United States Patent Application Publication US 2004/0031072 A1 - sequence listing, part 16

SEQ ID NO: 71400 - DNA, 555 bp, Glycine max
  Clone ID: PAT_MRT3847_35488C.1
ttgccgctctacacgtgtagcagtagcgcctgcttgggggggggggggggcaaaaactgagtattgagtcgagagagcgagtgagagtgagagaaagcgtagagggcataggcaaagggaaaccatacagacaaagagaaccgtaacaaccacggaaaaaaaaacaaaaacaaaccaggaaagagaaccgtaacaaccacgaaaaacaaaaaacaaaaacaaaccggggaaatccagcggcagagagcgcatagtacatgatgctactgtggttcgggaacggacacactgcaaacttatggccgggtaaagtggcagtattagttgtagtagggggatgtggctaacactacgactaactagataagagaactgcaagaactttacacaggctgttcagattaggctgcagtaccatagaaaccgtaaagcccgccagcacactagagcggcgttaatatctattaggaaccaacggacttacacacacttacaagcctagcgagggtatatgtgtgacggggagagattggcttagaaggcgaacaacccaca

SEQ ID NO: 71401 - DNA, 1657 bp, Glycine max
  Clone ID: PAT_MRT3847_35489C.1
gaaggaagagacttcaacttcagttcagttgtgttgtctgacaaaacgaacagcaattgggagcagatgcaagatccatcttcaaaccctaattccaatccaaatcccaatcctcacaacgccaatgccgcatcccagttaccgcgtccgccgcaggccacggcgtccaccgccgtcgccggcgccttctcgtcctctctattcgcgcgctccggcggacctcaccaccggcgagcccactcggagatgagtttccggctgccggacgatatgatggacctctcgccgtcggatccgttcgccggcgggtcatcgacggcgagcatggaggagatcggatcggaggacgacctgttctcgacgtacattgacgtggacaagctcagtggcgcgaacgggtcgggcggtgccggaaacggagcggatccgaccggcgaacgcgagaagagtccggcgaggccgcgtcaccggcaaagtagctccgtcgatttcggggaaatcatggatgcgaagaaagctatgcctcctgataagttagctgagctatggacaattgatcccaagcgtgctaagagaatacttgcaaatcggcaatctgctgctcgatcaaaggagagaaaagcgcgctatatacaagaacttgagcgcaaggttcagactcttcagacggaagccacaactctttctgcccaattgacattataccagagggacacatctggccttagtactgaaaatacagagcttaagctccgtctgcaagccatggagcaacaagcacagcttcgcgatgctcttaatgaagcattgaagaaggaagttgagagacttaaggttgctaccggtgaggggatgagccacactgaatcctttaatctgggaatgcaccagatgccattttccggatcaaatttcattccaatcccgccacaatcaggtccttctggtcaccagaacatgcagatgccaccatttggtcactccccatccacaatgccaactcatcaactgcatcaaacaagttctcatccatattcagaaatattgcaaaatgaacagcttggtcgtttccaagggcttgacattagtagcaaaggatcaactctcgtgaagtctgaaggcccctcgctctctgcaagtgagagtagcagtacattttgaatttgacagaaaatgcttgacctgctgacttatccatgctattcattgctcatagggttgacatttagtcaactagtgaaggtacctcatttcatgattcagatttgaggattaattcttaactatttattctaagggttgctcgccaaaaaggggaagcacccttggggttttgttgcaaagttcacagtaatcatgtttcagcatggcatttggtgtttctgggcgctggaatattgggaatgaaaggtcattcccattgtatctttgtatttgtatcatcgtttacgtgatagcatgtaaactgtgtgatttattgttgtgttttacttcattcatagtccaagatggactcttttttttttttctttgtataattagttttagatttattcatagtcgttgtacaatccaagagttttgggtacttgttgtattaaacttcttctgagataagaccttttttttgaaaaaaaaaaaaaaaaaaaaaaaaaaa

SEQ ID NO: 71402 - DNA, 363 bp, Glycine max
  Clone ID: PAT_MRT3847_3548C.1
agctcggaattcggctcgaggatttacatgagacacctttcactacaactgttgctctacactatgcaaccttttttcctctgcattgggacccctgccagctacccctgtctataaatctgactttgactggcccatggagccagctagagcctacagatggaatctgacagcacatgctgctaggcctaacccacaatggtcattccattataggatgactactactgcgtcagtagggatggtggccacgacagcacctttgatgaatgggaaggtcccatctgtctgtaacagtgactcctatgctcaccctgacaccacgctaaagccagctgatgacttcaacatccctggaatgtt

SEQ ID NO: 71403 - DNA, 353 bp, Glycine max
  Clone ID: PAT_MRT3847_35490C.1
tccggtcgcccagctccgcccacctccgaggcattgttgatctaaaaataccaacatgactgaaaagtgagtgaagattatcataaactcactgccaaattgatgtttctggaaccgaaaggctgggtatccatgtcccctcagactaagaaggattcggagattcatgtaggcttggagagaacttgaaaaaagttatgaaaagatgaatcttgattgccaccagaggatagtaggccaccaaaaaagttctgctgttcaggcccccgaccagaacactactgtgtacatgagcaatgctggagatattgtattgctgctgagatgttggaagcgtgttagtaaaaattgat

SEQ ID NO: 71404 - DNA, 193 bp, Glycine max
  unsure (1)..(193): unsure at all n locations
  Clone ID: PAT_MRT3847_35491C.1
atcaaaccaaaaacgttagcaaattgtgtttggtatccgtgtcagacttcacgcttcataagtattgacacaaagtgtgattgtaatgtgtctggtgtttgtgtgcaacgaggaagaaagggtgttggggagacagacaacaccangggcatgcccttattgtggagggatggtacaagccattaatgtagag

SEQ ID NO: 71405 - DNA, 401 bp, Glycine max
  Clone ID: PAT_MRT3847_35492C.1
aacaaacaaacaaaaacacaaaaaaaaaaaataaaaaaaaaaaaaaaaaaaaaaaaaaaaaagcaaaaaataaaaacaaaacaaaacaataaaaaaaacaaccaaaaccaaaaacaaaaaaaaaaaaaaacacaactataaaaaaaaaatcccataaccacctaactctaacatcaaacttaaacaccataacaatgcttcaaatcatccccaactaccttaataacaaaaccactccattcttactatcccattcactgacaccgaccgtctcatttaaaattcagacaacaatcaaatccccatataccccatcaacaccctcttaaatgccaacaagtttattcgtcatactattcactcattactctcatcacacctatatcatacttaaacctttc

SEQ ID NO: 71406 - DNA, 446 bp, Glycine max
  Clone ID: PAT_MRT3847_35493C.1
gggtttttggtgatcacaagctgcctaccgatgggacggggtacgagggcaagcacatcccggtttctagtattagtgcatgggaaaatacatgttggtcaaatacccctaaaggacaagaggaaactctgtctgctgcgcaagtgcttccagaactgcaatggtgagcacacatagcaagcctcaagccactgcaatgcatgagggagcgatagaaattatcattgatagtttcgcaggtcctgactgcaacatatgctggagcaacagcttcaggctgatacttatcataccaatccggacacagcatcctgtctgatataggacgcgccttgcagacgcggaaggcccattccggtggttacatctcctaataccactgatccgattggaccatacatgagttcaaagttgcagcacacgagtgccactacccatggggatgc

SEQ ID NO: 71407 - DNA, 274 bp, Glycine max
  Clone ID: PAT_MRT3847_35494C.1
aattcggatcgaactcgagaagaattggaattgagaagatggtgttagaggaagatgtacctgaggatgggaatgagactatgtatcactggagatggagccacgggagaaactgtatatgatgttgaggaattggtgagatgagaaggaagggatctttgtgactagaagtggtggaacagtgactgttggtatgatgaatatggtcgcactctaggtggttgttgtatatgatagggatgatcaatttgattggtcttgaagttagggggag

SEQ ID NO: 71408 - DNA, 238 bp, Glycine max
  Clone ID: PAT_MRT3847_35495C.1
aacaaaatattattcaaaaaggggccccgggtaaacactaaaaagcaaaaacacaaacacccaaataccataacatcctacctaatccaaccatattaaaattatttaataaccttccttattttaaccccctttgacatgaaaaataattaattctattaactctacaacccccatcaataacaaactctttcaaatcccccttaaagacattcctctctcaatatatctatttctc

SEQ ID NO: 71409 - DNA, 721 bp, Glycine max
  Clone ID: PAT_MRT3847_35496C.1
gagggaagtcacacttttttgtttggattgatcgagtgactttttcttttcgagattggcttggtgtgcagtggaaagagggtggaaaagagtggtaagggggagggcggcgcccctaaaaaaaagaaaaattgcttcagatccatatcttctataggcatcgttaataagaaaaagaattgcagcatggtcaaatcataaatccatctcagatccaaatcaaaattggtattattgaattcttgaaatcccatcatcactctgaacctctctcccatgtcctacccaattcctctccatcaccaatcgccccaaaaatgccgctcccaagatccagatccgaaaaattccgtcgcgagtcatgattgtgagcgcctcaaattcgggcttctgtgggattcttttcggcggtgcctcttcgtggcacatggtctgtcagtggaggatctcgatggtgcgggtgggtcgttttcagaactggtgtaatttgggaaggggcaaatctcgagggagacggagatccggcgagatcggagaagagtgcgacgactaggaagcagaagtcgtactctgtgtgcggcagcggcaaacgtgggagaaccccgtggcggagtaaggcgttgcatcaatgacaacctactccataacgccaagttttttctaattttgctcttataataatccataccataataaatagatttcttaatcttcaaaaggg

SEQ ID NO: 71410 - DNA, 324 bp, Glycine max
  Clone ID: PAT_MRT3847_35497C.1
ggcctactcacttacgcacgagaaatagagaaatcgagataaccagataactatttgattcattaatggaaacagggcggcccgtaggagatgtaacgatttacgatctcacgaaggcttatacgtttaagcttaagagctcaagcgagacggaacgatctaacttgatcaatgtagcgatatcagcaaaacagaaggagttagctagatatcttcctatctggcactacattactactgtctgactggcaaaaaagatctatagatctattggtcaggcggtctttgctttgcagcttatcaaaggagctatcgtagaagctt

SEQ ID NO: 71411 - DNA, 2385 bp, Glycine max
  Clone ID: PAT_MRT3847_35498C.1
cccacgcgtccgcccacgcgtccgggaatatattacaagcctccccaattggacgggctttatgaatgtctttcaacagtgtttgcaactgatttgcattctcgtgcatttttacggcttcctaaatctgtgggtgtggattttcgtgcctcgtgtttctgccataagcaaacaattgacatgggctatgtgtgttctgtatgcttatccatattctgtgagcaccatgataagtgttcaacctgtgggtctgtatttggccaggctcaactagatgcctcagcagccgaccggcaaagaaaggcttgatgcattatgttgcatctgagtgcataacatattttgtcacatttatcaagagagctgatcgattaaagttcttttcatacctgtagcataatgaaattttgaaatcaaatttcttcggcctccctattcgaactcagttaatcctcagatggcagtggaaaatatcaaagtccacgaagagtccaacgttgcccctccaccatcatcaacacaatcactatccctccctttcactttgtatgacactttgttcctcaggttcccttccattgactggatcttcttctattccctcaatgctcaacaatcagaaccttctttcttctatgccaatgtcattccaaagctcaaagcctctctctctcacaccctccaacactaccctcctctcgctggcaacattctttggccttctgattccacaattccaatcatcagttacacccctggtgatgccgtttccgtcgttgttgctgagtccaatgctgaattcaaccacttcatagattactcagtgccccatgaagcaacagagtctcgttttttagtaccccacttggaatcctcggattctcgtgcttctgccctagctcttcagatcactcttttccccaacaaaggcttcagcattggcatcagcatccaccatgctgctgttgatggaagatcttccaccatgttcatcaaggcttgggcttctctgtgccaacaaattattatgaacgatgaaacaacatcacaaagtgtggtggtgccatctttggtgccggagttggagccttcctttgacagaacactcatcaaagacccgggaaattggaaccgcttcttgttagcaaaatggtgccctaatattgctaatggaaacagtgatggtgatgataatgggaagcgaaccgtgaagattctaccttccccaccaagactcaaggaagcgttttcagccacgtcagtgattaaaccaacaattgaggaagcagttagagccacgtttgttctcacacgagaggatttggagaagataaagaaaagggtcttctccaagtgggaccaagtgaaagacccagaaccagaaccagaatcagaatcagaatcaaaatcaacggttaattcttcttcaaagccaccaactttatcatcctttgttcttgcatgtgcatattctgttgtgtgtattgcaaaagcggttcacggagttgaaaaggagaagcaaaagtttggtttctggttcccggtggattatagggctaggttagagcctccaatccctgatacctattttggaaactgtgtgtggagccacttggtggatgcagaacccttggacttcataaaggaagaagggctcgtccttgttgcaaaaagcattaacagaaaagtgaagaccttacacaaggaagaagttttcggtaaatcgtcttctcggttcatggctttggctaaagaaggagctgaaatgttgggagtgtcgatgtctaacaaatttatggtttatgagactgattttggttgggggaagcctgctaaggtggacattataaatttggatagggcttcgaatttgaccatggggttgttggacagcaaggatggggatggaggtgttgaagtggggctcgttatgcatcagaaggtgatggatctctttggtactatttttcatggaggactgaaagatgagtgatggattcggagctcttgtttgttaattaattcacctgagatgtgaaacattgcatctgagttcggtttatttaagttataaatgcttttgaaggcttctttgtcgaaaatatagagtttttctggtagaaaagcttttaaaaaactccaagaggaaggttgtgagtttctatttcctgtttaaggtggaattgttctttcttttgtgactgtatttaaaggtttttgtttacattaattttgtccttttagtattgtaattgtagagtcatgtgtagtataataattatgagttgctctattataataaatagagtaccaactcacgtagcttgtgtacgtgttaaaataatatattcaacctcctctgttttgaaaaaaaaaaaaaaaaaa

SEQ ID NO: 71412 - DNA, 225 bp, Glycine max
  Clone ID: PAT_MRT3847_35499C.1
tttttgaacgcaaaacatagcaatcatggtatttgattacgcaactgctatatacacaaactgcgaacatttgattatctatctaacacgagggggggaactgcatatcacatagactatccgaaaccctatgattattcatctgactggattggagcaactccctatagtctatctcggcacctatgttattggaggctcgccaacactaaactagaccatgat

SEQ ID NO: 71413 - DNA, 538 bp, Glycine max
  Clone ID: PAT_MRT3847_3549C.1
tcttgttttctttttctttttgtcttttattttcttcttttttaaagtcactatctcttagacagcactacttctacttcttcgacatatcttatattattcatgcgaaccgattaaaggaaccattctttgaaactcacgcttgactactcttttggatcaggcgcaaaaaaagattggtactgcaggaaaaaccttttgccaccccccggggtttgggatttgtaacaacaccttaccaatcacacagttgcttggaaaaaaaaacgcacgccgttttgcttcaaagtattaatggctctgaggatgccgaacgtgacctttatgtggcgggggaaaccccctcaaaaggctggagcctcaaccggcgtgttcgtggccccaaaaagaagggcttttgcgggggcccaccccgaaaaagaaaccaattcccctaattggagcaatgatgatgtggatagtcaatctcccttgcttttccagtggcaggccgggtaaaaaacccgtagaaaagaacccccaccccccttttttgggc

SEQ ID NO: 71414 - DNA, 224 bp, Glycine max
  unsure (1)..(224): unsure at all n locations
  Clone ID: PAT_MRT3847_354C.1
ggcttggcantcgttnctcttaactancganggccantcncgaagntgtgtnatncgccannagcggntgtngccatcggatagggcngcgctgctggcttccggaangcgtgancgngccntancttggcctcttnaatcgtngacgggtcnaantgctacctcgnctggtaggcatcagtgagacgccacaacggccgcgtcacngacatcaacctccgcng

SEQ ID NO: 71415 - DNA, 624 bp, Glycine max
  Clone ID: PAT_MRT3847_35500C.1
ccacgcgtccgcggacgcgtgggttgaggagtaaatatcaactttgtatgtcaagatatgtaagatgcaacttagtacatatagactgacttaaggataataagttgatgaccggttcaaggacaacataaattaaagatgtcttaataataactttatcacaatacttaaaatgagatttccaacacaaatacttataataagacacggggttaataacgtcacaacaatatcactatatataaacttccaatgataaaatagaaggactttcattacattctcaatcacacttgattttaaatttttctctcattttgttgtatattcgaacaataagtattaacatctagagacatgatctcatttatttcatgtgattatttatattttctttatatattttgtattcaatttttgaattatgagttatgtaataataatcaataatattggtcaagagtatataacatggtcattttgattgtatccatgggatgtatgaaatttctaatgaagaggtatcaagtaaaaccataatttacataatttctcttgtatagatagttgttaatattcacgggtaaggaacctaaggttatggtttaatttgccctgtaaaaa

SEQ ID NO: 71416 - DNA, 274 bp, Glycine max
  unsure (1)..(274): unsure at all n locations
  Clone ID: PAT_MRT3847_35501C.1
gctgtcnaatgtcnnaaaggnnaattaattggtgagttgagttagagttagnagacgtaanatagagnannattntcggagaaggaaaggncaaagtgaggagattncngnanagantcttngntaataataaaatttgtggaagtttgggaggcagttatatgatnnnacataagncnatgtaacacganganncnaaattggatgatgagtgtatgngcaaagccaaagtgatcgtgtggcagagccagngagagagaaagctcttnttgtt

SEQ ID NO: 71417 - DNA, 261 bp, Glycine max
  Clone ID: PAT_MRT3847_35502C.1
cgttgattaaccccgattaacacatcagggtcactagtcaaattccgatttaagtgcaccccgagatgtcctcacgtaaaagcagaaagacggttaacaatttagcatagatgggtcaaaacaagttaacctttccattttcgtagtgggattctgttcttgctttctccagtgtcatgtaagagagttcttcatcatcatttcagaacttgggactttcccaagtccaagggcacctattacagagtgtgaagcattggg

SEQ ID NO: 71418 - DNA, 209 bp, Glycine max
  Clone ID: PAT_MRT3847_35503C.1
caagcgaagaaggtcaaggtggcgacaggtcgtcatattcaagtctcgtcactcgctctctccgcaaatgcttacaccagagcaaaggcaacaccattggattctacatcaactatctgcccaattaccttgagatccacagcattactagcactgagtgctactaaatgcatattgccatcaagtcaagtgtccgcgataactgctca

SEQ ID NO: 71419 - DNA, 366 bp, Glycine max
  Clone ID: PAT_MRT3847_35504C.1
ccacgcgtccgctttttttatcctaccttcataatcagagtcgagcctttcaattttcgtatagaccttgaggctctggttatcctatcgtgcctcacaggacggctacttgctgataccgtgttaactagcttcgcgaccaccgcgggagttgctacggctcctcacctgtacttctactacgagcaagaaggagggtcgtcttcacccaccaagatcaccgatgactttaccgggatgggcgccatcggccaggtttgtcagatcatcggctcctacgtcgatgtcatattctacgagggtgctactgcgatcatgatcgtactcgatgagttggatcactacctgaggattgagctggaggtg

SEQ ID NO: 71420 - DNA, 123 bp, Glycine max
  Clone ID: PAT_MRT3847_35505C.1
acccggggggcgacccgaaaattccgaaatggtgccagcaagcggaccagcgtgccctatcgggaaacaccggaaagctgggggaaaccctggccatacctgtaaacggggggaaaaagaaaa

SEQ ID NO: 71421 - DNA, 497 bp, Glycine max
  Clone ID: PAT_MRT3847_35506C.1
tgcaatggaagtagcatagttgaagagggcaactactctgtcatggtctctcgccctttgtgaaacaaagctatgatgttgagctgcattgccatagggcgccactcaccatagaacagtgacataccatgatacctgccattaggatctgctctacctagtggggctatggccacactcttgctcatgctagctgttttatttttacacattgaattcgatagagcataatgatacactggatcctaccggaattctaacaaatgagtgggctgtaattagctgaactacaaatgactatgtagctggtgtcacaaagttacagaattcaacattatcgccacatataggcccccggatggccattatgggggacatgggctaaaacaggatcgagcacgaaacatgctgagagcccaaaccatagagcaaggtggactgcttcaaagactcatagcaggcatcccacatccagcgtaagaaggaccctacagcca

SEQ ID NO: 71422 - DNA, 388 bp, Glycine max
  Clone ID: PAT_MRT3847_35507C.1
aagatccaaacggttgcccgaaggaacgaattaagaatattgcaagagtagttagttgcgtcgccaactcatcggaaaaatttgaaaatttctggggaaaaaaaagccatcatcaccaccaacagcgacaacaaggacagagttaaaagttcctgttctgttttcaggaacacacagcaacgttgaacgttcgttttttttgttttttttttgcaagaacagagcaggaaaaaaacagaacaacactcacaacaggaattttcccaaattgttggtgttcgtaaccattttttttttctttcccaatcctttcttttttcctttcggttttttggggttccctttccctttttttgaaaactttttaagaaggttggttttgtgtttt

SEQ ID NO: 71423 - DNA, 356 bp, Glycine max
  unsure (1)..(356): unsure at all n locations
  Clone ID: PAT_MRT3847_35508C.1
ctcgcgaattcagtctcgattgaaattaaaatataccgcgatcacaggttgccgcaccttaagacgggatacaaacgcaacccctacacccatctatacaaatcctacatttactacaactacatcctgatcaattccttaattcaccaatcattcccttctgcgagacctacaaaccccccacgctcctccatccccgtactccgtctccgtcgccccttcccccttcatcttctccaacctccctccaccgccaccccttcctanatcctccgtctccgccgtccctccgccccctcccccgccgcgcgcctaccatctcttcttcttattcgtctcctcccccaacactctca

SEQ ID NO: 71424 - DNA, 307 bp, Glycine max
  Clone ID: PAT_MRT3847_35509C.1
ctaggctcatcgggaaaaatcgtggacaggtttcattcactttattaaaaaaggaaacagtgttcacctagtaccaatttacattttaaccttccacaacagaaatccgctttgcagcttactcggaggaacacattttgctgaataacttagcaaaatggatgacggaacagaagtgcgttggtaatggaaaaaaaaattatttgatctattcaaaccccttttgcaagttctaaggggctcactaaccttgcatcgaatgattgcactggtgccaatcaggaacccgtgcctgtgcctaaacaaa

SEQ ID NO: 71425 - DNA, 266 bp, Glycine max
  Clone ID: PAT_MRT3847_3550C.1
ggtttccccaggagcagttttggtttcagacggcgccgtctcccgcgaaagtcctgagaggagcccagccttttccgcctgccgcccccggatgggatggttgaggccggggccacgccccctctgcccccctgcgagggcatcctgggctttctcccaccgctttccgagcccgcttgcacctcggcgatcgccgactcccttctttatggcgtcgctcctgtgctgtgggccgaagctggccgcctgcggcatcgtcctcagcg

SEQ ID NO: 71426 - DNA, 404 bp, Glycine max
  Clone ID: PAT_MRT3847_35510C.1
gagtcagcggttttacttgcatcattttggaggacatctcttaatgaatcagagagtcagcggttttactttgatcattttgaaatccatccaataaagatcattgcaaactttatccctggggaatcacgttcaagttacagctcaacgcaggaggctctgaggtccttaattcatagtgtgattaaggtgcctcccataaaaaatatggtagtagaattgaacggggtcctgattacccatgctttgataacaatgcgtgaattatttattaaatgtgcacaacattatcattgtatacaatgagggccatatatattgctaaacgaagccccttgcttcctacaaattttggttctatttttgatgacttggcgttatcatctcttgaagtcttctttgat

SEQ ID NO: 71427 - DNA, 264 bp, Glycine max
  Clone ID: PAT_MRT3847_35511C.1
cctcgtgccgaattcggcacgagggagacacggggacttcgctaggatgcatttgtttgtgtggtcttagttacttcgtgttcgttcggggggtgtaggtctcttccttgagaactttcgttttttcttctctctttctcttgtgttttttctttctcttcgctgttctttacacagctttgggttatgtctgcgctgcgtgtgtttctcgcaacgcgtcggttgttggagcgtctcaacactgaccctcatttcacctcaaaa

SEQ ID NO: 71428 - DNA, 429 bp, Glycine max
  Clone ID: PAT_MRT3847_35512C.1
cgccccctttcccccccccccctcccccctctctccttcctttttttttttttttttttttttttttttttttttcacaattaaccttcttttctttaaaattttttccccttttttttcagttttcccccttcgatcttttccttaattttttaacttggcaaaacccaaattcaccttttcccgatcaagttgaaccatggagtaaagcttcctccaaaaattccaaaaagtccattaaattttttaccaaatcccctttttggtgggaaaaggacctttaaatttttaagtttgggtcaaactcaaccaacaaatcagtgaaaaagggatcaaaaatttcttccttggcccaatcattcttttcaaaactttttttcaaggatcgtaaatctttttcgtgcttcgtagtaccttcaaatgattttt

SEQ ID NO: 71429 - DNA, 104 bp, Glycine max
  Clone ID: PAT_MRT3847_35513C.1
ggctcgagctctatagaatcttctactttagacgtacttactccaaacctgacggctgcgagatgacacatcactcactatcccactcgaccggcacacttcct

SEQ ID NO: 71430 - DNA, 155 bp, Glycine max
  Clone ID: PAT_MRT3847_35514C.1
gtttaatcgcagatcatgtttagctagctagctagcatataatcacgtacgtgacgtcagtacaaattaaatgttacctatagaggtaaccactgcatattgttctttgtgcatccgtgctccaactcatattatttccaccatttctgatgaca

SEQ ID NO: 71431 - DNA, 141 bp, Glycine max
  Clone ID: PAT_MRT3847_35515C.1
tcatgattgtatacattcaatattagagccccgaactttatcaccatgataacctctgacatattgaggccctctatatagatctaacagtctaggactgaactgacgtatttcctgatgtaagcaacaacaagttacttg

SEQ ID NO: 71432 - DNA, 657 bp, Glycine max
  Clone ID: PAT_MRT3847_35516C.1
ccacgcgtccgaatttgtttgcaagggcccagttcacaagcttatgcgtcaactggctaataggtttgagcatctgaactcatggaatactgatgaagagttccaaaacaagaagagaaccaggtgtcaaccatgtccagcttatctcttgaatttgagttgcccccgatctttgtatgatttggcctttgagccatcaaaaactgttaaatttaaggattgggctcctatactaaacttcattgtgaaggccatcaaacaattctgggaggaaaacgtagcttgtgatccctccaatggggccacatacatggtagaagatcaacatcattttagcagtatcagatatgtcaaagtttagaaaccacaatcgtaaggattgcctagatctctttttttctacttaagacaatctaattgaaggtgactgtcatcaatccaacagggaagatgttgattacttaggggtcacaattttcaaagagaaacaaagtaagggagactttcttcttcagactgggtattctggcaacttattggatgggtcttatgccaagtgcacgtccactgtgatgagaaagctaatagtttgttgatgcataatagcaatagcttattggaaggtgataactttttttgatggtgaaaattcctgct

SEQ ID NO: 71433 - DNA, 229 bp, Glycine max
  Clone ID: PAT_MRT3847_35517C.1
tttttttttttttttgtttttgtatcccttttttactggggaaaggggaaattggtagatttccaaaccctatcctttaaagctggcttgtgttgccatccacaccaaacattttttcacgttaaaagggacaatagattctgtttgtgccctacccaagccttacctgttgcgatacaatctaaactggctaacaaatgctctgttaacgacccattgagtcgcatgc

SEQ ID NO: 71434 - DNA, 434 bp, Glycine max
  unsure (1)..(434): unsure at all n locations
  Clone ID: PAT_MRT3847_35518C.1
acttgggttggggaaataattagttaagcggtccaccggaacaaaaggatactcatgtttcggtcccgcgagcctaacaatggatcctgtattaacacactgatacttactccgccctaaggaagagtaacatcaaatgggaagatcactttttagtactaaactgtttgacgacacttatcttccaggatgtacgttccgtgcacgtatgcaatgtacgtacgcaccaaacgtgttattcattattattactctgttcattattcagncgatcacgatgagccgagcagcgtgtgcatgcacctcaacagtagagggtgccccccgggctgacgccgaactggcggcaggagtccttggagtagtttacccttgggttgaccgcaccgggagtcttcccgttgcactccagcgcaccgttggtggcccggatg

SEQ ID NO: 71435 - DNA, 329 bp, Glycine max
  Clone ID: PAT_MRT3847_35519C.1
gatgtatgagaggtagcatgtgtgctatggtgggcacactgaaccatatttgtcttaccaaaactgtggacgagatataggatccacgcttactaacgcttgcatacgacactatagcgcatcgatggacacaccataatactattcacatgacatcttacatacaacgtccatgactgggagatactattgatgttacctaactggactgcctagcatgacattcaaggttactccatactagcgtaatagcctaagacagacagcacctagtcgcccttcccaacatgtgcaccacctgaataactaattggactcgcactgtatct

SEQ ID NO: 71436 - DNA, 129 bp, Glycine max
  Clone ID: PAT_MRT3847_3551C.1
ctcgaattcgctcgagcttcgccgagggctatgtgccataggatacatagtacactttttctgctccaaacagtgaatgttatggcataggacttggctttcggaatagggcagggggttgtctgtgga

SEQ ID NO: 71437 - DNA, 148 bp, Glycine max
  Clone ID: PAT_MRT3847_35520C.1
ctcactcgtacctgaaggcgctcgcttgatagatcctgagagggcaagcacatagacatccgttgaagaacaggcactgcattattcggacatacatgcggcgacgtagacgctcacaccatatgacggatcaatggatcttatacag

SEQ ID NO: 71438 - DNA, 296 bp, Glycine max
  Clone ID: PAT_MRT3847_35521C.1
tcccaccttctaaattaaatacgctgaatatacgtcgtatcgcgatcgtctcctaagatcaatcgtattaagggaaatagtcacggagccacagcagacatcgagaagagtcatactcagatcgaccatacggacgccttactaatcgagtacgacgggaagcgtaagcgagctgatcaatcgtatccgtatggatcgtatccgcggtaaccaaggaatacgcacgtaaacgcgaccgtttcgcgtccggtaacataaactcttaaacaacgcaactcccgcacgaacaaatgcct

SEQ ID NO: 71439 - DNA, 292 bp, Glycine max
  Clone ID: PAT_MRT3847_35522C.1
gttctttagacctgatttcatgatttgcctagacaaacatcaaaggtgttcaaactcaggtatacaaaaaggaatgtgccgacatgattgttaatattcacattttgcgatcctaacggagtccaagagattcgtgttacattttaatagacggcctacttacttgaagcagattaccaaatggctgttacacgttgactagagaccaatggaccattgtactcaaaatgctgttgaatatcatgaaacgaaatatttgtttgagagtgacactacatgcgcctccaattgc

SEQ ID NO: 71440 - DNA, 1367 bp, Glycine max
  Clone ID: PAT_MRT3847_35523C.1
cccggctccggggcttagacccatctcctctaaaatcagggtcccctcaatcaaaaaacttcttcttgttctgttgtgtccatatgttatattttattttatgatatacatagaagcttgttcttctgatctaattttatgagatcaagtgttggttctttctccatctagtactattatttttcccctgtaatatatatatatatatattattctaattaaactaattcacaggctacttgatccgtttgttttgaagaagatcatcgcctgtttttggttaactgtttaatccaaatccagtttcattttacgtgatccgttaaatctgaatggaagctgttttgacgcctcacgcgacggcacaaaaacaaccgtttgctcctaacaagaacatcagaatgaaaaccccgaagaaaaacggacgaggtaatttcatttgtgctaataaccggtctgagaattttgacacgtatgcaggtctcttgaatcctccttcacgcgccatgtccttctcctactctcacccgctctcagcttcttcactcttcactcatcactgtgctcaacaaccacctctgcttcctctgccccacgttgtttcgccaacttatggtagcggacaaggccttgttgttgttgttaataaaaacaaaaacaggagcagagacatgtctctgacacctaagaaatcgaaaccaacgaagcgagaggaagcgaagaagagatcggtgacacaatctgataaccgctggggacctgatcccaaagaccttcccaaagtggtgctagggatgggaaacagccaccacgacgtcgtttcgggatcggttttcaatctggctcctccacccagtagtttgccgctgccaaagttctctttgagatccaaactcggttgcaacgccgaaaccgccgctggtggcgttgatgacggagcaaccaacaatctccggcgacttgtgcgcctccggtgatgctgttaaacctacttctctttctctcctcgttgcgtgatcgatggtgcatgaatatgatgctaagtttgttgggtcacgttactactggtaattattattatgtgtaaataaaaaggatcggcgagggtaatttgctgattcggggtgcctgctgaatatgctttcgttttttttctttttccaaaataaaaaaaggtgtgttttcttttgtttgttcaacacttttaacttttgtgcaccacctatgctttttttttttgaattggggtgcacagaaacgatgtgtagttctttctatgtaccatcagtttcggctatcagttccgtgatccctctgtatttaaattttcttgatattactacaaatctatttgctctttttatcaa

SEQ ID NO: 71441 - DNA, 325 bp, Glycine max
  Clone ID: PAT_MRT3847_35524C.1
gccgatcagaaacatcgccatcttatggcctgatgaggcttctcaccccgactcgttgtaggcggggttggctgagtgcatttccaccttgatcttcgtgttcgccggttcaggtcccggcattccctacgacaagctcaccgacgactgtgccgccactccctccgggctcagttgcgttttcatcgtccatgctttctacatcttcgatctccgtttccgtctgcgccatacatcttctgcggacacgtctaccccatctgtactcttagtgtttagaggcggactctattgacttatccgtggcttcgttacaatattgcct

SEQ ID NO: 71442 - DNA, 2688 bp, Glycine max
  Clone ID: PAT_MRT3847_35525C.1
atgggattggaggtgagagggctcttgagcaaaagaaaaggggtgatttctaagtgtgtgatagatggggttgtgagtggagaaagatggaatgtttttgtagaagaaggagaagaattgaaggtggtttcgtcattcaaggccaggccaactattgttgaagttgagaatgtattgtacaatctgatggctatcaattctcccataaccaagtctgcaaagttcatcaagggattggtatccaatgtgacagggaaaaagtaagtggagctgaagcattggtctttaagatctctattcacatgaattgtacgtagaacatgtttgtgattgtgagcatgtcttagtgattataggtgcaatactatgaccattgtgtgaagcaaacatatagtaccactcaccaattttgaatgagagttcagattacttttgaggactacgccttaagttattgatagtctgcctacagcacacttatgaaacatttaatgtcataaaattgcaatataccactgtcgattatgaattacatgataagaagcttttctgttagcttgatgtattatatgttggtttaaatgaaattggataaaatggtcctttggtctctcgctatcttacaaaagtttattgttaaaaccttgagctcgcaggtttgttttctccaaaaaagaaaaaaaaaagtgttgttttaatatatagtattggtatatgatctacaaatactcatacttacaacatggattgaagagaaaaagaatgtgagaatttcaattgacgaaagagttaaaaaagaaattttcaaagcaagaaaggagcatcatgctcatcattgttgtctctttgttgtcggggaaggcctgatgcttgaaagaactctcattttccttttccctcggatgcaaatgtcatttcttcaactcatcaatgaggtcgtgttatcttaagatataagctatgatgccctaatgtgacaactcttgatgaacttatctgagaagtcaacatactttgtccacaatttccttagttgtggaaaagctatttctaaccatggctttgccctgccattgaaatggatgacaccagcactctcagcatcagcaaaacttgtattttcctgatatcccaatcccagcatatgccagaaaggatcaataacgtggacataaccatgaaatgctatcaatccaggaggtaatgtccctagctgccacaaactcaggtctgatttgatattctgttcaacccaataatggtaaacattgcttatattggtcttcctccaagcctccaaatcaaaaatgttcatgccataggcccaggcacattcattgggattaaaaattttggatattaaagggtgggagaagttcaaatagcttttcaacctctttgacatcacaaacttatcttctccactgcatgtttttactgctccattgacttttccattcaagtcaatgtcccacagaggtgaaagatcagtttgtaccacaatgtcatcatcgaggaagaccaccttgttaagacttgagaacaactctggaagatgtatccgaatgtgattcggttcattactgaattatacttaggactaagtgcttgcagctttgctgcaattacttttggcttctcagtagtatttgcaactatagctgatgacccccctctaaattgtgatctaacattttgatctttctccatagcttccaaaacaggcacctttccctttgtaaaccaatcaaaatggtgcaatgccttgacctcaattatagcaggtgacaaagaatgcaatgagaaccaagcctgcatgggataataagtcttcttgtctgtaattatatgcagaacaaccttctgaggtctcaaaaagttgcgaacaagcgatgctgcaaccactgatgcagccaacacattgtctgaggcaaggacaaagtggaagtaggaattgtcaaccagagcagggactagttctgcagaggggagctgaaggcgtgccgctgcgttgttggtgtgttcattggccaaagtcaaggaaaggcagtgaagttgttttggtatgctgcttgatgctacatgtcgatatagatattcttggattttggccatcctggtcctttgttccataagcgttaccatttctcttagtttaattgcaaatgtcttggcatcatatccaccttccttcaattgggtcatgaactcttctaatgtctgaggaatatcagaccttccctctaattcctctttgccaaggggttcatctaatatttcgtatatcacttctggaacagttgattcaggccgtcttcccaaaatccttggtcctagtttttttcctaggcaacctatggtagtgcatttgttttctccatcaatgccatccactgctgttaagacaaacacaaaccggagaagaaaagtgaagaccaagagtgagtagaagagcatccgatacgagacacgcttcgatgcaaccttcactttgataaactccttgaaccctttacttggaaacacagtaacatgcctcaaacttggagatatgtgcagctgcatattgtcctaaagcaaaaaaagaagaaaataccaacagcacaataaaagggccttgagttcctcctcttgaaatggtatagtccttatttcattttgacaattcaacagcactcgagccgaatt

SEQ ID NO: 71443 - DNA, 563 bp, Glycine max
  Clone ID: PAT_MRT3847_35526C.1
aaacaatcagctcaggattattgtcaattactctgaattgtgttggagcatccatgggtgagaagccatcattgccaaagaagctgccagcgacaactacagttggtaagctgaaatttctctgcgaaagcttttttatgctgaagtccatgaagctaaaattatatcttccagaagagggttctccatttcccatgctgcttgacaatgacacttcatctattatggaccttggaatcggcaatgattctattatccttgtagatgaagaaagttcataaatataccagaaaaattgtgaaaaagcttctcttgcgttgaagactgtatcttgttctgattagcggcgattactcttggaagtataactctaaaaataatatatttgtaagcattttgttgggcttcagttgaaggtcttatcaggggttttgatgcaccatgttcataaaatgataagttccattccttgccgcaactgttttctgtaaatcactagttattttgattcaattgcaaacagatttgggtcttgtcctctgacagattcgaatagactttgg

SEQ ID NO: 71444 - DNA, 647 bp, Glycine max
  Clone ID: PAT_MRT3847_35527C.1
ggaaaataatggatagttttgatagtccaaatcattcagcgcactacatatgttaatgatattgattgataggttaatatcctattgaactatcaaatatttgtgccggtcaataattactcaaggcgtagttcaaaaggagagaacaaacaacaaaacgaagggcatgccaactcctcttcatggaaaaacatctgtagttacaaagaaagtatcttacactactcaatttggttatttagccgtttgggaagcttcagaggtattcgcttctataggacactgagatacgtatggtttgagcttgaaatcagtcaaatcaggaactacataatttggcaatttttcttgcatcaccacatacccacctttgcgagtgtggaaaccagtaggcttgcaattctttcccttataataaccacgaggagcacgttttgatgatagaatatcgagtgaagatggccgcttccttcgaaatgcccttcctattcctaagatgagtcccagaggcatctttttctagaaatcgcagagagataacaaattgggttggaaccgtcgacgaataatcagtgaaagcggagaaagaacaaagacagtggcggtgtggcaccgtcaggactgtgagggtttaggcggacgcgtgg

SEQ ID NO: 71445 - DNA, 236 bp, Glycine max
  Clone ID: PAT_MRT3847_35528C.1
aaaaataattatctaactcatcaacactaataaaagtggttagattaattattttattataaattttaatttcattccaagatcgcctaagcattaaatggtttaaaagatggttattttttaaattcaactaatgagtatatattgttttactgatagtttaataaatatactcacttctagaaaaaataaacacaattaattatggacaaaaaagaagatttaataataaatca

SEQ ID NO: 71446 - DNA, 3649 bp, Glycine max
  Clone ID: PAT_MRT3847_35529C.1
aggtagtcaagacacacggatacgttcacacaatttctcgtttttctccctatgagagcagttagcatgatggtgaaatgtggttaaaagtcacagatggtaccggtatcactggaactgattatatcttatgactggccataagtattcagtttctttctttgttgtgtcaaggacaccctttatgatttgttaaattttatgtgagattaataccttgtatgtcttttgtaattagatttctcagctatttttaacaaaagattcaggaatccctacttaaaagacaataattttagttctctcatttatcctgatcatcttgggcggtatgaatcagaagttacgtgctataaaccctttcaaaacttacactgccttctactgggtaatgacaacattggggaaacggagaaggaaaacatgatggatccatcaatggtgtccgatactttcacgcaaagtcagaaagatcagggtcatttgttcgaggtcacaatccaagatttagtttgattgcccgctggacaaaagttcagatattaaatggaagtgaatctactaaacatgaaaagaaagacgctgagatttgttatgctccacttatcaacccgcaggtacattcttctactgaagaaatcaaatagcatcccaggtttttagagcttaagaaaatacatggaattcaggataaaagaccttcaattggagctactgtcccacaaacaatcagctcaacattattgtcaatgtccctgaattgtgttggagcatccatgggtgagaagccatcattgacaaagaagctgccagcaacaactacagttggtaagctgaatattcctctgcgaatgattttccaggctgacgtccctgaagctaaacttatatcttccagaagagggttctccatttcccatgctgcttgacaatgacacttcatctcttatggaccttggaatcggcaatgattctattatccttgtagatgaagaaagttcataaatataccagaaaaattgtgaaaaagcttctcttgtgttgaagactgtatcttgttctgattagcggcgattactcttggaagtataactctaaaaataatatatttgtaagcattttggggggcttcaatgcttgctctgccaggatgtttggagaagctttatttaaacaagaattgtttgaagtctgtcttttatcctgataatggtgggcattatgaatcagaagttacgtgctataaaccctttcaaaacttacgccaccttctattggctaataacaacatcagtgatctggcctctattgactcattaaacttgtttcctaatttggtggatatcaggctttctgacaacccaattactgattctggaagaggtggagttccaagatttgttttgattgcccgtttagcaaaaattcagatattaaacggaagtgaggttactcctcgcgaaaggaaggactctgagattaggtatgttcggctagtggtctcaaggttgcatgctagtcctgaagaaatcaaacagcatcccaggttttacgagcttgaaaaaattcatggaattgaggatgaaaggccttcaattggagctactgtcccacaaacaatcagctcaggattattgtctattactctgaattgtattggagcatccatgggtgagaagccatcattgacgaagaagctaccagcaacaactacagtcggtaagctgaaatttctctgtgaaagcttttttaagctgaagtccatgaagaacggagaaggaaaacatgatggatgcatcaattgtgtccgattctttcacgcaaactcagaatgttctgtgtaatttgttagtgctcacaatctgaaccaagggatttcattgctggaatctcttgaaagtagatataaaagtgaatccacaaaagatgaagatgatgatatgtttgtcctttcaacaagcaaccagcgagtatctgttcaacttttgggtaaagataaaattcatgataagctaagtcgatttgaggagttaaccagtgtatcattgtcatatatgggtattagttcccctggaatcccatctcacattaataatacagtgccaaatataaaagaacttgacctgactgggaaccttctttcggagtggaaggatgttggcacaatttgtgaacagttacctgctctaaggacaatcaacttatctgacaatttaatgtcaccatataaatcgaagcttctggttctgaaaaacatccaagttgttgttctaaataatactggtgtagattgggagcaggttgagctgcttagacaatcattgacaacaattgaagagctacatgtaatgggaaacagtataagcagaatactgccagggtcatcctctatggttcagggatttgattatttgcggctgttgaatttggaagataattgtatagatgaatggaaggaaatcatgaagctttctcagctaagatgtttggagaagctttatttaaacaataattgtttgaagtctgtcttttatcctgataatggtgggcattatgaatcagaagttacgtgctataaaccctttcaaaacttacgccaccttctattggctaataacaacatcagtgatctggcctctattgactcattaaacttgtttcctaacttggtggatatcaggctttctgacaacccaattactgattctggaagaggtggagttccaagatttgttttgattgcccgtttagcaaaaattcagatattaaatggaagtgaggttactcctcgcgaaaggaaggactctgagattaggtatgttcggctagtggtctcaaggttgcatgctagtcctgaagaaatcaaacagcatcccaggttttacgagcttgaaaaaattcatggaattgaggatgaaaggccttcaattggagctactgtcccacaaacaatcagctcaggattattgtgtatggactatggatgttaagtttgtgcattgacttctttttctgaacttgcaatagctttaattttgatatagagattaatgcagctattactctgaattgtgttggagcatccatgggtgagaagccatcattgacgaagaagctaccagcaacaactacagtcggtaagctgaaatttctctgcgaaagcttttttaagctgaagtccatgaagctaaaattatatcttcgagaagagggttctccatttcccatgctgcttgacaatgacacttcatctcttatggaccttggaatcggcaatgattctattatccttgttgacgaagaaagttcataaatataccagaaaatttgtgaaaagcttctcttgtgttgaagactgtatcctgttctgattagccgcaattactcttgggagtataactctaaaatgaatatatttgtaagtggtacaccagtttaattggtcacaactttttgttaggcttcaatcgaagttcttatcaggggttttgatgcactgtttgattggatggtccgttccatcccttgctgcaactgttttctgtaaatcactagttattttgattcaattgcaaacagatttggatcttgttctcttcatgaagaaagactaaaaatgttcgtttttctttacccctttacatcggtg

SEQ ID NO: 71447 - DNA, 274 bp, Glycine max
  unsure (1)..(274): unsure at all n locations
  Clone ID: PAT_MRT3847_3552C.1
ttcttttttttgacttggtaaaacccgatctgtctgtggcccactgaataacaccgcacggcatgccaaagcgttgccagacccacatgacctatgcccacaagacacgaatgaaaattgcaaagcagtgggaccttcatgcctccttaatcctaaggggggaagctgaaattgcctcgcgtaaagaagcaaaagccnaancagcacaaacgaacacccaaaggggggagcagaacctacacagccaaaccaaaaacgggaagaccctgcctga

SEQ ID NO: 71448 - DNA, 315 bp, Glycine max
  Clone ID: PAT_MRT3847_35530C.1
gaaaaattgatgcttgtttatgtacgcacctgctgttggcttgggggtcaatgatggcaatttgtgggaaagatttttgtagagctgaatgttgaatcccttctggatttccgcttcacagttatttgcaatagcatttttaatgagatgctcattagatatagctattaaaaattactgtgccaggctaaagctccatgtttgtttctacaatccttcataaaatttgtcttctatattttgttgttgttgattataactttatctttgttcatgctttttgtcatgcctattcttttattgctactctaattt

SEQ ID NO: 71449 - DNA, 755 bp, Glycine max
  Clone ID: PAT_MRT3847_35531C.1
ctttgcaaggagttccatatctagccactggtaaacatctatgtggagctgcaacagatttaactttgagatgctgctttcctgaatatagagaagatagtagtggacagtacactgctaatagtaagtttggaggtctagctatagcaacatgttgtcaccacctttgccaatggaaacactatataaataaaaggttttttctggatttgggattgacaaaggaagaatttcatgccattacatggtttaccagctgggcagtagatgctaatcatggttcagatcttcctgatactactaattgtatatcacatttgcaaacaataaaggagcaaggtgatgaatgtgcaaatggagttgaaaaaattctctcagacatgcaagcagataaacgagcagcactgggatttaagtgcaagtggattattgacatggggaggttgatgtggttaagacaacatggattagatgcaaagcttgtcaaatttgttccaccaagcatctctcctgaaaatcatttgctattggctagaccatcaaatcgattatgaaatgtatatttgattatcttctttttctgcatttgtccctggtgacaatatgttaggtttcttgttaggttgatacattctatgttcttttcgatatactaaagtaatatgaggagcacttaaccacttactaccttagggattagaattgaattttgtcattttttttttcttctacttggttgaagttatcggtgcaaa

SEQ ID NO: 71450 - DNA, 360 bp, Glycine max
  Clone ID: PAT_MRT3847_35532C.1
tgcggctgggagataacaccacatggggatcaacttaaattttttcatcagtgataagcatgggttgggggaacacaacgaatgcattgtcttgccgctttcacaagtttggtgatgaccaaaagattctggtcttccaaggggataccacgtcttctttttttgccatagaactcacaaagttacacggcggacgaaaaccgctgggtggctttggggggagagtgttatactattttccccagcacctttggaaaagctctacagtggtcgcttgctttgcatcctacttcaccttttccatcttatcaaactctacttctcaaggtgataggccttgccttcctcattgcaccattt

SEQ ID NO: 71451 - DNA, 258 bp, Glycine max
  unsure (1)..(258): unsure at all n locations
  Clone ID: PAT_MRT3847_35533C.1
bgaatgangnccgncgactcngacgngnaaccatcancgcngcngagannagcnagntnaaaanaggcaagcnnacnncnctcangcntntgcangaantccntncaagcgtcacancngcggnaaaganaccncgctnaccangngantcancangtctagtccgcgcncacatcatgcnctnaattncggnnncacanangcncngncctggccatcnnngnnnaccnnganagcngnnagcngccnntcgctncg

SEQ ID NO: 71452 - DNA, 505 bp, Glycine max
  Clone ID: PAT_MRT3847_35534C.1
ggctcgagcgattgacaacagcctagctgatcttaattgagttgttaaacggaccaaactgcacgaggatcttctggacatttgcccccctacaaaaagacccattgccgctctctctgagccttctaccaatgaatgattgatggcctctgtggagtataatgaaaagacattaacagaggtgacacttgtggcaatgacatgttgtttaacagcgcacatgacagaggaggctgatacatctgaagtcacagagactgtggcactgccaatgacagatgctctattgccgcagatggaggtggtgcacatcttgtggcatgttatgatggaagctgctcatgggacaggacaaaatatgcatcctactgcgaaagctggcctatgtcaggcaaaaacttgggcagaataggcgcatacattctgcaccagcgggaaactagagctggaactggtgtacaaagcacacatgcaatgctatgacgatgctaaactgatgaacctg

SEQ ID NO: 71453 - DNA, 524 bp, Glycine max
  Clone ID: PAT_MRT3847_35535C.1
aataatattaattattttttttttttttgttaaaaaaaaaaattgttaatttacatttatgaaatcaagttgtagaatgtataaaaggaagaaaaaaaaatagtattaaaaagtattgaaaagaaaacaattgggaggaatattaaccccacgcgaaggatgggcagggaaataaaaaaagggaactgggggtgttctaaaaaaaacacgcccagtcttttaagaatggggaaaaaataaggacaggggtctcaaatgggagagggaggcaccctcaatggggggggaaaaatgggcggctttgaatacaggaaaaaaatcgggccagctcccaagggagccaacaaatttcttgagggaggggatttaaaaaacgggggcagaaagggaaaaatttttccccccgggaaaaaaaaaaaagggaaaacccccccaaaaaaagggcacgagagaggggcaaaagggtgcacccgggggttccccaagagggggaaaaaaactgtttggggggggcaaacgggggg

SEQ ID NO: 71454 - DNA, 199 bp, Glycine max
  Clone ID: PAT_MRT3847_35536C.1
gttcttactttctttggggtgttttctttttatagagaggaacaaattacttttccggcaaaaaaaaaatggggcaaaatttttttttggaatgttacatctaacacttgaatttaatctacaggtttcggcccttattgacccgcgtgggaactccgacttgttttccaggctctttaccccaaccaaaaaccttttt

SEQ ID NO: 71455 - DNA, 497 bp, Glycine max
  Clone ID: PAT_MRT3847_35537C.1
atatcataattataaaccaaacacaaataaaaaaaggcccaaataaaagtatatatatacccatgacgaaaaaaaaaaaaaaaaacccaatatttttaaaacatatggagccaacccttccaaagggttggggtttggttatttttggaagaagtgaagcaacttcccaaaccaacaaagtttaagatatcaatgtgagaaaaaaggctaaaaccccaaaaaactcttttcaaggcctcaataatgtttcctctggcacccccaaccgcggggggtgtttttttcattggattcccccccccaccaccaaaaagggccccaaaaaaaaacccctcaaaaggggaaaaaaaaaaaaccattatattgtgaaagagtgaaggggaaacaccctttcccacaccccggacagctttatttcccaaaagtaccaaaccctggaaaggggggggcatctggtgggcacctgaggacaaattcaaaaccgcatttgccaacac

SEQ ID NO: 71456 - DNA, 811 bp, Glycine max
  unsure (1)..(811): unsure at all n locations
  Clone ID: PAT_MRT3847_35538C.1
tccggtccggaaaaaagcttcgagctttagcgtttgtacgatgatgggtagcggcgacacgtcttcttcttcggacttcttctgccgccgccatgtgttcctctgctacaagaaccccgccgtgtggccgccgcgcattgaggctgctgaatttgatcgcctgccaaggttgctccacgccgccatcaatgccagaaagcctcatatcaagaaagagacctgcttaacaatatgtgaggggcatgatgggactgaaacatcaaatggagatgtattaatttttccagacatgatcagatataggagattaacccattttgatgttgagacatttgttgaagaagttctagtcaaagaaggagaatggcttcctggaaaccctgaatcattaaaagcgtcatatgttttcgtatgctcacatggatcccgtgatcgtaggtgtggggtttttggacctatcttggtcagtagattcagggaagagatagagttacatgatcttctaggcaaagtgttgattagctcgtgctcacatattgggggaaataattatgcaggaaatgtcattantatttggatcaagtatcaacagagaagtcactgggcacttgtatggatatgttactccagatgatgtacctttattgtttcgccagcatatcattcaaggggaagatttttgactcactatggaggggtcaaatttggtttatcagaagatgaacagaagaaaaaagcagaaacanaggcttcagctgnaatggtggaaagaaattttaggaggcatggggtgcttggcttgctgtcaaac

SEQ ID NO: 71457 - DNA, 342 bp, Glycine max
  unsure (1)..(342): unsure at all n locations
  Clone ID: PAT_MRT3847_35539C.1
atttatttttttttttttttttnaccatttcaaacaccatactaaatcttcgtaaattgttcaatttcccaataaaacatatccacaaaacattcataaaccctccaaaaaccaacttcacctatataactctacatttaatactttaattactttttcaaaaaacaaaaacaaatcttttcacctacattttataatatacaaaaccattaatcctttctatatttaaaccaattatcaccctttttcaaaaactcttttaaaaaataatcaacctcctcaattaatatctttttccataccaccccattttcccatatttcccttttcattcttacttcc

SEQ ID NO: 71458 - DNA, 405 bp, Glycine max
  Clone ID: PAT_MRT3847_3553C.1
gaccacgcgtgcgggacaacaatggaaaaagacggatggaagaaataagatttgtggaaggaaagaaactagaaatgttcattgattgacaccaaatcgtgtgccctgcaaaaaaaagaaagaagggagagaagaagttggtggggtgagttggatcggatttctaatctaatctatacctctcttttttactatgctctgaaggcacaaaccctgctttctttactgttctttcttgttctgattgatattccttgcctacaccctttaaggaaggaagaagcgaacaactatactactattattcttacaaatgtgattattgcaaataatcattccattatagtgactgaccgttgtgataattcctcagacatagaaccaacgggcctctcctactactca

SEQ ID NO: 71459 - DNA, 321 bp, Glycine max
  Clone ID: PAT_MRT3847_35540C.1
ctgaaaatcccattaaaatacttggggactaaggtagcattaacaaactaaggctcgctttaccccctaaaccctaatcaaaactactttcgttccaacgccagaaacttccaattttaacattggtttcaacaataaaagacacaacaatacaactgtgtgtccaaatctgaagcattcccaattatgacatgcacatacagggaacataatcagaagtgatgagttatcattaataaaatttcaaaccctaagaatcatacgcttggtggagaaagcaattgcgacccaatcatgctgcgaagacgaccaccgaagctg

SEQ ID NO: 71460 - DNA, 524 bp, Glycine max
  Clone ID: PAT_MRT3847_35542C.1
caaatttgagaatggtgtcttctctctctaccttttttctctgcacacactctctgaaatccccaacgctgaaacctctcacgaagttttattgcttcgcacgtcttcgttttcgagttccaccgaaagcttcttctcggaacaaaaatgccaacactgattccgtggaaactccgtccctccaaccctcttcccttaaaccgccttatgattcctcttcttcgctgcttcgttgtttcagtaatggctgacttaaatttgatgaacttgggatggagatagtgctcattgctctgcctgctgcgttggctttggcggctgatcctattgcctcattgattgacacagcgttcgttggccacataggggcagttgaattggctgcagttggggtttcagcttctggctttaatctagtgtcaaaagcgttcaatgttcctttacttaatgttactgcatcctttgttgcggaggagcaggcactgattaggaaggaggaagagtccattccaagtgataaaaat

SEQ ID NO: 71461 - DNA, 377 bp, Glycine max
  Clone ID: PAT_MRT3847_35543C.1
caagttgctaaacttagttctgaggattgtatttcactggtttagtagttaataaatagtatagaagcttttaggtgattggaaaaccttcaatttaactgttacgtaaaattgcattctccctctcccgtttttgagtgttttaatggttgtttccgatttgttaattcaaattctttcagatttatcttctagatatttatgtgttttacacacttgtattggctgtctatggattcttacagggggcaagagatcgactgggagaggtaagtagtattggtaagttgtggtttaccaacgataaatccttttgataatttgtcgtgttattattaatatcttttacctattgctagtcttgtcctgtacatttc

SEQ ID NO: 71462 - DNA, 138 bp, Glycine max
  Clone ID: PAT_MRT3847_35544C.1
agagtccttaaaaccagtaattaatataacttcacaggtccagaagaaaacagatgttgcaccacttacaattattaaataccactatagactataacacatcaacaccacacatcatgaaacaaaagtatgattatc

SEQ ID NO: 71463 - DNA, 341 bp, Glycine max
  Clone ID: PAT_MRT3847_35545C.1
ctcgcggtaacaaggttcacttcatcaagagaagttaaagcacaatttttcttctcctgaatggactattatgatacacccatcaacctaaataataaagcggcacggtttcattgcaggactaaccagccctactccactaccgctgccaaaatgcttgaagtgtctggcttcaagcatgatccccatgatcggaaaaaccaggccctcccttgtccaaattcaaccaaattgctctctctacacacctcgttggaaacaagacagactttatgatcagccataaatctgtgagcacatttcctgcaaagtgcacgcccacatgttctaagggccacaag

SEQ ID NO: 71464 - DNA, 120 bp, Glycine max
  unsure (1)..(120): unsure at all n locations
  Clone ID: PAT_MRT3847_35546C.1
tttatacagccaccaactaatcctggacccatccttcancaattnccatncaccgttgtctttgtcctnctaggagattttccccagtgaaaggctnccaaatgttgagtccagagagnt

SEQ ID NO: 71465 - DNA, 331 bp, Glycine max
  Clone ID: PAT_MRT3847_35547C.1
gtccgagtcttttgtagtgactaccacgacaggagatgagggagggtggtcagggaggaggaggatcccattccctggcgtttcgcgtcatgcgtctgtgccgcccttgcttcaacgtcgaacctgccctccgcctcgaccccgccgacctcttcgccggcgaggacctgttgaacgaccccgtcgccggtggggcctctttgtcctcctcctgcgactccgatcccaactgccgtaaccgcttcctgctgcggcacttttgcaacgccatgggcctgagcgggctgctgggtgtgcctgaggctttgagggccgttggtttgggggagac

SEQ ID NO: 71466 - DNA, 430 bp, Glycine max
  Clone ID: PAT_MRT3847_35548C.1
tacggctgcgagaagacgacagacaggggtaaggcatggaattgtgatgttggatcttgaaatcctcacacatttccttcatcatcttgttatttaggttggtggcattgatcgcgataatcttcctgggcaacccataccagcagattatctctttcttgatgaacttgaccaccatgcttctcgtcacgctagagtatgaagcagcttcaacccacttggtgaagtagtcgatcacaaccaagatgaagtgatgttccttcgaagccttgggcttgatggctccgattacatctgttccccacatagagaagggccatggcgctgccaatacgttcaaaggcatgggcagagcattgacattgtcagcgaaagcttggcacttgtggcatttcctcacacggatgcaacattcgcttttcatggtgag

SEQ ID NO: 71467 - DNA, 378 bp, Glycine max
  unsure (1)..(378): unsure at all n locations
  Clone ID: PAT_MRT3847_35549C.1
gttttggtttggtgactagccttaagatttaattaagggaaattgttaatggcgggcgcaaaatgtttaaaactttatatttttactctctctatggggaatgttacttttagtttaagaacacccaccaacttaatcatattagttgcatcttctcttgactcttagcaacatgttttttctaaatactcaaaatagccaatgaatggagaaggtgcaacactctacttcatgcaaattatatatactcttgattcccacccatctctcccacccttcattttttttttcaaacaaagttaattaaagaagtaacaatggatccttcctttccttcaaaatcctttctgcatgttgntcttatcttttgctttcttg

SEQ ID NO: 71468 - DNA, 560 bp, Glycine max
  Clone ID: PAT_MRT3847_3554C.1
ggctcgagggaaaattaaaccatcaacaacaacagaagaaaaaaaaaggagccaaccgaaatggcaaacaaatacactgcgttgttgttggtggtgtgccttatagtcgttgcaagtgttgatgccatatccgatgccaaaagaggatgcatagatgattgccacgctaattcttgcacgctccaatcgatgttgtgcaaaaactattgttgttttgtttgcttaaccgtcaaccgtagagaaacatcagaggttcatactcttggtaatggagcatcaaggaaaatgaaagcgcaaatgattaaagatcctaccgagccaaagcactaaacacttggaacataattagttaattgagatgcagaacaagggaatcgaacgattatccgaagcacggttggcagaatgcactgaagattaatatatataaggctttctcaagaacaaggacaaaatattgtattacttaattactatttatacacgtgcttgtgctgcttgccctgttgcccctgcttgtcattaactgccataataataattatatccatgtctttctc

SEQ ID NO: 71469 - DNA, 498 bp, Glycine max
  Clone ID: PAT_MRT3847_35550C.1
tgttgctgaaatcacccggacactaaaaaatggtggagtatttgttgggagcacttttctgcgttatagttcaaaaactccctggtttttacgccctttcagggagaggactccacaaggctatggctatctaacagaggaagagatcaaagacctttgcacctcatgtggtcttaccaattactcaagcaaaattcagcaggcttttattatgttcacagctcagaagccataaaactgggtttgatctatttataacattgattctccactgcattttatcaattccttctgtatgtatgtattgtatcacttgtttcatctgtaaagaagaaattgtaaataaatgagaaatgaaaaggtcaaaacctgagtccggtgtgttcgcaggttgtaaaatgcatcgtgtatcagtgcctaataatatatccaaattctgacaatttttgtaaagaatatatattttgttggcttaaatatatttttggttctagtaac

SEQ ID NO: 71470 - DNA, 275 bp, Glycine max
  Clone ID: PAT_MRT3847_35551C.1
gtgggtttgtttgtttgttcattaccttagatagcattgagaaatcctcttctgctatgtgccgaaaaactgaagccggacgtataagctttacattcaccactaccagcttcataatactcttttagccaaaagccggccaagttatatcccgtgtgtgtggctgccatactagcctacactgccttatgggactccccgccatttctgggcctaaactcaactgtacaccctgcacctgagagctgaacctttatgcgatcccggctgacgca

SEQ ID NO: 71471 - DNA, 1415 bp, Glycine max
  Clone ID: PAT_MRT3847_35552C.1
tcgcgggccggtaggaggtagaaagaagaaagggaggaaccagtcccgctgattagtctgctgtttctagctccattctatagtaatggccaagtctgttgctaatcctcctttccttcgtcctctgcatcaactagaatttctgagatgccctcgcctttcttctaaatctcagtttcaccctcgccgcttccgctctcaaacccaaagcatcattcgtgctatatccgcagttgccgcagaatcggagttaggtacacagcaggatcaagcaattgaagcagacatcttcgcttgccctgtatgttatgaaccattgataagaaaaggtccttctggccttaacttaccagcaatctacaggtctggtttcatgtgtaagagatgtaagaagtcatattctagcaaagacaggtatctggatctaactgtaactgctggattgagagactacactgaaattcaacctgctcggactgagcttttcaggagtcccctggtttcattcttatatgaaagaggttggcgtcagaatttcaggcaaagtggctttcctggtcccgatgaagagttcgaaatggctcaagagtactttgaatctgctaaaggtggactaattgttgatgttagctgtggtagtggtttattttcccggaaattcgccaaatctggagcatattctggagtcatagcactagatttttctgagaatatgcttcggcaatgttatgaattcattaagaaagatgacacactttcaaccactaatattgctcttgtaagggcagatgtttctagacttccgttcccatcaggttcagttgatgctgttcatgctggtgcagctttgcattgctggccgtctccctccaatgctgtagctgaaatcacccgggtactaaaaagtggtggagtatttgttggaagcacttttctgcgttatagttcattaactccctggtttttacgccctttcagagagaggattccacaaggttatggctatctaacagaggaagagatcaaagacctttgcacctcatgtggtcttaccaattactcaagcaaaattcagcaggcttttattatgttcacagctcagaagccgtaaaattgggtctgatctatttataacattcattctcccctgcattttatcaattccttctgtatgtatgtataatgtattgtatcacttgtttcatctgtaaagaaattgtaaataaatgagaaatggaaaggtcaaaacctgagtctggtgtaaaggttcacaggttgtaaaaatatatccaaattctgacaactttcgtaaagaacacatattctgtttaagtccgtgcctaataatatatccaaattctgacaatttttgtaaagaatatatattttgttggcttaaatatatttttggttct

SEQ ID NO: 71472 - DNA, 373 bp, Glycine max
  Clone ID: PAT_MRT3847_35553C.1
aacctaccttttttaaaaataatccacctcggttaggcaccttttaaccccgctttacattttaacctttaccttagccaaaggaaaaatcaacctggaaaatcattaaccatttaaccatgggtttggcaggggtcaaaaataccctttttttccaaacccccattaatcatttcaccacgtcccccccccaaggaaaaattaagacaggcacacaaaatacaactaggtaaaaacaacttaaagaaaaaacaattttcctaaactttagtcaaattctcccaatgattagccaactgagacagaatttgtgttgaagaaccgtgtttcagtgcattaccagcagaatcttttaaattcctcaatctttcac

SEQ ID NO: 71473 - DNA, 296 bp, Glycine max
  Clone ID: PAT_MRT3847_35554C.1
cttacgcctacggtcacacagaatatcacgtgtctgtatctacactctgcgtcatctatatgggagtcattcttatatatcagtcgtacatccttgtacatggggactgaagatcattgcaagttctatatcacgaggcaatttgctagctcatatgatgaccaatgcgatcttactcctcatggcttgaagaccttctcttgccgatctcttgctgcaaacgatcattctgagctgttaatgtagctgtgccacgactgcgacatggaatgcagcatcacttttgtaagacagcg

SEQ ID NO: 71474 - DNA, 384 bp, Glycine max
  Clone ID: PAT_MRT3847_35555C.1
agacgacagaagggttcagctatgttatacactagacaattttttttcctttaataatttctcatgtgaatcttcaacatggtcaccattgattttggagcctgaacaagtaaattagatcctttaaaaaagcaaagcaaaccaaagcgtcattgctgataaacttagtttttttcacaagtagcatagcacatggttttctcctgaaatttcacataacttaaggaacattcttacaaattacaataccattaacttcagagatataaggttggttgactagtaaagaaagaaggaaaggaggaaaagggtgcaggttcgatccttctactaacaaaaattaacaaactaataattaatatttgccgatagaaaaaaaaatac

SEQ ID NO: 71475 - DNA, 473 bp, Glycine max
  Clone ID: PAT_MRT3847_35556C.1
gggggcataaagaattttttctacccattttaatccaaaaaaacccaacttttttggtattggtgaccccttcaagttcactaattaggcataaaaaatgggctcgagagcaacaacaaagttatattagtttctttgggtctacatgcatgcaaatgctttttcaaaaaggacccctttacattgagcagaaccaacccttgttgccttaaaaaaagttcaagtttaaggaaccaaaatttggggtgtcgtaaggaaaaaagttggggtctttgttgggaaacactttttttgttaagggataaggggatctgtttaccaacctgtttttttgctttttcaagaaatttttgaagggattgcctttgggctagtggaaattattttgcgccctgccaatggaactcttgactgaatggggggaagggcaattattaaaatcttcctgtgaaaaaaaagggcttttgggaata

SEQ ID NO: 71476 - DNA, 232 bp, Glycine max
  Clone ID: PAT_MRT3847_35557C.1
tttggccggcctagtgttgttgttccacgactagccgcatggatgcgtgaaacacttatcgatcggcatttgttctatttgaaaacatactcaggctctacctagtttacacggactacaattctgcattagatcacgaccctgcttggtgtcgttttatcccccctgcattctggtttggcctgagtacacttatttgccctgacactaagagaggacgcctaactactat

SEQ ID NO: 71477 - DNA, 292 bp, Glycine max
  unsure (1)..(292): unsure at all n locations
  Clone ID: PAT_MRT3847_35558C.1
tttctctcgggcncaaatanctccctctgtgggtganctcccttanctcggagtacctngtcntccnacnaattnccccaacntnngncggcncantnnaagncagncnanggcgaaactccacnaaantccaagtaccttnganctctncaacaacnatctctctggcncaatacccgattntttcgcgcaactcaagaaactcgacgatatcgacatttcctttaacaactctcnggccccatancaagcncgcttggtaaatgcctanatcgcgtctctagatttgagc

SEQ ID NO: 71478 - DNA, 358 bp, Glycine max
  Clone ID: PAT_MRT3847_35559C.1
aaaaccaattttaaaaacgatgaaacttttcaaattcagcactgattcaatgttttgaacaccattttgttcgcatttactttcccatgcccattaaaagggcttgaatttaaccaaactttaacccaaaattaatgacttttaaccacgcattaactatcacaccgaggtttaattatttaaaccggggggggtttttaaactttaggagaagaaccttttggcatgaaatggaacatccaaaaagaaaattcttgcttcgaaacttttaggacgacggcttaaggggctaaatttgggaaaatttcaataccaggaaatcctgtccaaaatttttccaaagacaagggaatccggc

SEQ ID NO: 71479 - DNA, 356 bp, Glycine max
  Clone ID: PAT_MRT3847_3555C.1
tgctggtgcagctccagccggggccgctttttttgaagaaccaaggctgtaaaagcccaggcggcactgttttagatactgagcgtttgattggccggcgaacctccgatgcatgatcacaaggagacatgaaatagcggtcgaccaaggtgattcctgcccttgtagataaacctatgattgtggtgaactacacgggggaagagaaacaggtttcctcagcacacatatgctgcatggctcttttgcagatgacagacagtgcccaggcgaatctaggctgcaccgttactaatgcagacgacactgtgcctgctgacttaaaggactgacaacgtcctgtctccacagacgct

SEQ ID NO: 71480 - DNA, 494 bp, Glycine max
  Clone ID: PAT_MRT3847_35560C.1
agcaagaaaagaaacaaattcatcttctctaaaaacatgttaagatctacatgtaagtcacgaagtcctcaccagaaaatgagcaagcccttaatttccgaccacccccctcaactcaatgcaaaccaatcacgtccaagtcaataaatcaaggttttaaattgcggttgcagtttcatcgcatttctcgatattgcaagaaattgcatacaaatgcaaccaatgaggcgcatacacctcaaagacattaacattgtggctgaaattgcaattgcagaccgtattttaaaaccttgcaataaataaacaaactaatcaatctacaacaaggtgagttcctgaggattctccatggactgtttgagaatatactcagccctccttttcttatcatccctctcatcttccctcccagccaatgctgccgtccgcaacgcatccttcttccgatttctcatatccaatgactccccaataagcttcttcccagtttt

SEQ ID NO: 71481 - DNA, 1932 bp, Glycine max
  Clone ID: PAT_MRT3847_35561C.1
ccgttttaaaactatctcttgtactaaaatatgaaacaccacctgagaaataaagcctaacattaacttgtttcattggtctttacttcctgctcctatactcacgtctaagttagctgctataacttgcagcttgattaactaagaaatatggttcccaaagtttatgctggtcaagaaatggcaatggttgagaatgagaattgcataatgaatgggaagtggaagaaacgtgtgcatgtttttggtgagagggtgatgagatttcctaacaaggcttggcagacaacgtggaaggtgggacgtgaagacccaagaaggttgatccatgcctttaaagtgggtttgtctctaactcttgcttctttgttgtattttatggagccactttacaaggggattggacagagtgctatttgggctgtcatgaccgtggttgttgtgttggaattcactgcaggggcaactttatgcaagggactcaacagaggattggggacattgttagcgggattattggcatttcttgttgggtatattgcaagtgcatctggccgagtctgtcaagctattatcatcggagctgcagttttttctataggagctcttgctacttatatgaggtttattccctatataaagaagaattatgactatggtctagttatatttctcttgactttcaacctgattgctgtgtcgagctaccgggctgaaaatgtcttaaaaattgcacatgatcgcgtatacaccattgccataggctgtgctgtttgccttctgatgagtctactggtatttccaaattggtcaggcgaagatctccataattccacggtttacaagctcgaaggccttgccaaatctatagaagcttgtgtgaatgagtacttttacggagaaattgaaggctctggggatatgaaattatctgaggatccaatatacaaaggttataaggctgttttggattcaaaatccattgatgaaacactggcattgcatgcaagttgggagccaaggcattcaaggtactgccacaggtttccatggcagcaatatgtaaaagtcggagctgttcttcgtcaatttggttatactgtggtagccctacatggctgtttgagaacagaaattcagacacctagatctgttagagccatgttcaaggacccctgcattcggctagcagcagaggtatcgaaagtactgatagaactttccaacagcataaggaatcgccggcattgctctccagaaatactctcggatcatctgcacgaagccttacaggacctaaacactgccataaaatctcaacctcgactcttcttaggccccaaaaacaggcacaaccaagccaccaacatgctcaaaatagctgccgaacaagttggacaagaaagacatggaaagacctccctttcaagtgttaaaaccgactcttcggcgttgctggaatggaaaacaaaaagggtttcagttgaacagacaaaggaatcagaaaggaagtcttttgaggcccgcaactgagtaaaattgcaataactagccttgagttctctgaggcgcttcctttcgccgcctttgcgtctttgcttgtggaaacagtggctaaactggaccttgtcatagaggaagttgaggaactggggagactagcatgctttaaagacttcatacccggggatgactttgttgtcacttgtcaggagcctcgaattgacgtgtcacagaaccatttaccttctcatggagccgactaattaagagaacaaagatggataatctcttatctgttatttcatcaatcatgctcatggatattaaatataattaatatatttcatcagtatttttttactactattagtagtagtaggaggatgacgatctttcaggttataaagtgcatggatgcattcagtgttt

SEQ ID NO: 71482 - DNA, 510 bp, Glycine max
  Clone ID: PAT_MRT3847_35562C.1
ctcaaaatagctgctgcacaagttggacaagaaagacatggaaagccctccctatcaagtgttaaaactgattcttcagcattgctggaatggaagaccaaaagggtttctgccgaacagacaaaggaatcagaacgcaagtctttaaggccacaactgagtaaaattgcaatcactagccttgagttctctgaagctcttcctttcgccgcctttgcgtctttgctcgtggaaacagtggctaaactggaccttgtcatagaggaagttgaggaactggggagactagcatgctttaaagagttcatacccggggatgagtttgttgtcacttgtcaggagcctcgagtcgacgtgtcacagaaccatttaccttctcatggagtggactaattaagagaaagaagccttagccattagatggtgcattattttcatggatatggataatctgttatttgatgaatggtgctgatggatattatatataattactatatttgagtaaaa

SEQ ID NO: 71483 - DNA, 883 bp, Glycine max
  Clone ID: PAT_MRT3847_35563C.1
aacacgcgtccgtacggagtaaaaggctaaaaagaatgggaattgttaatttgcgtccataattcactcatcctcctcgcaatttccgatctttctgtagttgtctggtctccgtcaaccatcaatcaccaacgtagatcgcacacaaataacaatgggtttaggttttgttgtcggattcctcgggcttctgattctatttcacgccgcatattctaccatccaatacaagggtttgttgaagattacggaggaagagttttcagggcctcctttgaatgtggtgattgaggtgactctagggttagttttttgcatgtgggctgcactaaccgtgccaggaaagtttttgtcaatccaccctcactctgaagagaacagaattgtttctttaccttccaacgtggacttcatgatcttcaaccatcgatacaaagtctttcctgtggaaatggatgtgaagctgaagcattgagaacttttatataattggaccgagtaacttcatttcttacacgaggaagaaagagtctttcctcgaaaattgaataatctcttagtgcatttgattttgatgttagtactggttgatgtacgagattttggagatttcttttgtagcttcataccttacatttctgtactgggcacctacccgtcttcttaattttgacagtatgttactgctagagcctcttaatatttatgatgaggtagcctttaatttgaccattcttcctagtgttaactatagcactatagaatggtaatgtccaaaatgaagacaaatgatctgtttgtggttaaaaatacaaacaaaatgggtatcatttagctgtggtgtctgcgcctcccagaatggtgcatcacttcaattttataa

SEQ ID NO: 71484 - DNA, 384 bp, Glycine max
  Clone ID: PAT_MRT3847_35564C.1
ctcgagccgaatcggctcgaggtcatcgtttcgttcaactttcaacgccagttcacactctctgcttcgcgtgtaccaacaaggtagtaatttcccaattcaactctcttctcacatcaattctcaacacccgtttgtgttctcgttaaccaatttcgttttgcgcagtgcaagttcgaatcaatggccagcgctcagctcacagcaatagcgtcatcgatctctacggcgtcgtttgaagggcttcgaccttccgctgttcagtttgcttccacgggcagaattagaattggcaatctctcccaaaggtccttccggggcttggttgtcaaagccgccaccgttgttgcccccaaagtatatatatctttttttttctaattt

SEQ ID NO: 71485 - DNA, 216 bp, Glycine max
  Clone ID: PAT_MRT3847_35565C.1
cagaaccatgtacctcctttgacagaccctgtaggaaccttagaaacgcaactcctttaattgctgatacgaattctcagtcccacaaacaaatggtgatatcagccaaaactcaaagtaatggagcatactatgccaactgcggactatgttagggtcacttaccgagcaccaaaaagtactaacatcaaaggttctctaatgggttgattccct

SEQ ID NO: 71486 - DNA, 400 bp, Glycine max
  Clone ID: PAT_MRT3847_35566C.1
ggcaaacaaggagaccgggcgcactaacgtgatgaggggcgcaaagaaggaacaaggtcatcaaagggtgaattacattgttgtggtgagacaggcacttagggagcaatggggaggggcgtggacaaagacacagagaggacataaacatagttttgggactagacgacgtcatggaaaacctctgtgcgtcgtggacaagaatgaagctgagagtccccctttcaccttgtatgccattgattatgttatggaaaatgatcctttagtctatggaagccattataacacctttgggaccagactcattgatctgtccatgataacgaatagcttgactggtggagatgacttatagattgggtataacagatggaaatagatattagtggatatacta

SEQ ID NO: 71487 - DNA, 862 bp, Glycine max
  Clone ID: PAT_MRT3847_35567C.1
tatgacttcaagcatgttgagtggggagtgaagtgtttgcttcgttgaatggcgctagcttccaccaagccaccgcccaaccacagttgttcttggttgtagtcgtagatccgggcttaccagtgtgctttttcttgttctcttctctttccatttttctctggtatggagcatttgagccacaactttcttggcaatttgcctatttgagtcaaccagtcataataaaatgttatatatatatatatatatatatataactccatatcatccttggatgagagaagatggagcatctgataaacctcgatctagatgtttttgttttatccagaatgaaacaatttaggacaatgaacaagctaaagaaagctgctctgaaggaaatgtttaaatccatggacatagataatagtggaacaatcacttttgaagagttgaaagctggtctgccaaaactgggtactaaggtttctgagtctgaagtaaggcaattgatggaagcggtttatctttgggagttctcaatcttgcaattgtggtaccacagccagtattatatagtaggaggaaagtttataggactggcttaattgtttggcaaaggcagatacggagaggacacttgaggaaaagatgttgtggctgatagagagtcatgatcacgtagtcaggtgatgtggatggaaccgagcaccatgttgacaatgctcaagttgatcattgactcttggctattgttttagtttgattatgtcatgttagttatgaatttaaactatattaaactttcacattgcattttattaaactttgaattttcactttgtcaatatttaattagaattttgttattagatgt

SEQ ID NO: 71488 - DNA, 363 bp, Glycine max
  Clone ID: PAT_MRT3847_35568C.1
aacttgtggctgtttctattttattcctttttgtctccttttgctttcctctttttatttctcttttttattagcgaaaccccccccgaaataggatcccccccccattaataaccgacaacccggtggccaaatgccccggaaagaccaacccccgttcagcaccagaaagaattgaaaccatggacactcacgcagaaacctgctgaaccgccctatcgcaaccttctctgggggaagaaaaccctctgtgcctgcccccccccggggaaaatattcccagcgggtttaaacacccccccggttgttagcctaaaaaaggccccccccccaaaaccacgggtgggggcttcttggtccccc

SEQ ID NO: 71489 - DNA, 432 bp, Glycine max
  Clone ID: PAT_MRT3847_35569C.1
aaacacaaagcgtttgctcatgattagacaacagccaccatagaaaactctcatattcgtgattgcatcaatcatatgggtattaatggtatgtgctcaccaattggaacccttaatactactctcccccacgaaaccggccactaagagtgagatcctggagtccaaaccagtaaataaaataaatgatgctactccggacttcctatcttctattaattttaactgatcatatgaaaagagacaaagctaatgcgcaacttttgtgatccttactcgcactgaacacctgctcttaaaatgtcacggggcagtacttttgcgcctgcttccattatgcctaaaaccattggactttgccaactcatcagagaagattgatccattgccaatgcaattttcttcctgaacggagaatactttgttttttac

SEQ ID NO: 71490 - DNA, 457 bp, Glycine max
  Clone ID: PAT_MRT3847_3556C.1
gttttacacccgaaccactaggttaattttgctctagaaataattacaagagcttaattacataaataatgatttccacctccattatgaaatttaagcatctttccgagagcaaaattcgattgtactcccctgttctgtccctccgaaaactggaataaaacaactatgctacaggacacccgcctacacagttaatttcaatgagaagaatatgactttagatcactggctctaaaactaatcttgctaggaagacgtttatttaacatgacaacatgaaactgttaccaaatgtatggctgctctaataaaaaccggctgtcgtaaataacgagatagtggacacggttgaacaaggaaccctaatgacaatgattcaaaatttatccgtttcttttttacttgtcaaacattcgaggatgagtacatatcattcagcatgcggcagtatcta

SEQ ID NO: 71491 - DNA, 518 bp, Glycine max
  Clone ID: PAT_MRT3847_35570C.1
gtgcagtgaaagcagtagtagaagaagaaaacacgagttacgcacagtcccggtgccgccaccaccaccattggtttcagtcaactaatggcaaccactctcactccaatccaaaccctcaaattctgttctcccaatcccaaacctctcttcactcccaaacctctcttctctcccaaacctccttccatctccacacctcacaccttccgcgccgataaactctctctctccgtctccgccgccacctcctcctccaacggtcctccctctcctccctcccccgctcgctcaaaggttcgtcgacacacgatttccgtgttcgtcggcgatgagagcggaatgataaaccggattgccggcgtgttcgctaggagaggatacaacatcgaatccctcgcggttggcctcaatgaggacagggctctcttcaccatcgtcgtgtcagggaccgataaggtgctgcgccaagtcatggagcagcttcagaaactcgtcaatgtcttaaaggtagagga

SEQ ID NO: 71492 - DNA, 558 bp, Glycine max
  Clone ID: PAT_MRT3847_35571C.1
gacacaccctcaacttcttattcaatattccttcacactatcttcttctcttcatgagggtttagcaaagggttgctgacagagtttattggcattctgtccacctccacttcctactctctctctgagccacatgttcgtgaagttggaggtgggcatactgtcaactgagttctgttgtctgctctttgtaaagccttcatgatatttattcatctctcaacaattaaaaggagtggtataaggtgtacacacgggatagctgggtgggcggccctccaaacttgcgttggtgtgtactatgactatgaatctaacatcaatctaggttcttatgattcttatgctatactgtggcccccctgttatctgcttccgcctacatgtctcggtctccgtgactttctccgccccccgaatggcttattaccaccatactgcttgctgttttgttttcttcttctgcagaccctaataagttggctacgcaaattagagataaaagggagaggagtggtataaggtgtaaacacgggatagcagggtgggtggccctcc

SEQ ID NO: 71493 - DNA, 409 bp, Glycine max
  unsure (1)..(409): unsure at all n locations
  Clone ID: PAT_MRT3847_35572C.1
tttattttttttttttatttgttttttttgtggtcgntgttttttaaattatattttttttttcccagcaatagtcctagtttaatattataagccgagattcataattcaaattaactagcccaactttatacagaagcgaccaatttccaaacatttatatatttttatttataaaaaaaaaagggcaccatgaccttaacacacccatcacaagtccaaaacacttgaactttctcaagggcaaaaaatgaccactttattttaagggggtttgtttaaacacaaaacaccccattgcgacaaaattcaaactatattattttgaaggtgggaaacccccattaaattttattattttttttaaaggccattttttctttaaactttaactcttcaacaccccact

SEQ ID NO: 71494 - DNA, 340 bp, Glycine max
  Clone ID: PAT_MRT3847_35573C.1
ggggacaaaaagggcaacaaaacggccttaaaaacttggccttaaagggaacccctcttatttgggaaaaaatgggcaggccatgatcaccaaattatctttttatgcgggtcaaaataatacaatggtgaatgcaaaaaccgtttgctggctaaaaccctctctgggggtgcatgcaaccccatggcactactcacttttgggtccttcaaggtgctaccggaatttgcaaaacccaataaatgggatcccgtctgaaagtgccccccaaaaaatttccccccaaaagagctctttggtttgaccttcccatgtgttttgcccacccctttcaagctac

SEQ ID NO: 71495 - DNA, 714 bp, Glycine max
  Clone ID: PAT_MRT3847_35574C.1
ctgagtctgatgagaggaatgtcgctaatgaaaagcaattgcttcctgcaaaacgcaatgggaatttacagaggggaattttgcaaggaattggtctacacttgaatgcacttgctgccttaaaagaatacaacggcacacaagttgaaaaattgtcttctggaagacaactcagtctgcccagctctacttctttgcaaatcactacaagccaagaacatcagcatctatcattggtggctgcatcatctgaacgagaattggatccatcagacattggggttcagcctgctgaagattgttcccagccatcagcttacatggctggtgaagacttcaatcagaacagccccaaaaagaaaaggcgtaagtcggagacaccaggagaaaccgagggctgtaaacgctgcaattgcaagaaatcaaagtgtttgaagctttattgcgagtgctttgctgctggtgtctactgcatagaaccctgctcctgtcaggattgcttcaacaaacctattcatgaagacactgttcttcaaactcgcaagcagattgaatctcgtaaccctcttgcatttgctcctaaagtcatcagaaattctgattctgtacctgaaattggggatgacccaaataaaacaccagcttcagcacgacacaagagaggatgcaactgcaaaaaatcaagctgcctaaagaaatattgtgaatgttatc

SEQ ID NO: 71496 - DNA, 2026 bp, Glycine max
  Clone ID: PAT_MRT3847_35575C.1
cccacgcgtccgctctcacctcgttcttccaacccctctagatttgaatcaccaaacttcctcgttccttctctctctctctctctctctctctcttatatttgtactgtacccaaaaaaagcacttcacaaagttgaaagctgaaacctcttcttcaatctacttcacgatggcggagaagcacttgcgggagctccttaaagaggatcaagaacccttccttctgaaacactacatttgggagcgtcgcaggcagctcaaaagaccttccccaaacagccctttacaacaacaactgaaaaagaaaaactcaaacttcccacttaacaaatgcttcctcacttccctacaaaacgccacaaaatccccactcttattgtctctaaagaatagtacttctcccctcctcagacccttcatcgccaaaaccgcgtcgctccatctcgacaccgacctcagaatcaacaacaaaaaaaagaaaccgatggagcccaaaccaaacagcgccttgggcatcttcggctcgctcttcaagaaactaaccaaccgaaagagggaaacattagagggtgttcttgttaaggttaaagacagcgacgacgatgttgttgtggtgggatcctgtgaggtcgggttcagttgttcctgcaacggaaggccaagcagtgctgtgtggtcggagagcaacgaggataaatcgttggacttggaatcttctagtagtggccactcatttgatgactctgttgctgaagagattgagtttctcaacaaacgcaaacatgttacggattctgcttgttttgacgacgatgatgatcacggcttcttctgtgaaagcccgttccgtttctccctccaacgcagccccggctactccggccgccacaccccggatttttcttcgccggctgcgtctccatgtcgccgcaaaactgaggacaaaaaaattaatggtgctgatggcgtcaacaaattccaatcaggggaagaagaggaagataaggaacagtgcagtccagtatctgttttagtcccacccttcgatgacgatgatgtaatgatgatgggcatgatcatgacaatggagatgatgtttttgatttggactgtagctatgccaatgtacaaagaactaagcagcacctactagacaggctttgtagattcgagaaacttgctgagctagatccggtagaacttgagaagagaatgctggatcatgaagatcgcgagtacgaaacatttactgaagaggatgatgatcatgaagacgtggacagcgaaacagcatgcgaagaaaacattctcagaggagaaatgtttgaaatcctctgctgccgttcaagtgttcaacaagacacacagcaaggcccaagcagaagacctcaagaggctggtctatgatctcatcaaggaggaagagacgacacgggtagataataattcttcagacatggtgataagaagggttcttaggaggctagaattgtggaaagaagtggagtccaacactattgatatgatgatagaagaggacttctctagagagcaatgcaggtggaaaaaaaatgctgagcacacaagtgagctagctgtggaacttgaacttgctatcttttgctttctagtggaggagctttcagaggaactagtgtgttaatgtgggcaaattttgatgcagctgaagaatttagtatgagttatttattatctttattcttttaattagaagagtacagtctaacttgccccttatttaaataggctagttagataaaatgagacccaaaaggataatttgggttggaggagggagaacttgagggggggatatgttacatatgtacatgactcgtgtatgtaggtgccagggaatgctgtaaatcacctttattagttacaaaatactataatttttgcagtcattgatcccccgggcgttgttataatgctatgttctatttaatgtatccacatttgtaattagcattggtatctatatatcattcatatttatcttta

SEQ ID NO: 71497 - DNA, 352 bp, Glycine max
  Clone ID: PAT_MRT3847_35576C.1
ctcaaatcgcctattctgggaggttccataccacataccctaactcctggccccaaccttatctaatcgaattacactcctcttcgagagggcgtggggacgactttggtgacctccacgagtgggatgctcgcgatgctgaacgagccacatctctaggtgaagcttcacgctctctgcaacctcaacaacttggtcgacaccttctggcccgagatctccaccagtctccccaagatagaaagttcgcacgaagacgaggagtctgaccaacatcccatgcaacttgctgcacttcttgtatcaaaagtctttgattactcgggtgaacttaatgattcgttatcttatg

SEQ ID NO: 71498 - DNA, 113 bp, Glycine max
  unsure (1)..(113): unsure at all n locations
  Clone ID: PAT_MRT3847_35577C.1
tcgagnntctngatcagagggaacagagcanttcttgctcaataactgtnnaggtgttgattgttcatcngtgncgcaattagtntctttgggtacttagatgntgngnagtt

SEQ ID NO: 71499 - DNA, 310 bp, Glycine max
  Clone ID: PAT_MRT3847_35578C.1
ctttctctaaggcaatttgtatgatcatccacatcctctttcaaagattgcgtacaacactgaaatatagcagagatcaaccaaagactaaagaaaagctatgctgatcaattcagtcagttggttttacctcccctctcattttcatgtctgtttacaatttgaattgcaagtattttcctattaatttatgtgttaattaaggagacaaagcttggattgctaaacaagcgaaagagtagctagttattcaatcaatgtgtttttggatgagtatttacaaacttatttttgataattttaattttat

SEQ ID NO: 71500 - DNA, 1993 bp, Glycine max
  Clone ID: PAT_MRT3847_35579C.1
ctcgagccgctatttttttataaaaaaaactattaattaaatattcatttattatttacttgaccagcaagttctttttcatttgttaaaactttatgaaattagatatttcattttctgtgaaaaaatcaattcattaaatactgctgaaaatcatggtcagaatttgagcttttggcaactatggacagaaatatgaacttttcgtatttggaggagaagcaatcctttttcggtgtcgttaactttatttttttggaggataagcaatcccttttgtggttcgctgtttccattttcagcttttttcttgtgtttgagcatttgaatctggacaaaggtttcacctttgggtgagtgattcaacaccagctatagctgggggagtgaaggtaaggttgtgagcattaatttgctttaaggggaattattaattggtgtttactgggattaatgaaacctagctagaaaggaaaatgatgggagaacaagggagtgtattttatatatatatatgtaaaaatttgtgtattgtttgtagtggttaaatttgtgaaaaaggtaaaaggttttttctttctttctgggtatacatactaaagggtttttgagagttcagtctgctttgagatttgtgttttggatgatggaggaagctcagggcagttctagttccctgccacctttcctcaccaagatttatgagatggtggatgatccttcaactaattccattgtttcatggagtgccaccaataggagtttcattgtttggaacccaccagagttttcaagggatttgttacccaaatactttaagcacaacaacttttccagtttcatcaggcagctcaacacttacggctttagaaagattgatcctgaacaatgggaatttgcaaatgatgattttgtaagaggtcagccacatcttttgaagaacatccataggcgcaaacctgtccatagccattctttgcagaatatccagggtcaaggggtttcttcgctgactgaatcagaaaggcagagttttaaggatgagatagagaagcttaaacatgaaaaagaacaacttcttcgggagttagagatgcatgaacaggagtggaaaatgtatgaggtacaattacaacactccaatgatcgtttggaaaagttggaaaagaagcaagaaaatttggtttcttctgtctctcaagtgttgcagaaacctgggattgccttaaatctcttgctgttgacagaaaacatggatagaaaacggaggttgccaagaagtggtctctttagtgatgacgctagcattgaagatcatatggaaacttcccaagtattaccaagggaaaatgcagatggtgcttctattttctcatcgagcacagaacggttggatctccttgagtcatccatgacgttttgggagaatattacacatgatgttggtgacgtctttgttcaaagtcatttaaacttggattttgatgaatctacaagttgtgcagatagtccagctatatcttgtgtgcaactagaagttgaagatcagcctaagtcacatggaatcaacgtgaattctgagccagctgtagttgcggctcctgatcttgatgcatcaaaagaacaacctgtcgaaacagctcctctgactactggtgttaatgacatattctgggaacgattcttgacagagaatcctggttcgtcagaaatgcaggaagctcagtctgaaagagaggattctgatggcagaagtaatgccaaattttggtggaacattaggaatgtaaataaccctccagaacagatggggcattcttagcaaagcagagcaaacttagttgcaattgattattccttttagcttgtgatgcccctcaattttcatgtaataaatgtaggtatacatattctatatttttggttaaatgattgcatcctctatagaatttagtcaatttttatactgctcactctcttttagttctctata

SEQ ID NO: 71501 - DNA, 393 bp, Glycine max
  Clone ID: PAT_MRT3847_3557C.1
caaacacatatctcaaatggtaagacccattagtggcatcgggcaagcgaccctatgatggtggctaaggtatccacctcataaaccaccaccacctccacccacatctccaattcctccaacaccaccaatggaccctccatctaagcaattttctggcttcttgacctcttcctttgatttttcctccaagtttcttgcatcaacatattgggatattcccagcaccaaacatactcccaaaacaaccaccgaaatgaacttcctcttcatcactatcttataatctttacttacaaccttcccatgtgtgttcacttcattccctcacatttcagctttggccaaaacagaaggagcaaaactgaagctggcaagcagcggacgcgtggg

SEQ ID NO: 71502 - DNA, 860 bp, Glycine max
  Clone ID: PAT_MRT3847_35580C.1
ccttctatcaatctccttcaaaatggtaatttaccttattttattgtatttctagttttttattaaaaaaactagtaattaaatattcatttattatttacttgacctgcaagttctttttcctttttaaaactttatgaaattagatattccattttctctggaaaaaaaaaaccaattcattaatactgtcgaaaaacatggtcagaatttgagcttttggcaactatggacagagatatgaactttccatatttggaggagaagcaatcccttttgtgtttcgctgtttccattttcagcttttttcttgtgtttgagcatttgaatctggacaaaggtttcacctttgggtgagtgattcaacaccagctatagctgggggagtgaaggtaaggttgtgagcattaatttgcttgaaggagggtttgtgaattgaattggtaaaaagggtctctgttttatgggaattattaattggtgtttactgggattaatgaaacctagatagaaaggaaaagggggaagaacaagggagtctattttttatataaatatgtatattgttttgtagtggttaaatttgtgaaaaggtaaaaggtttttttctttctttctgggtatactaaagggcttttgagagttcactttgctgtgagatttgtgtttttgatgatggaggaagctcagggcaattctagttccctgccacctttcctcaccaagacttatgagatggtggatgatccttccactaattctattgtttcatggagtgccaccaataggagtttcattgtttggaacccaccagagttttcaagggatttggtaccccaaatactttaaagcacaacaac

SEQ ID NO: 71503 - DNA, 552 bp, Glycine max
  Clone ID: PAT_MRT3847_35581C.1
atgatgttggtgacatctttgttcaaagtcatttaaacctggattttgatgcatctacaagttgtgcagatagtccagctatatcttgtgtgcaactagaagttgaagatcagcctaagtcacctggaatcaacatgaattctgagccatctgtagttgctgttcctgatcttgatgcatcaaaagaacaaccagtgggaaaagcccctgtgactactggtgttaatgacatattctgggaacgattcttgacagagaatcctggttcatctgaaatgcaggaagcacagtctgaaagaaaggattctgatggcagaagtaatgccaaattttggtggaacattaggaatgtaaataaccctccagaacagatggggcattcttagtcaagcacagcaaacttagttgcaattgattattacttttagcttgtgatactcctcacttttcatgtaataaatgtaggtatgcatggttttggctctgctatatatacatataccatatttttggttaaatgattgcctcctctatagaatttagtcaattctt

SEQ ID NO: 71504 - DNA, 261 bp, Glycine max
  Clone ID: PAT_MRT3847_35582C.1
gtctggcagtccagctccacagcttccgtctatagctgcagagttcgtcgtcaatgagagacacgacagaactgccgacccgaaagcaattcaaatcttcctgggaagtgatgcgctgcgcgcccacaatgcagatctgctattctcttccaaccagctgaccttatatgacgacgatcgctgcaaactccaaattcctttggtgcgacccgaagacgagcgcacctttaaatcgctggcgatatagcaggtcttcggcga

SEQ ID NO: 71505 - DNA, 1599 bp, Glycine max
  Clone ID: PAT_MRT3847_35583C.1
accggaattctcgagccgattctcctcgcgcctctgtatcccattcctctgccatatcctgaaatacgttttcacaacactcacctttgccatatacagcataatcatcaattttctgaaatgagccagcgtgtccccaactgcgatgtggacgacaataacaacattcccacaaccacaaaaatccctcttcttcccaatttcaatttcatatcccatgaagtcccaatgttgggctaccaagctgctgaactaccatgcaaaaagggacaaccttcgacgtacaaaggcagccacggaaacctaactagtacgtgggacaaacctcgtacaagtggtggtaccttggagtccatagttagccaacatgtcagcgaaaaccgctacaagttggttactatggacgccttagtgccctgttcagaacaacagggcacacagaaggcagtggtgtcagaaaggcttgatgcgtgtgggaagagtcgcttcccacgcgtggtggcgcaggaggaagtggagaaacgcgctggggtggtggcgcgtgggacgcgtggtactacaacgctagaattgggtggctgcaaggattggagtgtgagtggtagtgaaacttgtcgtagggagttgagtgtgaccttcaattctgccaccaagggttcgccggaaaacaccactagctctggcaaacagtgcaccgggaccaccaccaatgacgaccgtgattccattagccaccgtatatcgcagggtgaggtaccggatgaggattacaaggcaacaaaagtgcatcgttctcctgggtccttctcaagaatcagtgcttcttcagtagtgcacaaacaagctgaacggagaagaagagataagatcaaccaaagaatgaaggaattgcaaaagctggtcccaaattccagtaagactgataaagcttcgatgctagatgaggtgatccaatatatgaagcaattgcaagcgcaagtgcaaatgatgaattggatgaaaatgtacaccacccagatgctgccaataaccatgcagcagcagcaacaacaacaacttaaaatgtctatgatgatggctcagatgggcatgggcatgggaatgagtaaggatatggttatgaatatgaacagcatgaacattcctggattcccccctatgcttcccttcccctccttcatgcctatggccccatgtggcgatcaattacaaggaacaccagagaagtccgtgaccatggatgcatacagtacgatggcttccctgtatcagcagctatttcatcctccagcttctagctcaaagaactgagcctttcgtgttctaccttcctgacaatattatggtgagctataaattaattaagagtgtgcatgtgtgtaaaattttggtgagaaagattgaagtgtgaagagccatcagcttttttttttcttttttatcggcaaaataaaatgtaatttctttgtaccaatagtacaaaaataagatgtttggaaatgtacattattagattagatgtgttcactccccttctgttcactgtcagtcttttaccactataattaatgtgctaatgtagggtgtatatataatata

SEQ ID NO: 71506 - DNA, 212 bp, Glycine max
  Clone ID: PAT_MRT3847_35584C.1
tcctatgacgttatgagcacgcatgcactcagctcgtgagctcggtattcggctcgagctcgagccgaatcggctcgaggaagcgttcctggaaagttgggagcccaacggctaagactacctccatgagagcttcttcgaaccgtcgtaagaggccaagctcttcgtcgggaacttgccttactactttgatagccagaaatggtcaaagc

SEQ ID NO: 71507 - DNA, 203 bp, Glycine max
  Clone ID: PAT_MRT3847_35585C.1
ctaaagaaaaggggttctgttggctattaacatttatttctaagaagcacaggaacttaaaaacttattacccaagttttacaaaatgggctcaggttttattaaaaatatagctaaattatccccaacttccaagaaaatacatagtttctacatataatatcaaatgcatacatcattatgcctataacaaaaagatttta

SEQ ID NO: 71508 - DNA, 171 bp, Glycine max
  Clone ID: PAT_MRT3847_35586C.1
cggaacttgcgtttatatacctgtcaacggaaattgcatctaaagagacagaatgcaaggacctgggggtggcagggatccttccatagatttgggaggtactgaaagatatggagcctttgggcctccaaagaatttaatttgaaaactaattggagttaaggacctcat

SEQ ID NO: 71509 - DNA, 597 bp, Glycine max
  Clone ID: PAT_MRT3847_35587C.1
ctttttttttttttttttttttttttttttttttttttttttttttttttttttttttttttttttaaaccaaaaaggggggggaaaataaaaatagggggcaaaaaagaaaaaacaagcaaaaagcccccctctcaaacaaaaattattcagcaattccaaattccatatggggttaaacaaggggggcaacaaattaaaggggcaaaaacccgaaaaaaacaacatggggggagcctggcaaaaaaacaagaaaatctccccccccccattcaatcggaaaaggccccccaggaaaaaaaaccgggcaattcctcccagcacgaccctaaaaaacgggggaaacaacaggagcacaagccccagttccacaggctagggtggttcctgctccccgctcccaaacacacattttaaagggaaaattaaacaacccttggacaaactctggggtagttcgggcagggaacaccccaggaggttaaaatttggggccaatttcggctagcttcaattcaacaacaaaaaaattcgggcttccttctctagtgaaagttacacaggggggattccccatgctgacacagggcacaggcc

SEQ ID NO: 71510 - DNA, 234 bp, Glycine max
  Clone ID: PAT_MRT3847_35588C.1
ctctctttgcacttgctccacaccctgcaaacaaaacacttgcatctccaacccaccaagcccaaagcctgtttccttatagacaccttcattttaaaacaaactttcactaccactacgaccttcaaaaaacatggccctattctctcttacttggctcatccaaccgtgtgctcacaccagaatgttcagctcttctcaaacccgagcaacttcttaacacaagtcaaacct

SEQ ID NO: 71511 - DNA, 3260 bp, Glycine max
  Clone ID: PAT_MRT3847_35589C.1
ggctcgagcatgcttccaaccttgactgaacttcgacgcgctttggacatgcaatcagcgcttgaatcccttgtagaagaagggaattactggaaggcatttcaagtcctatctgagtatttgcaactcttggatagtttgtcagagctttcagcaatacaagaaatgagtcgtggtgtggaggtttggctgggaagaactttacagaagctggatgctcttttattgggagtatgccaagaattcaaggaagatggctatataacagtaattgatgcatatgcattaataggggatactgccggtcttgctgaaaagatacagagtttcttcatgcaagaagttatatcagaaacacactctgtattaaaggctattgtgcatgaggatgaggagggactttcgcaaaatagttggctcacttacagtgatttatgccttcgaatacctgattcaaagttcaggcaatgcttattacgaacattggctgttttatttgaccttatgtgttcataccatgaaattatggatttccagctagaaagaaaggactcagcagcacaaacttcaaataagtgcaatgaagagatttcctgtagtccaggtgagactcaggaagttgattcagatgtaagagcctgcaataattctatgtccagttccagagatgtaatacatggctcatcttctagggaggaatctgcaacaaagagctcactgactgaaaccagtggttcaccatatagtgattttcatgatacaattaaggaggctggaaaggaggacagtgcaacatcaagcattgagtccccttggtaccatcttcgcaaagaagctacaacatttgtttcacagacccttcaaagaggacgcaggaatctgtggcatctcactgcaagtcgtgtgtcagtattgctttcttctgctgcagtctgtactgctagcattcatcaattcttgaaaaattatgaagacctcggtgtctttattttgactggggaagccttttgtggaattgaagcagttgaatttaggcagaagttaaaggttgtttgtgaaaactatttcatagcttttcatcgacaaaatgtgcatgcactaaaaatggttttggaccgaaagagacttggctaaaattacccccagaaacagtacatatgatcagttttgcaggacttattggtgatggagcaccgttgatttctttatccagtggtaaatcaactaatgtcagtgcagtccattccattaaatcggtgaatatggttcacactggtgcaaggaagaatgggttttctcactggattaaaagtggaaaccctttccagcaaaaattaccaacctccaatgaaggtcgtggttactcacaacctaatggatcagtttgtggtgaatttgacggaagttcaaccaataattttcatgatgataaaacacccagaaagaatgatatcaatcaaatgaatggtgccaattctgtttcagaagatgaaaatgaggatcttcttgctgactttattgatgaagatagtcaactaccaagtcgaagttctaaaccccatcattcaagagctctctcttcacatgttaatgacgaagagaatacaacacaaactggatcttctctctgtctattaaagtctatggataaatatgcaaggcttatgcagaaattggaagtggtaaatgttgagttcttcaagggagtatgccaattgtttggattttttttctattttatatatgaaacatttggtcagcaaaacgctagttcaactggaaaaggcacttctagctctcttaactatcagcctgagaacagctttatccagagtaaaccaagattgtgaagagtggagttagactcaatcatcgtcaccaacatctttgagttcaccatttgtacatgctgagttgacacctacacaccctcccaatacaaattatggtcactcctcagggacttctttgggtctgaaggaaagatgtgtggctgttgacactatatctcttgttgctcgaatactgaatagatctaaagctcatctccaatcaatgctcttgcaaagtaattcaactatacttgaggatttctatgttcatctggtggatgctgtaccagatcttacagaacatgttcatcggactacagtgagactactgttgcacattaatggatatgttgaacgtgttgccaattgtaaatgggaagtaaaagagctcggcatggagcataatggatatgttgatttgttgctgggggagtttaagcactataaaacacgacttgctcatggaggaattcgtaaagaggttcaagacctattattggattagggcttgaaattgtggctgaaactcttgttgaaggactttcacgggtgaagagatgtagtgatgaaggacgagcccttatgtcattagatctgcaggttttgatcaatgggttacagcattttgtggcgctgaatgtgaagcccaagctacaaatggttgaaactttcatcaaggcttactaccttcccgagacagaatatgtgcactgggcacgagcacacccggaatacagtaaaagccagattgttggactggtcaaccttgttgccactatgaaaggttggaagaggaaaaccaggttggacatactggaaaaaattgaatgagtaactgtcatttgttgtgtatcaagtcaggcatatagaatcttctgctccttttcgcctttgacttttttggcagggctccgtgtaaaggtagtgtatattgcttggcgtttgatcctctattaattatggagtattttccaaatctgtgtgcgttggtgtcttgtagatagtcctttgaaaataagctgttattgtactataattttaccttcacataatatttttcctcacgtaattcaggttactgatcgctaacaacagctttagacacaataatgtgaagagtggattaagtctcaatcgtcttcaccaacatctttgggttcaccatttgtacatactgagttgacacctacacaccctcccaatacaaattttggtcactcctcagggacttctttgggtctcaaggaaagatgtgtggctgttgacactatatctcttgttgctcgaatactgaatagatctaaagctcatctccaatcaatgctcttgcaaagtaattcaactatactcgaggatttctatgttcatctggtggatgctgtaccagatcttacagaacatgttcatcggactacagtgagactactg

SEQ ID NO: 71512 - DNA, 240 bp, Glycine max
  Clone ID: PAT_MRT3847_3558C.1
gatccattctttctttttctatggcctgttcacaatacaagatttataggcagagcatgttggttgccactgatatgttggttcaattcgtcggatgctaactactccaccattgtgatactacgcacctgcaagtaaagatgagctgtatggtacatattaccagtcatggatgtaacgagtcatgccctggtactgctgactataaatctcattatgaaatacatatcattttctact

SEQ ID NO: 71513 - DNA, 861 bp, Glycine max
  unsure (1)..(861): unsure at all n locations
  Clone ID: PAT_MRT3847_35590C.1
ttacgaattcgagctctgtacccggggatcctctagagtcgacctgcagattatattttgtatgcttaaatgtaattatagtgctactatttcactcaaattatatctattttaaaatagagatattttattttttaatttagaaaattcacaatttaggtacaattattaattttacctactattttgtttatttttcttattttgatctaattaaatatcatatctaacataaggtatatatcattaaaaaataatttaattaattaaaataaaatataaatgtacatgaaattaaaaaacattagatcaaaattacaaattttctacaaataaagatatcaactatctttatctcaaaataagtagaataaaattgtaaatttagcaaaataaaaagaagttattaaacctaaatttaactaactggacaaaatatattcgaattaagacgtgtcgtttacgaaatgtaccgttaatactcacaaaagaaaaatgtaccgttaataggtgaaagagcactgatcacgctagaaggtattgttggcagtagaaagggaccaatgacaagagctggaaggatagcgatgaagtccatgccgtgctctttcgcaaatttccaagcttctttctccgcaagtgttttagaaacgaaatacatctacattcgaaccaagaaaaaaaaaanacattattaattgcgtgtaataaggattagtgaattgagttacattatttatattnnttntctctggctttgtttctcattatttattttatcacatacttctctttctatctctttttntaagactagtgattgaatttattttaaaaataaataactaatttacactaaaa

SEQ ID NO: 71514 - DNA, 697 bp, Glycine max
  unsure (1)..(697): unsure at all n locations
  Clone ID: PAT_MRT3847_35591C.1
cttctgnggatgtacttactttatctgcaacccctataccacgaactctttatttagcattaacagggtttcgtgatgctagtttaatgtcaactccacccccagaaagagttcctatcaagactcacctttcttcattcagtgaggacaaagtagtatcagccatcaagtatgagctggatcgtggtggtcaagttttttatgttctgccaagaattaaaggacttgatgaagtaatgacatttcttgcagagtcatttccaaatgtggaaatagccattgcccatgggaagctatactcaaaacaattagaggataccatggagaagtttgctctgggtgaaataaaaatccttatctgcacaaatatagtagaaagtgggcttgatattcaaaatgcaaataccataatcattcaggatgttcaacaatttggcctcgcacagttgtaccagttgcgtggaagggttgggcgagcagataaggaagcacatgcatacttattttaccctgacaaaagcctgctttctgatcaagcattggagaggcttgctgctattgaagaatgccgcgaacttggtcaaggcttccaactagcggagaaagacatgggtataagaggttttggtgcaatttttggtgaacaacaatcaggagatgttggaaatgttggtattgatcttttttttgagatgct

SEQ ID NO: 71515 - DNA, 532 bp, Glycine max
  unsure (1)..(532): unsure at all n locations
  Clone ID: PAT_MRT3847_35592C.1
cactgagcatcntctagctatctcgatcgaactgtccaaggtcctgtcacttctaattttgctggtcgtcttcctcctagtgttgattattatttttcttctcttgcgtgttactcattaacttattgctacttgtgttgttgttcctcttccggtttcgcacgtgtgtttttcgtgtttcgcttccgcgacggtgttatttgtgtttcggttcgccgtctcttcattattttcaccgtgttcgtgttcgtgttcagtacgtataccaacaacccgaacaactatccgctgttcgtgttggtattcgtcggctgcccattgttgctcttatttattcccntgttccggttgaatcacnatgtggtggttttgccattgcgttatgcgtcgttaatcaccacacgccactacacattagtacncgtggcaacaaccggtgaccacgtggaacgggcccggccctgatttggcggggccgtggtgacatacgtgggcacgtgcagaggagaggtgcgaggcgagtagggagggg

SEQ ID NO: 71516 - DNA, 320 bp, Glycine max
  unsure (1)..(320): unsure at all n locations
  Clone ID: PAT_MRT3847_35593C.1
ccgaatgaaaactggctatggtgagcgttcttcggaggtaaaatgcgcaagttttaggcttgctgtgnaagcacacaacatccgagtnttaaaaccattcctgaagagtgcgtgaaccaacaaaggatacattaatggcgaacaattagatcagnctctaaaacagttaacaacaagcttctttatgtagtgaacgcgaagtcatcacnacgacatattatattcggcatgataacacgtactctctaatanccatatatgaaaacaggatnggggtggaggatttatgcacctatntgagaatgggtacagggcgcgnc

SEQ ID NO: 71517 - DNA, 121 bp, Glycine max
  Clone ID: PAT_MRT3847_35594C.1
gccattctttcgaaagaatacaagtgcgttttaaaaagtaggattgaattgaggtgcatcttttatgtcctagctagttgtaaatgccgatgcccgagcacatggacgaaacggtccacca

SEQ ID NO: 71518 - DNA, 478 bp, Glycine max
  Clone ID: PAT_MRT3847_35595C.1
ctagaatgttcaaaattcagcaatttggttattcttgtcccctaaaggccaacatcgaatcttccatcttgcacacaacgctcctgcacgatcctgtcactaagtttcttgtgtgaataaaaagggagaggaagggagaataaaggataaatcctttgtttcttaatcttcattcaaaagttatgggagtctagttcagctggttgaaaaccctaattctctttgactactaactagtgtcagacagagcatccaaactttggaatctaaacatggatctcccaatctgcggttacaaatcagtgttgtggtcccaattccaacttgtattggcagtggagagtgattataaagcttgtgaagtagaaaagggagctcttcatagataaattcagcttgggatatacgtggatgataaggattccaaatgtatcagcatcgcatcacttgcaaccttcaaatttgtctgcaatgaatg

SEQ ID NO: 71519 - DNA, 416 bp, Glycine max
  Clone ID: PAT_MRT3847_35596C.1
aacacaaaatcatttttcatgtttttgcagcggagctgaaatcatattcatatttcatgctttaatgattaccaaaatccttttttttataaagcaattttttaatttttaaaagaatcttggcctataaatttatcccgctttcaagggtacccagcctgggcctatatatgcctgccctcgtaattcaactagggggctttatgggtatataaaaaccctctcccacccggttcagttgaaatgggaagaaagatattcctactcccctccattacaccaccttaacattttatcccaccactgttttgagtgctggacccctgtggttggggaagaaaaatattaatttgcccccccatctttgagaaaattatgggtggaactattgaccccagggctacactggggggggg

SEQ ID NO: 71520 - DNA, 357 bp, Glycine max
  unsure (1)..(357): unsure at all n locations
  Clone ID: PAT_MRT3847_35597C.1
ggaaggggaacacgcaaccggctttgctttttttatagggaaaggttaacccaaattacattggttcgttcccctttcaaaaaaaacaacaaaaaaaagcttttttattctaaagacaaaggccaccctgcgtttttccaattattcgccctttttgacatcccaaaanttggctggcatcatacttcccaccttggttttaaggccaaaagccacgaatctaatgaagggttgggggagaaaaagactcaccctaaagaaatttttatgttagcagaggaaattttccaaaaaaagacttcccggatggaaaactggccaacacagggcaattaaaaagacccttaaggttggggg

SEQ ID NO: 71521 - DNA, 441 bp, Glycine max
  unsure (1)..(441): unsure at all n locations
  Clone ID: PAT_MRT3847_35598C.1
gtccaaaaattatttgatgagatgaaagcaagacgcatttatcctaatgatctaacttactcaacattgattaaaatatacactaaaggtagaatgtatgctgaggcgatggatgtttatagagagctaaagcaggaaggcatgaagacagatgttgtattttacagtgctctaattgatgctttatgcaaaaatggtttgattgaatcttctctgaggctgctggatgtgatgacagagaaaggaagtaggccaaatgttgtgacttacaactccattattgatgccttcaaaataggacagcagctgccagctctggaatgtgctgttgatactccttttcaagccaatgagcatcaaattaaaccttcatcttctatgcttattgtaggtaactttcaagatcagaagactgacnatgggaacaatgatgaaatcatg

SEQ ID NO: 71522 - DNA, 226 bp, Glycine max
  Clone ID: PAT_MRT3847_35599C.1
ttttaccaatttttcctcagaaattttctactttaaaaccaaaaattcagggaaaatttgaaaccgggagaggaacatctaacccttttttcccaatttcaccacttattgtaacaaattaaacgaaaaatacctaactggggcgaaactgagcactatgaaaagctacttgaaactaaaccaaactcataaaaattacacaaaatctcaaaaaaaaaaataaaaa

SEQ ID NO: 71523 - DNA, 1265 bp, Glycine max
  Clone ID: PAT_MRT3847_3559C.1
ggcatcccggacccaaccacctactgcttcaaaaaattcttaaggatggccacagcagaagaaatttcaactttgaaactgttgcgccaatatctcttgggggatatttcagacccttttctcaccaatctcattccagtaaaacttgaagacccctcatcaggacttgatatgggttcaaacttctcagaacaaagcagcttctgcaagtttctggagtgctttgattttgaagcagaagtggtaggtctcacttctcatcataaggtccaaagctccattgcaacaagtccaccccagaatttcaattttccagaagaaccaatggtgtcaatgaaaaaggaagcaacatgttatgcaacaaggcattacagaggagtgaggagaaggccatgggggaagtttgcggcagagattcgcgaccccaaaaagaaagggagcagggtgtggcttggcacatttgacactgagattgatgctgctaaggcttatgattgtgctgccttcagaatgaggggtcataaagccgtgttgaatttccctctagaggctggaatgtctcatccagagcccaacagcagtggcaggaaaaggagaagagagtacacaacagctgccacaagttcaaggcatgttatgtcatgagaaataattcagtgtgggagaaccatgtttttcttttggcattttttgccagttacacaagttaaagcaaggttttatagttacactacagttgagcatgatgagatctgttatttaaatccttgagttatggttaagggtgaaattgaattaaacccaagaatgaaacagctcataaagaaacctacttctacttttttatacaaggctctcaaagtagaatgtgtgatagtcaccactcaccttagttcattagataatgaggaaaattcttattgcatcttaacttaaaatataatctcaggattactaaccatatcgatagtggcttgttttcatcatttactgtaatagtcagcttttttcacaaggataaggtattatgggatgttcagtggagtatttaagtggcttggctttcccttcttaattggcagctaagttataagggagggtttcccaagtgcttggatatgacaatgatttttgctttcctagttacttaattataattataggatttattagaatttatcatttcctattttttactcaaattttacttgtaaagaatgtacaacgacttgtgaatataaatgaggaaaataatcttgtctcct

SEQ ID NO: 71524 - DNA, 2616 bp, Glycine max
  Clone ID: PAT_MRT3847_355C.1
atggcgacttcacgaggcaatggaattgtctcaagttattgggattcccatgggcagtggcaagtttgtgtcgaagacgatagaaatgtgggctctttaggaattttcattggggatcgtccatttgaatttgtgcttcctgtaacgttgtgccaactcttcaccgtcatcttagtctctcgaacgctttactttcttctcaggcctctaagaacacccaaattcatctgcaacgtcctggtagttgaggctgttccgaattattcttcaaagagtccaatgttggactccacaagtccaatagttgtcgaggagtgtctgaggtttagtttgaatgttaaagttgtgtctagtgaaaatgtgcagggtggcattattttgggccccacatttttggggcggaacaagacgtattggcaggttttatttccaccgagacagacggagtatttagtgatggcatccttaaccggcgccgtatatttcgtattcttagttgcattgaaaatggacgtactaatgaccataagagcagccaaaagcacgtggcgacttggagtaattcccttcctcgcttcatttgtggttatcttagcactcttatgtctctattatcacccccaacaaatttcctctgcatctttaacaatcgcgcgtgtctcagtaagctgcttaatgtcgttgagcaacttccccgtcgtgtctgatgcaatgcttgaactgaacctcacagccacagaacttggccagatcgctctctcttcctccatgatcaacgacatcatactatggcttttcatcgttatgcatagcttcacatctaatgttgatgtgaaaaaatcaatcgcattgttgggaaactggtgcttgctcgtcttcttcaacttctttgttcttcgaccaaccatgaaattgattgctatgagaaccccagttggaaaacctgtgaaggaactttatgttgtgttgatacttcttggggtgctagtgatggctggtgtgggagacttgatgggcgtaacgtttctcatgggacccttgatttttggtttggtcgtaccaagtggcccccccttagggacaacgctagcggagaagagtgaagttcttaccactgagttcttgctacccttcttctttgtgtacattggcatcaacacggatttgtctgcacttgaggattggcgcttatttttgacccttcagggtgttttcttcgcgggagacttggccaagttgctggcctgtgtgttggtttctctagcgtacaacattagacctaaacatggcacgctacttggcctcatgttgaacatcaagggtataactcaactcataagtttggctagattcaagaaacaaaagatgttggatgaggatacattcagtcaattggtgttctgtgtggtacttataaccgcgattgtaacacccttggttaacatattgtacaagcatcgccctcgagtacacgcagaaagcttattcgaaggggaactgagaacgatccaaagcactccaagaaacagagagtttcacattgtttgttgtgtacataatgaagcaaacgtgcgtggcatcactgccttattagaagagtgcaacccagtgcaagagagccccatatgcgtctacgcagtccaccttatcgagctcgtggggaaaagtgcacccattctccttcccataaaacatagacacggtcgcagaaaattcttgtctgtgaattaccccaacaccaaccacatcatgcaagccttcgaaaactactccaacaactcaagtgggccagtcaaggttcttccctacatcaacgtggcaccttacaagagcatgcacgacgccattttcaacctcgcccaagacaatatggtgcctttcattatcatcccttttcacgaaaacggcaacattgaccttgtcggacacgtggcagcctccatcaggaagatgaatactaggtttcaagcgcatgcgccatgcacgttggggatactcgtggaccggcactctcggctgggcgcgtccaacaacaacaacatgtatttcaacgtgggtgtattcttcataggtggggcccacgatagggaagctctggcattgggaattcgaatgtcggagcgtgcagatacgagggtgagcttgtttaggtttgttatcgtgaacaagaaaccgtgtggttgtaaaattattttgacaagagaagagcgtgaagaggaagaggaagataccatgttggacgaggggttaattgacgagttcaagagcatgaaatatggcattggtaacgtttgttggtacgagattacggtggacgatggggtggaggtgttggaagcagtgcatagtttggaaggaaactatgatcttgtgatggtgggaaggcgccacaatgatggatctttgaatggaaaagaaatgacaactttcatggagaacgctgatgcattgggaatattgggggatatgttgtcttcagtagaattttgtatggggatggttccggttttagtgacacagtgtggtggagtgaagataagtagtagtagtaataataagcttgatagagtaggttcagttaatgtctcacaaaaacgtttatctgttcataaataa

SEQ ID NO: 71525 - DNA, 254 bp, Glycine max
  unsure (1)..(254): unsure at all n locations
  Clone ID: PAT_MRT3847_35600C.1
agacagtgcttccaagattatttggagtttgaaaattccaccaagagcaactncgtttgcttggagaatcttcaagaacagattatctaccaaggataatctaaggaggagacatgtggagttgccttcttataattgtcctctctgcgatatggaagaggaatctgttggtcatgtcatgtattcatgtataaaaactaggaatctttggtgggagattttgagttgggtcaatagagtgggncctttcccac

SEQ ID NO: 71526 - DNA, 480 bp, Glycine max
  Clone ID: PAT_MRT3847_35601C.1
tccggtccggttgcaaaaagacaacagagggggatctggtgttgttgtggactcatcattttccatttccagtactcaaaagagtggatcttctagttcttcattaacatctagtgatgctttcgaaacaactgaaatcacttcacaacagtctaaggtgtccagtgattcatcagttttgagttcattaccaagtttatctgctgcatctaccatgaagcctacatcagcttccttgttacttcctgcatctgctgtgagtgaagattccatttcagttctgcctaataatgaaggcggaaagaaggaatctcttagtaggtcaaattctttgaaggataaccagaagaaaatacagaagaaaggccaatcacagcatcaggttgctgtgcaatctccttctgtggctaatgtgcctttccaagctgttgatggtgatatccctgttggtgaagtttctgaaactgtacgaactaaaac

SEQ ID NO: 71527 - DNA, 1730 bp, Glycine max
  Clone ID: PAT_MRT3847_35602C.1
acagaatcataagttcaaacttgaatttcactgggaaacttagcctcgatgctagtaatggaaacaccgaggtttacatgaatggtcgagagatcacaaaacttgaattgagggtactcaagctggcaaatgtgcagtgtccacgtgatacacacttttgggtctatgacgatggtcgttatgaggaggaaggtcaaaataatatcagaggaaacatttgggagaaggcctcaacaagattcgtatgtgccttattctctctaccctttccccatggtcagcctcatgggcaaaaggatgaaactagtcactataccacagttcctaattatctggaacagaaaaagactcagaagcttcttcttcttggaattcaaggatctggcactagcactatatttaagcaggccaagtttttgtatgggaacagattttctgatgaagagcttcaggatgtcaaattgatgatccagagtaacatgtataaatatcttagtattttacttgatggaagagagcgctttgaagaggaggctgtttctagaatgaatggacaaggttctcccggtcaaactatggaaacaggtagcaatggtgaagcaagtaatactagtgaatgcatctattccctcaacccaaggctaaaacatttctctgactggctcctggacattatagccactggggatttagatgccttcttccctgcagccacgcgggaatatgcaccattagttgaagaagtatggagggaccctgcaatacaagaaaccttcaaaagaaaagatgagcttcactttcttccagatgttgccgagtacttcttaagccgggctgttgagatatctagcaatgaatacgaaccttctgaaagggacatagtatatgcagaaggggttactcagggaaatggtttggctttcatggagttttctcttgatgaccgtgtcccaaagtctgatacttatttggagaacttggatgctcagctgccaccactgaccaagtatcaactcattagggtgaatgccaagggcctaaatgagggctgtaagtgggttgaaatgttcgaagatgttcgagccgtggtcttttgcgttttcctaagcgactacgatcagttgtcgctttccccagacagtagtggcagtggaacacttgttcaaaacaagatggtacaaagcaaggagcttttcgagacgatggtgaggcacccttgcttcaaagacacccctttggtgctagtccttaacaagtatgatatctttgaggaaaagattagcagggtgtccctaaatacatgtgaatggttcagcgatttttgtccagttcgtgcacaccataataaccaatcactggcccatcaagcctacttctatgttgccatgaaattcaaggacctttatgcatccctcacagggaaaaaactctttgtggcacaagccagggcaagggaccgagtaactgttgatgaggcattcaagtacataaaagagatcctgaaatgggatgaagagaaggaggagaatttctatggtccacctgaggattcattttacagcacagacataagctcctctccctttatcagacaagagtgaatgagtgtccataaaaaaatatattattatttggctgttgaaaagggttaaaaatgtaacgtgctggccagcttgtgttctgtgatcctatatgtattttaaatgttaagtgaaagttattgatggttt

SEQ ID NO: 71528 - DNA, 232 bp, Glycine max
  Clone ID: PAT_MRT3847_35603C.1
gcaaaatgtacctactaacttcatggtctagctagtagtcttacctatggtggtttcgaagccaaaggccccgtcatggggtggtggtctggtattcaataagggtattgacaacagcaagagtgtgcctttgatccttatcaaggatcgtgatgaccctaatcttggtctcaagatcaacggtacccttgctttaagtttaccagatgcttgtcaaacactcaccaatatt

SEQ ID NO: 71529 - DNA, 189 bp, Glycine max
  Clone ID: PAT_MRT3847_35604C.1
cctcgtgccgaattcgcatgctgcaatttcgtggttaatttgtgtgttttgtgagtgtgactttgtgcttattatgtgttttctgaggaaggtgttcttgggctttggggagtagaggcttgtaatggggccctctcttacgggcctttttctttgcaatgttgacttcttttccgtaaaaaaaaaaaa

SEQ ID NO: 71530 - DNA, 124 bp, Glycine max
  Clone ID: PAT_MRT3847_35605C.1
gtactttcttgcgaaaccgaaacagcgaacgggcaaacacaattggctagggaggtgcagaagcatttgagaaggcacagtgcgcgagagcatgggagggatgaccaacagggcagtggagtcg

SEQ ID NO: 71531 - DNA, 795 bp, Glycine max
  Clone ID: PAT_MRT3847_35606C.1
gctagcgctaacgattaggcctcctcttcgttttctccttaaccatgaagaagctctaccgtaaaggaaccgtccacccctctccctcgccgtctccgccaaccatctccgaccacctctccttcctccccgccgccatcctcaccctcactctttccctctcttcggaggacagagaagtccttgcatacctcatctcatgctcatccaacaacaacttttccggcaaccctcgccggaaacctaaggttgtcgcggacggcgatcaccctcctctcttcaactgcagttgcttccggtgctacatgagctactgggtccgctggaactcctctcccaaccaccaactcatacacgaaatcatcgacgccttcgaagactctctcacccacaccgcaaagccttctagaaaggacaagagaaacaagaggggttcaaaacccaagcctcccgagatgactcgctccgagtttccctcttcgccgccggaatcggtgccggagagtagcagtagcggcgctggtgccggcgaggttgaggctggtcaaggcggtgacgatgaggagaaagggtcggtgagaaggtttgttagtttcattggagaaaggatttggggcgcttgggctcagtgaatgaattttcaaggggaaaggtgggtttaacttcaccctttctttctctcttttggttcttctttttttatttatttataaacttttttttttctttttgtacattaatcacttctctgcaatgtataaaaggaaaatggcagtttcgttttttgcgtttcaa

SEQ ID NO: 71532 - DNA, 210 bp, Glycine max
  Clone ID: PAT_MRT3847_35607C.1
ggacaaaggggtgaatatgaaaaatttaaatatagggttatttggcaacttaaatctacttaaaaagggtaggttttctttgataacccaacattaaaagaggggcttcataaaactataatggggaataattttgtttatggagttttaaattataaacttgtgccatactattggaagaatttgggggaaaaaacaatttttggttat

SEQ ID NO: 71533 - DNA, 580 bp, Glycine max
  unsure (1)..(580): unsure at all n locations
  Clone ID: PAT_MRT3847_35608C.1
caggcctancagccttcagcatcgaacaacattctcttctatgaccaccagcacnngggnngggacaccgatataagtcaccatagatatcnnaaatggtgaaggcttatatatataagcactctattgactttgaaagctctaacatggaaggcattccacaaataatagcatgaaaaataaggcatgcctcatgggggtcttccccaaacagaggatatgccatacaatgacagaatgcaagaaagtccagaaaggatgagataaccgagagtaggattgttccaaaagacaataatcactactcagggttccttcttcagtacaaactcaacaagatttaagcattatatttatcatttattctcataaagcnataacagaataataatggtaataaagcaatgcgtccaaaacttttnnnnaaatatgatacgttttagtaaaatatgatattaatagcccccaagaatttggctaacataatttattctttatgcaccacaacattaaatgantcattacatatnnnnataaaanntccctttcctaaaactctactcaattatacaacnaggct

SEQ ID NO: 71534 - DNA, 450 bp, Glycine max
  Clone ID: PAT_MRT3847_35609C.1
ggctcgagactgctatctctccgcgccatttatagacgaacctcacgacaaagatggcgacttgctcttcggtcaaaatggtttgcttcacagaatacaacgggaggcgatattgctataccaacagagccaccacctaaagaggcaaactggaacgcgaccaagatgtagaccggggtacagttcccggactctgcggtacagatctccactaccgcaccgaaaatatggtgacgggacactagggcgcgggtgttattgttgatatcggaacacaagtgacatacatgaaaaagggcgatcgtgtaggccggcgctacctgcacaactgctgcggacactgacactaatggctcaaaggcaatgagacgaactgtacggagcgtgccatgtacgccctggagaacacggaccaatgatgtattgctagacacactgtttggcgagaag

SEQ ID NO: 71535 - DNA, 537 bp, Glycine max
  Clone ID: PAT_MRT3847_3560C.1
ccgtccgcgacggatatgcatgctatgtcatctagtctacgaaacaaggcacagctagtgttatcttgtccgcacctctgcacaacgatactgcatggtaagagaagcctgcgtagacacctctttgcatagtcctgacacttgtcatcactatgctccagaattcattgcaaggcaatgtacacgcagagaaagaggcttggaataatggaaaagagtcatacgtgcacagctgtgtgtgtagaaaaggaagatcttatgagagcatggagagccctctttagatgtgaaggatccacgatccatagtgcgaaaccgtcccgggaagtgtttgcgatgtataacttgccttgcaggtgcctatacatgagattcgataccgccataggggagctctgcaaaacttgctaacaatgatgctgatacgagaactggccttggagggtgtgaaaacttgatctagtgatagtcagtccattggcaccatgagcaaagagctagcgaagatgcaggacgagtaggcacacgcacgcctac

SEQ ID NO: 71536 - DNA, 416 bp, Glycine max
  Clone ID: PAT_MRT3847_35610C.1
acgcttgacttaatagaatgaaaaacacgggcataaagtacaacaagagtacattacaaggcctcagtataaccaaacacacaatgaaacaaacacaataagaaagcccagtctcatcggactacccataggctcacaccctaaactaacaaagcgtataaccaacttcaaaacccaccgacaattgagactccaacgatgatagcagcacagacgatgtaactagaaatgaaacgtccgcaatgctgggcttcgggcatcagcagacatcgagtcagaaagtgcaatgctcgcggatcagagaagcctagcttcggacccaggacggaacgggggctcagagctataacgttgtactatcatggtggatatctgctctgaacaatgaatggctagtaacaggtccatgagccgaa

SEQ ID NO: 71537 - DNA, 203 bp, Glycine max
  Clone ID: PAT_MRT3847_35611C.1
ttggaacataaaaacggccttgcttggtaaacccaaaaagggagactcatgctccaccaccaggttatcctaaaccaaacaactttcaacatatggaccggcacaacatacacgcccctgttctgcttaatactctacccatgacgttgaacacaccctccatccaggcccacagtggttaatacgctctactctatactgga

SEQ ID NO: 71538 - DNA, 1235 bp, Glycine max
  Clone ID: PAT_MRT3847_35612C.1
gacgacagaagggggaagaagagtggaagaacattgcacctgcaacttcaacttcacttctccgttctaacactcgccatgttccttatcaagacatggagacagacggctttcggtgtttttgggtacctgaatttcaccaaagctggcttccttgatcattctaagaaattcaacccagaggacatggaattacgaataccagggaagaattgcattgttactggagctaactctggaattggctatgcaacggctgagggtcttgcaaagcgtggcgcaactgtctatcttgtatgtcgtaataaggagagaggagaggctgctctttctgacattcaaactaaaactggcaatcagaatgtgtatttggagatttgtgacctttcttctgtcaatgagatcaagtcattcgcttccaggttttctaaaaagaatgtgccagttcacgtgttggttaacaatgctggagtacttgagcaaaatcgagttaccacatcagaagggtttgagttgagctttgctgtaaatgtcttaggcacttacaccatgacagaattgatggtaccattactgggaaaagcttcccctgatgcacgtgtcattacagtttcttctggtggaatgtatactactcctttgaccaaagatctacagtattcagagagcaactttaatgggcttgaacagtatgctcgaaacaagcgtgttcaggttgcactaacagaaaagtgggccgaaacttacaagaacaaagggataggattttactcaatgcaccctggttgggctgagactcctggggttgcaaagagtatgccaagcttctctaaatcgctttcagggaagcttagaacaagtgaagaaggtgcagacacagttatctggttgacattacaaccaaaggagaaactggtatcaggtgcattttattttgatagagctgaagcctcgaagcaccttgcatttgctggtaccagtgattctcatgctatgatcgactatgttgttgatagtcttgattccatggcttctccttttgtctaatagtgtacttttaccctgacattaaaccctgaagttgtaaattttaattaatcgtagcacctagttgtgcatcatcaataccaatataacatttctacagttttttttgttgataataacatttccaaagttaatacaataatataactattgttttccaaaaaaaaaaaaaaaaaaaaagcggccgc

SEQ ID NO: 71539 - DNA, 309 bp, Glycine max
  Clone ID: PAT_MRT3847_35613C.1
aactataactaaatttattatttttttttaatcttttataaaaatcttgggtgatacagattcacaattcatatacggattataaatccatatatttattaatagggttaattttgaaaattttgcagaaatgttgggtgtaaagatttttcttccgggagaaaatcccatcagttgggctaaaattggccatggactttaaaaatacacaaagacgaattgtccactcccattttataaaaaaaaaaaaaaaaaaaaaaaaaaaaaaaaaaaaaaaaaaaaaaaaaaaaaaaaaaaaaaaaaaaaaat

SEQ ID NO: 71540 - DNA, 264 bp, Glycine max
  Clone ID: PAT_MRT3847_35614C.1
aatgcaacagtccaggccaagatgggaacaaattttggtggcatgtacggttcaagctcagtactcacaacaagtcatcatgggagtgaggcagagaataataataataattattcaggtgatttgtcacaaataccccctacaaaaagacggcacgtacagaatgaggagagtgcatggggacaaactagggactttcttggtgttggtggtgccaaccatttgccacccttcatcaaccaacggatggatttgatttgatat

SEQ ID NO: 71541 - DNA, 683 bp, Glycine max
  unsure (1)..(683): unsure at all n locations
  Clone ID: PAT_MRT3847_35615C.1
aattcggctcgagaaaaaaaaccaggaaaataagaaaacaaaatacaaagaaagatttggaaagagaaaaaatggcaacaaatattctctcaacctcaaaccccttcctactaactaattcattctcatcatcatcatttgtaacaccaacatatgtttactacaatcccataatgaaatgcacagtgaagagggaattaactctttgcaaagcagcaaaccaaccagcccctccacactctccaattgttgtgacaaagagaggcttgtccatcagcttcatcaccagcttcgtgctttcattggctagtaagaagaatgcaaatgcagcaatacttgaggctgatgatgatgaagaactcttggagaaagtaaagcgtgacagaaagaagagacttgagaagcaaggtgtgatcagttcttccaaacaagaaacagggtatcttcaagatctggtgtacaagctaagcacggttggtcaagcacttgaaaagaatgatctatctgctgctggctctgtccttggaggaaacgcggacgcagattgggtccaaagggctaatatagccttcaataaactgagctccagtcctgaagagaagactgaggtagactcattcaactcctcattagcttcactaatttcatcagtttctaagaatgatngttgagtcctccaaaat

SEQ ID NO: 71542 - DNA, 1337 bp, Glycine max
  unsure (1)..(1337): unsure at all n locations
  Clone ID: PAT_MRT3847_35616C.1
gggcgtaggacttgaatacggctgcgagaagcgacagaaggggaagaaaataaaatacagagaaagattggaaagagaaatggcaaaaaatattctctcaacctcaaaccccatcctactacctagttcatcaccatcctcatcctcatcatcatttgtaaaaccaatacatgtttgctccaatccgataatcaaaagcacttcgaagagggaattaactctttgcaaagcaacaccacactctccaattgttgtgacaaagagaggcttgtccatcagcttcatcaccagctttgtgctttcattggctggtaagaagaatgcaaatgcagcaatactcgaggcagatgatgatgaagaactcttggagaaagtaaagcgtgacagaaagaagagacttgagaagcaaggtgtgatcagttcttccaaacaagaaacagggtatcttcaagatctggtgtacaagctaagcgcagttggtcaagcacttgaaaagaatgatctatctgctgctggttctgtccttggaggaagcaccgatgcagattgggtccaaagagctaatatagcattcaataaactgagctccagttcagaagagaagactgaggtggacgcattcaattcctcattagcttcactaatttcatcagtttctaagaaagatgttgagtcctccaaaattgactttgtcttttcggccactgcatttgcgaagatggcttcaaatcatagaacaagatgaattatataaggagatttgttgaaaagaattgacatcattgatagataattttcaaaataatataataaatatagtaaaattttttaataataaaagtcttattatatgatgaattccatgtaatcagatgtaatatattaatagctattgcatattcaaaaaaatcaattttatttagtcttactagctaatgatgccattccagcgctgcaagccatttaattgagttccaaagcttacattgaaagtccgcacatctgttggcctaatcgaagggcgaaatgcattgttttggctctcataatgtggcagaacaaggtcacgtttggttcctgaatatgagtgaaatcacagtattcattcggaattatactgtaattaaatcttttatcctgaattcttggaataaaaaataaaaaagcctactctagnattatggtgatggccatagctactaggttcgctcagaaactatatgaaccatgaaaaattacctgtgtaccagtgtatttgcagtgtaaaaaagctgttaacatcatcataatttcaggaaatgacaaactatgtaccaatcactctattaatcagctga

SEQ ID NO: 71543 - DNA, 2457 bp, Glycine max
  Clone ID: PAT_MRT3847_35617C.1
tgaggagataaattcaagggattccacattttccgtcacgccaaacactcctttgtaagcccatcgataaactaaagcgaatttggacagaagaaaaagactacaatgccaatataaacataaagaaaaagcaagttaatttgtaaaataggcacgtacagttcgggttcggggttccaacctttctgcttcaaccaactcgttaagttgaaagttttagtttaagggtattgatatttaagttccaggcataaaacttgttacagaatatgcacaaatttgtaaagcaactatctagaaacatgagaacatgagaatcagctcacctagcctacgaataggatgtccagctgatggaaaactttgatggtgtgtctctgtctgtcttacctccttacaaaatcaggctgattggtgacagatctcacccacgaccatttatgatcttgggtatcaaccgggttatttgcacgtgccacatcttccaaaggaatgtatgcatagtttccattaataggaccagcaacaaagccagtgtaccctgccataacaccatgaattgcagaatgtgcgaggagtgtacagtacaagttatcagtggcatttgcatgaactgcacgaatcatgtaagtaggatcaatgtacttgactgtaaacaactcattggggtgttcccttttccaccacttgttcagctctgacttcaaccacacaccaacatctaagaagactgggttcccagattcatccctttcgtccttctgtgaatcggttctgggtattatgtcctggccagcaccctcagcaacaacaagcacggcatgtccattttccttgagtcgctggccgagaaactccaagaggccccctttcccttccaagaagaaatctatttcggggataaggcagcaatcgacgtcgcggctgctgagcgttgcatgaagagcaatgtggcctgtgcttcgacccatcaacttcacgaggcctatgccgttcactgcactctccgcctccacgtgtgcagcactgattgcttcctgagccatttcaactgctgtttggaatccaaaagacctgtcgattattcccacgtcattgtccacagttttaggaattccaacaactgcaacttccagtttccgatgctttatttcgtcaaatatcttcactgctcctcgcatagtcccatctccacctataatgtacacctgattgaaggcgtgagtttggatggcatcgacgatgttatgaaggtcgaaaccgcccctggatgtctgaaggagggtgccaccgacgttgtgccaatgatgaacgagtttgggattgagggggagtgggacagaggagtaaaaccccctgtagccggcggtgatgccgaaaatatgacggacgccatagagttgccacaggcccacgacaagctctcggatgacggtgttaaggccgggacagagacccccgcaggtgacaatggcaacgcgaacaatggaagggtcaaagtagatgtttttgcgtggaccagcgcggtggtaggcgaagcggggagagggagagagatcgttgccgatctggcggagtaggacgtcggattctgtaaggtagaagccctgttgttgttgtagttggcgggtgtcaaagtaggggttgtgatccagtgggttggggcggctttggaggttggggacatactgcctcagctcagccacctccttcaggtatatgggtttgaacaagttcgatatacactctgcttcttctgatgccatcactctcgcattcacagcacaaaacttcttctgaatgtccctttgtatttgtatttcaataaaccagccgagtacgtggcgctccctgccttctgggtttgacacgcttcaccaacatcacattttgtgcgccactttttacacacctggaagagtgagtggcaccaataccaggcctaccgtgcttgacgggtttgtatgaaatagagaactcagcgagataatgtccaatcatctcgggtttgatttcaacctggttgaaggtcttgccattgtagactccaatgatgctaccaatcatctcaggcacaataatcatgttgcggagatgggtgcgaactggttctggcttctcacctgctggtgcttcccttttcgctttgcggagctttttaatcaaggccatgggctttctggtgagacctctctggaaccttctgcgtgcgcgagcactgaacatcttcacgagttcgtcagtggacatgtccagaagcgcgtccagatccacccccctgaagctgaacttcttgaacgttctcttctttggctgccctgcagccgccgccgccgccgccgccgccacatcaacctcaacgtctgccattctcgccggctgctagggttttggcttccaacaacaacaacaaacaagagaaggcagtggcagcgaaataacctcaggctctttctt

SEQ ID NO: 71544 - DNA, 236 bp, Glycine max
  Clone ID: PAT_MRT3847_35618C.1
ggttcgaggcggctcaatccatgagggagtttttttctctgcaatacccaattgagcatggcagagggaacacttgggaggacacggagaatatctgccatcacactaactataacgagctgcgtgcggcctcagaagagcaccctgtactcctcacagacgctcccactgaaccccaaggcccaaccgagagaaaatgacacagataatgtgtggacctaaacactccggctatg

SEQ ID NO: 71545 - DNA, 809 bp, Glycine max
  Clone ID: PAT_MRT3847_35619C.1
tcccggaatccagcggggccagtcatccaaataagtttgcattcatccattaacgcattcacaaacccaagtagaaaaaagactacttggacaaatattgatgcataaatctcccatgcttaaaatgaacaagttatcgaagttgacaaaatcaaaaactaaataaaatgttgatactatggaatcaagtcatgatagacagacaagtgaaaaataaaatgcttaaataaaaagaaaatctgacaagagtttcggtaaggctttcacttgagaggaatgaacctggaagagtgagtggcaccaataccaggcctaccatgcttgacgggtttatatgaaatagagaactcagcgagataatggccaatcatctcgggtttgatttcaacctgattgaaagtcttgccgttgtagactccaatgatgctaccaatcatctcaggcacaataatcatgttgcggagatgggtgcgcactggttctggcttctcacctgctggtgcttcccttttagctttgcggagcttcttaatcaaggccatgggcttcctcgtcagacctctctggaaccttctacgtgcacgcgcactgaacatcttcaccagttcgtcggtggacatgtccagaagcgcgtccagatccacgcccctgaagctgaatttcttgaacgttctcttcttcggctgcgctgcccctgccgctgccgccgcatcaacctcaacgtctgccattctcgccggctgctagggttttggcttcgaacaacaaaatgaacaaatagaaagcactcgagactagttctctctctc

SEQ ID NO: 71546 - DNA, 282 bp, Glycine max
  Clone ID: PAT_MRT3847_3561C.1
ggctcgaggataccatgggatatgctatgctaatgactgttatacgaatgtcgatccttgagacgtggtataagaatccaatgacatagataagtgacctgaggggctacaccgaaggttcagatgttcctccagagcgatgaatgatgcaccacgacatggtaatagtggactgttggcgcgatccatagtccactaagatttcgatattgccggggtccctgctctaggcgaagccgaccacagtgaaaaggcccgtaagggatccgagcctggcagggc

SEQ ID NO: 71547 - DNA, 552 bp, Glycine max
  Clone ID: PAT_MRT3847_35620C.1
ggctcgagagaagttgttgcacatcacataattacacttatctataatcatcattcatcaatactggtaatgagtcatcacgaacttccagtatatctggatcaattagacgtcaggcaagttttgacagaattagttcttgttggcaattagatcatttagttaacgcttgcatgctaagttttttctgtcttgagaagccacataatgaacaatgcaccttcattgaacattgaattaattacatggctcttgtttgataaagtccatatatctatatgctttttagcttgaggcaactttttttttagttatttcttaatccaaaattagtttttccttatattttagatgagtatgaagctatcagttgctgatggtcatctctgtaacatgggaaggatgattgaagaaatggagagtaagctgatgaactcactagatcatgtatactttggcaaaacatgataaatggtttgcacactgagaccaccatctaaatggcacagatgagaatggctgatagcgcctgataactgacctgtcgttact

SEQ ID NO: 71548 - DNA, 225 bp, Glycine max
  unsure (1)..(225): unsure at all n locations
  Clone ID: PAT_MRT3847_35621C.1
aaacgcccttgtcgaccacacctaaatttatttcatatataagcattttttcacaatgtggggtgaaatatggataatagttcattttgaagtcatattttctcacttgattaaaggctgncgtcccttgtgacggatgcgttgtgtgctgataccttccctgtgcgtaaaaacatctttctatctattcatacttaaatgtcgtataccacaccgtgtcaattt

SEQ ID NO: 71549 - DNA, 673 bp, Glycine max
  unsure (1)..(673): unsure at all n locations
  Clone ID: PAT_MRT3847_35622C.1
gaacaaaaccgcaacatttctctcttctaaaagttgagtatgaattcttctttattagaaaacaatgaatatattgacagtgaaaaaatatatttttattcaattataatttataattttattatttttataataattattttaaaaattatattaatcatgatttttgattagttaaccatataattttttatattggcgagatacataaaagttaaattttttgtgtgtgtaatatttgagtgtgtgcaaacattagcatccacaaggagttgggcatagtcacaaaagtagtttgagatggttgaatatttttttactggttttaattttagtgtgcgaaatatatttctaaaagagaaaagagaaaaaatattgaaaatatttaattggaagaatgaaatgataaatcatnaagttatgcatattctaatttataattntataataaaaaatggaaaagttgaaagggtgttcaaatgtagttctaactgctttgaatttgcacaatatacaatttttaaaaaaaattaacgatttttttagaacaaaaatcacaaggaactcttgataaagtatctattgtnatttgatttttgtcatgggcttgaagaaagatctcatggcgttcaacagcgccttgtttgggggactggcctacctattttttttg

SEQ ID NO: 71550 - DNA, 370 bp, Glycine max
  Clone ID: PAT_MRT3847_35623C.1
cccacgcgaccgcccacgcgcccgaaataataaaaaaacaaaaacaaaaaaaaaaaaaggggggaaaaaaaaaaaaaaaggagaaaccaaccaaagggcggccccacaaaaggacccaaccgaacgaacccgggcaagccacgcaaaagcccaaaaaaaggggcaccaaaaaccaaagcacgggccgacgtgcaacaacgacgggacgggaaaaacccgggcccaacccaactaaaacgccaggcaaaacaaccccccatcgccagcgggcgaaaaagcaaaaaggcccgcaccgaacgcccaaccaaacaggggcccagccagaaaggcgaaggggccgccccccgaaacggcccaaaaagcccgccgg

SEQ ID NO: 71551 - DNA, 214 bp, Glycine max
  unsure (1)..(214): unsure at all n locations
  Clone ID: PAT_MRT3847_35624C.1
aacaaagcttccgatgctgctgtccnacaggcccagtccagacatcgagacgattgctccaccgaactctgttcctgcatctccgaatgagggaactgaagcatgacgagttcgtgtccatgtgttacctctggacgagttgcagatattgttgacaagggatcgacatcacgtggtgcaagtggggctcatgatacgctgatctgctgtgtca

SEQ ID NO: 71552 - DNA, 684 bp, Glycine max
  Clone ID: PAT_MRT3847_35625C.1
ccggaaccggaactcccgggtcgaccccgcgtccggcagcgtaagccagaaagacaagaggtgtcactccaccggagcaaaggaacacataacataacccacttctccttttctctctctctctctctcactatagggtttctgttagggttccgctctgttaagccaagctggatagacacagaggagaacgttacaacaacaacaatgattttcacaacaacaataataactatcgtcactccaacagggggggcaacaactctcactcgcgcttctctgattctcccatgagctaccacaacgcgcgccagagccccgggggattccgctccggcgctgctccgcaccaccgcgccttcgatagtcccccgcatcgctctcccggcaggggcggaggattccggccgatgggcgccgagggtcccgcggaattcggattcaacggccaccaggcgccaccgccgctcgctggccagaaacgagggtttcctttctccggacgcggtggtggttcgcccgatcgtttagatggtggaagttgtgccaaactagtgtgtcggatctgttccccgaacagcctctgaagaagatattcgccctctgcttgacgaacatgggaacgtgactgaggctgccctcatcacagataaacagacaggacagcatcaacgcatctgctat

SEQ ID NO: 71553 - DNA, 370 bp, Glycine max
  unsure (1)..(370): unsure at all n locations
  Clone ID: PAT_MRT3847_35626C.1
gtgaggcccantaaacggtgttgatgtaagtaattgttcccgactcacttacacgtggcgcaggaaatgccatgccaacatagaatagaatagagggggaatttgttattcacgaaatcaccactctctcaaatcaaaccttccctcccccctctttctgctcttaaacattgtcccttattttctccctgccttcagtacatgcaggagctttgactatacaatgcatgtaggaggtttgaagaagaccaagtaacctggaagaagctttgacatacattcaggtaaaatgagagacagcacattgctaaactgtcaccaaaataatgtcagagcagtcgcaggtgcaccttcagttgagaaagatttt

SEQ ID NO: 71554 - DNA, 433 bp, Glycine max
  Clone ID: PAT_MRT3847_35627C.1
ccaataaccgtgggaccaacctttgggaaaaaggaaaaaggggtaaaaatccaaatggttttttttaacccaaacaatccttaggttttggtgggggcctggagggagggccccagggccccaaaaagcatatttttggaacctaaaattggctggggggaaacctttcctttgttgggacccatccttttatgataggaccctggttaacaacccggaggtccaggacctggggtctcccttcagggcccacgggctaaacccagccccgggggcccgttgggaaacaatccatcctttttgcaaattaaaaaaatccccccatccaacaaaaagacccacccctccctccccccaaaaaaaaaaaaaccctggcgggaacccccttattaaatgggggccgggaaaaaaaaaaaaccccaaaaaattttcc

SEQ ID NO: 71555 - DNA, 780 bp, Glycine max
  unsure (1)..(780): unsure at all n locations
  Clone ID: PAT_MRT3847_35628C.1
cttgatgcctgcagccggaccagttctgggacgagcggatgaaggacacccgcatcgtccgcaacggcgccaagatcatgtcggtgcgcgcaatgccggcttcgtccgcgacgtcgcgaaagaacatggcagcttcggccagttcctcgcgggatggccgtcgtccgacgagatcgggctgctcgatctgctggcgaagcgcggcagccggctcggcggcaataccgggcagatgttgctgcgcttcctcggctgggacggcttcgtcacctcgcgcgacgtcgtgctgtgcctgcgcgatgccggactcgacatcaccgagacggtgacctccaagcgcgaccttgcgaaggtgcaggcgcagttcaacgcatgggcggaggagaccgggcttgcttacgtgcagatttcccggatctgcgcgctgtcgatcggggagaattactcgatcgagaaactggagcgcatgatgggcggcgaggattgatgtagtcgtccctgcgaacgcagccacgactggcgatcgaaacgcggtcccgtgggcaaagcgccgccgaagctcgaagagcgcagcgnaaagcgtgcccaccatctcgccgcttgcttgctcggcgacggatggtgggcacgtggcttgtgctcctttgcccaccctacgacgcctcgttntgccgcaggcgccattcaaatcacgaagaacccgtgccgtgccgtcgcgccgcagctgttcgacgagaccgtattcccaatcaagataggcctgcatcgcgcgttccctga

SEQ ID NO: 71556 - DNA, 349 bp, Glycine max
  Clone ID: PAT_MRT3847_35629C.1
aaatattttctttttttgtattagttacagcctggttagattcatctcgctcttgcattttagaatgcaaagctgcaatcacttgccatttttttccataaccaacgaaatcctttcaacggcgcgttgttatcagattgtggagcgcaattttatattttagcaggatcaattgcatgacttattgcatgtttatttttcggttgtaaacagatacttggagcaaaatgaagtttgcgaaaacattcagttcttttcttttgcaaaattgaatttgtgatccattaaatttaattcggaatttatgtatcacatcttgaactgaaatttaaataaaaaaaaaaaaaaa

SEQ ID NO: 71557 - DNA, 745 bp, Glycine max
  Clone ID: PAT_MRT3847_3562C.1
agttgttagaatgcattgattttgaagcagacacagaagtggtaggtctcacgtctcatcataaggtcgaaaactccattgaaacaagtcttccacataattccaatttgccagaagaaccaatggtgtcaacgaaaaaggaagcaacatgttatgcaacaaggcgttacagaggtgtgaggagaaggccatgggggaagtttgcggcagagattcgcgaccccaaaaagaaagggagcagggtgtggcttggcacatttgacactgagattgatgctgctaaggcttatgattgtgctgccttcagaatgaggggtcacaaagccgtgttgaatttccctctggaggctggaatgtctcatccagagcccaacagtagtggcaggaaaaggagaagagattatacaacagctgtcacaagttcaagtcatgtcatgtcatgagaaataattcagtgtgggataaccatgtttttcttttggcattttttgtcagttacataagttaatgcaaggttttatagttctactacagttgagcgtgatgaggtctgttatttatatccttgacttatgattaagggaagcaaatggggtgaaattgaattaaaccaagaattaaacagttcataaagaaacctagttctacttttttatttaaagctctcaaagtagaatgtgtgatagtcagttagtcacgactcaccttagtcattatataattagaaaaattctcattgtatctt

SEQ ID NO: 71558 - DNA, 317 bp, Glycine max
  Clone ID: PAT_MRT3847_35630C.1
cattaacgacttattccattgatgcagttaccgcatgctgatcagccgtccctatgtcagcagattgatacaaccagctggctacgtccattgtcgtgcacaactcacatgcctgcctatgtggccacacccatgacgttctagagtttaacaacccacctaacttccaatggtaactctacggttctatgcacgactgtttccgtttgactctataacacgcctggtgcacaagatcattattggagagttctggagccgggaacgggcgatctcccacttccctaagcacgtagtccatggtgaaatactgcgag

SEQ ID NO: 71559 - DNA, 314 bp, Glycine max
  unsure (1)..(314): unsure at all n locations
  Clone ID: PAT_MRT3847_35631C.1
tattgtttcaggataactaggaaggaagcttgaatccacccaagatttccttgagcttgcaagtcaaggaaaatactggcaaggctttggtcagtactaattttgctttatttaactaacttggatctttgtaattatatattgattcttagatagataggagatctattttttgaaatacgagtgtttcaattcagccaccagaaatatttatttttattttgaatatgacttgaaaaaaatctgcatattgtttattttttaatatgtggatttgacttggttaanaanaaaaaaaaaaaaaaaaanaaacc

SEQ ID NO: 71560 - DNA, 452 bp, Glycine max
  Clone ID: PAT_MRT3847_35632C.1
tacggctgcgagaagacgacagaagggatactaagaacaaaaacatttggaacacactcttcataaactcagtcacttatgctctcattctactggtgctggtgctggtgctggtgctggaattagcgttatcgtcagtactaatgttggtcgtgatgctggtgctcattctagtgctaatggtagtactggtgctggtacttcacatagcattcacatttttattttgattaaaccaatccttttgaacttgttatcacgttaaatgacttattgcccgaagccccaatcttaacctgatattgattagtttttgttcagtgttcacttctcaacttttgttaactgatttgttgtgatttgcgatctttcgctctttaatttgtgagaatgttggctgtttaatttattaccattggttattttcaggccccatattaaaaaagtatcct

SEQ ID NO: 71561 - DNA, 316 bp, Glycine max
  unsure (1)..(316): unsure at all n locations
  Clone ID: PAT_MRT3847_35633C.1
tcgcangcacgcgtacgtaagctcggaattcggctcgagcgttcatagcgacgttgcnacangcnagttanccctgtncntaactntnctnanacctactagcttcntcattccgnangactaaaggatacgntaggtnncagaaaagttacnanagggnnaactggcttgtagnagccaagcgttacatnacnacgtgagcnttgtgatccancgaatgtcggctnttcacntcantgangagcantcncaccatagnccatcattgttcanctgacaancnggaacgngaatnagngtacantgtcatnagacn

SEQ ID NO: 71562 - DNA, 185 bp, Glycine max
  unsure (1)..(185): unsure at all n locations
  Clone ID: PAT_MRT3847_35634C.1
tatgcgtttctctgtcctttattcttcaatccacagcaaagttagagacgagagagagagagagaaagggaaagaaacctaatacgataccgtttttctcaggaatcacactgctcncacccagttcacccagttcccattctctgtgaattacgagggttttcgaaatcgaagagtctctgatc

SEQ ID NO: 71563 - DNA, 329 bp, Glycine max
  unsure (1)..(329): unsure at all n locations
  Clone ID: PAT_MRT3847_35635C.1
agatgaagatgaaaaggaangaaaggaagggaaggaggtggtgtngttgggggtgttgaaatggtgaagntgtggaggaggatgggntaaggngtngaggtatgtggaaaagggnggaaagtttgtgaagnnaaaggtgagnnnangggttattnantagtnaaggtagaaggaangnggtttattgtnaaaaagttatagntgtgtanataagggnaaatgaattaagaggtttgtttntttaaattttagagattttaattttggtgttgagttgttggtgtgatattttggataaagataaagggaggttgtttgttaatgataat

SEQ ID NO: 71564 - DNA, 579 bp, Glycine max
  Clone ID: PAT_MRT3847_35636C.1
ccacgcgtccgcccacgcgtccgcggacgcgtgggcggcgacgagaagtggcgagccccgagagcgggtttagttagaggctacgggcggtcgggcgcggcggcggcggcggccatgagcagcgggagcgagagcactaccgccagcaggtggctcgagctggccacgctgcgcgcgctggcgcgcgacgccgcggagcagcttcggctgccgcgggccggcacgtcggcgtcggcgtagtcgtcgtcgccgtggcgcgggcgcgaggaccaccttcacgggcacggaaagacggccaaggtgatgcacctgctgctttggggaccaaagtgaaacggcggcaaaaggccaccgaaccgccgggctctcccgccggcgttgctggttttgctctgcctgcaatccgccccgcacggactgtactgtacctatacacctatatactacgacgtgcacctgtactacgacgtgctgctgtaccatactaatactagtgcgctgctgctcccttgccttcttgcttgcaccagccactcccgctttttttgctcgaacgatcgactgctcgtgtcgcgtcgg

SEQ ID NO: 71565 - DNA, 1732 bp, Glycine max
  Clone ID: PAT_MRT3847_35637C.1
aaccttctccaaagtctctctgctcttgttggtgtcactttctttctcctatgcaacttctggcttcaaccatgagcatgcttacccaccacaatcacaagcagagatgctcacaagaaaccttaacctattcccaaaggacccagttaacattattaaaggtgattttgatagttttgtaccaggaaagatagtggagaagaagttctcgcttcttggtcattctgggccttctattcaacaccttggtcaccatgctggccaatattcccttcctcattccaaagctggctcaaggttctactttttctttgaatcacggaacaataaggatgatcctgtagtgatatggttgactggaggaccagggtgtggaagtgaattagctttgttttatgagaatggtccttttcatattgccaataacttgtctcttacatggaatgattacggctgggaccaggcatcaaatattttatttgttgaccaacccactgggacagggtttagttactcttctgatgatagtgacattcgtcatgatgaagccagcattagcaacgatttatatgacttcttgcaggagtttttcaaggctcatcctaagttcgttaagaatgacttttatattaccggagaatcatacgctggacactatattccggctcatgcatcccggataatccaaggaaataaagaaaatcaaggaatttatataaatctcaagggtttagccattggtaatggggcaacaaatcctgcaattcaataccaagcatatccagattttgcatttagacaacaaaataattacaaaggctaattacgatgaaatcaacaagttaatcccagattgtgaacaagccgctaatacttgtgaaactcaaggtggacaaagttgcgcgatcgcatttaatacttgccaaaaaatattctaccatatcctggactttgctcccggcattaactactatgacatcagaaaaaaaatgtaagggagattggtgctatgactttcgaaacgtggagactctgttaaacctaccgaaagtaaagagtgttataggggtgtcaaatgacttgcagtatgtttcatgcagtaaaagagtgcatgaggctatgatgcaagactatatgagaaacatggaagtggagattccttctcttcttgaggacggaatcaagttgcttgtgtatgtaggggaagaagatctcatatgcaattggcttgggaattcaaggtgggtacatgcaatgaagtggtcaggcaaaaaggcctttggaaaatctcctacagtgaaatttgtggttgatggttcaaaagcagggtctcttaatagctatggacctctttctttcctcaaggtacatgaggctggacacttggtccctatggatcaaccaaaagctgcacttcagatgttgcaaagttggatggcagggaaactgacataaacaaaaggattgagataattaatgtcgctcaaaattttatacattcacctcaaaaccaaaaccagacatcctctgaacatggatagtgatcataattatttgggctacatgactttggtttgtttttggagggtggagtttatatttttttctaaacctttctgaaattcctgatatttatactcaagttaacggtttgtgcaatgttccccccttctgtatttacttcaaataagaaaatgtcaataaacaattacccatagtaagcattatcccc

SEQ ID NO: 71566 - DNA, 271 bp, Glycine max
  Clone ID: PAT_MRT3847_35638C.1
gcgaaacccacgaacttataaggtgccattactattgagggctatagagcaaatccaagccggaaaagacaaacaaaatatttttgcctaccagcagcactggggtggaataatttttcatttacggaacctgcctcacatgaattttcatatgctcagctaaatatttggtgctccaaggattccactttgcccactgcttagagactccaaaaccagtccatgttttacacccacgctttttcaatcagagaaatcccatgttggatga

SEQ ID NO: 71567 - DNA, 616 bp, Glycine max
  unsure (1)..(616): unsure at all n locations
  Clone ID: PAT_MRT3847_35639C.1
cttgcagcaagtccttgttttgcatggaggcatggaggagcccatgcaagactacttttctatggagggaaagcagcttacgtgtctagcatggaacaatatggggaatgtgctgattactggaagtataacggggaacatcgagttcattgacgtgattcgcccagagcggatacaccggtgcaacctggtttcctgcagcggctccgcacgtatcgaaggtggtaatttatcagccatctgcttgtcccccgatggaacgtcgatgttgagtgttcatgaaaatggcagtgttgtgatggaatggtctgtcacgccaattatggttgctgtcacctctcagactgatgcgtctagcgatgtgagaggaagcataatagatgtgaagccaacactgatgtgtacgtacgagatggacaagccgttggcctcccgtgacgctgaggtagacacttcgatacgctttgttggagcgggtgatcattttgtagctgctgattctgctgctcttcacgtcttcaagcgtggcgaggaacgtgctatgttgactnttgtaccaaatcaagctactattgcggatttagattgtcacccaaatctacctgttagatgctct

SEQ ID NO: 71568 - DNA, 307 bp, Glycine max
  unsure (1)..(307): unsure at all n locations
  Clone ID: PAT_MRT3847_3563C.1
nnccnccntncgtncgtaagctcggnattcggctcgagtntngttcnggccaccaccgncnatgnnnttcgngngatagantggncgnncccnttaanacggccgcgggcacgtcnanntncatccggtgttcctactgtnggtaangggtgtcccaaggncnnggccatcaagaggtttctggngnggnatcngtcgaacaggttgcgncagagatgtgtagggancntttntctatgnagaanatcctcttcccnttctntttttggngattgcagtactgtgtttctttttgctatccactctc

SEQ ID NO: 71569 - DNA, 393 bp, Glycine max
  Clone ID: PAT_MRT3847_35640C.1
gactgcaactttgcacactgtgaggcatcaaattccaattaaggttacgcttaaaataaccaatcaacatgggagtcctcatctttgtcgcccgcacatccggcatcaaaaggcgcgccaagcaacattccggtcacatcgaagactccgccgagtccaccttccatctccaacggaagctcgtacaagccgctctcgccgttaaatcctccggtggacttcactcctctttctcacccgtgtcccctacctccacatgtgttcgacgtgacatcgggatccttcgtattcgatggaggtggtagtagtgctatagcaactgcacttgcaggtggcgcagccgcatctgacgatgcaccagctgctgacaaaaatgaacaaaacgtggatgaa

SEQ ID NO: 71570 - DNA, 136 bp, Glycine max
  Clone ID: PAT_MRT3847_35641C.1
atggctactatcactagacttcgaccaataggggaaagatatgccttggtctcattgaagatgaatgcaatactgaagaatatctccatcaatttcaagtttgatggttacaaatattacattcataagcatcagg

SEQ ID NO: 71571 - DNA, 1286 bp, Glycine max
  unsure (1)..(1286): unsure at all n locations
  Clone ID: PAT_MRT3847_35642C.1
gcaccacgctttctgacattattcactcacttcccccctcttcattttgtagtcctcctttacctgcaaaaaacagcagatggctcagcttaacctcatacttatctggttatttttattgagtctgtgcctttattcatgtcctacttcggcccagttaagtagacaccactatgcaaaaacatgccccaatgttgaaaacattgtcagagaagcagtcaaaaagaagtttcatcaaacatttgttacggttcctgctaccattcgtctcttcttccatgattgcttcgtgcagggttgtgatgcctcggttttggttgcatccacaaaaaacaacaaagcagagaaggatcacccagataatgtttcactagctggagatggatttgacacagtgattaaagcaaaagaagcagttgatgcagttccattgtgcaggaacaaagtttcatgtgctgatattttagccttggcaacccgtgatgttattgaactggccggtgggcctttctacgaggttgaattgggaagatttgatgggctaagatctaaagattcagatgtaaacgggaggctgcctcatccagagttcaacttgaaccagctcaattcactgtttgcggccaacggtctcacccaaacggaaatgatagctctatcaggtgctcacactgttggattctcccattgcaacaaattcacgaacagagtatacaatttcaagagcaaaagtcgagtggaccctacactgaacgagaaatacgcaacacagctaaagtcaatgtgcccaaggaatgtggatccaaggattgcaatcgatatggacccaagcactccacggtcattcgacaatgtttatttcaagaatcttcagcaagggaagggcctcttctcttcagaccaagttctcttcacggactcaagatccaaggccactgtaaatgcatttgctagtagcagcaaaatcttccatgccaacttcgccgctgctatgaccaaattgggccgagttggaatcaagaatgcacagaatggaaacattcgcaccgattgttcagtcatttaatttaagaagggacaacagattattatcaagtcaggggaattcgttatttatattagttaccctgtgtttaaaataataagtactgaaagtatttaatttctcaattgccatgattcctctgttttgttttctcataaattcttccctttagattatccacttgtaactacttggttaactacatcaaacactttaaaagtaacaaaaatcgtgttgnaaa

SEQ ID NO: 71572 - DNA, 365 bp, Glycine max
  Clone ID: PAT_MRT3847_35643C.1
ggctcgaggttaaaacaacaactatgttatgagaaaatggatagatgctgacaatattgcgcctccatggacagagaacaagagggagaatacttaaacagcaaaaaaacagatgggatccttctatcttcactccatcggatatggcattcctagatcgtggatacacctgtatgatggaagctttacatacaagggattttgcctacaccttactatgagtggtcttaaacaaacaaggacttcacagtgtactaaaactttgtacaatgcatttcgaacttttgcgaatatattacagtgaatggacccttggaaggcttccttggcttctcacagggagcagctatgtcatcccttttgat

SEQ ID NO: 71573 - DNA, 702 bp, Glycine max
  Clone ID: PAT_MRT3847_35644C.1
gttttatccgggttgagtttgacacagtgacacgtccgaggatagtgaatatataaatcgaaagttctagatagttgtcttttgactctttcttttctttctaacaagcaccgcctccactaatggctatgagatcgtgggtgagtcgaggatccgtgactcgtttgatggactcagcaaatcgaggggctttcagtcgcttcttcagcgacaagggtcgcgttctcagcgaggaggaacaggccaaagaaaacgtctacatccagaaatgggagagggagaggttggagaaacagaagcaacaggctgagaagaccaaggcagacaagggcaaagatgctgctgctgataagaaacctgaaggttctcaaaagggctgagtttatccttcacacaacccggcaaggtcactttgtgggaaataagcatgatggagaataaaacacattgacccttagtgaactttggtctttgtatagattgtgtttcttgtttatttgtagtttcttgacggatgaaaccaggtcattgcatccaccaaacttggtacctttattatgaacttgtcatgtaatcccttccagtaattgttcacttttgtgagttgtcggtgccaaaactaatcagtatgtttcgattaaggaaaaaatgggaaagttaatataagtttcgtcgtggatgaattcagtttaggaaaaaaaa

SEQ ID NO: 71574 - DNA, 445 bp, Glycine max
  Clone ID: PAT_MRT3847_35645C.1
ataatgacaagaaactcatcggggttttttaaaaaccaaatggaacttcttgcacttccattttaaatatctataaataactgtcccctttcaaaagataaaaaggcccctaaaagccaataagaacagggcttccttttaaaaaattccagtgcgaagatttgccccagagaaaatagctgctccattgatggcacattgcacaacctgctcatgaatggagccttccaatgtaagttcaagggtcgccccattgattgctcacgcaactgcccttttttttcattcatgagctccacgagctttttttagcccatttgtgacacctgaatacaatcctccaccctctccccacttttaggacttttttcccgctctcttaaccatggccttaatagattttttcctggcctttcctttaaaaccttttaaacgaatttttttt

SEQ ID NO: 71575 - DNA, 308 bp, Glycine max
  Clone ID: PAT_MRT3847_35646C.1
ttttacttacccctttaattgagatgccccagagggggttctattagataatccgccgcaatgaactagttaaaagctcctctcttccgttcttcccaaataccggtcttggacaaacatcttatcggcgatatcctccaaaagagagggcaagtaaccccagaaaacccgaaaccattaatacgtaacacgaatgtaacaatctaacgccctaacaggacaggaacgtacagctcaacctctttccccagaaccacccagccccgatggctcctacccattaaaaaaactcctcaggtctcaaaggc

SEQ ID NO: 71576 - DNA, 162 bp, Glycine max
  Clone ID: PAT_MRT3847_35647C.1
aaacaccatcttattcttcatcattaattcactcctctaagctatttccttcttccacatctctctcatatctacaacaaactcatttacttcattcaaaatcaatacatctacaaaatctatcaataactcatatcaccaaaagtatataacatttatcta

SEQ ID NO: 71577 - DNA, 414 bp, Glycine max
  unsure (1)..(414): unsure at all n locations
  Clone ID: PAT_MRT3847_35648C.1
gcntgggggagggaaggaactaaatttttaaggacattaatgaaacatgggtaagggtttacaaaaataaggaaccttcctccctcccttttcctataaaaatattttttcccatcctatcgaataactaaattttattctttacaaaccctccaaaacaaacaaattgaattaccccctttggaaaaaatactttaactttccttaaaaggggaacctactgccttacaggtctccaataaacccttgggttcaccaacatttatgccttgggtgaatgtcaccctttcctgacaaacaaagctaaacaaaaactgagtgcaggatgctgctcccctaaaataatagcggtttacaaagtagcatgggtgcttattctactacacctgaggctttgtaccaaaaataaggttt

SEQ ID NO: 71578 - DNA, 294 bp, Glycine max
  Clone ID: PAT_MRT3847_35649C.1
acactaaaattttggtcgagccctcggttagcctgccttatgtataactatatcggtagctctctctacgctgccaagcctatattacaggcgtgtgctgacgtgcatacggccactatagtgaacgacgcccagtgggcgacaacgcggaatggagatgacaccgatggggacgcactgtgtgcactcaactaaaccggtgcgcgataacacaaaccttaccaccaggagatataacgtacctgttgaggagtcaaacacatgcgctcgagatcaacgctaatgttcgtcgac

SEQ ID NO: 71579 - DNA, 377 bp, Glycine max
  Clone ID: PAT_MRT3847_3564C.1
gagaagagggagcgagagaatggatgtgaagaaaattgtggttgctgtcgaagatgtggatgcagctagaactgctctacaatgggctcttagaaacatcattcgctatggtgacataatcacccttctccatgtctatcatcactccacaagatcaaaaagcaaagcacgtcttctacgcctaaatggcttcaaattagccctctcctttcaagacatgtgcaacaactaccccaacacaaaggttgaaattattgtcacggaaggggaccaagaaggagccaagatcgcagccacggtgcgagagattggagcttccatgcttgtggttggactccatgatagtagttttctatacaaagtccctcgtacccctc

SEQ ID NO: 71580 - DNA, 211 bp, Glycine max
  Clone ID: PAT_MRT3847_35650C.1
gacgtataggagtttatagagacccgaaaaaaatgacagacggcgtcagaagaatgctggaaaacctgcgaaccaacaaagcgggaagcataaaggaaattcgcagcgggagtgagagagaaaaggcccataaagagcgtcgtgctcaacagtccggtcatccatgaatggaagaacgggagcggcgccctggcatcgaatgcaattaaag

SEQ ID NO: 71581 - DNA, 406 bp, Glycine max
  Clone ID: PAT_MRT3847_35651C.1
aattcggcaccaggagctgcaaaaggagaatcgtgaattaagaatacaactagcacaacatcaacagaaattgttgaccctccaagcacaatccttagcttcccattcctccccaacaccaccaccttcagctggacctctttccactcctctaacttctgctcaaccaatcgaaaaacgaaggactagatcctctttcttggctggaacttgtttcactccagaaaccaagcagaagggagctgaactaaccatcaagacacttcaacggacggtgaaaacactagaggcagagatagagaaaatgaggaaggatcatagcttgcagctaaagcaaaaagatgatcttattcgcgagctttcgcaaaagggtggaaaacaggcattagcaactggagaactgggg

SEQ ID NO: 71582 - DNA, 190 bp, Glycine max
  unsure (1)..(190): unsure at all n locations
  Clone ID: PAT_MRT3847_35652C.1
gctaataaccaacaaatggcaagtactttcccaatgggaacaatactcaaaatgacaatccataaaaaaaacaccaatattgagtccattatgctgttgttaaaagtataaactaaaaactgaagagcatggaaaagaagttggcagtgggtgggtttggggagtgcanggagatagtctatggagtgtc

SEQ ID NO: 71583 - DNA, 358 bp, Glycine max
  Clone ID: PAT_MRT3847_35653C.1
gggatactcacacggtaactgtgctcttgttggggatacagaggagtgtactgaattgaacactctgcctcatgaagttgatgaatatcgaattgctaaacaaattccgtgtggatttggtgggcctatctatccctcatgcaaaactatggcacttagtcacacatgaacatcaaacttactgtgaaatatagcatggttgattaaggacacgactgtagacaattctcacagagtgctgacagcttgacacactctcagatatcggcatttagtggactcgctggtatgcaatgatgcatctatcatcatgagaatcctattagcgactatgctgatgtagacagatagcatgaaa

SEQ ID NO: 71584 - DNA, 764 bp, Glycine max
  Clone ID: PAT_MRT3847_35654C.1
cggccattaaattaaaagtatcgttgaccaactgaaatatgtccacaccgtcgcggagatcggttgccgttgccgtgagcggcgggtccaagggtagccggcgagcagtgcagtgggctgcggacaatttggtccctcaagccgataggttcatcttagttcacgtcatccctcgaatcacttcaattgcaacaccaactggagagtatattcctatttccgaagcagacgccgatgtgtttgcagcttctgtgctggatgcgaaactaaaatctgaacaaatctttgttccgttcaagaaacttttgtgattcaaacacgatggaaacagtactgctagaagatgacaatgctgcagaagcacttcttagctttatttcggagtccgggtcccaaatattagtgctgggttctgactcctcaaatttcataacaaggaagctaaaaggacctgggataccaactaccattctaagatgtgctcctgacagttgtgatgtatatattgtagctagagatagaattatatccaagttggctgacttttcatcttcacgttctcatgagactagccctaggtacttcttgtctactaaagtaaataaagaggacaatggcattggcagagaaatgtctggaattagttcatcctcaactgaacctaaaattctaaggaatttccggtttttatccatatcagagcgtagttacattggtctgcaatcatctagtcgtaggaattcttttgaaaattctaccaaaaa

SEQ ID NO: 71585 - DNA, 125 bp, Glycine max
  Clone ID: PAT_MRT3847_35655C.1
cggctcgagcagctttccgttgcacaaacagtgaagtgacagtccagcccagcccctatttgagttaccggctacccaaggactttgtagacctctctactggggaggacgctcacaagctaata

SEQ ID NO: 71586 - DNA, 236 bp, Glycine max
  Clone ID: PAT_MRT3847_35656C.1
gtttgcttcatttttttttcttttcaacatgtaagacttttctggccctccttgcactgcaactcacgacctaacaattttatgagattttgtaaattaatgtggtcaagctaattcttcatcatttttctacagtcttaacaccacttcaattctctatgcaatacctttggaattggtgctgcagcaagcacaaggatttcaaatgaattaggagcggggaatccacatggtgc

SEQ ID NO: 71587 - DNA, 400 bp, Glycine max
  Clone ID: PAT_MRT3847_35657C.1
gccgcaacgccgctcggaattcggctcgagcttcgaaggtcccattctgccaccgtccgcctcttggccaggatcttcactgtcggcccacaagggggacactctgtacctcactgacgccgttgacagcgatggagctcctggactcgccggtacgatggccagagctacttgacggaccgtcaatcctgacagacgtaccggaactagcacggacgccgcccgacaccacggcaccggacaatctagcctcatcatcacgggcgccgccgagaactgtacagcgaatgtaccaccggcgtggactcccacgctgctgcctgacgatcactataccgctggcgctggtatcaccatcatagtcacctgttccggtactgaggacagtgcgaaagctgct

SEQ ID NO: 71588 - DNA, 469 bp, Glycine max
  Clone ID: PAT_MRT3847_35658C.1
tgacgaggttggccaccagaacccataatagacccctcattaaatatgttctgaagtactgaaaaataaaatgccacctacccgtcattaactttgatccactacttctgaaattatttgaagagaactaagacgaaaaaagggaagaagatctgaaaaaatttaaaaagatctagcaattatatttgaatacacattttctttcaacactacattaacacttttattttatttttttctatcttcttatcatatcatatcacttataatacttatatttttatctctttttagtaatgatacgtgaacactcatgtattataaatacctataaataattaacacttttttcttatctatcttttcctatcaaattaatcatatcacctattatatctatatttcactctctttctctttcaagatatctactaacatatgggtttccattaatctttattaatctttt

SEQ ID NO: 71589 - DNA, 307 bp, Glycine max
  Clone ID: PAT_MRT3847_35659C.1
gtggcatattacatgtgatttgtttcttaaaaacaaacacgtggatgtctgccatatttccgcttgtcggcatgctatcgcccattacaagtgcacaattcataggagggtgctatggtgtgattggtgatgatctaccatcaaggcaagaagttgtggacttatataacacagatggcatcaggtagaatgcacatatactacccatacgaagaagcactcctggccctaagaggctcaagcattgacttgattatggacgtggctaatgacacccttgcatcgtagacagactccaatgctgcta

SEQ ID NO: 71590 - DNA, 283 bp, Glycine max
  Clone ID: PAT_MRT3847_3565C.1
cccttcgatgatatatatcacttactaccagaaaaactgttacatactccctgtgagtttatcaccatacacggaatatgttcgaatataaccagtgcctaaatgttgagaatgactacccatattcatcatgactacccatcggttatttatagatatcattccgcgaaaaacatcgtagctgcaatggaagttgatatcatgacctcgaaaatggaaccccttattctccatcgtgtttgaagaaaaacgcgttctctgttcacatggtggctcatcaatc

SEQ ID NO: 71591 - DNA, 367 bp, Glycine max
  unsure (1)..(367): unsure at all n locations
  Clone ID: PAT_MRT3847_35660C.1
tttcccatgttgtgataaaccttttgtataaattgttatattgagattctgaaattgtgaatcaaattgtgagtatgtcataaattgaacttgtgataaaaggtgaaatacatgtgtattaagatgtgtatattgagttgtgagctataaactgtgcaatcacacaattgtaaaactctttaagggcgacgagtattgtgatggaatccactataggaacccgacgagtttaattacaagcatgaccagtaaaaatgatattgaaaataattgagtagttgtgtgtattgcatagttcataggtaaagtgtatatgattcatgaggtgtgataacatgctactntgggattatatcattgtgattga

SEQ ID NO: 71592 - DNA, 496 bp, Glycine max
  unsure (1)..(496): unsure at all n locations
  Clone ID: PAT_MRT3847_35661C.1
gagtcataacaganggggcaaagctatatacgaggccggtggggcctacttggtgttgcttacggatggtatgaccagagcacccgttgttcggtttccctccgcccagcgcgccgggcaagtgaaattcttcttggaggagcctctcaacttcgatctctcttgctgtcgctttcaataagggcaagctgtgttggtttaaagttggctgagagagtgtttggtaacacattgagaatccacattcactgtaaaatcgcactgaaatcaacccaaaagcaactatttgttacttcaagaaaccaccttgagtgcacatcaaggtgttaccaaacacgctatgaattttagccgtgtcttggggatcttgacaggaatgtgctacatttactttaatttatttttcatggtgattgaggattttttggaaatacctcgggtgaaatggtatggttttgtttttcaagattctttgctgaaataatactacaggttc

SEQ ID NO: 71593 - DNA, 1145 bp, Glycine max
  unsure (1)..(1145): unsure at all n locations
  Clone ID: PAT_MRT3847_35662C.1
ctgattcccacccaagtcctattcgcaacccacacatctctctctcttcagaacatggcttagcagatgaagtacaagttatcagaattgttggttctgtggtagttatctgtgtactttggtgacactagttttgtccacaatggactttcttggcaaaatcccttggtttaatgctcaagtgaacacagatttggcgactaattcaattcctatcgaaacattcactgaacaacctaaacaagaacttgggaatgatcccaaattgcccttcctttcattgtttccttggggaaatcgtgctggagagaaatttcaaagaccatctactatcaataaagagttaaagaggcaagcacgttgtgggaatggtgtaggaaaggatggtgaggctaccccttcgcgcttccggccgtatgtgtgtcaggttccatggcatacaggggttagagcatttctttctcagctgttccctagatatggacattactgtggaccaaactggtcaagtgggaaagacggaggatctcttgtttgggacaggcgaccaattgattggttagatttctgctgttactgccatgatatagggtatgatactcatgatcaagctaagctgctgaaagctgacttagcctttctggagtgtttggagaagcagcatgggagtactaaaggagaccctcatgttgctcatctttataagacaatgtgtgttaatggtctgaggaattttctgataccgtacagaaggaatattgtgaatctacaacagtttgggcaacctatgattcagtttggatggcttagcaatttgagatggggaggttggaactttcagaaaactcatagattgagctcactggggggaagtactgtgtcataaattgtgaatttcatcgaattttgaaagtatgtgatcctgaccccccagtcttcaaagttcctttagttttaaccttctgtttgctagagcatgcttcttattgttatgacttccacattttgtatagactatagtagtgtacatagcttgttttgtaaattgcaacgtttggtgctgcgtgacatcttggtgccataagcaaacttgttataatgaaaatcattaggttgtgaaaaaaaaaaaaaaaaaaaannnnnag

SEQ ID NO: 71594 - DNA, 342 bp, Glycine max
  Clone ID: PAT_MRT3847_35663C.1
gacgatgtaaacacattatttcttcctgtgtctaggaccacagggaaaacaatacaaactctagtaaaattggaccgagaaggttattaccggtgccagagccaaaagtgagaggggatcaacggagggataaacccatactggtggcacgtgaggaaatgaatgacaacctactcccctgcgaatcttcaaccgcatacgaagcagcctatagaccagctaccacagaatgaccttcactctatgggccctatgcagcaacaaggccaggcctttaacggatatcgggaagaggacctacagggcctcccaaattaccgatgatctcgtatgcttctgcta

SEQ ID NO: 71595 - DNA, 354 bp, Glycine max
  Clone ID: PAT_MRT3847_35664C.1
ggaaaggtttagcacctccagatgtaaattcatatgaagaagctggaactcctgttattaacgagaaggatgacgaaaattgtgccactattgtcaatgatgaacaacacgtgatgcatattccaagcccatgctctatgtcatcatcacctgatatgatcttcatggagttctacaaagcctaagtgtatctatgcagacctatccatgcacttgacgggatacaatactcgattgaaaatctgtcaaaaatgatgaagagcgtggaatactcttatgccagccacttctgtacacaggctactgccagaacttcagaatatgcaagatactctgcatgatctgacaatattg

SEQ ID NO: 71596 - DNA, 1007 bp, Glycine max
  Clone ID: PAT_MRT3847_35665C.1
gggacaaatgtgcatcgaatttcaatacctccaaacaaaatcacttttgttgaagcttctcatcttcccttcatttatctttctctttaacccaatttgattatctctctctctctctctctctactattcagcctctattgttctttccttctcttcttagccttggagctggttgatggatattgaacccttgtgggctattggggggtggtcttttctttcaaattattgcatggcagaacctaaagcatcatcatcatcatcaccaatctcagaacctttctcaaaatcaccctcttttcttcacttcctctcacttttcttcatcctcctccttctcatcaacctatcccaccaaccacacccttctaccatggcctcttcagaaaaaaacaccaaatcatcagaatcagccatgcccaccacaagcatgcaccctcagaacacccaaaaatcccatactccatcttctactaaggatgctggaagagaatttggtgctgatgctcatgaagttccaagtggtccaaaccctatatcaaattaaaaggtaagtgacaactcagaagcatataccatatgaaccatatagccagacctagctatttgaagataaaaaggagttgtaacggcatagtctcactattgtaatggtcatcttcaatgttcttattttagttcatcaccataaatatattattgcctgtcctcagtgagaggtttgtgttagtaatgttattgtcatcatcgttagcaaaattaaatttctctccctttttggctggaaatgtatagcaagagataatctattttctatatgtatgtatgtacctacctatttctttcttatatagatgatgacaaaatggtgttggtgatggtataagcatttaaacccatctgcttttgtgtatgataatttttttgggctttctaccatatttgtatcccgaattaagaacaaagagtttaaatttatgtgattgaattgtgtggcttatatct

SEQ ID NO: 71597 - DNA, 354 bp, Glycine max
  Clone ID: PAT_MRT3847_35666C.1
tttcgattatttcttttctaattttttttctctcccttcccatttttacagagttcatggttacaatcaccacatcccgggcttaccattctcaacatcatttttctcttttattttatgccacacttgttttgtcttattcactacttttattaaacatttacccaacccttcatatccaacaccaatttttcaccttatccacctcttcctctttttccacttttcctcaatcaccaatttcacactctaactaccttcacattctctacgcttttctctatattcaaaatatacatatccctttctccactatccatcaacaatctcatcaaacaaatcacacccaacttt

SEQ ID NO: 71598 - DNA, 493 bp, Glycine max
  Clone ID: PAT_MRT3847_35667C.1
cggcacgaggcctctgccgaattcggcacgaggtgggcagtaacatgtggacattgctcatagcgggacgacctacagtgtttgtcgcgatacccactggcttttatgtgcgaaatgtttgcggtattgcaaatcttgtccgccgcaaaggcgagcacatatcacattaagttctatggctatactgactagggccctgcgtaggacgttttgccgctacatatcgttctgtcgtatgtgtgtataagcgtgtatgtttgtattgtgtgtctgtgtgcgctggaaggttttacctcaaaacactatattgggaaacatatcatttgcgtggcctcaccacttgacatttgtctttgttcatttcctttcgtcccctaatgcccatgagcggagcttatcttgccgtttcctcctcttcttttgtccccaagaccctgtcgactgtaaattgtataaaatatatcatacgtaccatgtcatagctctaatatgg

SEQ ID NO: 71599 - DNA, 368 bp, Glycine max
  Clone ID: PAT_MRT3847_35668C.1
gaaggtttcccgtcatcactgtatgacgtcctccttctttgggggggggggggcggatgggggacagggagcggagcgggtggttagcgtgaagctgcacaaggagtaattgaacatggcgtttggaataattaattgttattataataattataacagtggataagtggataacagcgtagaaatgaagttaaatggtggggaggaatatgggcttaggtagtagttgtttgtttggggaaaaaaagtatccgtaccgtaccatgttaaaagtacacccacgtggaatccacaagtacaccaggtgacaggaagcaatacaatcaacaaaccaagttaccagaccggaaaaggcccatttcaaattt

SEQ ID NO: 71600 - DNA, 1370 bp, Glycine max
  unsure (1)..(1370): unsure at all n locations
  Clone ID: PAT_MRT3847_35669C.1
ggttcaatgtcagaactccacttccacctcttcagggtaattttagccaagatgtgtctaaggttcaaaggtcgcacggctgcgagaagacgacagaaggggagtttcaggctgtgtcttctcttgttttttgcaaattcgcaacccacacagcaagggaaggtgcgagtgagtgagtatggcgtctccattatcagctcaattggttcaatgtcagaactcacttccacctcttcagggtaattttagccaagatgtgtctaaggttcaaaggtcgcgtgtggtatgttacggtaccagatcaccgcttggttattatggtaaagcattgacatcaagatcacataacgccctgaggttttctgtcacgcgacaatctgaagcacggtcaattggatataggagaatgacatgtgtcaatgctgcagacaatgttgtagagcttcaagccaaggtgacaaccaagtgtttctttgatgtagaagttgggggtgaacctgtgggcaggattgttttgggcctatttggagaggttgttcctaaaaccgttgaaaatttccgtgctttgtgcacaggtgagaaaggatatggttacaaaggaagctccttccatcgtataatcaaagatttcatgattcagggaggagactttacagaaggaaatggaactggtggaattagtatctatggtcctagttttaaagatgagagttttgccttaaagcatgtcggtcctggagttctgagcatggcaaatgctggtcctaatactaatgggagtcaatttttcatttgcactgtaaagactccatggctagacaatcgtcacgttgtatttggacatatcattgatggaatggatgttgtgaagacacttgaatcccaggagacgagtaggttagatgtccctcgaaagccttgcagaattgttaattgcggagaactgcctatagagggttgatctttacgtggaagtacaacacttttcttctgattttcagttcagtttccaatgttctgattgtcccttattaatcatgttaatgtgtctggattatcattagtggctgccaaattggttgacttccggagacagagtggagataccacatccatattttgtatgactagactcatgcttaattcttataacaatagtattctcttttccaaaacttaaaaaaaaaaaaaaaaaaaaaaaaaaaaaaaaaaaaaaaaaaaaaaaaaaaaaaaaaaaaaaaaaaaaaaaaataaaaaaaaaaaaataacaaaaaaaaaaaaaaaataaaaaaanggggggggccgttttaaaggatcaaattttactcccccgggtttgcaaagaaaaaatttttttttaggggcaccaa

SEQ ID NO: 71601 - DNA, 397 bp, Glycine max
  Clone ID: PAT_MRT3847_3566C.1
aaaaattagggaggtacttacttcacttgataaaggattgacaatgtttacaatgctaaataacgagaacagaaatctatgaatccattcaagaaaacttcttaacacgtggtcgcatatcatgcactttgaagtcaccccaccggcattcagttgttgaagaaaacttcgtaatttgtgaaccaatgtttcacactaaaaacggtatgcggatacgtaaacatgctgaaaatcataatgtcacaaaaagaaggggcaaattagtttcttattcctttaaggcattacaatttgattgaacactccaattatttttgcatgaaacactcaaacagggacttcaattgggtactcttggtccccaacaataaacaaataagacccttcttcaatcacc

SEQ ID NO: 71602 - DNA, 277 bp, Glycine max
  unsure (1)..(277): unsure at all n locations
  Clone ID: PAT_MRT3847_35670C.1
gattttgaacaatcaggaaaactgcaagatggacgagaagttgctatcaagcgtctatatgagcacaactacaggcgagtagaacagttcatgaacgaagttcaaatcctcacacgcttgcgccataaaaatctggtgtccctctatggctgcacttcaagtcacagccgtgaactactccttgtgtatgagcatgttccaaatggcactgttgcttgccacctncacggtgagttagcaaggcgcgacactcttncatggcacacaagaatgaaaa

SEQ ID NO: 71603 - DNA, 219 bp, Glycine max
  Clone ID: PAT_MRT3847_35671C.1
ggatgccccgggctacacgaagtcggcacgagcgatcctccgggcagcagttttcggtgtgctccttgtggttgccagcgcccacaggaccatcgtcacggtcgtggaagagggggagagggagggaggatgcaaacagcaaatccggagtgccgagaacttaaaagactgccactccttcctcggtgacgcatccgagcccaaagaatctcagcacta

SEQ ID NO: 71604 - DNA, 466 bp, Glycine max
  Clone ID: PAT_MRT3847_35672C.1
agttgatatagacaccagaagacggggaaaacggagaatttagtgttttccttgtgcaggcaaatccattattgtgaattacttgctatctattgctccaaggtccaagtgggatgaagagtttagcagatagggtttccagcttcctagcaagatccgtagtgcactcgcatctcttcctcagattttgacgatgtgcgtatgtcgaacaccaagtgagcatcaagaccagatccgtggcgcactctcaacactttgcggcaaagtcaaaaccttttggagaccaaattctttcgttgcttgcttgcttccattggagggtgtcgcttggggcaccgagcatttttttggggcatccagcaacgtgggtgaaagggtaaaaatgcccttcacctttaatataaaagcagcacagtgactcgtccgtacaaatcactgtacatttccaaaaaaatttctccttcgt

SEQ ID NO: 71605 - DNA, 295 bp, Glycine max
  unsure (1)..(295): unsure at all n locations
  Clone ID: PAT_MRT3847_35673C.1
tcattcaactactccaacccgaacactgaggggactttcatccccaaagataattataaataatgctaagagaatcaataataacctcantcagaagattattaaattaaaatcgcagatggaaaacctagctcanaaagcccagcttcaagaagttaagttaaaaaaaacaactaaacagttaaaagaagcaatagcaagtgcaatcgaagaaactaccaaatacaaaacagcaagaaaagtaatcaagtcactcactacgcagttgaagaacatgactaaaagactacctagt

SEQ ID NO: 71606 - DNA, 373 bp, Glycine max
  Clone ID: PAT_MRT3847_35674C.1
atattgtcatattatgagtggtttggtttatttacaagaagggggcgacttagtattaaccggaaatattttgagcaaatccgagtaatttgacgcacttgcggctagctattgttttgcattagaagcagagtcttggtcaatccgttagactttggaacggccggtggcgccttgtgaaaccgaaacagataactcacattctaaagcgttggaacggggtgttacgaagtcacgctcgacacttttagcaaattgttcaatatcgtcgaaacgcaccctgtatccttgtatatgtccgacctcccttgcttagaagaggacaccgtttaaagcggattgagaaacttctccgacaaggaaacgcttaggc

SEQ ID NO: 71607 - DNA, 299 bp, Glycine max
  Clone ID: PAT_MRT3847_35675C.1
gttgtgagggtttttttaaacgatttgccgttcttaaatttaaagggcccatttcccctttaatccctaaacaataaacacattctagccttatatacttgcaattgcatacgatattcctgccttattcctaccaagaaaacgaatttgaatacaaatactaggcttttggttttttcatggcttggaaaaaaactaaaaaaagagtcctgtatcttagtgtttggaaaaactttttttttttaacggggggttcaacaacccctaagggaggggttcttaccactccccctgaagcc

SEQ ID NO: 71608 - DNA, 1564 bp, Glycine max
  unsure (1)..(1564): unsure at all n locations
  Clone ID: PAT_MRT3847_35676C.1
gagaaatcctgcagaaaaaccgccttgtacttgaaaagattgtggaggaattactcgagtttgaaattttgactggaaagtatgtcattccaaatacagagaatgcagtgactaaattatttaccacaaattgtggctcattcaaaccccgacacaagctgtagaagaaaaaatattgtacttgtctgcaaaagaaaccatggatgatcagtttattgattacgttgactggaaaaaggttgctgagaagacagctcttttacgacctatcgaattaaaaattgttccaatggctttggaaggaagtgccttccggagcaaagtactggacacagatgaattgatggactactgtggtttgtttgcgactttcagttctatgattccacaatggctgcggaagaccaaaattttcaataagtttagcaaaggattggtgaatcatcttggactgacattgacaaaagaagatctgcagaatgttgttgatttgatggagccatatggccaaataagcaatgggatagagtatttgagccccccacttgattggacgagggagaccaagtttccacatgctgtctgggcagctggtcgtggtcttactgctcttttattaccaaattttgatgatgttgataatctttggcttgaacctctatcctggcagggaataggatgtacaaaaatcacaaaagcaagaaatgaaggttccatcaatgggaattcagaatcaagatcatatcttgaaaagaagcttgtgttttgttttggttcttatgttgcatcccaaatgttacttccttttggggaagaaaacttactttctacatctgagatacagcaggcacaagagatagctacacgaatggtcattcagtatgggtggggacctgatgacagtcctgcaatatattaccgtagtaatgcggttacggcattaagcatgggggatgaccatgaatatgtgatggcagctaaagttgaaaagatgtttgatttggcatatctcaaagcaagagaaatcctgcagaaaaaccgccttgtacttgaaaagattgtggaggaattactcgagtttgaaattttgactggaaaggatttagaaagaattactaaagataacggtgtaatcagggagcaagagccgtttactcttggtgaagttcaagctagtgagccaacatctggcagcttccttgaaagaggaaatgcatcaggaagtgctctattagcatcctagattaatgggatagtattggatatgggacaatttgaggtgagactcctgttctttttgttttttggagggcaatctgttcatttgtacttggataaatgtgtatagtttaggatacaggatacactaatatcatgctcgtatttgttgggatgagaagagataacagttttccttcttggccttcctttcttgatgtcagccagatcccaatattttttccttaccattgtaacacgaatagtttaatttaatgtcattgtacttcttatcttaaaaaaaaaaaaaaannnnnnnnnnnnnnnnnnnnnnnnnnnnnnnnna

SEQ ID NO: 71609 - DNA, 279 bp, Glycine max
  Clone ID: PAT_MRT3847_35677C.1
gtccccaaagtaagtacatccacacatcacaacacaaaacactctattactgttttctgtcctcactgtcccttcgttctcacaaagtcacaatggcaccccctctctctcttctcgcaccggagaccctcctcgcacggcggcctctactggtctcgtgtgcgttcttgggccccgccgacagaagcggcaaacgcgcaccgatctttccggcggctccatctcgccgagcaaagtccaagacaactacaaacagtactggtccttcttccgccgccc

SEQ ID NO: 71610 - DNA, 410 bp, Glycine max
  Clone ID: PAT_MRT3847_35678C.1
gagaaatcctgcataaaaaccgccttgtacttttttagattgtggaggaattactcgagtttgaaattttgactggaaagtatgtcattccaaatacagagaatgcagtgactaaattatttaccacaaattgtgattcattctgacccctacgaaggatttagaaagaattactaaagataacggtgtaatcagggagcaagagccgtttactcttggtgaagttcaagctagtgagccaacatctggcagctttcttgaaagaggaaatgcatcaggaagtgctctattagcattctagattaatgggatagtattggatatgggacaatttgaggtgagacttctgttctttttgttttttggagggcaatctgttcattttgtcttggattaatgtgtttaggtta

SEQ ID NO: 71611 - DNA, 311 bp, Glycine max
  unsure (1)..(311): unsure at all n locations
  Clone ID: PAT_MRT3847_35679C.1
ntntnggtnncntacgtangctcgnaattngnntcgagncnantcangttngtctctntngtggaatctgngtcgtagaaagtcgtntggncttccatgtcgganggctcttgaggnatttcnttttgcaganacngtanataatcgattgannagaangcagatntagccgttncngcttgttnggatcannatagacgtacttatnggattantcangattgatncataagcagnatgtngtncctccggnaatagttgtggcagatctcggntggggtanaattagtgtatgttgngnngggntgggn

SEQ ID NO: 71612 - DNA, 367 bp, Glycine max
  Clone ID: PAT_MRT3847_3567C.1
ggtgttggccgcgctacatgtttttcttttaaaacggaacagaggctgtcgaattttaagatacaaaacatcaagtgcctatacgggatgagagtgagcacctgttattctattaatggaaaaaagccccggcaaattaaaagatgattttttttgaacgggggggggagaaaaaaaaaaaaaaacggaggaaacaacccactatacagggggccaggagaccacaaaaccttcctattgccaggtgataaatacatataagcccacccttttcattaaaggaatcccttctttcttttctttcataaaaagcgacttaatctggggggggggaccaacctccacgagagaggtcccgggggggaaa

SEQ ID NO: 71613 - DNA, 379 bp, Glycine max
  Clone ID: PAT_MRT3847_35680C.1
attcatgtatttttcgtttaagatgatgtttgtatttcattttttttattctacctatttatgatggggggggaccaaaaaatgaccgggggtttggttttttattaaaaagttcacccgcttatttctgcgggggaaaacaaatttttcccaaacaggaaaaggctgctaaaaaaatgtttttaaaaaaaccgttggtgttttttttcattcgaccccacttttcttttccacattgggggaaagccaaatttctttttatacttgggggggccccatttaccttgggggcgcaacacatggtttcatccttcttcctaaaccggatttaggaccaaaaaacccggggcgcgtgacattttttttggggacctttttt

SEQ ID NO: 71614 - DNA, 263 bp, Glycine max
  unsure (1)..(263): unsure at all n locations
  Clone ID: PAT_MRT3847_35681C.1
ttccacggancacccatantgctctgctctgcaatggccgacgaggaactgtngatcagacanagntnncttnaagagtcttgcaacccanaatgtgtnaaaccattactggactancaggcgtgcattaaaaggatacatggngatnattctgggcagcaaanctggactgnacaacatnttgattnttggtcncgtattgacaatgtgttgacaccgcagctattcaccanactgnagtatggagaaggctttgntggcta

SEQ ID NO: 71615 - DNA, 427 bp, Glycine max
  Clone ID: PAT_MRT3847_35682C.1
tacggctgcgagaagacgacagaagggggtaccaagatggcttcacttccatgtctcctcgtttccatccatttcattgttatcatgtcaagttccttacccacaaatagtgatgaagtgtttgcaaaacagtctccaatgtctccatccacaaaacccgtggaaaaaatcacccaactacacttctatttccataacaacgtaacggagaaaaacccaactgctatgagaattgttgggcctcccaagggcttcattactcagtttgggactgttgtgatgatggatgaccctctaactgaaggaccaagtccaagttcaaagcttgttggaagatctcagtgaatctatgctttggcttctcaacatgagtttgggtcgttgctcatggtgacgaattttttcttcactgagggtatttacaatg

SEQ ID NO: 71616 - DNA, 489 bp, Glycine max
  Clone ID: PAT_MRT3847_35683C.1
gtgttttttttttttttttttttttttttttttttttttttttttttttttttttttttgggggaaacctatcatctcccttatcctttgcctcctgataaccctaatcatcccagttattctcccatccatctttgtttgaagatcttataataaggggtttcccaaaaatgcttcctgcaagggctgacggggacttcactggcgcattgacgggccaaaaattgtcccaatcctgatcccaaccttcgggggattccacattgggagctgaagcaaactcgggcagggccatttaaagctcttgatatggaacctcattgggatgttttttcctgcatgcacaaaaagcccatgtcccttcaaagactagtcccattaatatgaggaaataggccccatttactggggtgaaaattttggcataaaaaggaagacgcacaatgaaattctcttcagggatatttgaaaccttgggaagcacacaat

SEQ ID NO: 71617 - DNA, 403 bp, Glycine max
  Clone ID: PAT_MRT3847_35684C.1
tgggttcatgtttggcaaagagtcatcgcgcaaagaactctctgacctaatccaagatctccgtcacggtggcggaaaccctccctcttcctcttcctcccatttttaatccaactttctctttctctttcaatttctttaacatcgttacttacactataatatgtttcttccaaaccccacccatttcctttttccctaacaattttgtaatctggaagttgaggttgcttttcaactctttagctcgatcaatgcagcttccttgtaatatggttttgaattatctcattttcagagaatcaggtagaaaaactaatgcccggattgtaatttttattaaacccctttggctcactaatattgtcttaatcggcaaaaaaaaaaaaaaaaaaaaaacacc

SEQ ID NO: 71618 - DNA, 580 bp, Glycine max
  unsure (1)..(580): unsure at all n locations
  Clone ID: PAT_MRT3847_35685C.1
ctcgtgggatctccagatttacaaaccctggccttcaaaagatccactccgaattcaactctttgtcaacctagtgggcaaaatgatcgtgtccaaggccccaatcgcttcgggcacgaatttcaacttcggcacctacgtcgtccagggtcaaatttgggatcccccctggtccaaccttttgttccatgggtccttcgaacaccaagccacccgaccgagggcccttcgtttccaatgcttcgaggcttgcaacggggcttgcttccgaacaccaatttttttcgccccaagccctcccccgctatggccccttggcctcctcgttcccaagtcggtcaggtccgcggccttttgtgccccgccaacaggtccggccgcgtggtcctttaaaacaaccttagccgggcttattctttctccgccacccttatcccaacctcgttaagtatacaactgatgtnattccccaactaattccctttcgnncttgcgtcaaacgccattcaaccggcgcccttttgtccccggccccaagggctttttgggccctgggcccgtggccccgcttgtcctttgc

SEQ ID NO: 71619 - DNA, 365 bp, Glycine max
  Clone ID: PAT_MRT3847_35686C.1
ctcttaaactcaatattcgatcttaacgttttaaaatactactcatacgaaatattacacttgaaaggaattaacataattcttaattcctaccaaaagctcaaatactcaaagtataatactgattgaaagttgaaaaacaatatctgctaatactgctttgtgtggggctaacacttcccaccacaccttttcacagcatctaatgcagagtgcatgcagatcttcaagaattctttcaaatattaaaactagatgaacaacatatactatatcgatggtctaattttgctgaaactccaacttcggcacagctcttctcgtcgttgcttcacctttaggcaaagcgactgagcacatgcttt

SEQ ID NO: 71620 - DNA, 471 bp, Glycine max
  Clone ID: PAT_MRT3847_35687C.1
cggctcgagcggctcgagtacggctgcgagaagacgacagaaggggcctctatcatttactgtcttggccaaactgtgctgtctttttgtactgggaatggattttgacttttcctcaattttcttaacagaattagtttcttgatcaaactccaatgtattatctttgagaaacctatcaacaaaatcgagagcattgtcctgtgacaaaactccaggttcttgagattccacgtaacttaaccctgtcaattcatcatggtaaataggcaacttgtccaagtcatctccttcattaaaatcattgcttctaagagaaggttggtttgtttcaacaggtaaaacatcattgaaaagttttctcactgtcgagttagcaaccttgcacatacttttgctcttaaaccccccaacttccacactgtatttcctgtgcttgttttcctgatcaactccatcatccttctcaga

SEQ ID NO: 71621 - DNA, 198 bp, Glycine max
  Clone ID: PAT_MRT3847_35688C.1
atcatacctatggccactcctactacacgttgttccccatcattgggaatcaggttttatccgagtaaacgttctgatcctgtgttttttagctcttaaatgaactgcctcactatctccttatttaaatttctcataactctaacttcaatgcttatttcttcctcacacaactttttatcaatcttcatccattgt

SEQ ID NO: 71622 - DNA, 189 bp, Glycine max
  Clone ID: PAT_MRT3847_35689C.1
gtttaacatcgtaagtcttgacatcacactagtttattgccatcatggactttgatttttttccctttaaactggggatggatgaagaagccaaggacagtgaacaatgccgggcaacctcttaaaaataattgtgcttatcatggaaaaaaaaaaaaaaagcgcaaacctcttttaaagatccaaact

SEQ ID NO: 71623 - DNA, 443 bp, Glycine max
  Clone ID: PAT_MRT3847_3568C.1
cccacgcgtccgcccacgcgtccgcccacgcgtccgcccacgcgtccgagcgttttgggtcacttgtcaagatgccactattgaaatctgataggaatccccttcctgagccagtgcagtctgttttggaggaaggaattgatctatataaacttcacactaagagacatggaagattagagtctaccaaaggatcctacgcaaaagaatggataaaatgggaaaaacagttacgggatattctttgtggaaatgctgagtattttaattctattcaggttccatttgagtttgctgtcaagcaagtgttggaacaattgagaagcattgctaagggagagtacacaccaccagatactgaaaggaggaaatttggtaccattgtttttgctgctctcagcatgccagttactgaaattcatggcgtcctcaataaattggcg

SEQ ID NO: 71624 - DNA, 261 bp, Glycine max
  unsure (1)..(261): unsure at all n locations
  Clone ID: PAT_MRT3847_35690C.1
ccacaccaattttattttcataaaaaancataaaancacaggacggtntgtttaaataaaataaaacattttcaactcatatttncacacttnattaaannctntcttcccttataacttattcattattttctaataccttcccttttcttaaaaacaactcccnaactattcacacttaaatttcttaaaccacaccttttcaattttcccnactctttcctcaaataaaattttatctctactccactcattttcctt

SEQ ID NO: 71625 - DNA, 515 bp, Glycine max
  unsure (1)..(515): unsure at all n locations
  Clone ID: PAT_MRT3847_35691C.1
tcgggttaaatgggaaggtaattgtagttgtagcacttgaccaaagggtagtccaatcctcttccatgtggtcttgtttacatttcccttttcctttttccacatttttttccctatggctaggtgtgactgagttcaggagaggggtggtaaggctaggaattaggatgcaggaaacgcagcttgcgcaggattccatcctgggatctagagcttacagtaagggatttgtgccatttgatctatggctgtttggcatgcacattgcctttcagtttcagtattattatgtttgtatcttcactatttctgtaggattaaattccttagtctttgatgaaaatatatgggaggtctaagaagccatctggtgagcttttcataggaaaggctgattgtggttcttaggctctcttatccatgacttgtatntagttctagttttcaaatttgggttgcaagtgtttcaatgctcaatagtcattataaaatgaaatgcatgaagagtggaacac

SEQ ID NO: 71626 - DNA, 145 bp, Glycine max
  Clone ID: PAT_MRT3847_35692C.1
ggctcgatgctgcgagaagacgacagaaggggaatgatattttccttaagatagaaaaccagttgtggtatgtaatacatgctaacaaaagccttgacttcatagtccataccctaagattcctcttacctcttctgcttcttct

SEQ ID NO: 71627 - DNA, 108 bp, Glycine max
  Clone ID: PAT_MRT3847_35693C.1
gaagtgtagcatgcgggtgaggaatggatcgccagtggcgatgaggagggtgacttatggggatgctgcttgcacagaagcaatgactggggcatgtgagccggaccc

SEQ ID NO: 71628 - DNA, 877 bp, Glycine max
  Clone ID: PAT_MRT3847_35694C.1
ggctcgagacacattaaggtttggctgtaacccagagctccttcgcctcatcgatagtttcaagtctcgttttgacaatggtgagggttagtgtgttgaatgatgctctgaagagcatgtacaacgccgagaagcgcgggaagcgccaggtcatgattaggccatcctccaaggtcatcataaaattcctattggtcatgcagaagcacgggtacattggtgagttcgagtatgttgatgaccacagggctgggaaaatcgtggttgaattgaatgggcggctgaataagtgtggggttattagccctcgctttgatgttggtgtcaaagagattgaaggttggactgcaagactactaccctcaagacagtttgggtatattgtcttgacaacctctgctggtatcatggatcatgaagaggctaggagaaagaatgttggtggtaaagtgttgggtttcttctactaggcttgctttttgtttgagttttctcataacaaatcgggtcggccaattttgtttaacgggtatggacttaaaatttgctgggcattagcgatgtccgatgcttggtgtttgccgcatcagcggacggatattgcatcatgtgcctgttttaaaattaattttggccactgcaaattgtatttggtaaatgtggtttccaaaattaattaaggtgggtgtatttgatttgagaatggtggaagcctttcatttttcaattgcatagaattaattccttttctgtttcacataatttattatttataaataaggtatttacatataatttatttttaatttttgatgtattattagccctaacacaatcttttactcaagtccaaataaagcaaagtagctttcccccc

SEQ ID NO: 71629 - DNA, 762 bp, Glycine max
  Clone ID: PAT_MRT3847_35695C.1
acggctgcgagaagacgacagaaggggctaaacattaacactttggtttggctgtagctcagagctcgctctcctcgccgtttctctcatcgctagtttcaagtctccttgtgacaatggtgagggttagtgtgttgaatgatgctctgaagagcatgtacaacgccgagaaacgggggaagcgccaagtcatgattaggccgtcctcgaaggtcataataaaattcctcttggtgatgcagaagcatgggtacattggtgagttcgagtatgttgatgaccacagggctgggaaaatcgtggttgaattgaatggcaggctgaataagtgtggggttataagccctcgctttgatgtcggtgtcaaagagattgaaggttggactgcaagactgcttccctcaagacagtttggttatattgtcttgacaacctctgctggtatcatggatcatgaagaggctaggagaaagaatgttggtggtaaagtgttgggtttcttctactaggctagctttttgtttgaggttcgctctgatgaagtttgagattctcattggttttgatggaccatgtgctagtttgttgctagcgccagaagttttatagagaggaagagttttaattattttttttcgcgcattttatttgtgaaaacgacttggtcattctaatctttttttcttcaacactgttttttctcatacaaaaaaaaaaaaaaaaaactcgagactagttctcctcgagttttttttttttttt

SEQ ID NO: 71630 - DNA, 225 bp, Glycine max
  Clone ID: PAT_MRT3847_35696C.1
cacacacattctgggtctttcatgggacccataaatcggcctcccccacattttacagagaaggagaagaaacaaactgtcttggtaaactaaaaagatctttccctaaaaatggagaactccacttctggtaaccagcatgcgatgtctcagcaggtgctactccaccatcttgcaacccaagcatgggagcattcatgctcccatttgtcgagccgaattcca

SEQ ID NO: 71631 - DNA, 1064 bp, Glycine max
  Clone ID: PAT_MRT3847_35697C.1
aataccctaaacacattaaggtttggctgtaacccagagctccttcgcctcatcgatagtttaaagtctcgttttgacaatggtgagggttagtgtgttgaatgatgctctgaagagcatgtacaacgccgagaagcgcgggaagcgccaggtcatgattaggccatcctccaaggtcatcataaaattcctattggtcatgcagaagcacggtattgatttgttatgtaatatgaatttggccttgaattgaatataataggaattgttttagtgttgttggcatgttttgttatggtgtggtgctttgtagggtacattggtgagttcgagtatgttgatgaccacagggctgggaaaatcgtggttgaattgaatgggcggctgaataagtgtggggttattagccctcgctttgatgttggtgtcaaagagattgaaggttggactgcaagactactaccctcaagacagtttgggtatattgtcttgacaacctctgctggtatcatggatcatgaagaggctaggagaaagaatgttggtggtaaagtgttgggtttcttctactaggcttgctttttgtttgaggttcgctctgattaagtttgagattctcactggttttgatggaccatgctagtttgctagcgccataagtatagatagcaagagttttaattattttttttgtgcattttattgtttgtgaagacgacttggtcacattctaatctttatttcttcatcacagttttctcataacaaatcgggtcggccaattttgtttaacgggtatggacttaaaatttgctgggcattagcgatgtccgatgcttggtgtttgccgcatcagcggacggatattgcatcatgtgcctgttttaaaattaattttggccactgcaaattgtatttggtaaatgtggtttccaaaattaattaaggtgggtgtatttgatttgagaatggtggaagcctttcatttttcaattgcatagaattaattccttttctgtttcacataatttattatttataaataaggtatttacatataaaaa

SEQ ID NO: 71632 - DNA, 389 bp, Glycine max
  Clone ID: PAT_MRT3847_35698C.1
gttgggacggctggtgcgcccggtccggccggtccggaatcgaccgcgtgcgacccgattcctgccttttacgcaaggcggatgaagcccctccctctaacgaacctgagaaggaggccaccagctataccaaagcacgcacgcgacaccgtactgtcatctccaaaatgccgccatccaggctgagttcggacaggccacactggcgctgaagctgacataggtgtaccgatcccggctcgcaggctggccacctaacacgctggtgctgagggggaggtaggtcataggctatgctagggtgaaccgctgtaccatgttgatgtttaatacgtcggtaactgactggatcggctgaaggctggtcaaattgaaagctgtccaggtgg

SEQ ID NO: 71633 - DNA, 407 bp, Glycine max
  unsure (1)..(407): unsure at all n locations
  Clone ID: PAT_MRT3847_35699C.1
cgtaaacaaaaagttaatacagtctcttgaccaattatgtcccattatgacattatcaaaaagtatctgctgatacttgatacaacctgataatgaagttatatttcttagtctaaaatattgtttagtacaatggaaggcagacattttaatggaataaaaaatcaagttcattattataggcttaggatgatcaaatacaactaaaaaaatagtccaaattaatataaaactttattttctcccttccaaatccctccaaaagagatttaacccccccttgaactttttaaaaatcgagtcaatccattttcgaaccactttgtaaaggcaacttggttaaccaaactaatcgaaccatttttcactttagttattttctctaaaaacggnntgtgttttttaaa

SEQ ID NO: 71634 - DNA, 125 bp, Glycine max
  Clone ID: PAT_MRT3847_3569C.1
ggatcagaaatcgtacagatacacacttggctgaggaaggtcgcaaaagaaaatggagttgctcttgtacacggagtttggtggttcggccgcggatgaggcagctatggagctgatcgagaaca

SEQ ID NO: 71635 - DNA, 1917 bp, Glycine max
  Clone ID: PAT_MRT3847_356C.1
atggacgtggtgacaacattaaaatcagcgaaacgttgttggcgattcggtgtgtttcccttcttggcttctttcttggtcactgtaaccttgttttctttgtattctcccaacggtaatgctaatcaaaaccaaatgtcaatctaccacttcccgaacatcttcaccttgagcagtttcgctgttgtatccgaaaccttgatggaactcaaccttgtagccacagaacttggccaaattgctctatcttcagccatgatcagtgaaatattgcaatggactacgatggaactcctgttcaactcaaaattcagcatgcgatttctaatcgtgcttttgataggtgcaactggatttgctgttttattacttcttattatacgaccactagtgaacattgttttggagagaacaccacctgggaagccaattaaagaagcatacgttgtcttgttacttctggggcctttggttatggcagctattagtgacacattcggcatatatttcgtcatgggaccttttctctatggtttggttctgccaaatggaccccccctcgccacaacaatcatagagagaagtgaattgatcgtgtatgagttttttatgcctttcttcttcttgttgattggcacaaggacagacttgaccttaattcatgagcattgggaggtggttctagtagttctggctatcttgtttgtgggatgcttggtgaaggttattgatacagaagtattcagtgtagcggtgatgtctgtggtggtcatgacatcaatttgcatacccttgatcaaatccttgtacaggcaccgtagggtgtgtaagacgcaaaccatacaagaagggtgtgtgaaaacaatccaaaacataaccgaaaatacaccgttcaacatcgtatcatgtgtgcacacagacgaacacgtgcacaacatgattgccctaatagaagcatgcaaccctaccacacaaagccccttgtacgtctacgtggtccatctcattgagctcgttggaaaaagcacacccattcttcttcccatgaacaaaaacaagcgaaaatctttgtccgtaaactaccccaacaccaaccacattttacgtgcctttgagaactactccaacaactcaagtggtcctgtaacggttctttcgtatgttaacgtggctccgtacagaagcatgcatgaggcagtttgtaacctagccgaagataactcagtgcatcttctcattataccctttcaccaaaatgatcaaaccctaggaagccacctggccagcaccattcgcaacctcaacacaaattttctcgctaatgcaaagggtactttggggatactagtggatagatactcggtgctaagtgggagtagctccaagttgtcttttgatgttggtatcttcttcattggtggaaaagatgatagagaagcattggcgttggggattcgaatgttggaacgccccaacacacgtgtcaccttgttccggtttgttttgcctaccaatgaagattcgaggtttaatggacttgtagaaaatgaagatgagaatttagagagcacgttggacgagagtctaatagatgagtttattgccaagaatgatattagtagtgatagtgttaacgttgtttaccatgaggctgtggtggaagattgcatacaagtgttgaaagcgattcggggaatggagaaggactatgacctagtgatggtgggaaaacgacatagcatggggaattttgtagaagaagaaatgtcaaatttcatggacaatgcagatcagttgggaattttgggggatatgttggcttccaatgagttttgtaatgggaaagttcccgtattggtgatgcaatgcggtgatgagaagagggtaaaacagttagaaaaggtttgccatatatag

SEQ ID NO: 71636 - DNA, 251 bp, Glycine max
  Clone ID: PAT_MRT3847_35700C.1
cgcatttgcactgtttgtaggtgtctccgtcgcagccaagatctcgggtggccatttggacccagctgttacttcttgattggccatttgaggcaacatcaccctcatgactggtttcttatactggatcgcccagttgtcgggttccattcgggcatgcctccctctcaatttcatcagcgccgagagcattccaagccatgcaccggccactggtgtgaacgatgttcaagctgtagtgttccagattg

SEQ ID NO: 71637 - DNA, 399 bp, Glycine max
  Clone ID: PAT_MRT3847_35701C.1
tcgatatattgaggtggagacctcgtctttggcgatgctacgatggacttctccctacattcaatgcccagtgtctttgttcatagcatttggaaatcaggctgaaagacaccatcaagcatgaggcttcaccccacaagttggagcagcttggagagagtcaagaaaaagttgtactgaaacacatcacaagaggaatttcttaacagggtagcacaacatgaagacgcattgcagcaacaactctagcaggctgaggcggtggcatattttgtatggaccggcacatgagaggaatgtgagtacgacaaccactggagattggatcacactgatacgaagacaatccataaacaatctgggtgcgagtggcttcaaggcagaaaggctaggtaatgg

SEQ ID NO: 71638 - DNA, 465 bp, Glycine max
  Clone ID: PAT_MRT3847_35702C.1
gattggagggtatcatgttggaagggacatggcacttattttggacgttgcacgatttaagtatcctccccattggatcccacttaaacttctttgggaaggcatgaattacatcgatgaggatactggacaatctagggggttcatgcttgtatcaaggcctcacagggaacctggattgctttatactctgaggatgtgaaagacatccttcaggttgtttcaattatagccgcttcactgccatctaattttgaagaattcatcaagtggattgctgagatcaggaggcgagaggatggtggtccaagtttaagcgcagaggagaaagcaaggcttgctatcaaggaagaggtattgaaacaggtgcaggagactgggcttttcaaacatgtggcttcctttttgtcaagttcttgcagtaggcaacacgtattaggtgatggggacacgttacctataatt

SEQ ID NO: 71639 - DNA, 211 bp, Glycine max
  Clone ID: PAT_MRT3847_35703C.1
ggctggctcaatgatctcttccccatctgttaccactgtcaaccgtaacggtgccggcatggttgttccattcatctgcctcaagttcatggctggtttccacaccagaaagaccaacaatgacattacctttattgctagcatcggtggaagagtgcaatgacttcatgtgaggcctccagttggcacgaagaagattgagagtgttact

SEQ ID NO: 71640 - DNA, 471 bp, Glycine max
  Clone ID: PAT_MRT3847_35704C.1
acgagatcggctagagatatggctaagaaagaatatataagagacaatcctatgagctagcttctagaattgagttaggtccaaatccacattataagaggttgatgcattcaatgaaaatgctttggattttagttgagcggatcaaaattcggaaacatattatgccagttggttggtgttgaatcacttttaaggtgtttgcaataagtaacctgctacaaggttttaagactggtttaatattgaatatttgagttccatactgctgattaaaaagatatgtgaaattatgtttttagtggctccagaataatgagcctggacttgcacatgatttttgtacagttaccttgtatgccaaattcaaatgatctcagtttcatcttacattacatcttattggagtgagatctatgccaagttgagacatattacatcttattgcaagttaaaataacggacctgata

SEQ ID NO: 71641 - DNA, 1873 bp, Glycine max
  Clone ID: PAT_MRT3847_35705C.1
cactgaaaaagaaaatggttacggttgaccagagacagtaacaaaaatgaatagaacataaaaagtgcgtgaggttgaagcaaaagagttgtcgtgtttgtataggtttaggaaaggaaagggttttgcggtggttactgtcaatggcgacggcggggttgtatcggcgccttcttccttgcccccccgccgtcgagtttgcttcctcacaaggcaagcaactatttcttgaatccattcagaatggaaccatggaaggcttctacaagttggtttcctatttccaaacgcaatccgagcccgccttttgcggcctcgccagcctgtccatggtcctcaatgctcttgccattgatcctggcagaaaatggaaaggaccttggagatggtttgatgaatctatgttggactgctgtgagcctctagaaacagtcaaggctagaggcatcacgttcgggaagcttgtgtgtttggctcattgtgccggagcaaaagttgaagcctttcatgctacacatagcagcatcgatgattttcgtaaatatgtcaagaaatgttccatgtccgatgactgtcacgtaatctcatcgtaccaccgagctgccctcaaacaaacgggaattggccacttttctccgattggagggtatcatgttggaagggacatggcacttattttggacgttgcacgatttaagtatcctccccattggatcccacttaaacttctttgggaaggcatgaattacatcgatgaggatactggacaatctagggggttcatgcttgtatcaaggcctcacagggaacctggattgctttatactctgagctgcaaacatgagagttggattaatattgcaaaattcctaatggatgatgttcctcttctgttaaaatcagaggatgtgaaagacatccttcaggttgtttcaattatagccgcttcactgccatctaattttgaagaattcatcaagtggattgctgagatcaggaggcgagaggatggtggtccaagtttaagcgcagaggagaaagcaaggcttgctatcaaggaagaggtattgaaacaggtgcaggagactgggcttttcaaacatgtagcttcctttttggcaagttcttgcagcagacaagcatcaggtgatggagacacattacctttcattgctgcaagtgtttgttgccaaggagcagaaattttaggggggaaacctagctcatcagggtattgctgtcgagagacatgtatgaaatgctggaaagccgaagatgacaagccaataacaatggtttcggggactgtggtaaatggtaacactgagcaaggggttgatgtgttgattccttcatcatctgggaaattatgttgcatttgctctaaaagtaagtacataagggtgcacccagctagcactgatgtgctaacagtgcttctgctgtccttaccatctacaacatgggctggcatcacagatgagcagcttttggccgaaatacacgatcttgtttcaattgaaaatcttcctactttgcttcaggaagaggttctgcacttgagacatcagctacaccttctcaagagatgtcaagagggtaaggtagacgaggatcttggtgctcctctctcttgactgttaaatttataccccataccatttttttaatcgttcaactagcttcatgacacgtcgagtagggtagaatcacttaaattggcatttaccacatgttgacaactgaagattttcttttctaccagtgattcagtacctcatttcctaattacatttttttttcctagtttatgataattcacccttggtgatggtatgaacttccctattaaaaaaaaaaaaaaaaaaaaaaa

SEQ ID NO: 71642 - DNA, 1437 bp, Glycine max
  Clone ID: PAT_MRT3847_35706C.1
cacgcgtgcgtctcgagcggcacagttcctcatatgggctgcgagaagtcgacagaagggggtgagcgttatcgtggagttcaacttcgagggtttccttcacaactctgtaatttctaattccacagttactcttgtgttttagcgagattcggagtgagtgatggctgggaaggaagagaatcgaatatttgttggaggtttatcttgggaagttacggagcgtcaactcgagcatgcctttgctcgttacggcaaaattctcgaatgccagatcatgatggaaagggatacaggccgtccacgtggatttgggtttatcacatttgcagaccgtaggggaatggaggatgcaatcaaggaaatgcatggacgggaaattggtgatcgtatcatctcagtcaacaaagcacagcccaagatggggggtgatgatgcagaccaaggttacagaggtggctactcatcaggtggtaggggaagctatggtgctggagatagggtaggacaggatgactgcttcaaatgtgggcgtccagggcattgggcccgagattgtcctttggcaggaggtggtcgtggtcggggtggtagctcatttccttcacgtcctaggtttggagctgctggtggacatggggatcgtctaggtggtgaacgtgatcgatacgttgatgatcggtatgagggaggacgttatggagatagggatcgttttgacaaccgtgactacaaatatggcagccgtgatcgctatgctagtgacaggtatccaaccagtggagatcgattcgcaagtgatcgatatggcggtggctcagattacccgcaaaatggttatggcaaggaaagagggtatgaccggtatggtggtccacgaggaggtgctgataggtatggaagtggaatgggaggtcgtgatgaaggaaggagttataggggtagacctggtccatatgaccgcccaagcaggggttctcgttcatcacttgatcgctactgatttctaacgctgatgtttttaacgggaaatccaaatgcagaagccacattagagacctagttcttgttcttgttgttacgtaggacatcctgtttgggacaactgttgctgctagattgtagtttcatagattatggatttcgtagtttgtttccctatttatagatcgtgccaatccctgttgattttccccctcctttgcctgacgctttgactaacttccctaatgcaagtaagcatgatttaccgctgcattccgaaataaaaaaaaaaaaaaaaaaaaaaaaaatgaaaaaactaatttcaaagacaggtataaatgttcgcctaggaagagtacaccggtgcaagtgacatgtgttaattgaattacgtagatacgtagaattggtataactcatcattattttctgtcttaatttttgattcaacac

SEQ ID NO: 71643 - DNA, 601 bp, Glycine max
  Clone ID: PAT_MRT3847_35707C.1
gggggcccccaagaaaacccccattttcccctaccccatcccccaaatttttaagggggatttttgactttcccccaaaaacccccatcccccattaaaaaaattgattcaaacacacccaagttgaaaaaagggaaaacagggtaatattacaaaatttaaaaacatggcaaaaaaaaaacttgaaagggggggggaaaaaaaggcaaaaacaaacaccaagtttaaagctttgcaacaggggaaaaataaagcgggcctttcatcttgggggaccaaaaaaaaagttttaaaaaaaacaaaacttttggaaggggggaggaaaaaaaggcaaaaacaaaaagcaagtttaaagctttgcaacaggggaaaaacaaagcgggcctttcggctttggggaccaaaaaaaaatttttaaaaaaaacaagacttttggaactttatttggcacaaaacaaaaggcttcaataaaggaggttccttgggaaacatggaaaaaaaaaaaaacccccaaaaaaaaaaaaaaagggggtggggatacattttttcgggggtaaaaaaaaggaaagggaaaaagaaaccggaattttttctttggggg

SEQ ID NO: 71644 - DNA, 239 bp, Glycine max
  Clone ID: PAT_MRT3847_35708C.1
aattcggctcgagcgcggaggcgacagaacgacggcatgctgaacgcttaaaccactctggtgattgactgcgtgtcggaggaaggaccctacccgatactatttagatcgtcatagctcatctcctactcttagtcaagcgtatgctcgtatctcatgatcggctacatagttcacatgaattgaggggatcatagcaactggtgcagtgggattggattgacatgtggacagaacat

SEQ ID NO: 71645 - DNA, 289 bp, Glycine max
  unsure (1)..(289): unsure at all n locations
  Clone ID: PAT_MRT3847_35709C.1
gcccgcaagcaccggaccggaanactcggcgcgacccgcgagggcgnacagaagcgagaagacaacaaacggaggagcacaccgagagggagcaaagaaagcacagaacagcagaagcgagcggccgaaaaacgcaagcggcaaagaaaggagagggcccagaggagagagaccgacactcctcttcaaaggggggggaccacggcgccaacagaanccanncacaaaaacccccnnnaacggggggggagggggggaaaaaaaaggcaacagggacaccgaagcacca

SEQ ID NO: 71646 - DNA, 423 bp, Glycine max
  Clone ID: PAT_MRT3847_3570C.1
tttttttttttttttttttttttgtattgtttcggtttacaaaaggagaggtcacaaggttagataacgtatctattgaacctggctgagatttggtgattgcgtgattagagagttgctgcaataaacaagattaatgaaccttacaacaatacccttctctttctctaattcggatcaccttgtaaggccattttgtgtttgcatacgaataataaccattgcatacgaaggggcgtcagtgtcttgcagtgtttgggagacgaaaggggcggttggcggcccaggaggacgccggccaagtggagaaggggcaaggtgtggcctttggccatgaatggaagtatgacagcatgtagcggcaaagagggttcgagagaccccatttctttctctctgagtttgagggtagggtgctgtttg

SEQ ID NO: 71647 - DNA, 450 bp, Glycine max
  Clone ID: PAT_MRT3847_35710C.1
aaaaaaaaaacaacccattttaaattgacaacgggcaaaatcatacgggttttcaaagcaaattactttgggggcccctagcttttaacctagggaacgaagggtcaagttacaaaaaaatttttttttaaaaaaatttgtttgggacttttaaccaaaaaacaaataactggggctttgtccccttgcaagataaataatccaaaatttaaacaaaaattttttttcaaccgggttccaatttaaaagccgtcacagtaaaaacggaaaccggtttttcacttgttaaaccactgaaattcaatttttaaattcctggaggggccacttttactttccggcaacaaagtgtactcaccaaatactggtccaagcattactacccgaacaatttggattgtcactttcccaaaagaaccttttcccattttgctcttgtttttgcaaaaa

SEQ ID NO: 71648 - DNA, 137 bp, Glycine max
  Clone ID: PAT_MRT3847_35711C.1
gaatccgttgcatcattagaaaaaaaattgtcaagggtggtggtagatttggtaacggatttgaatctcggaatgaaaacataaaaaagcaagtgggttttggtatttaaataagactcatccgcaaatcaactcac

SEQ ID NO: 71649 - DNA, 280 bp, Glycine max
  Clone ID: PAT_MRT3847_35712C.1
ggctcctacgtggtgaagatcgccatgctgtgggggacggtgtcggtatccttaatggtgaatacgacaatgtcgaagactggcagcgccactatcctgatacccggaagacatcctttccgacagacgctcttatctaagccgctgacagtcactcattcgaagaagaagggacaggttgaacttaaggggatacacaccctcaaatactgaagggcgggacgccatgtacgctctgtggtgatgacatcaatccatagtagtatcaaactgatgctga

SEQ ID NO: 71650 - DNA, 679 bp, Glycine max
  unsure (1)..(679): unsure at all n locations
  Clone ID: PAT_MRT3847_35713C.1
gtctctctctctctcactctctcctcatgttcttgtctttaattctattgtagcaaacaagctatgcagacatgctcgatttggccgttcaacacattaaaggtcttcaaactcaggttcaggtctgtataactacttattccattcatcctctactactattaattacaagaaagctcgctgttgtttgtatatactctaatttgctcatcactctctaaaatatgattttcttgtttaatacattcaattaagattgccatttgttacattgcatccctgttttggatagagagtgatatgtcgttcatcaccaatttcatcacatgtctccaccaattacaagcttttacaacttcttttttccctttatctatttccttcacaagggaaatgatactcatacaccaaggtacataacaattcatactaacaagcagatccaaatccttccaaattataaaaaataaaattcgtggatttaaaattatataaataaaataaaataaaatataaaaatataagattttatttacaaatttgataaatttaaaataatgaggggatgcaaggtgtacaccctcacatggctgtaggtccgcctcctctnaacagaggaagatggataactagataagagatgtgatgcagagagacacgacagagaaaaactgagtct

SEQ ID NO: 71651 - DNA, 271 bp, Glycine max
  Clone ID: PAT_MRT3847_35714C.1
gatgttctgtttttactcacaggtacttgcgtgcgtgatgaccgaatgcctatgtctatcagatgtggagctggcccatacagagctattattgtgcctatgccgcacgctgtatttttagtgggccaattgtctgttgaacagtttgtatttgcagttattaataagagctctgcctacattagatgggcaaacactgtctctataatattggtggatccaggtggcgacaccataaattatgggcactttttcaacaatctgactcaga

SEQ ID NO: 71652 - DNA, 498 bp, Glycine max
  Clone ID: PAT_MRT3847_35715C.1
gcggcccttcagatcatgccctgtctcattatcagcaatgtatatcttgagagctatccagggcatgtgcaggaggaggaagcagctgctctgtctctgtacatgataagtgtattctaacatatctgctcttgccttcgcatctcagataaagaaacagtcgctgcgggcttgtcatgagtacttatacatcccaaagctgtggttcttcacctggtatcaatactttgtatgctgattgagcatgtatgcgccctactccacggtaattcgagaagaggcagagtgatccatcctcatcaacctgactagctgttagcgccacgcgaatacctgacaagagtggcggcgtggtatcaaacagccggcgcagggtactgaaagcctcttggagagcgtcgtcaaggacttccgagtcatggcggctgtcagtcagccaacttttaaaaagtcccatgactgcccgacagagtgtgtacaagtggtcgagtcggaata

SEQ ID NO: 71653 - DNA, 322 bp, Glycine max
  Clone ID: PAT_MRT3847_35716C.1
atttggggctgcaagaattcacagctttgccttatatatcatattattgtaatttggggtcctgaacatatattcactactgtcctcaactgtttattccctcgtctgttcatccttcattagttaattgctctatgattgtgatcacagtacatcatatcgaggcttctaattccatattgcatctcatgactgacatttttcatcttgctaattcctcttttgtagatcaatttataccaataatacatattctaataattcctcaaaataccagcatcaccataatttatcaagcttcatcaacagttgcactcactaa

SEQ ID NO: 71654 - DNA, 353 bp, Glycine max
  unsure (1)..(353): unsure at all n locations
  Clone ID: PAT_MRT3847_35717C.1
atttatggagcccctgcatcaatgttgtttagtagaaggctttantcactggctgtgataaagtcaggggcataggattaaattgtcacacaccctactttgctattaatcactataactaattttacatctctagatctgcaactttcttcactaaaatttctctgccaataaattatttaaaagcattcaccattcccatgatcatttttattcttatactaacgacatttctacatttaaacccaaattcaatatatacaaaagagagagctccgtcctacatcaactatttccattattaatgactaatcccttacaccgataccataatatcatggtattttcaaaac

SEQ ID NO: 71655 - DNA, 286 bp, Glycine max
  Clone ID: PAT_MRT3847_35718C.1
ggaggaattttagtggacaaagggggggattttatcacacttacccgcaattctcccaattagcaactcgttgagagttgctgtttggaagaaaggctgtttaatggttaagattgtgatgtctgggaatgcatccgtcaaaaggtgtgattgggccttattggaacaagtggttttaacaaacagcaacagtacaaagcattttgatgcatgtaagttgtcaaaatctgaaccacattcctgggaattgattcttcccaatcgaggtatgtggaccctaataatg

SEQ ID NO: 71656 - DNA, 432 bp, Glycine max
  Clone ID: PAT_MRT3847_35719C.1
gatcattttttgccatgttgcctctctagtattgcttaaatttctccattttactgagttacctcttcatctatgtcattttttgcatcctttacattaaattttgcttttatgttacaagctgtgagcttagtacgtttcaggtggagtccttgagggtgcaatattaaattttactatgactctttttacgggtcttatgatctaaatagtcttaaatgagctggattttttttttctggttgtataatatagatagatgttacgggttgaatctaatgcataatttctctcagaagtttgttttcacacttctattttcattactattcagtaatgctttatttggtgtcaagtataaggaaaataaaagtcagtgcttaagtggagattaatagaaaaagggagggaatagttgcgattcttctttca

SEQ ID NO: 71657 - DNA, 273 bp, Glycine max
  Clone ID: PAT_MRT3847_3571C.1
atgcaccatgacgcttttaatcatggatacaaagcagcaaagccctcttttgacataacaacacattcaattttgagacatgcatgttacaaacgactaaaagcccacgccattaataccttgttcactacctggatgcaccttgttctttcccacactagaactagccacctttctctcttcagtactcacctcacctcttcgtactctttccacttccattctcttcaacttctctttctgcctcttctccataacataaatttcagctga

SEQ ID NO: 71658 - DNA, 1183 bp, Glycine max
  Clone ID: PAT_MRT3847_35720C.1
cggctcgaccggctcgagtacggccgcgggctgacggctgcacgccggccccaaaaaattctctcttttctctgagtcgcagcttttacgttttcctaattctttgtccttagcatcaccatctccatggccaacaccaaacacctcacatttactttcaccatcgttctcacgctcctcttctcattcgccacagcaaaatccccaacggctttgggctcgagccgaatcggctcgagacgcgagaagacgacagaaggggacatagtgagcggtccaaagcccaccgcggtgagagtggcccaggcccacatgaccaacacctcctccacgcttttcgggctcctgatgatggccgacgacccattgaccgtgggccccgagcccgggtccaaactcgtgggaaaggcccaaggaatttacggatttgcgtcccaggaagatatgggtttattgatgatcatgaatttcgcgttcaccgaagggaaatacaatggcagcacactaagcttgttggggtggaacgcggtgttgtccaccgtgagggagatgccaatagttggaggaagcggggctttccggttcgcacgtgggtatgctcaggccaagactcacacggttgattacaagacaggggatgctgtcgtggagtacaacgtctacgtgctccattattaactagtgcgtgaagatgtagtatcgttcgatctctgattcttttctttactttctcctttctttattagatgcttttggaataagaacttgtcttatgcttcgtgtgtgttacttttgttaaagctaatggacttaagaaactgttatgactgaagaaaacaatttaagaaaattagtttgcttaacttgattttcttctggaggtactttcaaactatcaagaccatagatttgattaggactcggatcatgaatgcataagatttagggttagtggtgggtaacaatttgattagaacttagatcgtgaaatatgtgctcttgcgttagggtttagggtttttagtgggtcaatttgattataacttatatcatgaatgcgcgtgcctttacttagaatttagggttaatagtgggtaacaatttaattaggacttagatcatgaatgtgtgcccttgcctcggatttagggttagttgttggtaatggtttgattaggactaa

SEQ ID NO: 71659 - DNA, 485 bp, Glycine max
  Clone ID: PAT_MRT3847_35721C.1
ggagggacacaaaaaattctctcttttctctgagtcgcagcttttacgttttcctaattctttgtccttagcatcaccatctccatggccaacaccaaacacctcacatttactttcaccatcgttctcacgctcctcttctcattcgccacagcaaaatccccaacggctttgggtgtccagaaggagaagctcagccaccttcacttcttcttccacgacatagtgagcggtccaaagcccaccgcggtgagagtggcccaggcccacatgaccaacaccccctccacgcttttcgggctcctgatgatggccgacgacccattgaccgtgggccccgagcccgggtccaaactcgtgggaaaggcccaaggaatttacggatttgcgtcccaggaagatatgggtttattgatgatcatgaatttcgcgttcaccgaagggaaatacaatggcagcacacttagcttgttggggtggaacgc

SEQ ID NO: 71660 - DNA, 451 bp, Glycine max
  Clone ID: PAT_MRT3847_35722C.1
ttgccgtgctacactgttgcagtgcctccttcttggggggggggggggggggggggggggggggggggggggggggggggggggggggggggggggggggggggggggccccaattgggggaaggtttaagggtaagggggcccttaaagccgggccaaaaaaccttaaaggaccctttgcccccccaaaatttgccgggataaaaaatacccaatttaatgcgccttttttagggacctagggatttttggggaaaaaggattccctttttggatgggggaaattagaaacccacagccggcttgaaagggcttaaaacttgcaatttgcggttgggtagggatggccccatttcctggggaaactgccaactggaaactttaagcccttaaatgcccataatccgggtaaaaaaacttttggcggggccccctttaatagcctgataaa

SEQ ID NO: 71661 - DNA, 3221 bp, Glycine max
  Clone ID: PAT_MRT3847_35723C.1
cggaattcccggggctcgagccgaaactgaagaaagcagcgattttgaagtctctccaaaccattatggttgtcttcctgctgatagtactctttagcagcaacaccaaagcagaaaaagaaacaatccacgaccatgcaaacaaaaagacctacataatccacatggacgagaccaccatgcccttaaccttcaccgaccacctcagctggttcgacgcctccctcaaatcagcgtccccctccgcggagattctctacacttacaaacacgtggcccatggcttctccgccagactcactcccaaggacgtagacacacttgcaaaacaacccggcatcctctccgtcatccccgaactcaaatacaaactccacaccacaagaactcccaacttccttggacttgacaaagccaccaccttgttacccgcctcggagcaacagagccaggtggtcattggactcctcgacaccggcgtctggcccgagctcaaaagcctcgacgacacgggcctcggcccggtcccttccacctggaaaggccagtgcgaaattggaaacaacatgaactcttccaactgtaacagaaaacttgtcggagcgaggtttttctccaaaggctacgaagccgcacttggacccattgacacaactacagagtcaaagtcagcgcgtgacgatgacgggcatgggagtcatactttaaccaccgcggcaggctcggttgtacccgaagctagcctcttcggcttggcgtcgggtacggcgcgtggaatggccacgcaagcgcgtgtggcggtttacaaagtgtgctggctcggcgggtgttttacttccgacatagccgcgggaatcgacaaggccatagaagacggcgtgaatgttctgtccatgtccattgggggaagcttgatggagtattacagggatataatagcgattggatccttcactgccatgtcacacgggattctggtgtccacgtcagcggggaacggtgggcccagtcagggaagtttgtccaacgtggcaccgtggataacaactgtgggagcgggaactatcgaccgcgatttccctgcttacataaccctcggaacagggaaaacatacaccggagcttctctttatagcggtaaacccttgtcggattcgccgcttcctcttgtttacgctgggaacgcgagtaactcttctgtagggtatctatgtttgcaagattctctgattcctgagaaagtttcagggaaaattgttatatgtgagagaggtgggaatccgagagtggaaaagggtttggtggttaagcttgctggaggtgctggaatgatattggcgaatagtgaagcctacggagaagagttagttgctgactctcatcttcttcctgctgcgtctttgggacaaaaatcaagcgagattttgaagaactatgtttcatcttcacctaatccaacagctaagattgctttcttagggacccatttgcaggttcaaccttctcctgttgtagcggcttttagctccagaggaccaaatgcactcaccccaaagattctcaaaccggatctaatagcaccaggagtcaacattttagccggttggaccggtgcggttggaccaactgggttgactgttgacacccgccatgtcagcttcaacataatttctggaacatccatgtcatgccctcatgtaagtggcttagccgcaattctcaaaggagcacaccctcagtggagccctgccgccatcaggtccgcactcatgacaacagcgtacacgagttataaaaacggtgaaacgattcaagatatttcaacaggacaacctgggacgccgtttgattacggtgccggacacgtcgatcccgtggccgctcttgatcctggtctcgtctacgatgccaacgtggacgattacttagggtttttctgcgcactaaactactcgtcatttcaaatcaagcttgctgcgaggagggactatacgtgtgacccgaagaaggattacagagtggaggattttaattatccttcttttgcggttcctatggatacagcttcggggattgggggaggttccgatactctgaagaccgtgaagtactctagggttttgactaacgtgggagctccgggaacgtacaaagcttcggtgatgtcgttgggggattcgaatgtgaagactgtggtggaaccgaatacgttgagtttcacggaattgtacgagaagaaggactatacggtgtcgtttacatacacttcgatgccgtctgggacgaccagcttcgcacgtttggaatggacggatgggaagcataaggttggtagtccaattgcgttcagctggacatgatgggctgtggaaaatgtatgacccaaataaaagggcccactcaagtgttgtaggctcttcgtggtttgcttttgggcccggcccgatacggcttgtttttattatgtatctcacttattcactttgctgtttttattccgtaggctgaagttcaggagaaaactttatatatggaataataacaataattgtacatagaaaaagataatggtcgcatctgtatgtatgtatcataatggctttgaatctgaattatccatatcttcccagctttgcatcttttagtctttacttgttctgtcattttcctgtgggaatgggcattttaaaagtataagtattttagtccaattgcgttcagctggacatgacgtgacattatgggctatggaaaatgtctggcccaaattaaaaggcccacttaagtgtcgtcagctcttcatggtttggctttgttctaacccaatagagcttgctgttattatgtatctcacttataacatttgatttctgcattctcattattatattttgaaaagttgattctaaaatataaatttatattttaaaatgaactttacgaaatatattaaaggatgcaacatttgagagtgcaggattcaatagtcctcacttattcaggagaacacttcgatatatcgatatatggggaataataattgtacatagaaaaaggtaatggtgcatctgtatgtatgtatgtatgataatggctttcaatatgaatgattcacatatcttcccagctttgcatcttttggtctttacttgttctctcattttcacgaggcaacagagattctaaaattaatagtattttatcccatgcgaatatcaatt

SEQ ID NO: 71662 - DNA, 1289 bp, Glycine max
  unsure (1)..(1289): unsure at all n locations
  Clone ID: PAT_MRT3847_35724C.1
gtaaaattttacaagcttgacaagaaagcagaacctgaaatttttgtaggttatagctcaacttcaaaggcctacagaatctacctaccacagagcaacaaagtaatcgtcagcagggatgtcaaatttctggagtcagatagttgggactggaaaaatgattagaggtctgagtttcaggaagagaatgaagatgttgatgaataacctatcagaggaaccagatcactttcagacatctaccaaaggtgtaatgttgctgtgatggagcctgagggatatgaagaagctacagctgatcaaaaatggagaaatgcaatgaaagaggagcttataatgattgaaaaaaataaaacatgggagctggtggacagacctaaccacaagaaagcgattggtgtcaagtgggtttatagaaccaagctcaattcagatggttctataaacaaatacaaggcaaggcttgttgttaaaggatatgctcaagtgtttggtgttgatttttcagagacttttgccctagttgccagactagaaaccttaaccacgcggccgtctcttgctgcacaaaaaggttggattatacatcaaatggatgtgaaatcagccttcttaaatggatacttggaggaagaaatttttgttgagcaacctgaagggttcgttgttcaaggacaggaggagaaagtatatcgattaaggaaagctttgtatggtttaaagcaggcaccgcggtcatggtatagcagaattgatgcacacttggtgaacttaggcttcaaaaaaagtttaagtgaatctactttatatgtgaagaagactaatggtgaaatgcttgtagtatctctatatgttgatgatctactggtttcgggaagcagcggggagcatattgacaagttcaaggaagaaatgaaagatgcttttgaaatgacagaccttggaaggatgacattctttctcggtatgcaggtggatcaaaaacagaatgaaatatttctttgccaggaaaaatatgcaaatgaaattctcaagaagttcaacatggaatggtgcaaaccaactgcaactccaatgaatcaaaaggagaagttttacaaagaagatggagctgaaaaagtggatgaaaagctgtataggagccttataggctgcctaatgtatttaagtgcatcaaggcctgacatcttgcatgcagtaagcttgttatcaaggtacatgaactgtgctagtagaattcattntcaggcagcaaaaagaattcttagatatgttaaaggcacaattga

SEQ ID NO: 71663 - DNA, 459 bp, Glycine max
  Clone ID: PAT_MRT3847_35725C.1
ttttttaaatcaataaatcatgcataagcatggccaaataatggggacttccagaaattctagttcgacggggtaaaaacacaacaactctctcttacagtgaaagaatataagatgaatgctacatgataatctaaagatacagaacctaagtacaagcaacctatttcttttgtggggcattttacaaactaatgtagtatattttgtagttacaaaagccatgactctctaatcttatcgattctgactgtttctgaaaaacttgacatcccaacgtcgcagtaagccgttcaagacctgacctgttggattcttaataacagttaacgtgccttttgtattgtgcgaaacgtcagtgtctgatgaactttgtaagctaccagaactatcattaccagtagaagcactctctgtatcgccagactcggtgaccgatgaagtgtccaatggtggtag

SEQ ID NO: 71664 - DNA, 245 bp, Glycine max
  Clone ID: PAT_MRT3847_35726C.1
ctgttaggtgtttcccttttaattaatattacggaactgtgtatgagtgaataagtggatctgggatcttgtattccattgggttgtgattagtctgtgttatatttgggtattgtgctagattactgtgtcttgtgagcatggtgattgagattctccttacagtttttttgtacttgctagataacgtttattgacatggatcactgtttttgtatacatatgtatctggattttgttataaa

SEQ ID NO: 71665 - DNA, 474 bp, Glycine max
  Clone ID: PAT_MRT3847_35727C.1
atcactttctacttgtacacatctgcatacaaatatcttgcaagggttacgccaaacaattcttgacttaatttctgattttggggacaaaaacagtgtgaagggagtagttgaaaaaaaccacagttgtgaccaagaagaacgcctgctagaatggggtgaaagcaatggtttaatgacacagttaaaaatagcttatattgaaggagccagtcggggtgcaatagcaaggaaagatctaaaagttggagacattgctttggaaattcccgtgtccattatcatttccgaagagcttgtgcatgaaaccgatatgtatggtgtcttaaaagagattgatggcatatcatctgagacaatattgctattatggagtatgaaagaaaagtacaactgtgattcaaaattcaaaatttactttgacacactcccagaaaaatgtaatacaggtttgagtttcagcattcaagcaat

SEQ ID NO: 71666 - DNA, 1081 bp, Glycine max
  Clone ID: PAT_MRT3847_35728C.1
gtgatgaacctattcatttagccagtatctcttttttcaaaccaccagcgcttccttgctagtggtatccgggtggcttggggttctaattgcaccaaaggcaatgaaaaaggtcacgtggaaccatctaaaccaaaagcacaagaagttcctgcgaaaattccttctcagcaagtgcctagcttcacatcctcttgggcagttgatgacttgttggaattaacagactttgaatcaccagacaaagtaaggcagttttgtttcataattctagttgcatatattagctaaaaaattagagtgattttgataaaggaacctagtatggttatgatcacacagaatttgtttctcccaccaaaaagatcccagtgaccaccatctaatcagtagcccattttcagaaaaagcaaccagcccctctccatctggtgaaaagctcagtgctgaaattgcagtagtcaacattgttcctgatgttgctgctgggagcagagttggaagtccaggaggcccacttgcatccaaaacctttaccattgtcacactttgcatatcataaaccctaatgcctgcattgttaatttctccaatcacatctccaactgctagtttggtccatgaatcagtgacagccaccatgggatatacacgtacaacttcctttaaagttgtcattgaactctgaaagcatgtcttccgcatgactgagttgcttggatctatagtctgtaaaatgaagttgaccaccttgtcaaggtattgagccgaattctttggagaaccacgcatgatccttataagagtcaacaaggacaccatgtgaacaggtgaatcagatgcagtggaccaaatttggctttcaatcacagtcaaaaagcctggtatatcagccatagctaaacttggaagaagaacctccaccaaagtctttttaatagaaaaagatgcatctgaaatttctttcactaacttggaagatggaccactcaactctacttggaaaaaaatatccccaatcagacgaggaatctcagagacaatgcattctttccatgtactttccatgccgtctgcaaag

SEQ ID NO: 71667 - DNA, 822 bp, Glycine max
  Clone ID: PAT_MRT3847_35729C.1
attcccgccaagcccgagaaagaattcccgccaccgccaccataacctgtccctaactctttgagtcactcattcggtgccccgggtcgacccacgcgtccgtggctccttcccgccgcaacaccaacggtcgatcaccgctcgtcaatcaacagagtcaaatcacttccttcttcaccaaatccgcttccccttcgccctctcccactctctccaaaaccaaccctaaccctaaccctaaccctaaccctagtcccacccctgctactccttctcctctcaatcccaaacgctccaagccccttcttgtaatcggcgcttccacttctccaccctccgcttcgccttctctctactttcaagagctcattggccgaaggatcaaggtttattggcccttggacaaagcctggtacgaaggctccgtcaaatccttcgatagcctcacctctaagcacgtggttcgttacgacgatggcgaagaagaatccctcgacctctccaaggagaagatcgagtggcttcaggaatcgtcttccaagaaacttaaacgcctgcgtcgcggcgtccccgccgttaggaagatgatgatcgacgacgacgacgaagaagttgaagaagaagaaagtcacaaaaaagatgatgatgatgatgatgattccaatgacgaagattgggggatgaaggctgcattggaggatgctggggatgccgaagaagatacggatttagaggatgaaaacgacgtggcagagagggctaaaggaaaaaggtagagactaaaagcgggaactaaagcggacagagaaacaagagccggca

SEQ ID NO: 71668 - DNA, 488 bp, Glycine max
  unsure (1)..(488): unsure at all n locations
  Clone ID: PAT_MRT3847_3572C.1
aggccaggngcagcgcccgggccaaagnncnnngngccaagggnncagcagggacaacagggacagcgnccnggnggaaggcgnacaggngcagnccagcagncccagcagcccgnnccaaggangccacagcagangctacctagggggcgngncaatcgnnanccnccggggagggggangccagangnnncnatgcccggggnngcnggaggnangnnnncngnnccatangangngggngggangccacngcgngangcancaancncccagcaaaacccggggggggcnnnagcaacagcncgggctaaggcnncnccagagcagcagaggacgaagcngggngagaancncnacccccnngnggaacagnnagagccngacaangcngccaaagngacaggcangcnncnngagaaggaccagacngaagnncngcannngcncgagncgccagaagcccngaaagcaaaggnggcggaggc

SEQ ID NO: 71669 - DNA, 252 bp, Glycine max
  Clone ID: PAT_MRT3847_35730C.1
atgccaggacttacacacgattctcctcaaattttagccagctcgcatcaattagaccttgcaccttacgcttcagggccctacaatgctcaatggaacgccccggggcttctctatgagaagcacacgttgcgttcgagtcgtattctcggagaaatggaggttgatgaaccttggctggggttatggctaccattgaattatcaagtggcgttcgtcattggaagtgcggtagacaggctttatggttga

SEQ ID NO: 71670 - DNA, 655 bp, Glycine max
  Clone ID: PAT_MRT3847_35731C.1
cacgcgtccgcgtttacaaccccgaaaacgacgcccccgagggtcgtcgtttacgtccccgaaggtaaacgaccttaacgtgttgagctctttgcttcaactaacggatcagatatcatcgttctccacaagctcaaaaccctgttccctaaatctcacagccaccctcttaaaccgtgtttcctcttccaccatccgcaaaacgcagctcctcggcgtcgttttcgaggagctcttccgcgtttcgaatctgaactccgattccgttctgttcctctgcctcgaggaaatgataatccaagatttctccaacggaagcaagttcaatttgctcatgcagatcgataccgtcgcggagagcttccacaggctcaccggagaactctccacgctcctcgacgtgttccctctccaagacctcgacctcaacgacgacgttagggaactcgttctcctcgtcagaaaacagtgctctgaagcgaaagcgttcatcggagccgaacatgtcagcctccgcaacgacgtcgttttggtcctcgaccggatcaagaacgagatccgccccgaccaaacgcatctcgcttcaatcttcgaaaaaatgggagattcgcgaacgcgtcgagctgcagagcggagattgagagcctcgaggaag

SEQ ID NO: 71671 - DNA, 413 bp, Glycine max
  unsure (1)..(413): unsure at all n locations
  Clone ID: PAT_MRT3847_35732C.1
cttgagagctgttgtaccaacctttgattcctccaacactctgttttatagttaatacaaggaatactttcaacttaaaggaggccaatgaggatcgggttgggatgctntantccataccactgactgcttttgccaaatgcaactgcaaaaagggttgaaaaaccttataggaagcaaaaatgaaattcattaatcccccaaaggtcccaaaagactatgacattctcgccatacctctaactgacgcagctctaataatgctgtcattaagaaagggaacacctgaacaatggcgtcagtatctaaagtctccttcagttaatcatcaangtagctgtatagtcctgtatgtcatgtcatccacactaaatttattctttctcacccccnctacccgtttccattattac

SEQ ID NO: 71672 - DNA, 967 bp, Glycine max
  Clone ID: PAT_MRT3847_35733C.1
aactatcctcaattggctgagaattataacaaaaacatggcgctttctccggaaacgtttacaacccgaaaacgacgcccccgagggtcgtcgtttacgtccccgaaggtaaacgaccttaacgtgttgagctctttgcttcaactaacggatcagatatgttccctaaatctcacagccaccctcttgaaccgtgtttcctcttccaccatccgcaaaacgcagctcctcggcgtcgttttcgaggagctcttccgcgtttcgaatctgaactccgattccgttctgttcctctgcctcgaggaaatgtacatcgttctccacaagctcaaaaccctaatccaagatttctccaacggaagcaagttcaatttgctcatgcagatcgataccgtcgcggagagcttccacaggctcaccggagaactctccaccctcctcgacgtgttccctctccaagacctcgacctcaacgacgacgttagggaactcgttctcctcgtcagaaaacagtgctctgaagcgaaggcgttcatcggagccgaacatgtcagcctccggaacgacgtcgttttggtcctcgaccggatcaagaacgagatcgtccccgatcaagcgcatctcgcatcaatcttcgagaagttggagattcgcgacgcgtcgagctgcagagcggagatcgggagcctcgaagaggagattcacaaccgtagcgaagaacaaccgaaaacggatctcgtcgctttgatcggcctcgtccgtttcgcgaagtgcgttctttacggcgcgtcaacgccgtcgcagaagaccgtcactatgcggcggaatcagtcgttggagctaacaattcctgcggattaccggtgcccgataagcctagagctcatgcgcgatcccgtcgtggtggcgacaggacagacgtacgatcgtgcatcgatcaagctctggatggattcaggacacaaca

SEQ ID NO: 71673 - DNA, 840 bp, Glycine max
  Clone ID: PAT_MRT3847_35734C.1
ggctcgagccaaaaccacttgacacaccttgccaacttgcccttccttcaaaaaccaaagagagacagaacgactccgagaagaaacaaagaaacaaacatgggaagcaacaaaacctacgaggaagaagaaagcacggttctattttcccattcccaaacacaaacagagttgttacccttcaacgagaacgacccgcaggacatggtcatataccaagtcctcaacgaagccaatgctctcaccaacacatttctccctcagaggcttcaccaacctcagttgtgcctcgagcccaccagaaacataacaaagaagcactacagaggagttcggcgccgcccctggggaaaatacgccgctgagattcgcgactctgcccgccacggcgccagaatatggctcggcaccttccaaaccgctgaagaggctgccatggcttatgaccgagccgcgttcaagatgaggggctccaaggctttgctcaatttcccagctgaaattgttgctgcaacggagttatctttcaataatactaatagtaacaatcacgatgctgtttctgattccagtgctggtagctcttgcacgaacaattccgttcagctaaataggaatcagtcagaaagctgcacaagtagcacaggttagctaaatggggttcaacaattaattgtagaaatctttttttttttttttcgcaattgggttggtttgttataattattataattatttgtatctgtctgtcttacaggacaccgaaaattaattcatttaatgtgataccatgttcatgaatgggtttaccatgatcatgcatgggttaaaattataaaa

SEQ ID NO: 71674 - DNA, 265 bp, Glycine max
  unsure (1)..(265): unsure at all n locations
  Clone ID: PAT_MRT3847_35735C.1
acttttaaactataaagaaagaccacanatttttnattttggggataatttaattcctttttagttattattataaaaancaaaaaaggaattanattatccccaaaattaaaaatttttattttgtganaaanattttataanattcttttatatacaaacnanctttaanctataaaganagagaaaaattttaacttagtagnttnncaaantgtnaatagtaaactaggcnaaangattttcgcntgtntaacanaaacat

SEQ ID NO: 71675 - DNA, 518 bp, Glycine max
  Clone ID: PAT_MRT3847_35736C.1
cttcaaaaaccaaagccagaccgaccctaagaagaaaccaacaaacatgggaagcaagaaaacctacgaggaagaagaaagcacggctctattttcccattcccaaacacaaacagacttgctgttacccttcaacgagaacgacccacaggacatggtcatataccaagtcctccacgaagccaatgctctcaccaacacattcctccctcagcccaccagaaacataacaaagaagcactacagaggagtccgccgccgtccttggggaaaatacgccgctgagattcgcgactcggcgcgccacggcgccaggatatggctcggcaccttccaaaccgctgaagaggctgccatggcttatgaccgagccgcgttcaagatgaggggctccaaggctttgctcaatttcccagctgaaattgttgctgctgctactgcaacagagttatctttcaaaagtagtagtaataataataataataataataataacaatcccgatgctgtttctgatt

SEQ ID NO: 71676 - DNA, 388 bp, Glycine max
  Clone ID: PAT_MRT3847_35737C.1
aagaagttccagagcttgttgctggactgtgagtgtttataaatcaaggatatgcagatgttgcaatgaatcagattgtttcacttgtagccacacaattccgcagtcagctgtcaaaggcacttatccttacaaacagaaaatggacatcttcaattagagagcaagagaaacataggttgactcctattgtggaagccctgtcctcaagttatctgggtcctgattattctcagtcaagagaatatgctgatatatcattaaaggacatagatcaagttgccaagagctcatttcctttgtgcatgcgtcacctatttgataagctgaaagaggatcatcatttaaagcatggagggaggatgcaactaggcctctttctgaaggg

SEQ ID NO: 71677 - DNA, 567 bp, Glycine max
  unsure (1)..(567): unsure at all n locations
  Clone ID: PAT_MRT3847_35738C.1
actattaattagatcttaaatagagcatgcctcttaaggttacagaataacgaccaagagtaaaagaaaactataataaaaaaattgtggttaaagtacgggcatcagcgttcaagatggagcccagataggcaagtaaacaacgctatccctgtaattttattttatttactggtctgaagccaactttattgaaactgaagacattcagagcaagctcaaacacaagaaaaatacgcataaatgggcctagttgagatcaaactttctgtaaccacaccgatccagtccagagtttagcgacgtacttgctgtaatctaaaagttcaaaattcctgtatagtttcaaatatgctagaggactataaagcaagtaatctcacatctattgctaggctatagaggactaccaagtaccaantaatttctcgtctaggaaagcaacggctaggagctctcgtcaacctaaaaaaatcccatgttatgaaagatcggggtgtttttctttcaatactcaaaagtcaaaactaaccctcgttaaatctcagacaccccaaacagcatttt

SEQ ID NO: 71678 - DNA, 443 bp, Glycine max
  Clone ID: PAT_MRT3847_35739C.1
caattgtttccctccttgtacattttctctttgtcgtttctaccctttttcctgttcattcttcacaatttggtgaccaccaccctgttgcaaatcaaacttttcggccgaaggaagagctgcgcaagttgaacgccatcagaaatcggcttcagctaatcaacaagcctcctgttaagacaattcagagttcttatggtgatataatagactgtgttgcgtctcatatgcaacatgcttttgatcatcctcaactgaaaggacaaaaaccattggatcctccagagagaccaagagggcataaccaaatggatgatgatttgagtgatagctttcagttatggagtttatcaggtgagtcatgtcctgaaggaacgattccaattagaagaacaacggaagaagacatgttgagagcaaactcttgtcgcagatttggaagg

SEQ ID NO: 71679 - DNA, 372 bp, Glycine max
  Clone ID: PAT_MRT3847_3573C.1
ggaagtccaggcacgactacgcctgctgcgggtggaagaagactacggatggggttttagagggcctgggaatgcgatcgggctttgatggaagttagctgtgaagggaatgaggaaaaacgtggaattgtcccaaaattcattcacaagatatggttacttatgctcatatttgtccataatgaagattgggattggtagaaacaaatgacctgcttgccctcttgagactactttctgcttacgttacaactaatacacatctctgtatcactctattgactgagagaaacactatgccgacgagattaacacctagctgatcattcagctacaccacaatcactgacctatctacttggatgtctttat

SEQ ID NO: 71680 - DNA, 543 bp, Glycine max
  Clone ID: PAT_MRT3847_35740C.1
ccaagggcagtttattttgtaacaaaattacaattccaaaggctgaaacaaagacacgcccgtttgcctaacaacaaagggatccgtcaatacaaaaaaaatacgtgggggaagataacaggattccgtttttaaaaaaaaagaattgagaaaagcccgtttttagatagaccctaaattttgcggggggcagagcaaagacagattgattttttgtgggaggggggttacataaaacccccaacggggcagggttgaaccaattgatatttaagggggtttttgccaagggcaatcccggtgtttggggggccaaaagttataaaagcggggccctttacatagaggttgtagggaccaaaaacaaagggcccaattttccatggtaccttacgcggaattttaacaaggacaaggaccttgccgggggtctggtcttgactgaaaccaacaaaattgaagggtgcaacggggacttttgtgccaaaaaaaaatggggaccacacattcttttttttgggaccttggtatgagggggggatt

SEQ ID NO: 71681 - DNA, 354 bp, Glycine max
  unsure (1)..(354): unsure at all n locations
  Clone ID: PAT_MRT3847_35741C.1
gctcgagcgagcatgacacataaaatgtctactcattatcccaatgacatgatcccccanctgggtatcttgtattcatttcggctanctagctttcaccctaccttttttaattccttccctttattattaatttacaaaatccaaacaaatctctcgatcttgatcatctcatcattcaccaccacaatgtcttctttaagtgccaaaaatttggcagaaggatcaagctctccaacagaaaactaccaacatagtccaaggacacttaaccgctatgagtctcaaaaaaaaaaggattcaaacactttttgtcaactctttaataataaaacccccccaaatccctttttt

SEQ ID NO: 71682 - DNA, 368 bp, Glycine max
  Clone ID: PAT_MRT3847_35742C.1
agtttttgttttttttaaaaaacagcgaaggacaactggccatatctacattttgataaaagcatgagcacacttataacaaacaaaagataaagtcacaagacattctaattttatacatataaatatcacaaaaggaacatcctaacatattttacatggggggggtatcctatcatactctgaataccgataaactgagagctggctgatttacccgtcacagaaatttcctgagtgtccaaaattatagactgaaactgacccgctttgttgcgcatatgcaactaatgaagggcgcgtgagactatccgtttaaacagagcatgcaaaccaacagacaaacaaacacactttaagcatcaccc

SEQ ID NO: 71683 - DNA, 391 bp, Glycine max
  unsure (1)..(391): unsure at all n locations
  Clone ID: PAT_MRT3847_35743C.1
gttaaatntttgttttnnttggggggcggaatggcccaaattaaaatcttaatctaacacaaccaggtcaataaaactagaattaaatttcaaggacaaatgttgggtaggaataaaggtgaaacaaaaccacgccaaattcttttttcttggtgaaccaaattcccaccttttggaggttttcaacccaccagcttcataaaaaattcctttggcaactaaaggcttggccaccggacccaccaacattgttattaaggtaattaccttgaggtggccgggctttggcttaaactcctattggaaccccttattttggtgggggtttttggtgccttaaattatctaaaggttgatccaacccttttctttttggcccttggggagaatg

SEQ ID NO: 71684 - DNA, 238 bp, Glycine max
  Clone ID: PAT_MRT3847_35744C.1
cggtccggaattcccgcctcgacccacgcgtccgtctagaccgtgagctgaggccttttatttatttttaaaacgttcgttttggttattacttgttacatggatatcttaacatcttggtttttctccggtcaccaatattatctttacttcggaatatcagatagtctcgatttagagagtggctcagttgtttattctgtttctcttttaagggtgacatgacaaatttaccctt

SEQ ID NO: 71685 - DNA, 506 bp, Glycine max
  Clone ID: PAT_MRT3847_35745C.1
gggttaacatccaaagcttttttattaacagtaagagccagggttagtttttgtagcctcggctggcccttcggcctctggcacgctcgaacttccggcccttggaacggacatagggtttggtgtggctgtgtggagttcctggggccttgccaaagtgtcggtacacctctcggcccttccgaggaccagacaagagcacagtgcccctgcccttgggagactccagggccagctggtcgaaggtcaggatcttacccccagccttgaggatccgacttcgggcccggctgctcaccctcagtgcacacaccttcagcttgggcacttccagaatccgcacatcatctgtgatcgtccccacaaccacagcagttttgttctcccgaccaggaagcttcatcttccggatcattcgggacagggacagaggtggccggttagttcggctcataaataaccttttcagcacaacctggttgaaggtggagttggtccgtctggcc

SEQ ID NO: 71686 - DNA, 154 bp, Glycine max
  Clone ID: PAT_MRT3847_35746C.1
caagtggttagtgaggaatgtagcgaaatgcgtattcgtttttggctgagtccttctgagggacgtggacctgccaaacgcagaagctccggcagaagttgcgatcgcaaagatgtcgaagaggtgtagtattatcgctcggtttcattctccc

SEQ ID NO: 71687 - DNA, 230 bp, Glycine max
  Clone ID: PAT_MRT3847_35747C.1
tattcaattcattcattcattaaagtattacagaggggaggatcgcaacgcccatggaaagcatcgagggagagcaaccaacagtatctaaccgccttccgtcttgtagctaccacccgcaggaccttttaaggcgctcggataacttcttgccgctgcccgaagaaacaacttggtttccaccttgttgaagaaccatgcgaaccagcatatgtggagaaaccgccata

SEQ ID NO: 71688 - DNA, 153 bp, Glycine max
  Clone ID: PAT_MRT3847_35748C.1
acgcatacgcttgcgatgtctacatgtaccgatctatcgttcttcatgctcgtacactctcaagagctaggtgccacaatactgtggaccaatcacatgcccatctaatacaactaccatgtatatttaaactatactgatgaagccctccaa

SEQ ID NO: 71689 - DNA, 426 bp, Glycine max
  unsure (1)..(426): unsure at all n locations
  Clone ID: PAT_MRT3847_35749C.1
cacgaacccaatacagctgcacttgaaccaccttcatcttccatactttctctcatacccaaatgcacctctctcagagagctcaagcaaatccaagcctacaccatcaaaacccaccaaaacaaccccaccgtcctcacaaagctcataaatttctgcacttcaaaccccacaatcgcctccatggaccacgcccaccgcatgttcgacaaaattccccaaccagatattgttcttttcaacaccatggcacgcgggtatgcgcgctttgatgacccacttagagcaattcttctgtgttctcaggtgttatgctctggcctccttccggatgactacactttctcctctcttctcaaggcctgtgcaaggctcaaggcacttgaagaaggtaaacagctgcattgccttgctgttaactanggg

SEQ ID NO: 71690 - DNA, 337 bp, Glycine max
  Clone ID: PAT_MRT3847_3574C.1
gaagctcggaattcggctcgagtctctcttgacctttcagcgtcgccaatctctctctctcgagaagagtcccctgctggagctccacgtacccattgtgcaggagggcgaacttcaatgacacatgaatcatatcgcacgctgggcgcagaaaaaatgtgcgcggtggttgtgttagattttctggaccttttttaacgcgatgccaccatatgtgcttgcagaggcggaggcaatcgagtacgctctcttttgactgctgctgccgtcaccacaacctactcaattcgcattataaaaagttgcagcaacggctgtggtagtagttttaataacc

SEQ ID NO: 71691 - DNA, 708 bp, Glycine max
  Clone ID: PAT_MRT3847_35750C.1
acgagtttccctacactttctttaaattcacttatattggttcaccaaactcaaacaccatatactgggcgaagagaatggaggatggaagtgagaaatggaattttcaggggaacaagaagctgaatgcttcatccatctctgtgagaggggtctataacatgttgatggagagagtcaacaatagccgagacaagaaacctttggttcctctctgtcgtgtagatcccaccgagaacccattgtttcggactaccccagaagctactgattctgtttcaactgctgttaactcctataacttcaactgttaccctcccaccgttggcttacctgatgcaaagagggctattgcaaattatctctcttctgatcttccataccaattatcaccagagaatgtttttctcaccatcggtggcacacaagctatagatataatcttgcctgcccttgcacgttctgatgccaacattctccttccaagaccagggtacccgcaatatgattctcgtgctagttgttgtctcctcgaagtacgacattttgatcttttgcccgagagaggttgggaggttgaccttgattcccttgaatctcaagcagatgaaaacacagtggcccatggtcctcatcaatcctagcaatccatgtggaaatgtcttcacataccaacatttaaaaagggttgctgaaattgctacgaaa

SEQ ID NO: 71692 - DNA, 380 bp, Glycine max
  Clone ID: PAT_MRT3847_35751C.1
aattatttatagacatcatgaaactcatgcaacatctctgtttgctaaggttcagagtgatgatttgccattgcagcggcatcagctaagcatgccaatacgagatagtgagaaatattttaaaggtagctctaagattatgtgcagaagtaagggtgggcaggcattgctgagatgcaggaaatcagttgacttgattcatggggaaggaaaggtaaagatggggaaaatatggtcaagaacatgtacttttgtctttatgaaagagttatttgacatctgtttactttatttctttttggtaactgttatttatataatgtccgctgtactacctttctcccataaaaaatctatactattatcttttattaattttt

SEQ ID NO: 71693 - DNA, 151 bp, Glycine max
  Clone ID: PAT_MRT3847_35752C.1
attaaaacgaaatcgaattattgtggggtgagggcactttatccaagtattcaacccacttggtttcttttaactcatgattaatctcaactactcccacaagtttatctggcgcactcagtgtttacatagggtcttatcactcatactt

SEQ ID NO: 71694 - DNA, 283 bp, Glycine max
  Clone ID: PAT_MRT3847_35753C.1
ttcccaattcggggggcgacccacgcctgcttacggatgacaaaaaacaccgaatgggatattgtataagcgaccaacgaagctctggggttggtggtcataacaattaaaaaactatcaaacacaatgcttaaaataatccacgagaataacgattttaatatgacagaacagaggtaggatgctaggatccagaaaataaatatgaaccaacatcaacgtcagctgatgggtctatgcttacaaaaacttgtacacactttcttattttgatcattaaaaa

SEQ ID NO: 71695 - DNA, 2057 bp, Glycine max
  Clone ID: PAT_MRT3847_35754C.1
ggctcgaggcaatttctgcggcacctgtgacagaagcctgcaagacccataccacttctgctccctctcttgcaagatcaattatctcgaacgagacagcgcccacgccctcttctcttctctctttcgtctttctctttctctctctttcagatttctgtctctctcatctttctctctccggaagggcaaaccctaaagaccgtttgcacccaccaattgtcatggatgatgatgtgttgaacatgcccaattggggttattacgaaccctgccagctgggtccatcttgctcttcagcccatgcccggcttctctccctctcacatccataaaaatttgaaattgatggggtccttcttctaccgctgagcctcaatataaatcatttgtgctgtgaatttgtttttcttcgccataacgagcgagatctagtcccaaattttggaaccctaaaatgggaattggggatctgcacgccgagctcgtcttttgtgtgtgctgtgtttggtttgtgaggaaatgtagggatcgtaatggcgttcagatcgtggggttttcgttttgcggcgattagatcgagcaagttccgatcttttttcactcgggaacggtgaatctggacttgtttgagcctgatttgagaatttgggttcgggaatcttagacattttcaatttttgttgaatttgtgattttggtatttttctcatttttcaattaaattgcatggtgttttgtctatctggaatttaatttccccgttgaagtgtttgtgttttattagttcatggtatatgttgcttgtttgtttaagattattttaatggtggacattgaaagaagaagcaaaggacatattttgaaactttatgatcctttgttttgtgttgtgtgtagttgtcatggatgatgatgtgttgaacatgcccaattggggttattatgaacccttcagggggggacatcttggtcttcagctcatggttataactttgctaaccctattgatctgaagactcattgggccagacatggcaccaacaagtttgtcactatcaggtagataggtgctctgctgagacacatgacatttggtctgtttcacctgtatatacacctgtgtgatctttcacacagatgttgagttatttgttatccaagatttttctgtcgtggtacttctacctaaaatttggatattccggttcttttgttctttttccctcttcggcttttatgtgacaagggacaaccatgttatatggcacaaagaggtagctgtcaaaaaggaaggtggcaagtcaaagaaaaggcaaactaagggtgctctgtcgactccaaaagctaagaaacctaggaagccgaaggataatggcaatgctccagttcaacgtgcgaagccaccgaagaagactatggagcttgtgattaatggaattgatatggacatttctggtctacctactccggtttgttcatgcactggggctcctcagcagtgttataggtggggctgcggaggttggcaatcggcttgttgcaccacaaatgtgtcaatatatcctttgccaatgagcatgaaaaggcgtggtgcaaggatagctgggcggaaaatgagccaaggtgcttttaaaaaggttttagagaaacttgcagctgaaggttataactttgctaaccctattgatctgaagactcattgggccagacatggcaccaacaagtttgtcactatcaggtagataggtgctctgctgagacacatgacatttggtctgtttcacctgtatatacacctgtgtgatctttcacacagatgttgagttatttgttatccaagatttttctgtcgtggtacttctacctaaaatttggatattccggttcttttgttctttttccctcttcggcttttatgtgataagggacaaccatgttatatggcatcaacatttatgtagatgagttataactagatagactagctttggataattctccttcacattttaatttaaaattgttaagatttttcaatgctatgattttttgtg

SEQ ID NO: 71696 - DNA, 277 bp, Glycine max
  Clone ID: PAT_MRT3847_35755C.1
gcagtgtgtgagatatctagcgagctagcggttttaaagatcggatttgtgattgggaacgctaacgattgcactgtctctcttcctcttctctttcgactcatacctcattcataatcttccaattcaacaaccttatcctgacactcacccattcccacatctatacgcctatcggcccttccatggctttaaagcgcatcctcaacgagctcaaggacttgcataaagactccaccacttcttgcagttcttgtccagtccactgacgacatgt

SEQ ID NO: 71697 - DNA, 698 bp, Glycine max
  Clone ID: PAT_MRT3847_35756C.1
cccatttcctcttctctctcctctctcttcgtctttctctttctctctctttcagatttctgtctctctcatctttctctctccggaagggcaaaccctaaagaccgtttgcacccaccaaggatcgtagtggcgttcagatcgtggggttttcgttttgcggcgattagatcgattgtcatggatgatgatgtgttgaacatgcccaattggggttattacgaacccttcagagggggacatcttggccttcagctcatgcctggtatgactgaacgggacacaaagccatttttgcctggtcgggatcctgctatgttaatgggtgctaatggaacttttcaccctcgagattgcgttgtttccgaggcaccaatgccattgaactatgtcagagatagttggataaaccagagagataggttttttcatatgcagcagcccacaaatcctaattatgctgttcttccggagacatcaggagctcctaacttgaaaattatacagccacccgatacgtcaagagatgagaaagtggatagagttgaagaggtcgttgtcaaaaaggaactgggcaagtcgaagaaaggcacactaagggtgctctgtcgactccaaaagctaaaaaacctaagaagccgaagataatagcaatgttccagtttcacgtgcgaagccaccgaaaagactatggagct

SEQ ID NO: 71698 - DNA, 218 bp, Glycine max
  Clone ID: PAT_MRT3847_35757C.1
gccgacgacactagggggcaagaaaatttggaccagacctacgtttctttgaccgggtcaatcggtcagacaccaatggcgcctcatggattctttccttcttatcaacaccttccatgccgcatccggccatcgcttgaggctcctccgtctgtagtaactatagggtggtgcagacttcacaccatctgatccaggaagccaacacccagtggtcc

SEQ ID NO: 71699 - DNA, 445 bp, Glycine max
  Clone ID: PAT_MRT3847_35758C.1
aaaagatgacaagtcatatttcatatacacaacttatttgcaaaagcaaaaagtagagaaaaataaaataaaggatcgtataacttttttattgtagaatagaatacacaaggcatgatctaataaaaaaaattaatcatactaacaattaacatttatcaataaaaaaaatatactaggcatgagctacaattttttacaactttcatatatgttttcttctcaacacatgttcattccattttttatgctgctgtgttaataccatttttgttgtcattagattcttgcgtcaaattatctgagaagaatttgggtgaaaatataaaactgtcatatcgttcatttagctagactcatcaatatgatttttattggtatgaagcattaaagaccaattcattgcattgtggatattgacactttgaaccttggaaactattat

SEQ ID NO: 71700 - DNA, 741 bp, Glycine max
  Clone ID: PAT_MRT3847_35759C.1
attttggttcatttttattttttttgtgaaattagaacagctaaaattttggctatagattactttggctcttagaaattagaataatactatcaaaacatttcttttctgtatacttacgcctggacttttgaactggttcaaagcccacatggtgcatagaaaccaagatgttcaagcagcacaagcttggtatatgggagctgttaatttctttattgttcctctgacagtttggcatcagaaaatttatgatacaagtctggtggacttggctggaaagttagacgctctttgctatgtcagtaaaataggaattgggatggaagatactttagataccatcatgttttatgattttttttttctacactgcttatgtacgtgtctgttgcgatgacatggtatatggtgatgccccagaaaaaaaagaaaagataaaaggctgcagtgtgtgctatataagcacaccacgttggcttttatgttattccaaaactttgcaatatgaaatcatatctcctactgcattacctgaaagatgtaccgaaatgcttaatcttcatttggattttgatagtcactgagactgcttggagattcatctgcttcctttgaaaagaattgcgtgagaggcattcaagctaacagggaaagaatttcaaaattactgcatgagtcactaatgcttgtcacatccttaaacccgaaaattggttatgacaaggcagcagcagttgc

SEQ ID NO: 71701 - DNA, 230 bp, Glycine max
  Clone ID: PAT_MRT3847_3575C.1
acatgtggttggggacgtggtggtttccccaccactgcttggaggggatctgcccataacaggcggtcctcagatatcaacaaaaggattcgcacagcacttggcaaaggtaagaaaattgtttttcttactagagttgatccttttccacacgctatactggctgttcttttcggcgctaacaatgaaattctgagtgctaacgccgctagtcctatgctgacactact

SEQ ID NO: 71702 - DNA, 454 bp, Glycine max
  Clone ID: PAT_MRT3847_35760C.1
aaaaacgaagggcctttgttccatgaaaaattctcccttaataaagaaatttcttcaaataagtcattttcaagctaatccctttataacaaacaaaacatctttttttaaatgaacccggtcaatgcccaaataaccatggttctttttttttttcctttaatttaaaacaggggagtaaaattcctaacctggaaaaattttgatttagacttgtttacaaagctccatcttgctttattttggggagcaggaccacctttgctgggtttaatttgtaatacgcccaacctttttataaataaggggaattccttttaagttttttacagggtaaactgttcttcatggaaaaaaggatgttaagggatagtccccccctttaatgggcttaaaaatcaacctcactgaaaatccttttagagccgtttgagccgtttgagccaatttccga

SEQ ID NO: 71703 - DNA, 469 bp, Glycine max
  Clone ID: PAT_MRT3847_35761C.1
ggccggccctttccctttttcaggctggttattacataccaccgacccttatgccgaatttagacttgcacccacctcccttagaatctaggcttaccatccgatcaacaaatagcgagcgccccatcgttgaggattcccaaccaacaccgacttatgaaaaccttttctacacttgtgcggcaatccgctacctttcataagaacctttatccgctgcatactgacgcaccaccagattctgaggggtcgcacaaagtgctatacttcgcagcacacccccaatggtttctaaaagaagatcctcactcttgaaatgtgtaccctctgaggccccccaatgctgcacctgacccgtcctgtgctgaaacactgggaaacggccaggtcatgcatatgccgtactcgggtgttccaccggagggatctaaccgcgccgctgccctaccttttggatatggaagagctg

SEQ ID NO: 71704 - DNA, 643 bp, Glycine max
  Clone ID: PAT_MRT3847_35762C.1
ctcttttttttttttttttatattttttttttttttttttttttttttttttttttttttttttttttttttttcttttttttaaaggaaacaaacccttgtttggcccccccctaaacccccaggaaagcaaaaaatttccagtaattttacctcccaaagggtttccccccaactatttttccccaagcaattatacaaaccaatttacttaacggacattactttaagggcccaaaatgggtgccaaccctggggttttttgaacccctgaatgggggaactttcaaatttaaacccccaggaccttttttttttttaaggggaaaaccccaaaaacccaatttttttttgggccccgggaaaaaaaaaaaacataattgggcttgcatggaaacattgcccaaaaccttttttggaaaaaaaaaccatttggtggggtctaaaaaaaaaataattttgggggggagggccaaaaatttccgaaataaaaaacggcgggtcagtagcatccccttcctccaaacttttttaaaaaaaattggaggcaaatttatgcgggtttaattggaaaaaatgcccaaatagctgggaaataatttgaccccttttctgagggtttcttttttccaacacagggggg

SEQ ID NO: 71705 - DNA, 1641 bp, Glycine max
  Clone ID: PAT_MRT3847_35763C.1
aacctggaaatccggctcgagaaatgatcaaaataaggtgacattcaaataagaagtgataaatgagtggctctgccttcccacttcggcactctattctatatatagcaatggcatccaccacacatgcattccaaacccaaccgtatccttcattcttctcctaaatcctaatccttcttcactttcagttctcagcatgggaagttctggaacaaccgactatggagcatacacataccaaaaccttgagagggaaccttactggccctctgaaaagctcagaatttccatcactggggctggtggtttcattgcctcacacattgctcgccgcctcaagaccgagggacattacatcattgcttctgattggaagaagaatgagcacatgactgaggacatgttctgccatgaattccatcttgttgaccttagggtcatggataactgcttgacagttaccaagggtgtggaccatgttttcaatcttgctgctgatatgggtgggatgggttttatccagtccaaccactcagtcattatgtacaacaacaccatgattagcttcaacatgattgaggctgccaggatcaatggtgttaagaggtttttttatgcctctagtgcttgtatctatcctgaattcaaacagttggagacaaatgtgagtttgaaggagtctgatgcctggcctgctgagccacaagatgcatatgggctggagaagcttgcaacagaagagttatgcaagcattataacaaggattttggaattgagtgccggattgggagattccataacatatatggtccttatgggacatggaagggtggaagggagaaggctcctgctgctttttgtcgcaagacacttacttccaaagatcgatttgagatgtggggagatggattgcaaacaagatccttcaccttcattgatgagtgtgttgaaggtgtactgagattgactaaatcagacttccgggagccagtgaatattggaagtgatgaaatggtcagtatgaatgagatggcagagattgttcttagctttgaggataagaatataccaatataccatattcctggcccagaaggtgttcggggccgtaattcagacaatacattaatcaaagagaaacttggctgggctccaactatgaagttgaaggatgggctgagaattacatacttttggatcaaagagcagcttgagaaagagaaggcagaaggtgttgatttatcaggctatggatcatccaaagtggttcagactcaagccccagttcaacttggctcgcttcgggctgcagatggcaaagaataaagctgctagtgcaagggatgttcggcagttgcagcagatggcaaagaataagagtgaacaatgcatttccaagtgaagggcaggcttttatgttgctattttgtagagatctatggttacagattagctattgaagttagttttggaacttgttcatgtatttgtaacggatggtgttatgttcttgttttgtttgaggtaataataataactgctgcttaaggtgatgttactgaaagaaaaattttaaaatgtgttgaaagtctatataaattgattaataatccttgaaaaaatcttttttgccttaa

SEQ ID NO: 71706 - DNA, 246 bp, Glycine max
  Clone ID: PAT_MRT3847_35764C.1
gttggattttccagcctctggatcagttttcctggagagtttctctctgatctgtttggaggcacagatattagtttgaggtttttgtggctgtggtcaactttggaggtttttcagtttcaggagatgatcatgcctctttggaggcttatgagattgcgaaaaaagggtcaatttagtgatccttagatgctctttttcctctgatttcaaagccgttcttaatttcgccagggatttcgtctg

SEQ ID NO: 71707 - DNA, 875 bp, Glycine max
  unsure (1)..(875): unsure at all n locations
  Clone ID: PAT_MRT3847_35765C.1
ccagcgtccggaacgtagaaaagaaaactaggataaggtaaaggacgagaaaaagaaagagaaagagagaaagggactctgtccccttttgtgtgcgtgtgttgtgtcaactgagtgaactctcaagtgaactaacatcaccaaaaaaaccactctcttgcaacctcctcatcacattgctccttctgagacaggtttggctcaactgaagtaaggtttggttatcttattaccttatctctcaccacatttaaaaacacacaaaacacagttacacaagtgaagtgtggttttgggaagcaagaatgtatggggattgccaagttatgtcaagtatgggagggaacgtagtagtaaacccagacaccctcttctcttcctcgatccagaactctagcttcaactcatccccaccatgccctttcaaccttttccttccatgaaagaagaagatgggatcttgcgagggaaggaagagattgagagtggatcagggagtgaacaattagttgaagacaagtcagggaatgaacaagagagtcatgaacaacccacaaagaagaaacgttatcacaggcacactgctcgccagatccaagaaatggaagctttgttcaaggaatgtccacacccggatgataagcagagactgaaactgagccatgaattgggtcttaaaccgcgccaggtcaagttctggttccagaaccgtcgaacccagatgaaggcacaacaagaccgtgcagataatgtgatacttagagctgagaatgagtctcttaagagtgagaattatncgttacaagctgcactgcgtaacgtaatttgtccaaactgtgtggccatgcataatgggtgctgatatgggcttggat

SEQ ID NO: 71708 - DNA, 354 bp, Glycine max
  Clone ID: PAT_MRT3847_35766C.1
ggctcgagcgcaaacttaccactccattctcacaggcgcgagcatacggacccggcgatcagcagagacgggtaccatttcccactaaccctaatccatgttcgaatgcggctggtaggaacggtacagaacgccaaaacatggctcctccataccgcctggaggggcatatgcaagatccaagtggaggagcctgcgtgtcatgtagtcaatcacagagtggacttacgggcccagcttgcataataggcgatcactatggcaccactacatagaggggtcacgcagactgaggaactcaaccgggtgaaatgcggaccaggcagactcatactataatattgagccacgtac

SEQ ID NO: 71709 - DNA, 405 bp, Glycine max
  Clone ID: PAT_MRT3847_35767C.1
gtacaggcgacacgcggctagaggttgctcttatcaagttgaatccgctattacactctggactttgtcatggtacacaggctagcctaaacgttaggttcttcataccacatacagtggaagatgaattgacaggtgctgcaagagagttctttgagaaccatggtattgaagcgagcccggagaagagagcggtttatctaactcggatgttcaagtggttcagtggggcttttggacgagagacagaaatatcgttgcggataatgaatctcttcggaaccaaataacgtcggtcttgtgacacatttcatgggagagagtggaccgaggcacatctgttcaccagaattatcattggtcaatgaattcttgattagttttgatgcaactactgattattac

SEQ ID NO: 71710 - DNA, 620 bp, Glycine max
  Clone ID: PAT_MRT3847_35768C.1
ccacgcgtccgggattagtttcccttatttaaacacataaactcactgtaagttttgtaaaatatctcagttaatatgaattagtgtttcattcttttttctctctcttcctccctctgtatctataaccccataatttcaactactaaattgatgacactaaataagtgtgcagtaacactatattatatactgatggctataatgatattttttttaatagcccagtaaatacttcacgatcttataactgcccttgctttcacattcttataacaaataccagaaggctgctaaccttgtttatctttggtaataacatggaaacctacaaaggtgaaaagagaaaggacgagagattttttttttgcacgcgtcaaattattattctcagttaaactttgatcactttgtttgattagctatcttattaacattgaatggtatttcagtatagacaactattgtatatttttctctgatcacacgcacacatatattactattatatcttgctaccttgtgacttggaagcccccaatttcaaatccacttggttggagtctgatacatattgggttgccctttaattttatatccttttgtgcatctcagttact

SEQ ID NO: 71711 - DNA, 687 bp, Glycine max
  Clone ID: PAT_MRT3847_35769C.1
cggacgcgtgggtacaattccaagttccaaccctcaagaaaccgaagaatctctatgcacatatcctcagaactccctgaggaaatggccctcaataccaccaagtctaaaaactcaacttcaccttcaaatttctacttgtgcaccactcttttcttcattgtcctcttcaccatacccgttcttttcctcctccatgccccaaccaccaccatctccatatgcaccaacccagccaaaacatggtctggtgatcttcagttagttgaatttgcgtggaaccgcctctcgttttttgaacacaagccaccaccctttgctctcaaagttgctgtcttctccaggaaatggcctattggcacaacccctggtggcatggagcgccatgctcacacccttcacacggctttggcacgccgtggccatcaaattcatgtcttcacatctccacctgatcaagatgagagcatttcaatctcatcattctctgaggtgaacaaaaacaaccatcaatcttccccttacatccatttccatgaaggtgagcctggcaggtggcactataacaaggcgtgggaacagtttgtagaagaaaacaagccagaaccattcgatgttgtgcactcagaaagtgtggcactccctcactggctagcgcgcaacatgtcaaatcttgcagtgtcttgg

SEQ ID NO: 71712 - DNA, 570 bp, Glycine max
  Clone ID: PAT_MRT3847_3576C.1
tgaacaagcgattgagcatctcatttcttgttgtcctttgattgaagatgtaactttgaagtgttgttctgtattgaacaatggtggcataggaggtctacttgagcccaggacctctaggatgcaatctattagtatgaatgctctgccaaagctcaagaaagttgatgttcaagggataccggagattattatcattgatgctccaagtctagagtatttctgtttttgtcctggtggagatgtgcattcaccttttaagatgaattttgacaagtgcagaaatttgagagtgttatacttatggtcattgaagagcactactatcacagacaagtggtttcttgatctatttactaaatttcccttccttgagtgtttgaaatttgtcaattgcacaatgtctgagacgattaatatttcaagtgctcaactcaaggtcttagagttatcaaattgctccaaattgaaggagctcaacctggatgctccaaatttattgtcatgtggatattgtggtgatggtgcctcagaacctataatatcttttctgaaaagctctagtcaact

SEQ ID NO: 71713 - DNA, 655 bp, Glycine max
  unsure (1)..(655): unsure at all n locations
  Clone ID: PAT_MRT3847_35770C.1
ccacgcgtccgctatgatctagactagaggcttagttagggttttctgttaccgccatggatttcgagagtaggaggcttcatttgctcatctccgtggttgccatcattgctcttagcttcacaggtactttactttattcaaattcaaactattctataaatttaagatctgggttggtacagatcgcaaatctttctaattttctgctgcttgttttgaccttacaattcttttatatttaaatttaattacatgacatttatcaacaaagcctatctgaaaattttagttcacgctaatttgtctgtctctttattatatctaaagccctaaatttcatcctctaaacattatcctctttcctaaatggtcctcaaagtaaaaagttatataagtaatccctcctagtattagaaatcatgctaagtaatctctcaaaattgaaaaaccggtccccaaaacattagtaaaatatatcaacttagaggctaaatttgatagatattcaatacttgaatgattacttgtatagttatatagnncttgggttcttattacttcacggactattcaagagtgtgactgaatgagtaatacatgaggagggtaatacataagggaccaaattggacgggttattccttttcatttc

SEQ ID NO: 71714 - DNA, 143 bp, Glycine max
  unsure (1)..(143): unsure at all n locations
  Clone ID: PAT_MRT3847_35771C.1
ggtaattgttgtaactttttgattcctaanttctntanaattcganattctaattncnggtangggaaaganattgnctgtgtntgagtgcagcntnagctncgaaaaggcgaggngcctgctancggcancgatttnggaac

SEQ ID NO: 71715 - DNA, 421 bp, Glycine max
  Clone ID: PAT_MRT3847_35772C.1
ctccttccataccatatattgacatctgtacacacatttcgaccgggcggaataaatcactcaaaaggccaccgttaagctcatgatattgcatataaaaagaaactattgtttccgggatacaaagtgcaccaaggggagtgttttaagaaattggcttgcgttttaagcaagtttgttatacatgaattgaatggaaccaaacctttgggaaaggttcaaaattgggaactcctaagccttccactgataaggaaccaccaccaacctcagccttaaaagcctaggaggggcccaaaaggcgatactattaccaccaaatttggtacctacaacaacaacaacaagtttaaacctggacattactgcaaaattggcaggaggcatgggactaaaggtggaactctacccaatgttcctg

SEQ ID NO: 71716 - DNA, 266 bp, Glycine max
  unsure (1)..(266): unsure at all n locations
  Clone ID: PAT_MRT3847_35773C.1
ctntcaacctaacccatcgttcgcacgganccgtggtgnttctgnctctgtccttttttcctttctctcgttaccagaaccagaagnaccatttgnngcnaacatggattnngaccantggatctccaaggtcnangagggccngcatctncttgnagacgagcttcaacttctctgcgaattgtaaaagngctcgtatcgnggngtccaatgtnnagttgtcaatagtccagtgactgtttntggtgatattcatggnngntcnt

SEQ ID NO: 71717 - DNA, 597 bp, Glycine max
  unsure (1)..(597): unsure at all n locations
  Clone ID: PAT_MRT3847_35774C.1
ttgctaatagttgaacacactctgtgatcgtgtgtgtgcttgccttacgtgatgcacaattgattaataattcaatcaaagccaaagaaatgaatggagctcagacataaacaattcttcttgtctaatattcactcattccatttttactaatatttaatattcactcattccaattttcatcacaaacacacactggttcatctacctccgacccaaaacaagggaatcaagactctacttcccgttccaatcanaggatatacatagaaaattatgattcgatcgaacaaaaataaaactcttcgtagcgatgggacagccaacaatgaatcttcttcaagtggaataacaggataaagggatgatcatcttgatcatgaacttgcacagctcacaaaacttacgtcaagtcctcatgacctttagagttaagttgttcctggtaggatcacgttacctgtctctactgaaaaaatgttgtccggtaaagaaggtaattattctctaaaagggacattctcctcancacatggatcccatgtgttaaccctctattggcctaccaaatgtccttgaattatgggtcagatcaaa

SEQ ID NO: 71718 - DNA, 1161 bp, Glycine max
  Clone ID: PAT_MRT3847_35775C.1
acgagtgatatttgagtgatttaagtagttgattgttagatgtgattattgcagttggggagtggagactggagtgagacaggcttaaaaggttatagaactatacaaaattgagaaatctgatattgagtaagagaagagaattacaggtatacttgttgtcaaaccgaaccgtggagttaaaggttttgaggactcaagacagaatcactgttatggaggattcagagcaaaggaagaaaaggctgaaagaaatgcgcgtgcaagctgatcaagctgaagtttctggtggtgtggaaggttctgtggtgcctggttttctctcaaatcccctgatggaagctccttcaactatgccatcacaggataaatcatatgctgctccaaggtttgactattatactgatccaatgagtgccttctcttctaacagaaggaacattgccagtatacaggctgcactggataatttccctccttcaaaatttggtggttctcctatggcacaatattcatcaccacatccagaatcaacaaatccacagaggactccgcatccaattcaagcttaggcagcagcatatatgaagccaatctggagtggacctggcggccctgctcactataacttcccaatacatccatcaagtggtggtacttatccaagccctagatttgaaccatcgggtggtccattatataactccggacagggcatagctcacccgcccagttacagtcctaatcctccttatccaggatatggtgacagtcctaggcccagttacaatcctaatccctctccaggatatgggaacagtcctaggcccagttacaatcctaatccctctccaggatatggtgacagtcctaggcccagttacaattctaatccctctccaggatatgggaacagtcctaggcccagttacaggcccaatccttctccaggatacaggaacagtcctagccctggtcaagggcgaggcaggggtttctggcgcaacactggaagccctgtttcaggacggggtagtggacaaggaccgaattttcatggtcatcggtccaacgaaaacacagctcgtggtccagatcgattttacaataggtccatggttgaagatccatgggagcatttagaacctataatatggaagg

SEQ ID NO: 71719 - DNA, 208 bp, Glycine max
  unsure (1)..(208): unsure at all n locations
  Clone ID: PAT_MRT3847_35776C.1
cccacgcacccatacaaaaactattacaatttatttctaanacacaacaacaaatgcgggtcgttaaatcccaaactttgactgcctccaaacttaactcacctacccctaatccctctataaatcactataactatacaaatacattatcaaatctgaagtcatcaacaacctctaatacttacaattatacactattcacaatttt

SEQ ID NO: 71720 - DNA, 284 bp, Glycine max
  Clone ID: PAT_MRT3847_35777C.1
gacgttccattctcttcaaacgtaacgcagcatcgctattctcttcattccatggctttgcgcagccagcagaccgtggattacccgagtttcagactcgttatcgtctgcgatggtggcacaggaaagacaagctttgtggggaggcatcgcacggggagaattctgggaggagatatgagccgggcagcggtgtgggggtgcacccattggagtttttcagagactgtggaaagagtcgatgttactgccggggagcggctgggcaggagaagtttggtggg

SEQ ID NO: 71721 - DNA, 125 bp, Glycine max
  Clone ID: PAT_MRT3847_35778C.1
gttttgcgtacctttatcccggcaaatagaacggcaactgtatgagcaattggcgattaccaactgagactagagccgctgcagttgtgaaactcggaagagacacaacggatctggaatcgaag

SEQ ID NO: 71722 - DNA, 136 bp, Glycine max
  unsure (1)..(136): unsure at all n locations
  Clone ID: PAT_MRT3847_35779C.1
ncancgcangcncgcgtacgtaangctcggnnttcggctcgnngcaggcnanctgttgatgttganngacatgncagatctgtcatnncncncncattacgtanacnctatagggcttngcagcgagatccttgcc

SEQ ID NO: 71723 - DNA, 607 bp, Glycine max
  Clone ID: PAT_MRT3847_3577C.1
tctttttttttttttgactcacctttctccatataatttcattataacttaataatcaatgatgtgggtaaggttatgatgataaatctgtgaattctatagctgtatctcttagatctaccataagacaggctaaattggctttgaggaacttgagaattgacttctaaacaatattaattatcaacaattgaacttgtctggtagtagtcagaaaaagtacaatatagtggcttcttcatggttctgtttcccacaagcctccttttttagtggaagctggcataaatttatatggaaatatatgcttgagcgtttctatttcccttcagatatctgaagtactacctcctttgactcaatgaacaagaaatgaaaaattacgaattatgtcatttattcttaaatgtatactgtcaaaagttgaactttctctcttcactttagatgtattcatagaaatttactctaaccggggctaaattgctggggcagatatatatttaaatgcaatctgtgtgtctaatgaataaaggcacatccatttttcctccctgtctcacctgattggaccttttcaaattactcgttacatttctatatttta

SEQ ID NO: 71724 - DNA, 230 bp, Glycine max
  Clone ID: PAT_MRT3847_35780C.1
ggcgagactgtccgatggtgtcatggcatcgatatctggtgtagtgacgccttaggatagtactcgcatctcgtcgtcgggtgaccgccattgctgtacctcgattggcgatccgcacttgtggactaggcatggtcgcgtatatcccatgccacgccactttgttgttaggatcctgaactggttggctgtcgcttcgcctagaagacacggccctccccactgctatt

SEQ ID NO: 71725 - DNA, 507 bp, Glycine max
  Clone ID: PAT_MRT3847_35781C.1
ccgggccggaaatatcccggtctacccacagcgcgcgcgcagactcttgggtagtgatatcattagtgtcactggagtgactgttacaccaatgcggggggtatatgctacaatacattggttcatgacctctcaagagtgcgcccccaggaccctactggttttaaacccacacaaaccgtcagagaaagataggtggatggggaaactgacgtccccccagggcactgcccgaagtgttaaaagactgcctatgcctatagggggaggagctaacgcaaagaatgctctgcatcatgaacatgccaaatgctgtgctatgaatgtggagatatttagatggagatctataccttacaagtatctaagatgacttgcttctacaataagtgtacaggctctcatttcatagcagtggtaaaattggctgtaggcaccatcaatgttgaggcttttgctcacacggtgttgcagactgcagagacacacgatagagttgactcgaaa

SEQ ID NO: 71726 - DNA, 423 bp, Glycine max
  Clone ID: PAT_MRT3847_35782C.1
gaccaaattttactttacatttttcacattagttttcttattttgtttagccacacctctgagaccatgggtgcgaagtttggacatggagtgatgatactatttgttataagtgcttcaatgttttcgatgagcatggccaacaaggactggtcctttggtttcaactacactgattggtggtctagattcgggaatcatgctcagaacaaaacacaacaaccacccaggcagatacttgtgggtggttctgagcattggcactacggtttcaactacaccgattgggccttcaagaatgcaccattttaccttaatgatactctagtttactaatatagtaaaacatgagtatactaccttcaatatcaatactacataattagaaggtttgggagcgttgggaagatttattattttaca

SEQ ID NO: 71727 - DNA, 501 bp, Glycine max
  Clone ID: PAT_MRT3847_35783C.1
gatatatatatatataggcattttgcaacaacaaaatatgaccgttggaaaaccaacctacagttgtcaaaacaaatctaacaaactagtttgactcattaaaacaaaatcttaaaaaaatctaaaataaatattttattttataaaatagaattaatatatatttataaattttaaattaaaacacaaatatttatcaactgttgctgatggaagatatagtttatctagtcatgatgtaaaccttgatgatcaagtgcaaggacaacacttgggtgagtattgctttcaccttatgcatataatgtgcattgcagttgaaactaaattacaatagagattaatttttagagtcaagtaaaaagttcgcattgtcaacctatcagaagcattgttttttctggtgattagtgttggaaaataaaacaaaaaatgaaaaaaaaaattaatatgaagaagatgcacagtcttgaattaaataacgaaatagcagtagcaaat

SEQ ID NO: 71728 - DNA, 301 bp, Glycine max
  unsure (1)..(301): unsure at all n locations
  Clone ID: PAT_MRT3847_35784C.1
agntnntgcaagcgtncgtnagcnnnggaattcggctcnaggctgtntacctaaggnanacaangtnaagnanaggaagtnnnggttacgaggtggntnagctggttcnnaaangttcnngaaaagtngncatgggganangncantggtcataaanngtngaagagnatcaaggggagttgtaggggnaancttttgggggcntcnagnaaaatggggtttnngangttggtggtngaantggtctnngnagggggtnttggcgngggacgnggantttcgnnnaaatgggtgtggctgn

SEQ ID NO: 71729 - DNA, 389 bp, Glycine max
  Clone ID: PAT_MRT3847_35785C.1
gtgattttgattatcctcgatcactggtagccgcaccttacaccctataacaaatgctatcgaacctagatttcaagaacttgtcaatgttttcctacttctttgagcgcgatcacttacgggacagacaatcactctgtgggctggccacagactttgtgaatcattatcttttccactcttagattatttgctgaacactctcctatgtgatatacgactcctgtgtcagatttaaactcattatgactctcactcagttctttgtttaatcacacgttcaagctgccgaaaattcggattagcactctcactctcctatatggttaggatgttgcgggtagactgacctattccatgccttcatttcactttatcgttgtgactga

SEQ ID NO: 71730 - DNA, 489 bp, Glycine max
  Clone ID: PAT_MRT3847_35786C.1
aaaaaggtaagaatatccatctaccccaattgaaaatgttctacttgttggtggtcttaagcctagtctactaagtgttagtcaattatgtgataaaggctttctagtatcatttgactctcataattgtgttattgaaaataaacatgataaaaatataaaacatataggcgatagatcaaataatgtatacatgataaatttagataaaaacatcaaatcatgatcaatgttttcttggttaagatgatgattcttggttatggcatagaagaattgctcatataaacatggaacatctaaataaactaatttctaaggatttagtaattggtttaccaaaacttaaatttgaaaaagatagattatgtgatgcacatcaaaaaggaaaacaagtaagggtttccttcaaatcaaagaatattatttctacaacttaacccttacaacttttgaatgtggatctttttggtccctctagagtcgacc

SEQ ID NO: 71731 - DNA, 162 bp, Glycine max
  Clone ID: PAT_MRT3847_35787C.1
gtgctaaatggaacttatattggagaactaacgggatattccacgcaagacatatatggctcatacagactgaaacgtgatactatttgcgactatataataccacaaaatattacagagcttgtggactgaagtacaagcaataataagaaatatgcataa

SEQ ID NO: 71732 - DNA, 267 bp, Glycine max
  Clone ID: PAT_MRT3847_35788C.1
acaaaattgtgttggttcgattctgccaataaataatatattatcgagctttagttctagtatgtattgatttcacagtgattgtatgctcaaccaggacttataaagggtcaccagatactcacactacaacttacactaaaccatgtcttgaactctttatatagaataaaaactgagagaacaacacatactagaactaaagctccatattatattatttattggcagaatcgaaccaacacaatgttgacccgagcacgaatc

SEQ ID NO: 71733 - DNA, 191 bp, Glycine max
  Clone ID: PAT_MRT3847_35789C.1
cagaatcctctaaccttaaagagacagccaaaaacaatctcactactgctctttttcatcatcgcactcccattgcggggaactttactgagcggcgggggagccacaactttcatactgctacaacatacacactgtcaccacacccactacttaacgaaacaacctcaactgcattaacttatttaatc

SEQ ID NO: 71734 - DNA, 363 bp, Glycine max
  Clone ID: PAT_MRT3847_3578C.1
gaacatcgttttctcgtttgtgttttggccgttaaaatcataaaaaaataatggaaaaccacatctacgcctcctcttacagcccttccaccaactacagatccttccgtgaccatcccgccgccgacgccatgttcctctcccaccacctccaccaccgtaccgacgcctccgacgccgccgtcgaagccgccgacattgcccctcccggcgtcaccttccgaatcgcctcctccgccgcctccgcgaatttcctctcctcctggccccctgtcgccgccgccgccgccgtgccttccgcccttgacctcaaacgcttctccgacgctctctaccatccaacaattttgggtacaattgggc

SEQ ID NO: 71735 - DNA, 1089 bp, Glycine max
  Clone ID: PAT_MRT3847_35790C.1
gaacaaaatttgctttgaaaccattaaattaactagtgtcatacattgatcttttgatcaactaaaaagagtggttatatatatatataacggtttcactcaaggcatatatttatatgttcccattctcatctagtgatgaatcagaggcagagtcatctagtgttgagtttgatgtagtctccaattgacccccactctcgttatcggaagttcccactgtcctttcttcatgagggtgttttaggcaccaagacattatactagctgttagtgtaaggatcatttttggattcacctcagtgatgtcttcaggaagcaggaatatagaacatccaagctttcttgcaatactgataatgtaggtggcgttcatctttttctcttggtaggttactccctttgttacaagaccccaatttacagctctgggtgtcactgaacttagaagctcaaggaaaaatattccatctgataaacttttatccttaaaactgtccatgcggctttggctattagatttttatacccctgcacaatgtccacccagcaacatcagcatcaaaaaatttaatctgtttccctattttcacaacttggtgcagttctctacttttctgaatggcatcttaattggaggtttgttagcaatcttccaattgacaatccctggtgacaccttgtcaagagtctcaagaagaacccacccatttcggagatcctcaaagacattgttgatatatgttgaatttccaaggctattcatccataggcgaaatgctctttcttctctagagtcttgggtgtcatctggaaatgtctcaaggagagacatttgttgttttgtctgggctgaaagtccattcctgtgctggaaaatatgtgcaacaaaggcaagattaagatttggtgatccttccactatgtctcttgcagttaagtatcgcttgcaacccatcttatcagcatgttcaagaactaactttgctctttcaaagggatttttaactgccaatgtggagggattggtgtattcaggtgccagaacatttagaaggtgtgcaaagcctcagcatccttcctcgagcc

SEQ ID NO: 71736 - DNA, 1245 bp, Glycine max
  Clone ID: PAT_MRT3847_35791C.1
ctggttaatactgaatgttcagtagcgtttttttttcttctttcaaagtggatatggaaaaaagcactcctcataactgaggttccaaacttgcaaaaaataaaaacctcactatttacatagctgcttgaacaaaatttgctttgaaaccattaaattacctagtgtcatacattgatcttttgatcaactaaaaagagtggttcaaatatatgtatatattaaaaagaaaaaaacggtttcactcgaggcatatatttacatgttcccattctcatctattgatgaatcagaggcagagtcatctagtgttgaatttgatgtagtctccaattgactcccactctcattatctgaagttcccactgtcctttcttcacgagggtgttttaggcaccaagacattatactagccgttagtgtaaggatcattttttgattcacctcagtgatgtcttcaggaagcaggaatatagaacatccaagctttcttgcaatactgataatgtaggtggcattcatttttttctcttggtcggttactcctttggttacaagaccccaattcacagctctaggctgcactgaactaagaagctcaaggaaaaatattccatcggataaacttttatccttaaaactgtccatgcggctttggcttccagagctgctaaccttgctgttggcccactctaaaatatcagcatcatttatttcctttccacgagagtaaaatctcaagttcttgagaagttgtaggatattgtatcgcatcaattgccacaaataagctagtattaattttttatttccctgcacaatgtcatttccagcaacatttaccagcgaaaatttaagctgtttccctattttcacaacttggttgcagttctccacttttctaaatggcatcttaatcggaggcttattagcaatcttccaattgacaatccctggcgacaccttgtcaagagtctctagaagaacccacccatttcggagatcctcgaagacattgttgatatatgttgaatttccaaagctattcatccaaaggcgaaatgctctttcttctctagagtctagggtgtcatctggaaatgtctcaaggagagacatctgttgttttgtctgggctgaaagtccattcctgtgctggaaaatatgagcaacaaaggcaagattaagatttggggatccttccactatgtctctcgcagttaagtatcgcttgcaacctcgtgc

SEQ ID NO: 71737 - DNA, 1754 bp, Glycine max
  Clone ID: PAT_MRT3847_35792C.1
gagttgcagcaggtgcactgcacgagtttggtgcctctgtgctgtggggaagaaagggtgctagttcatgtgaggaaaattgggatatgcttgcatggacttggggaaaccatctaaatagaggctacacattttgcagatttgaagcaaccagccgaattcggatgatggagagcaaggcaaatgaggagatgaataatgggaatgagtggcatgtgcctatactggccatgacagctgatgtgatccatgctacatacgacaagtgcatgaaatgtggcatggatggatatgtctcaaagccatttgaggaagagaatctgtatcaggaagttgcaaagtttttcaaatcaaaaaccatgtcagattcatgacaaatgtgcttccttacttggcaaccaactagatgattggatttggagacaacacattttagtttgatcactgctagcactttcatgtcacatgtaacttgttacttttgctttcttgcatagagtaacacttgtttttgcaacatatttgagttgagttcgttgagggatcattactattactaatcggctgcagtttggcattattagagtaaaatgtataccacgccacaccccccaattgtgtacagattctggctcagggatgactggagtggagggcattttcaatatatgaaacacaatggtcgtacgcttaagatgcctaaaatgatccttctggcaaccaatattagtagtgccgaatttgataaagctaaggccacgggttctactgatactgtgatcaagaagcctcggagagctagtatggtggctgcttgtcttcagcaagttttgggtatggggaagaagaggcagctagggaaagacatgcctaatggttttctacatagccttctctatggaaagaaaattttggtggttgatgacaatggggtaaaccggagggttgcagcaggtgcactaaagaagtttggagctgatgtgaagtgtgctgaaagtggcaaagtctcttgaaatgctgcaattgcctcacaattttgatgcttgcttcatggacatccaaatgccagaaatggacggatttgaagcaactagtagaattcggatgatggagagcaaggcaaatgaggagatgaatggcagtgagtggcatgtacctatactggccatgacagctgatgtgatccttgctacgtacgacaagtgcgtgaaatgtggcatggatggatacgtctcaaagccatttgaggaagagaatctgtatcaggaagttgcaaagtttttcaaatccaagaccatctcagactcatgacaatgtgctttgaacttggcaaccaactagaagattgattggagacaacacattttagtttttttattttatcattactagcactttcacatgtcacttgtaactagttacttatgcatgctctcatgcctagagtaatgcttgttttcctaacatctttgagttgagttcgttgagggatccttacaattaccaaccggctgcgtttggcattattagagtaaatggtataccacgctacaccccccaattgtgtacagattttgggtaagggatgagtgaaattatgtaaattcaatgtttttccccatctcgttacttccccatcagaaggtttttatagcaatagctttttgtgtaaaggcatcttgtattgtaatagatttggtcattatgttaaaaaatgcatgcttatgtgtagtgtagcatatctttggtgcatg

SEQ ID NO: 71738 - DNA, 735 bp, Glycine max
  Clone ID: PAT_MRT3847_35793C.1
ggagagaaattttagtgattgatcttaaacgacaagtatggaggttacgttcaatttcaagaaaaattgcttgagaagctgtgtttgaagagcaacttcaatataaagtaaatgatttgtttttttttgttagatcagcatcaataaaaagtaaatgattgatcgattgattctagaggcatccgatacctgctcagtggtgtcaacagttgagtgttgaaatgggtgtgcccgctgagaacgatggctgcaaatgtggaccaaactgctcctgcaacccctgcacttgcaagtgaggtgttgggagagcaagcttcaagcagagatagcccttaattaggaataatgataaactattaatgtgtagctaaaaacttatgtattatgtctgtgatggatttcgcgcactctggtgttttgtgttaaacaaacatccttagaatacattggtcatgtcttgcctttcagcaacttcaagtgatttgaacttgcgatggccgtgataaccacatggttcatgtctttttccgcttgttagtcatccacatcgagcgcatcacccacaacaatgttcacggcttcaccgatgactttcgcgttcaccctcccaatggtgtcgtctcctagctccgaatggacaaggaccgctattacttcctcgatctgaaagccaaggctcgcgccgccttcgacaaggaacacgacactaccttctctcctgaggatattatgcag

SEQ ID NO: 71739 - DNA, 2910 bp, Glycine max
  Clone ID: PAT_MRT3847_35794C.1
gacgaattaaactttctcaatagatattttttcataaacaaagtcttggagattgaaccactaatacatgcttaatgctcaaggatatttgtcaatcatgtcacatcatattggttaatatataaacttattttgagacaaaatgacatctagagtctcccggcccctacttcactaaatcctcgtctttcctggttagactaatacaagctgaacatgcaccagctgttgctgacgagaactttgcaaatatgaaacaagataatgaaagccactttagacaaagctgacttccacttccgtactttctcagagtcctttccgaactgacatttatatgcatccaggccctccttaaaactaccagtttatctccttacatgggagggatccatgtggtaaaagattggaataactggttggttctttgttttcttacactgaaggatgtcgacaagttattcaaggcaccacaaggaagacgtgaaattttgggagagatcaatgattgaaatcctggatgcttctaatgcttgaaaaatagtgtctaagatttgatcgccacccttcaaccaacaatcgaagaaggtcttcaatctcgcatgtcgcaaagcaacataaagattacctatgaaggtgtagtgcgtgtatttcgctctaaaacacaaaaaacatcatagcaccgcttcgcaatgcccccttcatccgccatcacaatgaaacaattaagcagatatgaactttgtaccacgaccctcacaactaatggctttagcaattgtctcaacagacaactttactgatatgccaagtacttttccggtgaagtatcctccaatgactttgtttctgtacaccttggcaatcctccagaactcgcagatgagttcaggcaccaccaccttggggtcttccaaaaagtgatggatgccacacaacatgaggttggctttgatgacgtacccagcattctccaaagattcaatgttgaagaagtgtttggcattaactctaggttatttcactcaattcatgcagttttattctgtcgatgaagattgtgtccagttttgttctgatgaggaatattgtgatgcagacaccaatagttgtgatgaagttgaaaaggctgaggtataccgtggaaaaacattgagcaacccctcagtggcaactgaatcttcattcaaagatagcatttcactcaattcatgcaatcattctgcaacacttgctggaccacagttgtctgagtctccaaaattcagcaaaacttaaaggagaagtgtggctatttcatcaagttatctgggaagttggaacaatgtagcagagacttcaactttcagtaacaaagtgttaagcaaaccatttaaacagggagatcatgtgcaatcctcattacagtctaacaaggccgagtccttggcagcaagccttcagaagggattacagattattgactatcatcagcagaactcagcattgaacaaatcttcaacttccttctcctttgagcacttaacttgacaccatgtctagacattgacaaggatgactcttatgaccaaacaatacaacagaaaccttccagtgatgaagtaactgctgctttcctttgtgcatcttgctgggcgaaaatatcaaatgaagattccagcaaggcccaggctggaaatcctgatggaatgacagataaagaagtccaggaagagttagcccaaagtgacgtctcttttgattcaaccgagaaggagtcacttcttaaggaaattcagaatctaaggagtaagctgcaattatgtagtgatgcaccagttaaaaagtctacagacaaactaaggtcttctttggtgtcaagatccatacaattgcaaaaaagcggtgttttttcttatgataatggccatgaatacctagagaatgaaagacagagatggacagaaatgaaagtgagtggatctatcttactgatgaacttagagctgatcttgagtcctaccgccaacgtacagagaggttggagatggatgatgcactaaagagagctgttatgggacatgctagaatggtagaacactatgctgatctacaagaaaaatacgatgacttggttactaagcatgatgctacaatggaagggatagcagaggtgaagaaggcagcagcaaaagcctcagaaaaaggtcatgctcgcttcgccaaatctctttctgctgagctttctgcatcgagagaggaaagagaaagggaatcaaaattattgaaaaaagagaaccagagcttgaagattcaacttcgagatactgctgaagctgttcaggctgctggagaactacttgttagactaagagaagctgaacacgcaacagctgttgctgaggtacatttctatctcactaagagaagcaaaatttaaagatgcaaattgcaaagatgaaaagaaaacacaagactgagattaataccatgaagcagtacattacagagagcaaattacctgagtctgcactacaaccactgtataaggaggattctgatggggcgcacaatgcaactttctcctatacatatgatgatcaggcatggagagcagaatttggagcaatatatcaggagcatttctaattcaactgtaatattagcagttgatcaatttgatagcagagactgcacatatgatcaaactcaactatttgtctggcatcagatcctacttggatcaaaagcatccctaatgccacattcttttttgaattcctagaaattcattatatctttttccatgttgtgatcattcatcaggtgctctgatatagataggtggacgattgcattcctttacccgtagatttttcctggtaaacaaatctccttgatgcttttcatttcagatttcttttattccca

SEQ ID NO: 71740 - DNA, 458 bp, Glycine max
  Clone ID: PAT_MRT3847_35795C.1
aaatgaaaatgcttcttgattttcttttatatgtgagaattgaagacaatggcaggtgtcttacaacgcatattaatttaaaagcccaatcaatccccaacgggtcattcattcaaagcccacgatccaattttaccccgggggagaaaaatgcagattactcgaaagaactgaactgaagaacaagagaatccatggaacaaaacttagatacacatatgacataaccaatagacaacgttgacattatcctctaattaaaaacagatattttatctcgataattgttacttcaatgattattaatatcgagataaaatggcgatttaaattggaaaataatatcatcactggcttagctacatttatgcatctaagtttttttttttttttttttggacattttctaatatgaacaataatcactaccacttagctatcacaatgggaattggagt

SEQ ID NO: 71741 - DNA, 446 bp, Glycine max
  Clone ID: PAT_MRT3847_35796C.1
ggctcgagctcagctcatcacaggcacaagccacatcatgctttactacctgtgctaaacaaccttattttcatgagacttgaggctgcgtgcatcgtgctctaattccggtcctgtcatgaggtcttgggtcgcctggttcggccaaggggaatctatatggtttttatcaccactctgcctctctcttacgcattcaaagcaccctcctcctttacatgagcaaccacagggagaacgtgacatgagagcaggataaccctctatgcgtgcacttaaaagacttaccgcagcgctaaacttacatttccaggctatattagcccccttcaccttcgctatgcctggcttttcggcgcccatagccttctaaacctttgaagtggtccattctggctgctcgctcgaactcttacactcgtgaaaaagaagcccttgattgtcac

SEQ ID NO: 71742 - DNA, 815 bp, Glycine max
  unsure (1)..(815): unsure at all n locations
  Clone ID: PAT_MRT3847_35797C.1
tttggttttttatctctaactgaagcttttttgttggaaacaattgaaatgctttatacatgcttacaacaacattatcgtacatatccagtcttttttccccagagaaaatcttttactctctctatataatctacataaactgaaatcttttacaaggatttttacaaatttaacgagagaaaaaattacaccaattttggccagagcatgcaagctctgaccaatcaaaaatcacctgggtcccaggtttttaggagaagatgcagccaaaaagtcattttcatgagtgatatagctatggtgatgaagatgaactatcatcatctgaagagtcattatactgttgtctctcatgtaatccaggaaggggttgcggaagcatagggttaactggcacagggaatttatgagctgaactaaccatagttctctcatttatcattccaacttctttgcagacccggtcaagaactgctaggaagtctcttacaaccatgaatattctaaatggatgagcttcttcctttgtcaagttcccaagaaaatactctgtaatctccttcacatgggaggaagcaacactttcttgggcttgaatttttggaatttcctcctcagccattctgatgaatttgttcattgattctgtgaatttctgactgctttcatctgatgccatgngtttggtttaattgcacagcctctgctaagctagcaattcctttgggaagtttcaagacatcactgctgnagacttcagaatccatagctgctgcctttctcacatttgctagctcggaactcaggcttga

SEQ ID NO: 71743 - DNA, 732 bp, Glycine max
  unsure (1)..(732): unsure at all n locations
  Clone ID: PAT_MRT3847_35798C.1
atatttctagacattgcatgtttcttcaaaaattcggatagatgttgggtaacaagagtactggaagcttttgagttctttccagcacctgggataaacatccttttagataaagctctcataacaatttcagatagcaatctgatattaatgcatgacttgatacaagaaatgggtcgagaaattgttcatcaagaatctaaagaccctggaagacgaacccgattatggagacatgaggaagtgcacgatgtattgaaatataacaagggaactgatgttgttgaaggcataagtttagatttgtctagattaaatgaggatctaaatttgagctccaattcccttgcaaagatgactaacttgagatttcttcgaattgatggagaaagctggctgagtgacagaatttttaacgggtaccttcctaatggtcttgaatcattgtacctttctaatgatgttgagccattgtactttcctggtcttgagtcactagtactgtactttcctaatggtcatgtgtcatcgtaccttcctaatggtcttnannnatnnactttcttgatggtcctgtgtcattgtaccttcctaatggtcttgagtcattgtactttcctagtggtcttgagtcattgtctaatcaactaaggtaccttcactgggatctatgttatcttgagtctttgccacctaactnttgtgctgaacagctagtagtgcttcacatga

SEQ ID NO: 71744 - DNA, 209 bp, Glycine max
  Clone ID: PAT_MRT3847_35799C.1
ggaaaaggacttttttaattggggggaggggttaacctggggggcccaaagggggcccccaccctggttttaatggacctgaaaatccattttaggaaggccgagacctttgagaagagggggtttttccttttttttgcacacccctttccccatttgaaaaagccgggcacaaagaaggggtttttaaaaggggccacgagagggcc

SEQ ID NO: 71745 - DNA, 576 bp, Glycine max
  Clone ID: PAT_MRT3847_3579C.1
cacgcgtccgaaggaactggtcatcggtctcatgtctacaacaggatctgtgttgatgattaggatggaaagtatatcaaaataaagtgtaccttaaattgataaagattagttaaggggaggatatatgttaatataaagaggtgcattagtagctgggtgtgataaattagtttaaatgaaaactaccaagttggcattgaccattaaaaatcgtactatgagttgaccaattagacagacggagctcttcttttaacaatcatatgtataaaattctcacatggttctagcgaactcgtatatttactcgatataacaagctgctcgaagacaaacatgggtttcaaaacaccaagtgaatgttacttatatgatcctgtatggagctgcatcttggaggaattcagtgttcttcctgtgatagatcataaattctatggaaagcaaattgatcacttacacagatgaattgaagcaaatatgggctgctgttgactctgatgaggatatacaaaaaatagctgatctcttaaacagaagcatcacatactttgattaaccgacatcatgtta

SEQ ID NO: 71746 - DNA, 5007 bp, Glycine max
  Clone ID: PAT_MRT3847_357C.1
atggcgacttcacgaggcaatggaattgtctcaagttattgggattcccatgggcagtggcaagtttgtgtcgaagacgatagaaatgtgggctctttaggaattttcattggggatcgtccatttgaatttgtgcttcctgtaacgttgtgccaactcttcaccgtcatcttagtctctcgaacgctttactttcttctcaggcctctaagaacacccaaattcatctgcaacgtcctggtagttgaggctgttccgaattattcttcaaagagtccaatgttggactccacaagtccaatagttgtcgaggagtgtctgaggtatggggtaacgtttgtttgtggaaggaggagagacatggaagacaccattttggtctgtctatcattttgccaagaaaatttatctcatgataaaaagtttagtttgaatgttaaagttgtgtctagtgaaaatgtgcagggtggcattattttgggccccacatttttggggcggaacaagacgtattggcaggttttatttccaccgagacagacggagtatttagtgatggcatccttaaccggcgccgtatatttcgtattcttagttgcattgaaaatggacgtactaatgaccataagagcagccaaaagcacgtggcgacttggagtaattcccttcctcgcttcatttgtggttatcttagcactcttatgtctctattatcacccccaacaaatttcctctgcatctttaacaatcgcgcgtgtctcagtaagctgcttaatgtcgttgagcaacttccccgtcgtgtctgatgcaatgcttgaactgaacctcacagccacagaacttggccagatcgctctctcttcctccatgatcaacgacatcatactatggcttttcatcgttatgcatagcttcacatctaatgttgatgtgaaaaaatcaatcgcattgttgggaaactggtgcttgctcgtcttcttcaacttctttgttcttcgaccaaccatgaaattgattgctatgagaaccccagttggaaaacctgtgaaggaactttatgttgtgttgatacttcttggggtgctagtgatggctggtgtgggagacttgatgggcgtaacgtttctcatgggacccttgatttttggtttggtcgtaccaagtggcccccccttagggacaacgctagcggagaagagtgaagttcttaccactgagttcttgctacccttcttctttgtgtacattggcatcaacacggatttgtctgcacttgaggattggcgcttatttttgacccttcagggtgttttcttcgcgggagacttggccaagttgctggcctgtgtgttggtttctctagcgtacaacattagacctaaacatggcacgctacttggcctcatgttgaacatcaagggtataactcaactcataagtttggctagattcaagaaacaaaagatgttggatgaggatacattcagtcaattggtgttctgtgtggtacttataaccgcgattgtaacacccttggttaacatattgtacaagcatcgccctcgagtacacgcagaaagcttattcgaaggggaactgagaacgatccaaagcactccaagaaacagagagtttcacattgtttgttgtgtacataatgaagcaaacgtgcgtggcatcactgccttattagaagagtgcaacccagtgcaagagagccccatatgcgtctacgcagtccaccttatcgagctcgtggggaaaagtgcacccattctccttcccataaaacatagacacggtcgcagaaaattcttgtctgtgaattaccccaacaccaaccacatcatgcaagccttcgaaaactactccaacaactcaagtgggccagtcaaggttcttccctacatcaacgtggcaccttacaagagcatgcacgacgccattttcaacctcgcccaagacaatatggtgcctttcattatcatcccttttcacgaaaacggcaacattgaccttgtcggacacgtggcagcctccatcaggaagatgaatactaggtttcaagcgcatgcgccatgcacgttggggatactcgtggaccggcactctcggctgggcgcgtccaacaacaacaacatgtatttcaacgtgggtgtattcttcataggtggggcccacgatagggaagctctggcattgggaattcgaatgtcggagcgtgcagatacgagggtgagcttgtttaggtttgttatcgtgaacaagaaaccgtgtggttgtaaaattattttgacaagagaagagcgtgaagaggaagaggaagataccatgttggacgaggggttaattgacgagttcaagagcatgaaatatggcattggtaacgtttgttggtacgagattacggtggacgatggggtggaggtgttggaagcagtgcatagtttggaaggaaactatgatcttgtgatggtgggaaggcgccacaatgatggatctttgaatggaaaagaaatgacaactttcatggagaacgctgatgcattgggaatattgggggatatgttgtcttcagtagaattttgtatggggatggttccggttttagtgacacagtgtggtggagtgaagataagtagtagtagtaataataagcttgatagagtaggctctttaggcgtgtggatgggtgataatccattcgattttgtggttcctgtcacattgttccaaatcattttagtcagtttactctctaaagcccttcattatgtcctcaggcctatcaatacacccaaattcatctgctgcgtcatcgctggcattctgttggggccaacattcttagggcgccatgaagatatattgggagccctctttccggtaagacaatccctgtttctaaatacgttgtccaaaataggcactacatattgcgtgttcctcacttgtttgaaaatggacgtggtgacaacattaaaatcagcgaaacgttgttggcgattcggtgtgtttcccttcttggcttctttcttggtcactgtaaccttgttttctttgtattctcccaacggtaatgctaatcaaaaccaaatgtcaatctaccacttcccgaacatcttcaccttgagcagtttcgctgttgtatccgaaaccttgatggaactcaaccttgtagccacagaacttggccaaattgctctatcttcagccatgatcagtgaaatattgcaatggactacgatggaactcctgttcaactcaaaattcagcatgcgatttctaatcgtgcttttgataggtgcaactggatttgctgttttattacttcttattatacgaccactagtgaacattgttttggagagaacaccacctgggaagccaattaaagaagcatacgttgtcttgttacttctggggcctttggttatggcagctattagtgacacattcggcatatatttcgtcatgggaccttttctctatggtttggttctgccaaatggaccccccctcgccacaacaatcatagagagaagtgaattgatcgtgtatgagttttttatgcctttcttcttcttgttgattggcacaaggacagacttgaccttaattcatgagcattgggaggtggttctagtagttctggctatcttgtttgtgggatgcttggtgaaggtacttgcatgtgcgctcatttctcccacctataatattaagcccaaacatggcgtcgtgcttgggctcatattgaatgtcaagggtatagtcgaactcatcttttacggtagaatgaataaactcagggttattgatacagaagtattcagtgtagcggtgatgtctgtggtggtcatgacatcaatttgcatacccttgatcaaatccttgtacaggcaccgtagggtgtgtaagacgcaaaccatacaagaagggtgtgtgaaaacaatccaaaacataaccgaaaatacaccgttcaacatcgtatcatgtgtgcacacagacgaacacgtgcacaacatgattgccctaatagaagcatgcaaccctaccacacaaagccccttgtacgtctacgtggtccatctcattgagctcgttggaaaaagcacacccattcttcttcccatgaacaaaaacaagcgaaaatctttgtccgtaaactaccccaacaccaaccacattttacgtgcctttgagaactactccaacaactcaagtggtcctgtaacggttctttcgtatgttaacgtggctccgtacagaagcatgcatgaggcagtttgtaacctagccgaagataactcagtgcatcttctcattataccctttcaccaaaatgatcaaaccctaggaagccacctggccagcaccattcgcaacctcaacacaaattttctcgctaatgcaaagggtactttggggatactagtggatagatactcggtgctaagtgggagtagctccaagttgtcttttgatgttggtatcttcttcattggtggaaaagatgatagagaagcattggcgttggggattcgaatgttggaacgccccaacacacgtgtcaccttgttccggtttgttttgcctaccaatgaagattcgaggtttaatggacttgtagaaaatgaagatgagaatttagagagcacgttggacgagagtctaatagatgagtttattgccaagaatgatattagtagtgatagtgttaacgttgtttaccatgaggctgtggtggaagattgcatacaagtgttgaaagcgattcggggaatggagaaggactatgacctagtgatggtgggaaaacgacatagcatggggaattttgtagaagaagaaatgtcaaatttcatggacaatgcagatcagttgggaattttgggggatatgttggcttccaatgagttttgtaatgggaaagttcccgtattggtgatgcaatgcggtgatgagaagagggtaaaacagttagaaaaggtttgccatatatag

SEQ ID NO: 71747 - DNA, 1507 bp, Glycine max
  Clone ID: PAT_MRT3847_35800C.1
gggccggaattcccagtgcgacccacgcgtccgcaacttggaagaagtggagatatctactcaatatttctcggaactgaatttgttggggaaaagcaacttcagtgcaacgtataaaggagttctaagagatggatctgttgttgctgtcaagagtattagtaaaactagttgcaaatcggatgaggctgaatttttgaagggattgaacatcttgacctcactgaggaatgagaatttagtgaggctgagaggattctgttgttcaaggggacgaggtgaatgcttcctggtttacgattttgtttctaatggaaatctgtcatgctaccttgacgtgaaggaaggtgatggagaagtccttgaatggtcaactagagtttctattgtgaaagggattgctaaaggtatagcatatttacatgcatacaaagcaaagaaacaagctcttgttcaccaaaacatctcagctgagaaagtgctcattgatcagcgatacaacccattgctttcagattctggcttgtacaagcttctcaccaatgacatcgtcttctctgcactaaagggtagtgcagcaaagggctacctagctccagaatacaccactactgggcggttcacagagaaaagtgatgtttatgcatttggggtgcttcttttccagatcctcacggggaagcagaagatcacaagtgcaatgcgccttgctgctgagtccttcaaattcccagaatttattgatccgaacttgcatggcaagttctttgaatacgaggcggccaaactagcgagaatggccttactttgctcccatgagtctccatttgaaaggccaagcatggaagccattgttcaagaactgggaaattgtagtagctgtctttgatttgaattttactttaattactttaaccatcaacaccacaccagttttctagtatttggccactggctcatatggtcatggtggtggtgaccttttaaggtatgacattttcctgtgtccttaactaaggaccagctttaatgtgaatgaattgaatgttttggacattatgttgtagcctagggaagggaattttatttttattttattcgtttcagctattttttttctttagtccttcaaattcccagaatttattgatcctaacttgcgtggcaagttcttcgaatacgaggcggctaaactagcaagaatggccttactttgctcccatgagtctccatttgaaaggccgagcatggaagccattgttcaagaactgggaaattgtagtagctgtctttaatttgaaatttacttgaattactttaaaccatcaacaccacaccagttttctagtatttggtcactagctcatatggtcatggtggtggtgaccttttaaggcatggcattttcatgtgtccttaactaaggactagcttcaatgtgaatgaatgtcttgaacattatgttgtagcctagggaagggaattttatttttatttcattcaaaaa

SEQ ID NO: 71748 - DNA, 323 bp, Glycine max
  Clone ID: PAT_MRT3847_35801C.1
gatggttttgcctatttgtgggggccgggggggctttggatttccttggggcctaattcaatttcatatgccgggggggggatttggtcaactggattttggtggttattagcatgatgaggaggatccgcctttgtgctatcattatttctctaaaacggatgtttttgttttagggttttgagttcacaatactagattgctgtgcaatttttcttgaagtttgagattacttttcttacatcttatctttaagttgaagcttaagtgcttggattgcctcgggttttgtagtctgagcatgttggtttaaggtatttttg

SEQ ID NO: 71749 - DNA, 905 bp, Glycine max
  Clone ID: PAT_MRT3847_35802C.1
ggattttttcatttaaaaaatacctgaccccatgctaatgctttacagaggttttgatgtttattgtttgtatcgccgtagaatcttaagcaaattcgacggctggtgaaccctaattaaattatgccatgattgacggtgcccttaattggtccctcttttccaaaccccaactgggtatcacaaagtttccaaattgaacgcaaaaacggaaatttcttcctcaaatgccttctgggtcgctcttctttgcatccagattacgaagtttttggtcgccagtaaggttacttattcacttgataattccaccttctttttttgtttttattttctttattcctcaaaccagaacttatatatctaggcaccctttcaaagaagagagagcttttctgtttggttaccttttttttttgggtgcaacaatgtcacttttttcaacctttgacctccttcagactacattaacttacagttgtttgccattgcatgtgatgtttcttaggattgataaacctctagaattgcataggtgaaatattaagagtggattgaatattgataattactaacacatgaaaagagctttggagtggtgttgctagcgtttaattatgcattccttactaatcaacatcatgtctaaattagcaattttgattatctatttagaatttaggatgcagggtaagtgtaaatgtttttgatactttcattcaatcacaaattaattattcagtcacataatggtaactttgttaacttttgtagtaactattttaaaaatcatcacttagaggatgattttttattgattgagcatataaaaatcttttcattgctagtgtgtgaaaatgaacttatttattgggagtgctattgcatgtacaaacctttggctt

SEQ ID NO: 71750 - DNA, 463 bp, Glycine max
  Clone ID: PAT_MRT3847_35803C.1
ctcactcttttttttctgtttctttttctctttttatctttttaacccatggcagagaacaacgtcacaaatgccctttaccatgttactcttaggggcaaaaactttcttccatgcgaataacacacatgcagattggaaggaggcgacccaaacaggctacttaaatgtagagattctcggaaaagaaactggaaggaaagcagggaacccctataacaaggccggtccgaaaactgcaaaaaactttcgagcagggagctcaccggtgaaaggaaccgcaaacagtggatggggagtcccaccaaaggtacctcaatccctaaacttgtaaccaacttccttcccaaaagaagcgataccaaaaaaagaaatcctttgggccaaccatctatttgccgagagaggtttgaaaatgagaacccatgggaaagaagaccagaccttgccttttataaaaggc

SEQ ID NO: 71751 - DNA, 560 bp, Glycine max
  Clone ID: PAT_MRT3847_35804C.1
aaaaaaaaaaaaaaaaaaaaaaaaaaaaaaaaaaaaaaaaaaaaaaaaaaaaaaaaaaaaaaaaaaaaaaaaaaaaaaaaaaaaaaaaaaaaaaaaaaaaaaacaaaaaaaaagaaaaaaaaaataaaaaaaaaaaaaaaaaaaaaaaaaataaatgggggggggggttttttggggtcccttttttgggccgggggtttgcgaaacataacttttttttttgggggcccttccctcttttttccgggggggggtttttccccctttgggggggggaacccctggggttacccccttttttgctttttgtgccaatcccctttttcgcgggggggggtattgggaaggggccctgcccggtccccttttcccaaatttggcccgcttttcggcgcaatgggcccccccctttgccggggctttaggccgggggggggggggttttcccctcggtgtgccgcctcttttggcggggttcttgggccgggtttttttggttgcctccctttctttttcccccctttccgctggttttcccccggggccttttaaaggggggc

SEQ ID NO: 71752 - DNA, 579 bp, Glycine max
  Clone ID: PAT_MRT3847_35805C.1
ggaattttgcaccaggagaactagtctcgagttttttttttttatttttattataggttaaactattcatttggttcttatagttgtctcttttatattttttagtccttatagtagaaaattgtaagctttagtctttgaacaattttttgtgatagtttatcaccaccagaaaattttggtagcagatatacactgttagaaagtgctccctgatattagcaatgaaaaccaaaacttagcttttatgcatatgtaggaactaaaacttgcaattttctcatatagagacaagctaaaacttaaaaataaagacaagtgtgagaccaaaccttaacacactatttaacatattaattttaacacacttttattactaggtgaaattcattcaggggccactaaacaatgtgcatccaacactatgggtgtgcatcacacacatacacacaaaacacacatatattagtataaatactcctagcaatatgtcatcttaaccttatataaactaagtgtaacaaactttgttctgtcagattggacgccctgtggtgttctccttggctgctgaaggag

SEQ ID NO: 71753 - DNA, 424 bp, Glycine max
  Clone ID: PAT_MRT3847_35806C.1
aataaagctttttacactgttaggtaaatattcttattacaattaacaaataaaagtacaactaaaaggtatctatttcaaacaaacgacaccaaaagaaagaacgaaaagcatagaaactgtaattgcattaaagcaccagcaccctgaaccatgcaactactacatcattggtgtaaacacatcacaaccaaaaccaagtatttaaatgtacaaatatcacaattaattcgaaccactttgttgaacacaaacttaacttgaatcaaacaggaactgtcctagcagacactgcatgttcagcatcattttcattattctccccactcaactcctccagggatttcccctttgcttcaggaaccagcaaggggaatagcatcccaatgaagttgatcacaccaagcataatgagtgagttctt

SEQ ID NO: 71754 - DNA, 183 bp, Glycine max
  Clone ID: PAT_MRT3847_35807C.1
actacgcgtgcgataccttgttggaaggtacgcatgaattgctcataggcaagcggtcagaattgttactcggtacggactggctacgaccttggtatcaaagtagacgcaattaatggaggaggttgcattgttggtaccaatagggtggaagcctcgtcattatatgccattagcgctgca

SEQ ID NO: 71755 - DNA, 602 bp, Glycine max
  Clone ID: PAT_MRT3847_35808C.1
ggtcacgggtggacctaaagtttcattccatcctggaagagagtcaacccaaataggaaatcaaatcaacataacaacaatgggagaagctacatgtttcctttttcaaatactagcacttcggaggcttaacaacaactatgctctcgactctgcagttgatagatacacatgcaacatttgttaatgcaaataccattcaattacctgtgtatatgatcatacttgatactacagagaaattatttcttttggataggcaataatggttgttatgactgccattaagagtatattgttgtcacttctattttttgtatgtttgttatttttatgcaattcaggtgggaatggaacttaccaaatagtttggtaatcttggaactgggcgtgggcttgaaatggttgctgcctttgaaaaagcttccagcaaggccatatcatattatttttcatcttcctctgctcgctcacatgaatcatccactcaacctgatttcttaattttgcagaaaattccattaataatgtgtcccagaagacccagagatgctactgctgtatatgcatctatggacaaagctgagaaagaactggttgga

SEQ ID NO: 71756 - DNA, 191 bp, Glycine max
  unsure (1)..(191): unsure at all n locations
  Clone ID: PAT_MRT3847_35809C.1
aaaacccnnacccacaacacnacacactccannacaagaaaccnccanacaaatagaaatcaacagcacacacacacacacatatatatatatatatcatgtttacctttaatcattcttctgatttgtaccatatttcccctaatctctcatcttccttgtacacatcctttctcacttctaaaatctct

SEQ ID NO: 71757 - DNA, 313 bp, Glycine max
  Clone ID: PAT_MRT3847_3580C.1
acacccttccgccacatccttcacctaaccaggcctttaatttttttaaacctcacccaagattttggggccgggggaactgttccaaagagaacaggttctgttcaacctttccaaagataacaatcctcaaccaagctagatcaaaaggtttttttccaaggcctaacaaccatcaaaaattttcaccgcataattaacagaatttaggtcttaaaaaccatgtaaacgaaacttcctctttttttaatcccaatttgcagtcttttctaagttttacagaaggcagccttccttaattcccatccaattt

SEQ ID NO: 71758 - DNA, 922 bp, Glycine max
  Clone ID: PAT_MRT3847_35810C.1
ggagatggcactggtgggcagtctatttgggggagagaatttgaggatgaatttcataaaaggtaatgaagtttttttacaaacgttctatgttattaattattatatgcaaaaaatatcacaatatcagactcctggctaatgattatttgggggatatgccgatggcttgtggaaacttcctggtctgattttgcctcagatggaatttagagcaaatgcttttttctctcttgcagtttgaggcatgataggcctttcacggtatcaatggcaaatgcgggcccaaatacaaatggttctcagttctttatcaccacagttgctactccatggttggacaacaagcacactgtatttggtagagttgccaagggaatggatgttgtacaggctatagaaaaagtgaagacagacaggccagataagccacatcaagatgttaaaattctaaacgtaactgtaccaaagtcttgaaggttcttggtttgtatcgctgatggagtcagtcatatctatggatgatatgtggctgaagaagttttaacaggatgatttcatgtttctgcccttggtttcatagggttcctatgaacctatgaactgaggcgattattcttaacaggatgggcgttgtttttcatgcatacatttttgtcacaggttccatcttcctttatctgactaatgggtcaagcttctgctttgccagtgtaatgtgctttgcatgccaagggaatgcatttaggcaaaatcacttcttgacgtataatttttctgatactatacctgatgtacgatatacctgcctttttattacttttttaatctgcccttaataaaacatggacatcagtgtttcatcgagtctctgggtgggacactagcttccgcgacctgtgagctactaaggatagccctg

SEQ ID NO: 71759 - DNA, 216 bp, Glycine max
  Clone ID: PAT_MRT3847_35811C.1
tttttgaacgaccatgaccaaaaggaactggcagatgtagcttttacaacataacgactaaggccagccactaacgtaccgggtgtgattactgtgtctcatgacccaggggttcacgccctatgatactcaaccgattcaagggcccctgtcaggcggctcaaaggcacgggctgaccttactccttgcacctctgggacgccaaccaatgatcg

SEQ ID NO: 71760 - DNA, 890 bp, Glycine max
  Clone ID: PAT_MRT3847_35812C.1
tgtggtgggttagcatcatccaccgctggggaagctgtcctcgtctgtgagccttgcctcctccgtccttggtgtgggcctccctgcctgtgggccggggccgcttgggccttgttgggggcccacccgcctgtgggttggggggggtctgccctgctgggcggctccggcgtcctagtcatacggctcagcgtccactctccaaaatcaggtttggtttgattgtaagtaaaaaagaaactgagggcggtttgcattaaccaccacttttaaatctgaaatcttttttgaggtttgttgcatcatccatgttccatgccatggtgctgaagtccaaggcagtgttcctggtcctcttggtccttgttgtgtgccaactctcttgtgggttgggggaggattggtctactaggagactcagtaggcataataataataataaggtgattcctccaagctgtggagagctggtgttgaagtcacagtgctcagagaactcaaagtgcaggtggtgcaccagtgaggaccttgatgacatgtgcttctctaaatctgaggcattgaggttgcctcaccaggttttctcttgtgcctgactcacatgagatgagatctattctctcttggatctcaggatctgtgttgcctacactaaccaatttcagggactacttttttttttttttttttttttttgtcttgtttttatgtatggcttgatagggtggccgtgttttttattgataaatgttaatttgttagttttgatagagggtgacattgttgttgtatattcagtctatgatttacttcaaacttaagccatggttagggtatatagttgaaggtagagaggaaatggccacattttatccttttgctttatctgc

SEQ ID NO: 71761 - DNA, 241 bp, Glycine max
  Clone ID: PAT_MRT3847_35813C.1
gaatactaacagtactgatcagggctacatcggaccattgttgtcagacggtgtacccttaataattactctgtacaaaggccatgcagctgtaaaggatcatgcatcaaataaactgatctgacaaaaacatgtttcatctgatcaatttgactgcgtattactagcagtgttgcatgcgggtcatacatctggtctctcatagcagttcatagttcagacatggatcattagacattac

SEQ ID NO: 71762 - DNA, 476 bp, Glycine max
  Clone ID: PAT_MRT3847_35814C.1
gaggcggaaggcccattcgggaggctacatttccgaataccatcgtgcagatggaaccagacaggaattcaagggaacaagctaggaggaccacaaccaaaggagaataaggtcaaggaaaagatctcgcaaaggtaaaaggtaaaggaaaaagagcagcagatggctagacatcaaagaacactccaactccaatgagggaaaaacgggtcgcaaaaagacagaggggtaatagaggagaaatatggaaggaagacccgcggagcacaaaacgagaaacagccccaaaagaaagaattgaaggaggggaaaaataacccaagaaaaaaaaaaccgaatccaaaaaggaaaaaaattcccataaaaaaagacaaaaaggtaggagaaaaaaccctgaaaaatgaaataaaatggagcagggtcacaacgttcaaaaaagatataccggaaagggaagaacaagaaaaaacccaaaa

SEQ ID NO: 71763 - DNA, 1237 bp, Glycine max
  Clone ID: PAT_MRT3847_35815C.1
ggaaaaattccgatcacgcgccatggaacaacacgatctccgccgccgccgccgctctccgccgttaacctttgatcccaaaccattgccggagctcgctcgctccgcctccgcctcctccgccgtcaccgtcgacaacgcctccaaaggcttctcgcatccgcctctggaccagtcgacgagatggacggatcagcagcacagtctatatattcgttctttagaggcctcatttgtgaatgaattgcatcgatctatgcgtttacatcatttgagcttaaaaaatagcacagatgaagcatataaatgtagatttttgcaaaattcacataatatgcctaagcagtctctggctctacaagatggctgccagaagaagatcaaccttgaaagagttgcacctatgttagagagcacagctgattctcatgttcttgcaggaagtcaattccaacttacatctgtggatggaggctgtagtttgagagagcatggcttgctttgtgatgaggagattcatgcaagaggaagttcaatatttactctagaaatggcttgcagttctacagaggtcaccgatcaaaacttcaaggatgaggatgccaggtcaagctgcatgcccttggtgaaaaggttgaagacagctacagctgatagttcaagcactgatcaagttgtgccatttggaaaagttcacacaccagatgtttcaactagtagtaatgcaagctcagaaaataaaggacatgaattgctatcagaacccccagtgagctaccatttcccaacatctgatctgccatactttttaaggggaaggtaagtatatgcaacacagaattgaagtctcagattttacagtggatgctgctgatacaaattgagagaatagacaatttgcttggtgctctttcaagaatttcttgagaggcttgtgtaaaggaaaattgaacgtgacaacaactctattcttgtgaaatttagtgctggttaggtttatccaaaggtgtttgatgtaacataatggagaaactttcgacagcaatttgcatagacatagtaaaaattatgactatatatgattttttttgttagatgaatttttggatggttaacaaactgtttaggtatcctagattagtatggtatttctttagttagcttcgttaagttttcttacaatagttgtacttcaaatagttgaaaagataaagatatccaatatgcatttttctta

SEQ ID NO: 71764 - DNA, 466 bp, Glycine max
  Clone ID: PAT_MRT3847_35816C.1
tcgcgatctaggttctcgtgtttgctgttaagtgttaatgaagaaattctgtttgtataaaaaaaaaaaaaaaaaaaaaaaaaaaaaaaaaaaaaaaaaaaaaaaaaaaaaaaaaaaaaaaaaaaaaaaaaaaaaaaaaaaaaaaaaaaaaaaaaaaaaaaaaaaaaaaaaaaaaaaaaaaaaaaaaaaaaaaaaaaaaaaaaaaaaataaaaaaaaaaaaaaaagggcccccccccccattttttttccaatttattttttttttcaccccgccaccccccaaaattttaataaaaaaatccaatacggcgaatccccttaaaatcaacgcaaacaaaatttttccataccattattttacataccctttaaaagggaaaggccaaacaaaaatacattctaaaaaaaaaaaccctaacaacaaaatataaaaaataatatacccccacaaagaaaaaacccccc

SEQ ID NO: 71765 - DNA, 223 bp, Glycine max
  Clone ID: PAT_MRT3847_35817C.1
ggctgggactacccgtttttagaaagttcctcaagtgtgcaacttatgatattcgtgttcagtaaaatagacatggttttttatgggccacttgaatgtaaaaagggtcttccaaggctgggtttatagaatgttaccggaaaaatcaaaacctatttctattagggggtccgtagacaatgagggatgggacagttctgacaactgtgtctatggggattgc

SEQ ID NO: 71766 - DNA, 220 bp, Glycine max
  unsure (1)..(220): unsure at all n locations
  Clone ID: PAT_MRT3847_35818C.1
taatgaaagtaaagcggttttttttttgaagcaagggaaaacccagaaatngcggaccggagccggcaggagatccagaaaaaaaggagaggagcgggaataggggacggcgaaaccggagcatagagggttcccgtatagaaaggaaaacagagcaaagggaaaacaaggaacaaccgggaaccggggagaaaaaagaaaaagggggccaaatgaccga

SEQ ID NO: 71767 - DNA, 778 bp, Glycine max
  Clone ID: PAT_MRT3847_35819C.1
ttttaatagaggagagacggtgggaaaatttatgctactataaaactactagtacaagtaagttcaataaatacacgaattttctcgttaattttcccccctattttctcattattgttctacttttaccagatgcttacaatcactgttataaacaaaagaatccatcacagaagaacaaatttgcttcttaacaatagaattgaggtcataataattacccgtaccccgctgaattattgcacaatccgaaaacgatgttgacccagcgagtgaactcgcttccggaatcgactcccccgagacaattaagtgaacgttcctcaatgcaaacttgttccttacgagttgactcagaatcgccgagtcggacaccgagttcttcctcttgtgcggctgcattgcggcccgaacaatcgcaacgagcatggcgtgcgacacgcgccggatcccgcgggcgccgcccatcagaatcactgagttaaccgggtgatgcgactgagtcctctcggagttcctaccgtgttttgcattagggtacacgaaaaccgactcgggactctggttcctgactcgtccgagtgggtcattaaaaatgaccacattttttacatccacaagggtcacgtgtttaaagttcctcctcacgcgcccgagtaacatggggtaacaggcccaccttctcaaactgagtggaactcggtccaaaaaaccagccaacgagttctctggatcgagttcgttggcatcaaaactaagcaccgacccatactcgtgc

SEQ ID NO: 71768 - DNA, 510 bp, Glycine max
  Clone ID: PAT_MRT3847_3581C.1
tttgccgtgtctacactgtgtgcacgtccgcctgcttgggggggggggggggggggggggggggggggggaaaggcgatcgaacgtgactagagagtagagagcgcatacagaagatgagaagacaatacagtgattggcctggacgtagtataggccataacgatacgataaaataacctctgcttcatacttttctagcgaagcgaagagactgaaggaatgaatgacgggccggttcgtataaggcccgccggaatgacccgttctgtgtccgggccgttccggtcagccccaagtcagcgtagggagaagaagattaagtatataggctggtgaggggagcctggatcgggcataatttgctggtggtagggctggtttaagcatatagtgcaatgggcatctattccataactaatgattgcactttatgcttgtacttgtcgtggtattcgtgcacccggagtattccgccgcaacagcctccaagccccatgcttcgcccccc

SEQ ID NO: 71769 - DNA, 976 bp, Glycine max
  unsure (1)..(976): unsure at all n locations
  Clone ID: PAT_MRT3847_35820C.1
ctaagccctctcttgctcgggattttactctcacggtagcaccaccctaagccctctcttgctcgggattttactctcacgagattagagattgaagatggtgtctgacgcgagcaagaagaaggctgcgcagaagaaggcggcggcagcggccaagagaggaggcaaagcagcagctgcttcgtcgaaaacgacgtcgtcggagaaggccgccgacaagcttgccaacggaattggggaaattcagatatccgatcgaacctgcaccggtgtcctctgctcgcatcctctttccagggatattaggatagaatctctgtcagttacttttcatggacatgatttgatagttgattccgaattggagctaaattatggaagacgttatggcttgcttggattaaatggttgtgggaagtctaccctgcttacggcaataggttgtcgagagctacctattccagaccacatggatatttatcaccttaccagggaaattgaagcctctgacatgtctgcattggaggctgtcataagctgtgatgaggaaaggttgagattggagaaagaagctgaagctttggcagcgcaggatgatggaggtggggaagctcttgaacgtatttatgaacgattggaagccattgatgcatctactgcagaaaagcgtgctgctgaaattttatttggtcttggtttcaacaagcagatgcaagcaaagaagacacgcgatttctctggtggttggagaatgaggattgctttagcacgtgctctatttatgaaccctaccatccttttacttgatgaaccaaccaatcaccttggtatgcattgattttcacgtggctgatgttatgattttttctgctgtctcacttgttgtgattttaaatggaaggtcctgtagattctttatctatgatataaattatgtctatcanatattagccatgaacttgtgaatccttttagt

SEQ ID NO: 71770 - DNA, 731 bp, Glycine max
  Clone ID: PAT_MRT3847_35821C.1
atccaaccgcttcatctgaatcacaccaaccttcgcgtacgaatttaggttctcttaaaacaagggcccctcaaaccactttccccacactcttttagtgtgtcgtattttttcctctctttctccacaattaggtcttggaccgacccttttgtgtaagtgcaatggccatggctaagcttgtatgtgttctgcttctggcattccttggcatttccatgatcacaactcaagttatggcaacagattctgcctatcacttggatggaaggagttatggacctgggagtctaaagacctcacagtgcccttctgaatgcacaagaagatgtagccagacacagtaccacaagccgtgcatgtttttctgccaaaaatgctgcaaagcgtgcctttgtgttcctcctggctactatggcaacaagtctgtgtgcccctgctacaacaactggaagaacaagcgtggaggacccaaatgcccttgaaaattgaaattataaacatgatttcacctacaattttatattactcaaagtggaactataaactatatatggccattgctatatgtttaggtatcacctactacaatagggtataccatcttgttctctatcatgaaattaattcaattattaatttaatgaaaaaacctatatgttattccctttcctaaacaaatatgagaggggtgttctcctgattagccaaaaaaaaaaaaaaaggcccct

SEQ ID NO: 71771 - DNA, 1809 bp, Glycine max
  Clone ID: PAT_MRT3847_35822C.1
ataactcattattattcactaacatgttgcatgtacgtaccatttttttatgctatatgctctggctatgaattttgctttaaattaaatttttactatatggtttcaggttatggcaacagattcgcctatcacttggatggaaggagttatggacctgagagtctaaagacctcacgtgagtaatcatactccatttttttgcacacttagttgtattatttgtttaccatgcttcatgaatctagagttgcttcagatttaccaaatgatctaatattttcagttcatttgctttctattatgtgaattaattaagtgtgatctaatgattaacaattctgaatttggtttgatatatcggaattacggaaagcctctcacactcactacgcaccacaccaatttaggttctcttaaaacaaaggcccctcaaaccactttccccacactcttttagtgtgtcgtattttttcctctctttctccacaattcatttatgctctcttaaaacaaaggtccctcaaaccactttccccacactctttagtgtgtcatttttttttttgctctttccccacaaagaggtcttggacccttcttctgtgtagtgcaatggccatggctaaggttttctgtgttctgcttctggcactccttggcatttccatgatcacaactcaggttatggcaacagattctgcttatcacttggatggaaggaattatggacctgggagtctcaagagctcactcagtgcccttctgaatgcacaagaagatgtagccagacacagtaccacaagccgtgcatgttcttctgccaaaaatgctgcaaagcgtgcctttgtgttcctcctggctactatggcaacaagtctgcgtgcccctgctacaacaactggaagaacaagcgtggaggacccaaatgcccttgaaaattgaaattataaacatgatttcacctacaatttcatatatactactcaaagtggaactataaactatatatatatatatatatatatggccatttctatgttttgggcagcacctactacagttgggttgtcactagactaataccatcttgttctctaccatgaaattagttcaattattaatttcatgaagaaacctatatgttactccctttcctaaacaggtatgagaggggtgttctactaattagtcaattatctttgtcattgtactttttttagttttatatataatgaagttattttataatttttgggtgaaaaaaaaagagaatctaatggattatgttgaaaggtttaattagaaaattaaagaaaagctttaacattaatagtctaatgagatcattactctataaaaagatttctctagtaagtattagtatgtttaatttggaatgatctccttgtgaagaatgggtcttgatttgcttttcttattcagttgggcttaggcatggtaatcaagggtgggcccactttaattatcatagttttgcctactgtacttggtgcacttctttcatggtgatccatcaaaatcctgctttatgctcaaccacaatttacctgtcctacacagtcttgtgtaatcttttcttacatgtatttttttttttccatcacacggtcgaagatgtattttttagttctcaaatacatgcccgaaagcatatgttctggtaattgaaattcttcaaatttcagcatctcccattttctggggtggatgtttagttcacatccatgtacaaaataaggtttcacaaccagaataacagtatacaaaagcattttagattcaaaa

SEQ ID NO: 71772 - DNA, 226 bp, Glycine max
  Clone ID: PAT_MRT3847_35823C.1
atttttatcttgtgacctgttattgggctttctgggcatatacaacgctacctactgtttctcatcataccttctgggcacattaactacgcctactggttgaagatgcacacattgctctcctgtgagacacagcatcatctatgtggaaaagaacaaacgttctcagcattcctgctgacttctgcaatggatggcatttgcgttgaacgcgcaataaaggaag

SEQ ID NO: 71773 - DNA, 493 bp, Glycine max
  Clone ID: PAT_MRT3847_35824C.1
gggaacccaaaaccaaaaatatcaaaaaaaaaaatttttaacttccaaaaatttaagaaacaaacccatcggggaaacaaaaactaaacaggaaaaagttaaaaggaagggggggaaaaaaaaaaacaaactaagggggggcttaaaaagggcggaaattaaacaggaaaactaaaatttgggggaaggcaaaaagggcacagtttgggacaaacccatgggggggccaaacggggaaagccccccaaaaaggggggcccaaaaaaacaggggcaccgacaaaagtaaaaaggaccggaaacttttggaccccaaaaccaaaagaaaccaggtggggggccccccaaaaaaaaccaggcatttaaacacgggaaaaagccttttccagttttttaagggggggtcaaaaaccccaggggttaacggaaagaaaaaaaaaaaattggccactcttttttttttgggaaaacttttaaacggccccgggggccac

SEQ ID NO: 71774 - DNA, 665 bp, Glycine max
  Clone ID: PAT_MRT3847_35825C.1
gctcgagccaaaattttatttatccaaacctttctatttttagcaacttgttcttactgaaaccaaacacggtgtcatgttggttgatgtgtttagccttcgtcttgtatctgatgagagtttggtgtttcacacatgataaacaacaccctagccttaatcttcactttctgcagagcttacctgttctcacttgatgctgaagtagcctaatcatgaatgcaaagggacataaatttgtgaggtttgaggactggaaatcagagtcatcttttagtccagagcaagaagattctattgacagtgggaatcacaaaagaagaccaagtgtgggtactgttttaaagagtataggaagaaggcttgagagtgggtcggagaagatgaagaacttgagaagagcttcagctgtccatcctgtaagtgatggacagaaaaagctgccacctaggaagaaaattcttgatccacagggtccggtccttcagaaatggaacaaaatctttgtaataacgtgtgtgctggctgtctctgtggacccgctcttctcttacattccggtgataaataatgaggaaaaatgtgttcatttggatggagcattgcagatcactgccagtgttcttagcaccttctttgatctattctacattcttagcataatc

SEQ ID NO: 71775 - DNA, 386 bp, Glycine max
  Clone ID: PAT_MRT3847_35826C.1
ggataccaaccacaaggcctcgctggattaccatcaattttcattgcactaacggcttgttgctgaaagggtagacgataaacaaccttgtacagctacaaggtgggatcgtatgggaaagaaaagacaggctgatgtcaccctatatcacctggctataaaacacacttgagtacatactagggattgtatatagctgaactttatactactcattcccgcatttacagaattgaacggatactctttagagccatcacatatatcgacgcgaagcagtcactgataagcaccgagtatgcctcctttacgacttcctgttaagttttgcaactggattgcttcttggcagttacctactttacatacacggatctgagagctgc

SEQ ID NO: 71776 - DNA, 286 bp, Glycine max
  unsure (1)..(286): unsure at all n locations
  Clone ID: PAT_MRT3847_35827C.1
cccacgcgncccgaaaatttttttctctcttaaccctctgaaagccaccagacaaaaaaaaaatgccgtcccaccagaaccctaccgcactgaattccgacccgcagctcccgcagatcaaaactcaccaccctgcctccccacgccaccatcacccttcctccgccggcgccatgaccccaaccaacaccgacggcgcgcgcggcagaagcgattaaatcctttttccacggccgacgagagcgcccacgcgacccgcggggggcgcgcagcaccaccccccccc

SEQ ID NO: 71777 - DNA, 383 bp, Glycine max
  Clone ID: PAT_MRT3847_35828C.1
tttcgacgaatgacacacattgtggaggatgggtgaggtgggattgccagtgatggtgatgcgcactgggtaggtgaagattgtgctgacagaggttcaacgatgttgttcaggagatcgaataagaaaatcctgatggatagtgttgaagacgtcaatgttttgggggggttcagtgcttttttggagaggcgcatgagacatgtttttgtcactgatcaagaacacacagataatgattcgttggattagggttgtgactaatacactaccatcaaatgtgcaagcatactatagggtagcatgcacctatttaggaagcgcatgtagtcagtggcgaagtgtcaagaggcatgctacgatcgacaggagttatggacact

SEQ ID NO: 71778 - DNA, 375 bp, Glycine max
  Clone ID: PAT_MRT3847_35829C.1
tccttctgggcgggccgcttattttttttttttttttttttttttttgggaaaaggaagtccagtaaaatacctggaagggttggaaattggttcttaaaacccgtccccctaaaaccaaaatccatattcttggggggaacctttggaaaccaaccccaggtctctcccaaattaagaccttggggttttcttttttttctttaaggggggccaaaggggggccccccgggcctcttcggcctttaaaccgtgacccgggaattttcccccagagttggccttttgggccaaatccgcaattaaaagtttgggatttcccctttgtggggttttctcacacccaccggcccgcggggttaccccgggattttcg

SEQ ID NO: 71779 - DNA, 1749 bp, Glycine max
  Clone ID: PAT_MRT3847_3582C.1
ggctcgagcgaaagacaataagtacgtgtgatgtggtgagtggaacttggacatctagcccctcctcccaccattataactctttccttctttggcccatttgcttctagttctagccccttcctttgttaactcttttgtttattcagaagaatggcatcctggttattgggaaggtcgagtaggatcttgattcatcaacatcaccaccttcacaaaaagtacttgcctttcttgttaggaccatttcttaaccataataatagctcttgttcctcttttccatcaactgaaccatttaggtgccgtgatgcatttccgggtaagaactcatcacccaccctcttccgattctcgcgtcatgaatcaaccaaagctgaggcacaattggaattggagcaagatgttgccaccgaggatgagcctaatcaggtcattgattttcctggagggaaagtgggatttacttctgaaatgagattcatttctgagtctcctgagaaaagggtgccctgttatcgtgttcttgatgacaatggtgagatcgttaaatacagcaactatgtacaggttagcaaggaaatgggtgtgaagatgtattctgacatggtcactcttcaaactatggacaacatattctatgaagtgcagaggcaaggtagaatttccttctacctcacccaaatgggggaaagaagctgttaacaattgcatctgctgctgcacttgctcctgatgatataatattgcctcagtaccgggagcctggagttctattgtggcgtggttttacactgcaacaatttgttcatcagtgctttggaaacacacatgattttggaaaaggcaggcagatgccaatacattatgggtctaaccagcacaattacttcacagtgtcatcccccattgcaacacaacttcctcaagctgttggagctgcttattcccttaaaatggatgggaaaagtgcatgtgcagtcactttttgtggggatggtgccaccagtgagggagattttcatgctgctatgaattttgcagcagtaatggaggcccctgttgtttttatctgtcgtaataatggatgggcaatcagtacacctgtggaagaccaatttcgaagtgatggtattgtagttaagggtaaagcttatggcatctggagcatcagagtagatggaaatgatgctcttgctgtttatagtgcagttcacactgctagagaaatcgctataaaagaaaaaaggccagttttaattgaggctctcacttatagagttggacatcactctacatctgatgattcaactaagtaccggggaactgatgagattgaatattggaagatggcaaggaatccagtgaataggttcaaaagatgggtagaaaggaatggttggtggagtgacaaggatgaattggagcttagaagcagtgtcaggaagcagttaatgcatgcgattcaggtggcagagaaagcacaaaaacctccacttcaggacttatttaatgatgtctatgaccaaataccatcaaaccttcaggagcaagagagactaattagaaaaaccatcgagaagcatcccaaagactacccttctgatgttcctttgtagatattgccaattcaaacaagaaattgtactaaatcttacaatcaaaatataaaataaagggattggatgccctgttcttatcttttatttttatcctttctatgctattcaccattaaactagttcaaaa

SEQ ID NO: 71780 - DNA, 161 bp, Glycine max
  unsure (1)..(161): unsure at all n locations
  Clone ID: PAT_MRT3847_35830C.1
anaggaanaacaagacgaaggnnaagaaagggctganagagaagattcgnggagacaatagagggtgatcattcatcatcacaaggntgancgacacaagtgtcccctgttgagcaagttcgacgttgctgaaacagcactgcctnaggnaaaagaagggc

SEQ ID NO: 71781 - DNA, 771 bp, Glycine max
  unsure (1)..(771): unsure at all n locations
  Clone ID: PAT_MRT3847_35831C.1
gccgtatgcagcctcaccatgttctgtcaataactgaattgttttaagtctctgttcctctgctttcatttcttacattttcaactcttcattactcgagccgaatcggctcgagtcgtcgtggaatctgaggaaacgtcagtatgaaaatcaaggaattttcctcgccataatgaacgagagaatcactagaggcacatgttggtagaagattttctctggggattgacttgattgattgttcacagttcatgctaaacaaccaaccaaacggctattctgactattttttgatcctgtttctaatcttgtttcttagactgtgtctaagtcttcctttcaggctttgtgaattgaattccgatgtcacagccaaggcaaaataagatgatgagtccaaaccttgcaaaacaagttggtgacgcaacctataccaagatttttgttggaggactggcttgggggactaagagagacactctaaaacgctattttgatcagtttggggagatcttagaggccgttgtcatcactgacaaaatcactggaagatcaaaaggatatggctttgtaacacccacttctctattctttaggcacttgggtctttcacttcttggtatttttttactccattcacttcaatatcntgtttgtacttttggttttggtaggtgacctttcagggaccccaaattctgcaataagagctttgtcataatccctatccctgtgatcgatggggaggagagcttaactgtaatcttgcag

SEQ ID NO: 71782 - DNA, 121 bp, Glycine max
  Clone ID: PAT_MRT3847_35832C.1
tgtctatgattcccctcaatccaaagctcgactgctcggggtggagtacattggtcctgctgatgtctctgaagcctcccctccggaggagcataaactcagccattctcatgcttatgag

SEQ ID NO: 71783 - DNA, 326 bp, Glycine max
  Clone ID: PAT_MRT3847_35833C.1
acgacagaacggtacagctgccagaaacgacagaacggtacggctgccagcaacacgacacaaaggtacagctgcgacaacacgacaacaaggtacggctgccacaacacgacaaaaaggtacggctgctactacgacgacaacaacgggatatttctaactctcaacacttccatatcttatcgtctcctcctccatcattgatgttctcacagaaacttctcaagattgctggcataccattctgaagcttcaatgactccttcaatttggcctccatcaacgcctacattgctgagttcatctcaacccttctccttgttttt

SEQ ID NO: 71784 - DNA, 286 bp, Glycine max
  Clone ID: PAT_MRT3847_35834C.1
tttaacatcacttcatcaattccgaacttagttctcctgacatggagacctgaactattattatccgatattatattgcataaagcatcttcttcctctcaactacatcaagacacagcattataacttggcactctaactggcatcttcagagttattacttgcacgttttgcaaatgcatagtacctaacagaccatagtactgaaatacttgacaactgtccaaagaacattcagcttaatattacaatattgaattatcaagcctaaatttatgtactataa

SEQ ID NO: 71785 - DNA, 436 bp, Glycine max
  Clone ID: PAT_MRT3847_35835C.1
agccactcttcgacctctgactctaccctaaacctaccagctcggcttaatgtctcggtctccaaccacatttatgtgtatctagagccaggtaaagcctgcgtaactacagcttatcaccaatgagagctgcttcgactgagatgacaaccaacccataaactgtcagtcttctccttacggagctgctggcagatcatgacaacgcaggccccttcatgcaaacgcttaccctatgcaccacggtctcgaaggatgaaatatgaagaagattatggactgctgcacaatctagggattggtgacttggacaaactgcgacgtagaacccctaatgctctggcttctgataacctaatggaaagtgcttctgtggctgaatagagcggctgcactactcttgctcaagagacatgcactggttctcctgcaatga

SEQ ID NO: 71786 - DNA, 315 bp, Glycine max
  Clone ID: PAT_MRT3847_35836C.1
ctctatttattcttttttttttttttttttatcaatattttcttttcatttttggggggccagttttttaataatagggaaacaaaacccttgcccactgatgggcgccctggccgaacttaaaaaaccatctaccttaaaaaaaatgcccaaccaccaaccggatccagcccgggaaatttaaacccaacgggcccagtaaacttagccccaacactctaacatggaaccaaaaacaaccctgacgcgtgggataacccggaacgtcctagacaggtacctgcaagcccaccctgtttccctaaagggagccct

SEQ ID NO: 71787 - DNA, 555 bp, Glycine max
  Clone ID: PAT_MRT3847_35837C.1
cctcttgctttttttttttttttctcctacataaaataaatatttatttttttaatagatctccaaatatacaaggaatgaaacacgggggatgaatactgcaaaaatatacatgtgctaaaacaagagcaagacaaagatctatacaaagaaatacaccaacaatgcctaaagatctatacaaagaaatttgaggaaagaaacaactatccacaagggggcttcttccagacagttaactattgccatgatattttgcaatgctgacccacagttcatacacaaatccaaagaataatgctttttatgatgagcgatgaattgtctggtttcttccaattgcatccactttgcaaacgcagtttggaaaaacttttcctgataccaacgcaaccatagctcatactcccctttctgacccctcatctagtttcctccaactttctctagtttgccaatacatctgggaagaatttcttatcaatatctttgcgcagccaacacacgaatcttattcgccctttttggagatggttcaacaaacacatatttaaa

SEQ ID NO: 71788 - DNA, 480 bp, Glycine max
  Clone ID: PAT_MRT3847_35838C.1
gataaaggggactatggtggttgtgcccattaacgtgtctgatatcaacctcttaacctttgttgacgggagaatcagcgccgggttaaacttattaggcagtacactcgatgcaggtacttttatagtctacatcatctgcttcctacttattagacgctaccacagatgatggtggaaaatgaaatagcgaaattgatacccattcgagaggattgacgatattgccatccatatgatcttaggaacaagctgacgatcctcagttcgattgtgacatgagactttggaaaacccagagcatgtgatattaatgaactacatgctgaacgagttctacctgacgtctttaattgttaaacacattcctgaccatggaacgattcacttcatatgtaacgtgtgcggttacaattcggcagcctagcatactgatcgcagttactttgccgacgatccatatctgacgagtgagacaac

SEQ ID NO: 71789 - DNA, 259 bp, Glycine max
  Clone ID: PAT_MRT3847_35839C.1
ttcgagtgggacaggagctgagtatgttctggcttgcctcttccaatgctcaggggcttcactctcagcttgatagcctgttctgctcttcttggtggagaaagcaggaaacatgaggcaggacttagctcctacactgcactagagagatggtaagtatgcagcaacaatggtgatggttatgatgaagacgtggatgtggatttgactctaagcataggcggaggaagccaggttaatgatgtgaggagtagtagta

SEQ ID NO: 71790 - DNA, 228 bp, Glycine max
  Clone ID: PAT_MRT3847_3583C.1
gcgagcggtcgccctttttttttttattttccattttatactcaccatatttttaaaagggtatatatattctatcacttctacatcatatttcactactaattattatactctacaaacatacagaatactataactgattatttttataattacatcattgtcatcctaaacgactatatatatactccctatatatattaattctaactaatgtgtcatacactt

SEQ ID NO: 71791 - DNA, 238 bp, Glycine max
  Clone ID: PAT_MRT3847_35840C.1
ggaattacacctccaccacacacggtttagggcacactcaatgtgctcacattgacactgttaggccatatctcctttttttctctgacctgtacttaggtaaaactcacaaatactatacctttgatctggggaaacagttacattcatacgacatcattccaccaacattaaacaacttccgtttttgatgttcgagtcaacttctgtacactcaactgcaaaggcttttgtggac

SEQ ID NO: 71792 - DNA, 327 bp, Glycine max
  Clone ID: PAT_MRT3847_35841C.1
cctacgtgtccgcacaaaccatgacgagaccagggcgcagaatcatagcgaatggacaccgatccaaaaatctgtcacagaaagtgcgagtccaaatagtcccatctgaaaaagagacactggcacgagaaatgaccccgacacgataaagatgcaagacaacagtgaaacaggcctttatcctaacaccactttggaagatatcccacattcagcttgggacctttcttgcagggacagacagaaaactcagccaaataactctcctgaatgaaccgccatctcgcaaacaggaaaccgacactggccaaaacaatcctgaggggg

SEQ ID NO: 71793 - DNA, 444 bp, Glycine max
  Clone ID: PAT_MRT3847_35842C.1
tacgctgcgagaagacgacagaagggggattttaattattacagataaaactgtatacttttctgcattttgtgtggtgggtgtgtgagattttgaaattttggttcagctggaaatggatctgattgaatctcaaggaaggttttttttatttggtttattgtttctgttgggctaagaattagagaatcatggttttcactgtttggttgattgagactatttttctaataatccgagcatctcctgggcagcagcagtggatcttgccaaaatattttgagggacacaaaatagttaaaaacacttaaaattattcatagtgccatacatggaaaaaaaattcttatgcatggcactactattaagtttccattctttcaagatatgtttttttcaagcacacaaacaccgaaaagttgattgaaaaggacatgatgatgt

SEQ ID NO: 71794 - DNA, 454 bp, Glycine max
  unsure (1)..(454): unsure at all n locations
  Clone ID: PAT_MRT3847_35843C.1
cgttgcttgttttgaattggtaaaatgggaattcagctgagttaagttcatggcttgaatgctgttatgtctttgttggaatgaagtttaaatttttttggactgctttgggactgaagtaccgtagatgtcaacattactttatttggttggataaaatgttgttgggaagtgatagaacttttgttgagaggtgatttctgtttatggttgcacaggtaagaggggagggatgtgagaaggatgtttgctgatttgtttgttgtaattcttctgctgatacatggggttagggaaaaattaaattagaatctcattgtgtttcttagttntgaagaaaatcattatatttcttctccggtgttactgctttatgcagtggacttgaagtgtatttattaatttatatagatgaataagcatggttaacctcattatactttctttgttatgc

SEQ ID NO: 71795 - DNA, 491 bp, Glycine max
  Clone ID: PAT_MRT3847_35844C.1
ccgattatatctatagacagcgtaagagaaaagtgagctaaaccaggtacattaccagctcgctggaacacaagagactcgacaatcccaagagaaaatgacacccattcgagagtaggccttttttggcccatgtgtttgtacctttcagggccctttcaatcaatgcagtggtaaggcgcataccatttgcacaagctactgatcaaacgaaaataggtacaagatgataatggccaaaacatgacaaagagcagagccacctatgcagaccataaaatcaataatcgatacattggcacctatggcaaaggatataatgtttacactgattaatatatccaaccataaccaattgggaatgaaaaaccaattcacaagacattggctgatgtcaactgaccataagaagtgccggtttcctgtgtatacatccttgtgtctgagggaaacatattaaactggcaatccacattgtgaaacatcaccaa

SEQ ID NO: 71796 - DNA, 283 bp, Glycine max
  Clone ID: PAT_MRT3847_35845C.1
taatcagcttggcagagatgctcttaaataagctatttaacgaatcatgactgattccaaagaaaccaaccataaatctgtggagacacttgaactccaccttgggctgaaaaactatgatccctaaagtgacaaacgtctgagtggctctgctaatttgcctcgcattcctcgtctcctgatgaagatttgtctgctgggacatgcacaacacgttgaatacgctgataacatatgattggactacatggatgtctgcgcctggaagaaactgatcagcaat

SEQ ID NO: 71797 - DNA, 732 bp, Glycine max
  Clone ID: PAT_MRT3847_35846C.1
ggggtcaaggtggtcagcataggaagactccctctcagttccgacgaggcggcgacgactctcattcttttccttttcctttcccttcccattcccacccacctaacttctctctaggttttcgccatttctccctaattaagctcagtttcaatttcaatttcatttagcgtgtgtttagaagtgtgttttcaatgggaactccagaattcccagatctgggaaagcactgtgctgtgtccgattgcaagctcatcgatttcttgcccttcacctgcgatcgctgcgaccaggtgtattgtttggagcacagaagttatattaaacatttgtgtacaaaagctgacaagcaagatgtcacagtagttatatgtccactttgtgccaaaggagttcgcctagttcctgatcaagatccaaacataacttgggagaatcatgtcaacaccgagtgcgacccatcgaattacgagaaagtcacaaagaagaaaaaatgccctgtccctggatgcagagagatattagtattctcaaacacaattaagtgcagggactgcacagtagagcattgtttaaagcatcggtttggacctgatcataaatgtcctggtcccaaaaatgtggaatcaagtttttcattcatgaatcttttgaatgggagtaaaaagcaggagtccaaacccaagtcaagcgcaaccacatcatctaaatggagtacaagctttcttaatg

SEQ ID NO: 71798 - DNA, 927 bp, Glycine max
  Clone ID: PAT_MRT3847_35847C.1
ctctctttcattttctactattctctccaccgtcttctcttctggatgtctctcaagatctgtctggggagtgaagcttaatttgattattgatattaaggagtaagatctcattcaacacactaaacaatagtgattttgcaaatgctaaattttggcaggtccagaaatcagtcaagggcagccagagctacaacaatgggaggcatggattatgcagatccaaaaaggaagggcaattttgttgggaaagtatttcttgctgcggcattaactacactatgcataatcatgatcaagcagtctccatttttgaattcccctagtccgtttgcagttcacgaacctggggtcactcatgttttagtaacagggggtgcaggatatattggttcacatgctactctacgacttctgaaagagaattatcgtgtcaccatagtagacaatctgtcacgaggaaatttgggggccatcaaggttcttcaagacttatttccagaacctggaaggcttcaatttatttatgctgacttgggagatccaatatctgttaataaaatatttttggagaataaatttgatgccgtgatgcactttgctgctgttgcatatgtgggagaaagcactggtgatcctcttaagtattatcacaatattacatcaaacaccttggtggtattggagtctatggctaaacatgatgtgaagacattgatatattccagtacatgtgcaacatatggggaacctgagaagatgcccattacagaagaaacaaagcaggtcccaataaatccatacgggaaagccaagaagatggcagaagagatcattcttgatttatctaaaaactcagacatggcagtaatgattctgagatacttcaacgtgattggatcagatcctgagggaagattgggtgag

SEQ ID NO: 71799 - DNA, 1806 bp, Glycine max
  Clone ID: PAT_MRT3847_35848C.1
ccacgcgtccgcaagaccacccttcaattttggacctttccatattcgtgtgcaactctcttcccattttctacatatttccattttccactatttctctccaccgtctcatctggatgtctctcaagatctgtctggggagtggagcttgatttgattattgatattaaggaataaaatctcattcaacacactaaacaatagggattttgcaaatgctaaattttggaaggtccagaagtcagtcaagggcagccagagctacaacaatgggaggcatggattatgcagattcaaaaaagaagggcaattttgttgggaaagtatttcttgctgctgcattaacaacactgtgcataatcatgatcaagcgatctccatctttgaattcccctagcccgttttctgttcgtgaacctggggtcactcatgttttagtaacagggggtgcaggatatattggttcacatgctgctgttgcataggtgctttcattttacgttcttcaacattccgaattgaacttccgtggtccttgcaatggcaacgaattcttctgatgtactatcgccgaagcaacctcccttgccatctcccttgcgtttctccaaattctatcagtctaacatgagaatcttgattacgggaggagctggattcattggttctcacctagttgatagattgatggaaaatgaaaaaaatgaggtcattgttgctgacaactacttcactggatcaaaggacaacctcaaaaaatggattggtcatccaagatttgagcttatccgtcatgatgtcactgaacctttgacgattgaggttgatcagatctaccatcttgcatgccccgcatctcctattttctacaaatataatcctgtgaagacaataaagacaaatgtgattggcacactgaacatgcttgggcttgcaaaacgagttggggcaaggattttactcacatcaacatctgaggtatatggggatcctcttgtgcatccccaacctgaaggctattggggcaatgtgaaccctattggagttcgtagttgctatgatgaggggaaacgtgtggctgaaactttgatgtttgattatcataggcagcatggaatagaaatacgtgttgcaagaatctttaacacatatgggccgcgcatgaatattgatgatggacgtgttgtcagcaacttcattgctcaagcaattcgtggtgaacccttgacagtccagtctccaggaacacaaactcgcagtttctgctatgtctctgatctggttgatggacttatccgtctcatggaaggatccgacactggaccaatcaaccttggaaatccaggtgaatttacaatgctagaacttgctgagacagtgaaggagcttattaatccagatgtggagataaaggtagtggagaacactcctgatgatccgcgacagagaaaaccaatcataacaaaagcaatggaattgcttggctgggaaccaaaggttaagctgcgagatgggcttcctcttatggaagaggattttcgtttgaggcttggatttgacaaaaaaaattaacttattttcgctccttttatatctagtcaaaatattcagataataagtgggatggattattctattaagttttcctatttttccttttcataattatgatacttaggaagtaggggtgcctgtattttggcttcctcaatcaagatcgtactcttgtttcacaaagcactgcagcaatcatgcctttgcaaattttgccggtaaaattactactgagttaaaattttcctatag

SEQ ID NO: 71800 - DNA, 326 bp, Glycine max
  Clone ID: PAT_MRT3847_35849C.1
agatgtgcctaccattgcacatattgaagggcttcattcgctgcagagagcgacgaatgctcctgattcaaatgatagatatggatctactgttgagcatagatgggccgggttgacaaggctcaggtctagttttcacaaacatgaacgcctttaatgatcagctagcgttggctaacacacaataatgcttgggaggaaatcttccagggtatcctcggtgaccaatttaagttgattgacgacatgctggcagtcatttaccttcagaagctgtctgctacaatggaacatgctgcaatggacgtggcggttcacccaccact

SEQ ID NO: 71801 - DNA, 2782 bp, Glycine max
  Clone ID: PAT_MRT3847_3584C.1
ccacgcgtccgctcctccatttctcagaaaccctctcgaatgactgagtcaatgcccgccgtggaaccgtcgccggagcctccggcgtccgatatcgtgttcgatgacttctccaccgacttcagcgccttccccatcccctccatggactcgctcttcaacactactgatgggctccccttcccctccgatctcgaattcggcatggatttcaacaacaacaacggagaattcgaaatcaccttcgacgacctcgatgacatctacatcccctccgacgccgaggatttcctcctccccgacgcctgtaaccctaattacgcctccgtttcgccgcccatcgacgattcctccgcgaagaattccgattccgacgcatccgcggtttccggcgacggcgtttccaggtttttcaattcgcaagtgtcggaatctgattccgccgataatgttagggttccgagcgttccttcgccggaggctgaattctgcgaacgggaggagtcttccaacggaccggtttcgtcgcagggttccggcaacggcggatcgggtgtatacgaggccatgcactcgccctcacctgattctggcccttacgagagagacataacatcgtttcatgcacatgcagctacaaacaatggtgtgaaaatggaggaagttccagcttttgatctgaagaggaagaaagggagttgcgagggaagtgctaccaagcacagaaggttctcttcctcggtggagaataataataataacaccgagaaacagtctcagtctggtttgaatggaattgacgatgaggatgagaaaaggaaggcgaggttgatgaggaacagggaaagtgcacagctttctaggcagaggaagaagcattacgtggaggagcttgaggagaaagtgagatcattgaattccatcattgctgatatgagtagtaagatgtcgtatgtggtggctgagaatgctactcttagacagcaagtgggtgctgctgctggtgtcatgtgtcctcctcctccagcacctgctcctgggatgtaccctcatcatcctccaatggcacccatgccttatccgtggatgccatgtgctccttatgttgttaagcctcaagggtctcaggttcctttggttcccattcctaggttgaagcctcagcaacctgcttcagcccccaagagtaaaaagagtgagagtaagaagagtgaggggaaaactaagaaggttgctagtattagtttgttgggtttgtttttctttatcatgctttttggtgggcttgttcctgttgttgattttaggtttgggggtttagtggacaatgttcccggtactggtagttctaattatgttagtgatagggtgtatggtcatggtggagggaaggtttggtctttgaatggtcctaggaatgggtctggaagagatggggatgtaggattttctaatgggaggtttagtgtttctgacagagtgaagaattatgagaagagaggccggaatttaagagaagaaaggcatgatcggaaaggcccagatgattccagtcgtcagggcaatgctagtgagccccttgttgcttctctgtatgttcctaggaatgataagatggtgaagattgatgggaacttgattatccattccattatggccagtgagaaagccatggcatctcaaactgctgaggcaaagaaggacaagagggaaactgggttggccattcctaaggatttggattctgcattggctattcctggagttggaagaagcagagatcaacatccacatgtgtatagggtttctcctgaacagaggaaggctcttggctctggttcaaccaaagctttgaaggaccatatgaagtcctctgcaactgatggtaaaatgcaacagtggttccgtgaaggtcttgcagggccaatgttaagttctggcatgtgcactgaagttttccagtttgatgcttctccaagtcctggagcaatagttcctgcaacatcagtagccaatgtttccaccgaaaaccatcagaatgctaccagtgttaagaagaccaggaatagaagaacccttcatgagctcccagagccgcttaatgggtctagtctgaacataactgaagaacaagtgaaaaatttgcagaaagaccacttccatggtaacaagtcttctatggtggtttcagtccttgttgatcccagagaggctggtgatggtgatgttgatgttgatggcatgatgaggccaaagtcactctctcggatttttgtggttgtgctaattgatagtgtcaagtatgtcacttactcgtgtggtctgcctcgtgcttctcctcatttagtgactggttatgtatgacaatccatccttcggtaaaaagttttgatgcagccgaagcatctaacctgagttgttctagtttctgtaacaaaggatgtgggggactgggaaggaaagaaactcatctccagttttgtacatattaacatatttaaagtagcagtcttaaaaatgtacctgagagaatttagaagctgggcttgaccaactgcgtgtactgagttgagacctttcttagaaacttaataatatatgccccccttaagttttaaagtggatcccttgtcatgcgttgttgaatttatagttgaaatgtgtttggcttgattttggataattatgattttacacagttgatttttttttatcaaagcacgagcttgattttatgatggttatttttctgtaaaattgatttagattaaaaaaaaaaaaa

SEQ ID NO: 71802 - DNA, 166 bp, Glycine max
  Clone ID: PAT_MRT3847_35850C.1
ggctcgagcactctcgtccatggggcaaactgattttctatttcggatctagatgtggtcccttctgccatctggcggaacctgatgacgcattggattgcctatcagccggcctatgtggcaagctaatgcctctctgacgccaatgtcttcttgcctggacttg

SEQ ID NO: 71803 - DNA, 349 bp, Glycine max
  Clone ID: PAT_MRT3847_35851C.1
gctaatcacgaagacagtatgaatggctctgccgatggctttcacgatgctcatatctagggctgacggccaatcagctgagaatcccaatagttcatctatgcccaaacttgtaatccatgcgtaaacatgcctacgctcacaagcttaccgagaccactcacaactggacaagcatctctaaacgatctccgtccattactgctaagccgacgcccgagacgcctacctgataatactcctcgtcaaatggctacacatgctaaggattccaaagccaacattccactgacactataaactgtcgacactgtcatcatagcaaaccaagcagcggaagctacatgca

SEQ ID NO: 71804 - DNA, 378 bp, Glycine max
  Clone ID: PAT_MRT3847_35852C.1
tttttgtcttttctctaattttatatttttatatgctgcatcaagaccgtaatttttctcaatattccaaacacggaggggtatggatcggttgggaccaagcacacgagtggggtatactttaacccatttttccaaatctatggttttttttgctttgcgtattaggtatttaacattaaattctaataacaccgtgaatgcaatatgcttatgaaaaaaatgtaagaaggaaagttaaataattagcaccgagcccatgcgagggagagagattttgccatccttccaaagctgaacccactgttgtgtacttttaccagaagtagaaccccagacgcccccatgcgcgcttcgagagactcatcgactctttga

SEQ ID NO: 71805 - DNA, 1830 bp, Glycine max
  Clone ID: PAT_MRT3847_35853C.1
atggttgttgcttttgaaggaataaattggcaaggtttggattggaagatgcaacagcagcagcattatgatgagaagctgaaccaaatggaggagcagatgagagaagttgagcaagagagaggtcgagccttcaatgatctcaggcaaataaaaagggttgctgaggagactaatgtcatggttgatcaatcattagcctcaaagagatcaatttcagagccacgtataatagaacaacaaatgggtgctaatgacagaaacaatgaatcatcagagaaagatgctttgttggacaacataaggaacgagatggatagtcttcgatcatccgaggataatgcaatggcgttattgtctgactataaaaggagaattcaagaactggaggccgaactggacaagcgaaaagaatcagaagcaaatttgtttgacacattggtaatgcaaacaaaacagctggagcagaataagattttgcttgaagagtcaaagcttgagatcatttctcttgaagaaaaaataaaggcacttcaagtaagtgccagccaaatcatcaaaacccctgtgacggaggatggcttttccacaaaagaaagtgtagagaatatggaaattgaagctgagctagaaaaagtgctgttcagtggtgaggaatcaaccatggaggtcaaaaccatgcttgaagaattgcaaatgcttaaaaatgaattgaagtcagcaactgaggcagaagagaacagcaagaaggccatggatgatttggcatttgcattgaaagaagtggcaacagaagccaaccaggtgaaggcaaaactgaccttaagccaagtggaactagagcacaccaaaggggatgcagagcgttggagaacaatgttaggaaccacagaagagaggtacaaggagattctagaaacaacaaggaaagaagctgataggtacaaaaacacagctgagagattaagattggaagctgaagagtcccttttagcatggaatgacaaggaaaccgagtttgtgaattgcattagaagagccgaagaggaaagattacttgcacagcaagaaagcactagagtccttgagttgttcaaagaggcagagaacaagacaagggtttcaaaggaagagaatcaaaagctgcgcgatatactcaaacaagccttgaatgaatccaatgttgcaaaagaagctgctgagattgcaaaggctgaaaatgctagactacaagatagtctcaacctacttgtccacgagaatgagatgctgaaaatccacgaagctgcgtcgtttgagaatattagagagttgaaacgaatgctatcagaatcatcaatgaaggagttcaaaaatgaggatatggataagccatccacaaaagaaggtagcaaggaggataacaataataacaaggaatcaggtgggagaaaagcaaaggcacataataacaactcaatagattctaagagtctgcacaaaacatttagttttaatctgaaggaaatgataacgccacataaccataataagcagcaacacagcaaagaagaggccaataacaaagacactgatgatgacacgttaaggggttcgatatttgatgaagtggattcatcatcagattcagaatctcgtcctgatgtagacatgggaaatagccctgatgattatgaccatcttggtgaatcgcattttgatgatccccatagtgatagcaactcgaggaaacgaagagctttgctgagaagatttggagaccttataaggagaagaggttaccataatcaccgaaaggaaccatccaacgaggaacatttacaaacgtga

SEQ ID NO: 71806 - DNA, 803 bp, Glycine max
  unsure (1)..(803): unsure at all n locations
  Clone ID: PAT_MRT3847_35854C.1
ggtccggnaatnntcccgggtcgacccacgcgtccgcaaaaaccatttgcaccacaaaaatcatcatctcaatccctcaaccttccctcaaccttcttctttcaaatcatggattcttcttcccatcagcaaaacccttgtctcctcattgcagacaaacaaacccaacaccaagaccaccctcttcccctgtcccctctcgcaacccccaccaaatccccatcccccgccgtccctcgcaacacctcgccgccgccggagtttccagattccgcgggggtgcgccgccgctgcaaaaccagagcaccccaaactgcgtccccgaggaaccctcgcaaatcgcggcggcgctccgagctcgagattcgagaagaaaaagattcaatctttctcgaagaggtcggaaaacccagaaagagaagacaaaccgcgcgaactaagaaggagaaacctaactctgctccgccttcaaccccatctccaaagagcgaagaagaaaatggtggtgatttcgaccgtgttgggcaggttgtgagtgatttgatcatgtggaagaattcgtcaaagtcaaccttttggtttgggtttggttctctttgtctcgtatcttcgtgctttactcaaggactcaactttagtatcttctcggccttgtcgcaattggggattctcttatcgggtgtttcgtttttctcgaattcgatttgtcaaagaaatgaggttgaagagaagagggaaatcaagctgaaagaggatgacatttcgcgtcttgcgaaataattcttcctgctctgaattttgct

SEQ ID NO: 71807 - DNA, 550 bp, Glycine max
  Clone ID: PAT_MRT3847_35855C.1
gaattcggcaaagaatctgaggttcttagtgataaaaagagtagagaaccgagtatgtctaaagtggccaccctcttcactttagctcttctgttaagcttcaatttaatccatgcctcccgtcttaatccttcacttaaagttttttcttctttgcgtgaggatgttgcagctacaaaggaagagataaatgaagagagttgtgaagaaggcacagaagaatgtttgataagaaggacgctagctgcacatgtcgattatatctacactcagaagcataaacccaaaccttaatatatggcataatcacagcactttcgggaccaaatatatatagcaatatacaataatgaatcaatgaatataccatacgtatatatgtgtgtacttatttcgttagtaaacatatgctttggttgaattttttgttttctcttttggccttggttgagttttgtgtaattcccatatattgatcattctcctaattattattccatgagagagtgtgataaaatgaataacacgcatgcatctacttcttcctgaa

SEQ ID NO: 71808 - DNA, 415 bp, Glycine max
  Clone ID: PAT_MRT3847_35856C.1
gcgtacgtgcgctcggacttcggctcgagagtactgtcaagccacacctgtcatgaggcagccatacctataccttcttgatgcatatttacgtcgcgaccctctgcggtatgaccatcacgctggaagtggaaaggtctgacaccatctacaacgggaaggccaagatccaggagaaggaaagacagcccccggaccaacaacgtcttatgtttgtcaggaagcaacttgaggacagtcggaccgttgctgactacaacattcagaaggagagtcctcttcacctaggactacggatacgaggtggcatgcagagcttaaataagacactctcgcggaagaccataaccctagaggttgaaagctacgacaccatcgatgacggcaaggccaagatccaggacaaggagggtat

SEQ ID NO: 71809 - DNA, 176 bp, Glycine max
  Clone ID: PAT_MRT3847_35857C.1
gaagaccaaacgcgcaaaatggaaccgcttgagcaccttgctgactgcccactgaagcatgcatctataaatgcatgtctacaccccactgaaatcaacaaaatcatcattgtctatatttcacacaacataaagcctctagttgacgatggcctaatcatattgctaaccaccat

SEQ ID NO: 71810 - DNA, 1469 bp, Glycine max
  unsure (1)..(1469): unsure at all n locations
  Clone ID: PAT_MRT3847_35858C.1
naatacaacagcaacatgatggtttcagtttcttgagggtactaatatgaacagaatctcctctcaacacctttgccttgctgcagttcgcaactgcaactgcactcaaatataaatatatatacatatatatatatatatatatatatgtattacttcatggtcacacatagttaagtttattaattactaggtagctggttttgaatagggtagttggtagttatagttgttgtcccagatatggaagaagcaggtttaggagattgttgttcctcgaattcgacgattacgaggaagagcgataagcgaaagcagcaacaccaacaacaagagaagccatacagaggaataaggatgaggaagtggggcaagtgggtggcggagattagagaacccaataagcgttcgaggatctggctgggttcttacgccacccccgtcgccgccgcacgcgcctatgacaccgccgtcttccacctccgaggcccttccgctcgcctcaacttccccgaattgctgtcccaggacgacgacgtttcgacccaacaacagggcaacatgtccgccgattcaattcgcaaaaaagccacccaagtcggcgccagagtcgacgcgctccaaaccgcgcttcagcaatcctcgtcctcacactccgctaattccagccacgtcagcagctctgacaaaccagacttgaacgagtatcccaaacctgaagattagtaattttcttccaccttcaagattaatattgatccaccaatcacgcgtcctgatgtgacatatatatagggcttcaacttgccctcttcacctatgctaatttgaagaagaagaaaaaaacctttttatatttgtcatatgattatatatatatcttagtagatatttttcttccagtctatttattttaatattagaacgtgtaggaagaaatatacagacacacctgagaattgagatgaggctaattaacttgtttatgaggcgagtaactcctttaaatatatataaattaaggggtatatatactattacttgctcatcaccacatgaagaacaacgtttgacctttaaccaaatgagatcgtgtaattcatgctgttgacctgattttgctgttgttgctcatctcacgaagaaactcattatagtttttttttttctttcaatatgtgtatgttagctggagtcgtggactggtagctacgtaggttctcgctatgatggggggcatatcatgtggtcttttctcaggtcggtggtgtgttgtaatttgtaacgagatatccgttacacaatcggatcaaattaaccgtgttttgttgttttagattaataaaaatacatatgttctgatgaattcgataatttcacatacatgtggtgaaaatgatttcatatataagttgtatgcatagttcatgtgtgtgaactatattaattcgaccgatcctgtttatgtt

SEQ ID NO: 71811 - DNA, 387 bp, Glycine max
  Clone ID: PAT_MRT3847_35859C.1
taccactcccaggagctgtaactgtacggctttttggcacttgatagcgctcctgggaggcgcgtcatttggagttttgtgcctgctttaatggacgcatctcccattgattgaaacatagatcttaccgactcgatacaggtatgccagtttattaattgaggtggcgtgaccacttctctttttattgccatatggttgatctagagcgcggtggtgttgtagatcacaatgcactgggacacttgcgttcagaagaggcgagcgaatattctcagaagccaagggcatgcgcgcgtttgtgctgacctacgtttttaatagctatcctaactatgctaatgctaatatacgcgtggaggctaattgtacgatgataccggggcc

SEQ ID NO: 71812 - DNA, 2609 bp, Glycine max
  Clone ID: PAT_MRT3847_3585C.1
tcgcccacgcgtccgcccacgcgtccgtttgggaacatgaaactgaaatgaacatccctccattagacaaaatgatgtcctcaactacagtgaggaagttgcaggtggtgtcccctgttcctgcggacatagacattgcaaactccgttgaacccgttcatatctcccagattgccaaagacctcaaccttagtcccaatcactatgacctttacggtaaatacaaggccaaggtaattaatctttcactttctgcacttgagaaagattcagatttgagttagaggaatatcatgatattattagtttatttgtttatgattgattatggtatgtaacaaataatgttttatgttagatttcggttacatgcaactaaccaggtaccctagaagttctttttcgttaacaacttgaggatacatgcgataatttctgtattattgcttagctggagagtgatttggatgcacatgcacaggttttgttgtcggttcttgatgagcttcaaggatcagaagatgggtattatgttgtggtcggaggcattactccgactcctctcggggaaggcaaatctactactacagtggggctctgtcaagctttaggtgcttttcttgataaaaaggtagtcacctgccttcgtcaaccatcgcaaggacctacttttggaattaaaggaggtgcagctggtggtggctatagccaagttattcccatggatgaattcaatcttcatctaacaggagatattcatgcaataactgcagcaaacaatcttctagctgctgcaattgatacccgaattttccatgagtcaacacagtcagataaggctctttttaaccggttgtgccctccaaataaagaagggaaaaggagctttagtgatgtcatgttcaggcgtcttacgaagcttggcatttcaaagaccaatccagatgatcttacaccagaagaagtaaataaatttgctaggcttgatattgacccaaattctatcacatggaggagagtaatggacatcaatgatcgattcttgagaaaaattgctattggcccagggacctgacgagaaaggaatggtgagagaaacagtcttagttatttcagttgctagtgagttcatggctattttggcactgacaacatccagaggttatgcgggatggatgcttgggaaaatggtaattgagattagtaagagggttgaccctgtaactgctgatgatgtaggtggtggagaagctttaacagttttagtgaatgatgccctcagtcttgaagagggtctccatctcatcaaagtcagtggtgtagaatcttggagtcaagagggtctccttgatattgcccttcttgttgcttgcagctggctttgtggaggtggagggtagtggtggtggggtggcagtggcagacattcttattatggtgctgaatttggaggagtgtgatgagcccattctggggctgctgacaaatttgggagtgacattggaaattggtttcacaagagctgccatttgtggggaggtgaaggaagtgcggagtagcggttgaggatgaataattaactgaaaatgttgccctggttgaggctggttgtgtgaacatggcacgacatatatcaaatacaaaatcttatggtgtaaatgttgtagttgctatcaacaagttttcaactgacactgaagccgagctaaatgcagttcgaagtgctgcattagctgctggagcttatgatgctgtaatttgtacccatcatgcgaatggtggcaaaggagccgttgacctgggcattgcagttcaaaaagcctgcgagaatgtgacacagccattgaagttcctgtatcctgttgacctgagtataaaagagaaaatagaggcaatagcaaagtcatatggagccagtggtgttgagtactcagaacaggctgagaagcagattgagatgtatagcaagcaaggattttcaggtcttccaatatgcatggctaagactcagtattctttctcagacaatgctgcagcaaagggagctccaagtgggtttgtcttacccataagggatgtaagagctagtataggcgctggatttatttatcctttagttggaacaatgagtacgatgccagggcttcctacaaggccatgcttctatgacattgatctggatacaacaactggaaaagtcattggtctctcttaaatcaaagtgacttgttctatcacctttcaaaagctttatggatgtcatttacatatctccctttgcgatgttcatgaacctcacagtaacattcctccttgtttgtttgcgtgcttggtgatctgtatgaatgaaataaatacgtgatttaaggagacattatatccgtttccttatatctatttctgatacatgtaattgaattgatgcaaactcgtgaacaatacttgtcaggcccactgaaatcgtgtataaatatggagttggaagtttcatcctatagagtgtgatttagttcagtaaagagggaaagagatataataaagtcgtaggaggagattttaagtgtaatctcctcggccaataatattactgaaaagttagtgtttaaaaa

SEQ ID NO: 71813 - DNA, 827 bp, Glycine max
  Clone ID: PAT_MRT3847_35860C.1
cccacgcgtccgtaccaatatgaacagaatctcctctcgacacctttgctttgctgcagctcgcaactgcaacttcccacaaatataaatatatattacttcatggtcacacatagttaattttattaattactactaggtagctggtttttaataggtagtaggtaggtgtaatcgttgtcttcctgcagatatggaagaagcgggtttaggagattgttgttcctctaatacgactattacgaggaaaagcgagaagcgaaagcagcagcaccaacaacaagagaagccatacagaggaataaggatgaggaagtggggcaagtgggtggcggagattagagaacccaacaagaggtcgaggatctggttgggttcttacgccacccccgtcgccgccgcacgcgcctacgacaccgccgtcttccacctccgaggcccttccgctcgccttaacttccccgaattgctgtcccaggacgacgacgtttcgacccaacaacagggcaagatgtccgccgattcaattcgcaaaaaagcgacccaagtcggcgccagagtcgacgcgctccaaaccgcgcttcagcaatcctcgtcgacacactccattagttccagccacgtcagctatgagaaaccagacttgaacgagtatcccaaacctgaagattagtaatttccttcaaccttcaagattaatattgatccaccaatcatgggttctgatgtgacttatatatagggcttcaacttgccctcttcacctatgttaatttgaaaagaaaaaacttttatatttgtcataaaaaaaaaaaaaaaaacataaa

SEQ ID NO: 71814 - DNA, 464 bp, Glycine max
  unsure (1)..(464): unsure at all n locations
  Clone ID: PAT_MRT3847_35861C.1
atcgttttatacatttttatagattttgcaatttaattttagtacacaattttgataggtagtactaccatataagaggggtaagggttaggggttaccagatttgttttcagtgagctgaaaagttatgaaattttcatatgagacaggtctacgattcagcaaaggaggacttcgtggcaagatggtgttcttggcacaaactatcatattcctgcaaagtggaattggacttaccagtttcaggtgaaagatcaaattgaaagctttttctacttctcttcccttcatcttcaaagatgaaggggtttcatcataaacaacaaacttgtcattccgattccttttgatactctatatgggggacattgttgttttcattggagtagtccattttatgttttgaattatgggtattggttttttcttcaatgangcctatgttgcacgagtatagggattgg

SEQ ID NO: 71815 - DNA, 376 bp, Glycine max
  Clone ID: PAT_MRT3847_35862C.1
cccttaaaaggggcaaaacattttttcctttccaactgggccttggtcttgccccccatttttttacaaaacgcgcaatttttaaagaaaaaaccttgggctccttggtaaaagagttcttttttggggctgcccgcttttttttcaactaaagccccgggatcctggacctccctttaagttagcttcccccccccccccatttccttttaaaccctttggatgcaatggggcggggtggttttttgccccccgggccccccccccaaatttgggggggtttttcaaacaatctgggagggggaccaactgcccaatttaagagggcccggcggccccccaccgcaaaagaaaacaatttgctcccaaaggcccc

SEQ ID NO: 71816 - DNA, 289 bp, Glycine max
  Clone ID: PAT_MRT3847_35863C.1
tgttttttctcaaaattaaaactctttacatttaaatggtggattcaggggcttaagaaataattaatgtaactgggcctcccgaccagccgacctggttatacaagagaccaatttggcccctgatctactgtgaaaaaccatgtttgacatggctcacccagaacagatgcattctacacaggctatcacaaggagcaagcatgtgactgtcattgtggaacctaccgcctgctgagcactgggaatgaggggtgcatatgacatgaaattgcgttgccaaatgttt

SEQ ID NO: 71817 - DNA, 219 bp, Glycine max
  Clone ID: PAT_MRT3847_35864C.1
ctggggggggcccaaaaatttctaaatgttgttcaaaaaaacattctagtttatagaggcacaaaaattcccatttcacatgaaatttcacttttgggggcttacagggcgggcttatgagtttttgaccacaatcatggtttaaatttaggcaacattgccttgccttagctataaaacgttattctctttgggtctcaattgcctaaccccaccctt

SEQ ID NO: 71818 - DNA, 668 bp, Glycine max
  Clone ID: PAT_MRT3847_35865C.1
ggtaattgatcccatgtggatcaataatccataagattaattacattgaatggtatgcattagtttggtcccatgaaagaaaaaaagatgtaaaaaattgatgtgaaatgcattattcaacctattacatgctaaggaaaatcataaaatgaagcacttcgtttggaagatccaaaatgggagggaaggaaacaagaagaaaagaaaagaaaactcaagtgctgcttacatttttagaagttatatatatactgaggtgaaatgaaatacaacttagcctcatccaattagtctgagaatgcaggcttcagctgcacttagccaaatacgcattccatccttgaagacggtattcgcgagctgcctgagctggatttgctgccttgatgatgccacgacctactatgataatgtcactacccccatcatagacaacagaatgcggtgtactatattgttgtcctaaagcatcaccaccagtcaccatttgaactccaggagttgcatgaacaaaagagggatttatgggtgctccaggccatgatgcaggattgactgagatgaagccaataacaaagtcagagtgatcctcagcaattttcaccgcagcagtggtgtaatctcccttggcaaggttaccagctgaactcatttcagcaagcagcgtt

SEQ ID NO: 71819 - DNA, 341 bp, Glycine max
  Clone ID: PAT_MRT3847_35866C.1
cggacgcgtgcgcgacttctccttattctaaatgataaggttcagtggacttgttacaacgtcgggggcagcgaaccgctcacgttgccggaatgccatcactttacatgaccattcaatgtgctagtgctactgtcgggtgagtccacgggctgcgcctgctacgacgcactctgatcacttgcgcttactaggaattccgaacatggtgtcccacttgacttggtgaatatcgccagaggacgagctataactgactgacgtaagctgcatacaaatgggacagaccaacacattcgcgtctgacagagtgacagaacgtgaaaacctttgccatatgt

SEQ ID NO: 71820 - DNA, 441 bp, Glycine max
  Clone ID: PAT_MRT3847_35867C.1
gcaaggatttaaggtggttactggcaatataacaacccaaaacccacgccttctctggatggtaagtgctttcattgctttgtgtctgcattgtcaaccctactagaaatgcttcctagcaggttctttgcaaattgagagttcttggaaatttgattatattagttgctgaatgttattgttaaatttggataatgcacacatcagaagggctcagattcaagagctccttctcacaaaatgatgccgtaccagttaagctgtgcaataacaacaaattttcaatttttgatatttacaaatgttgggttttaaaagaataaaagacatctctaacaaaagagcagacaagacttggtgcatgtttgcttctcaattgtttttggaaaataagtgtttttttaaaagtctctcagaaagttgataaaaaacaattattct

SEQ ID NO: 71821 - DNA, 283 bp, Glycine max
  Clone ID: PAT_MRT3847_35868C.1
gttgttccccattctgctgtgcgctcctcatcgaatcttgtcccaccaatctctctctctctctctttccattttctctgcactctttacccattttccccccaatcgtacgcaccaaactcacacggatacgaggttgcaagagtcacaatgagtctggcatgtcttgtgtgccatagtgtggatagtccatcaccgtcacattctttcaggagttactctgtttcaagtgcagaaaatgaaggaagatgtcatgctgttgcaacctgcttaaccaggaaat

SEQ ID NO: 71822 - DNA, 253 bp, Glycine max
  Clone ID: PAT_MRT3847_35869C.1
agaagacagctgcttgcgggcccagaagaggtcgagttctaaacagaccacataagaggcgtctgagagaccctttgcgactggcgtggttgaacgaacactgtacggagcatcatgtacatgtgcatgataccacaggatgtcgaatgatacacactcgaggagagttaagaggagctttcgctaaccgaataggcattgcaatagcctttaatgcgaggtggaactctagacagattccacatggaggatt

SEQ ID NO: 71823 - DNA, 823 bp, Glycine max
  Clone ID: PAT_MRT3847_3586C.1
cggattcccgggtcgcgcgtcgcgtccgcaatgactgcgtcaatgcccgccgtggagccgtcaccggagcctccagcgtctgatctcgtgtttggcgacttctcctccaacttcaacgccttcctcatcccctccatggactcgctcttcaacaccactgacgcgctccccttcgcctccgatctcgaattcggcatggatttcgacaacaacggggaattcgaaatcaccttcgacgacctcgacgaactcgacgacatcttcatcccctccgacgccgaggatttcctcctccccgacgtctgtaactctaattatgactccgcttcgccgccgatcgacgcaaagaattccgattcgccggattccgacgtgtccgcggtttccggcgagggcgattccgcggataatgttagggtttcgagcgttccgtcgccggaggctgagttttgcgaccgggaggagtcttctaacggaccggtttcgtcgcagggttccggcaacggcggatcgggtgtatacgaggccatgcactcgccctcacctgattccggcccttacgagagggacataacatcgtctcatgcgcatgcagttacaaacaatggtgtgaaaatggaggaaactccagcttttgatctgaagagaaagaaagaaagttgcgatggaagtgctaccaagcacagaaggttctcttcctcggtggagaataataataataacaccgagaaacagtctcagtctggtttgaatggaattgacgatgaggatgagaaaaggaggcgaggttgatgaggaacagggaagtgcacagctttctagg

SEQ ID NO: 71824 - DNA, 1822 bp, Glycine max
  unsure (1)..(1822): unsure at all n locations
  Clone ID: PAT_MRT3847_35870C.1
gtgaactagatttatatagaccgcgtagccctgacaagagacagaaagtgattgtgggattcatctccgccaatgtgcgccgaaaaaagggtactacgtatccttcagcgttgataatccttcctggaaatgattgcatgggccatagcaaagagcctacctgcacagtcgaacttaaaccacagcagccttacaaattagcttttgtgtattcccgaaaataattgattgagatagacaggaaagaaatcagcaagaaactggagcttgtgctgttctcgttttctcccgtagctgcagcagcattgaatatgaaaaaaaaatgacaagctgaagtaagttttattaaaagagattcgtgtagaaaagtttcacgtcttgtgactgctcttccgttagagtttctgaaaactggtccaatctcaattactgttccagattctgactttcatgactttgacaaagataggtcagaggaatgcttcaggccaaagcaaatatgggccttgtatgatgaggaagatggaatgccacggttgtattgtatgatccgtgaggttgtgtctgtcaatccatttaagattcacatcagttacttgagttccaaaactgatagtgagtttggctcagtaaactggcttgattcaggttttaccaaatcttgtggaaatttcagggcttttaattcagatgctgttgatcaagttaacatattttctcatgttctaagtaaggagaaggctggtcgaggtggttgcgttcgaatatatcccagaagtggagatatttgggctgtgtatcgaaattggtcgccggattggaacagatctactccagatgaagtgaggcatcagtatgaaatggttgaggtgctggatgattactctgaggaacttggtgtttgtgttagtcctcttattaagttggctggatttaaaactgtatatcagagtaatacagacaagagtgccataaaatggatacccagaagagagatgttgtgcttttcacatcaagtgccttcttggttgctgaagggggaggctagcaatttgcctgaaaggtgttgggaccttgatccggctgcaactccagatgagcttcttcatgctgctacagaacctaatgctttgtaggttatgcaatagtaaaaacaattatttgggttgtgctttagcattcttcccagagtattttagatttaactgtacactatgtctcacttggttagagaccgatgagatattaacaacggatgttttagaaggtgaaattttattttgtaacatttgtctagtagactttaagatctagtgattgcttgttcggtaaagtttcttctctgtaactcttgtgagagaggtcaggacagattgcctgcttgtaactctatttccgaccagtttttactggttggtaaagaattcattcaattaaaggctgaaattaatttttagtctcagaaatggctatgatgaaaagggttcaaaacgtgcttcagagtcgatagtggctaacggaaatgatagcatgggacatggncaaaagccttcctgcacagtcgaagttcaaaccaaacagtgttccatggcaccggcctttgacgcaagaaaattgttgattgagaaagccaggaaagaaatcaggaagaaactggaggagatgaggttgtcgtctgaagcagcagcaacagcagctgcagctctgaatgagaaagaaaaatcacaagctgaagttggtcaagtaaaaagagagacatgtagaaaagcagctccgattgtttctggtctacagttagagaatgggaaaactggtccaatct

SEQ ID NO: 71825 - DNA, 285 bp, Glycine max
  Clone ID: PAT_MRT3847_35871C.1
atttctttccacctttccaaccatcattacttacaagagctagaggaggacctctgattccagctaaactccctccaagatgtgccaggcttgttgtttacagtaggaaaacaaatgagactagtatatggattgttgagttgtcgcaagtacatgcggtaactcgaggtggtcatcaccgagggaaagtaatttcatcacatgttgttcctgatgttcagcctccaatggatgctgaagaatatgcaaaatgcgaggctgttgtcaaaagttttcccccattta

SEQ ID NO: 71826 - DNA, 426 bp, Glycine max
  Clone ID: PAT_MRT3847_35872C.1
tgatgatcaaaatttaagttgctctatgattccacctgaagcagaatgtagcaatcgttcctcttttcccaactctgcgatgtataaatcagacaaagggaaaagcaagatggtttgacgtaagattctaatagatcacactcactgcatgcagctttatcgccgtcactattgacttcaactctctcaattattttgtgtttttaatttcaacgcaatcaagagactctgcaaggatgaaggccgctatatgtaatttattacaagtatgtaatttctaaatatttcatatctatttgttaattctttcctgtagcattgtattgaaaaaagtgaagctggaatttaacggttccacgctaacctattgcattttatcaatgttaccgtttataagagtattcgttatcatttttttcaaaaaaa

SEQ ID NO: 71827 - DNA, 390 bp, Glycine max
  Clone ID: PAT_MRT3847_35873C.1
gcgttttctcgtgtgacggaggacactgtacacgtagcgcctatcccatgcttgatggtgggagacgtaaactcgtacttgtctggagcaggaccaatccctgcctaaggaccttgatagtggcgaacctgaagaccttctgccaatccatatccatattcataggcaatctctagctccgtgctcttactggaggatgatttctgacagatatgtacgcgaatgtgatcgatactccttgcgcctacgataggccatcgactaccagactctctcccgaaggacgctcctgggcttgacccaattgggatccaaacattgcctattctataatactccgatgttgatatcctgagattctcaaaataagcgcaggaatgcactgtgtgt

SEQ ID NO: 71828 - DNA, 290 bp, Glycine max
  unsure (1)..(290): unsure at all n locations
  Clone ID: PAT_MRT3847_35874C.1
ttcacgcgtncgtactactactaaaatactatttaagggttatggacaaatatataggtaaatgtggataatcatacttacttactttatttataatttactattctagctacaaatcggtgctaatgactcttataatcataacgaagataaatatcaaacctatactaatttatgttataaagtttgtcaattaatgcttaaaataaacacatatacattacgttaataatgtcctgacatttaatactattagatggaatctattcttaaaattatctatttatact

SEQ ID NO: 71829 - DNA, 620 bp, Glycine max
  unsure (1)..(620): unsure at all n locations
  Clone ID: PAT_MRT3847_35875C.1
aatgcaactccaggactgatgtttatgccttcggcatactgctgcttgaaatcttgattgggaagaagcctgggaagaatggaagaaatggcgagtatgtggacttgccttcgatggtgaaagtggcggttttggaggagacgacgatggaagtgtttgatgtggagcttttgaaagggataagaagccctatggaagatgggttggtgcaggcgctgaagctggcaatggggtgctgtgcaccagtggcatctgttaggccaagcatggatgaagttgtgaggcagttggaggagaatagaccaaggaacaggtctgcattatacagccctacagaaacaagaagtggaagtgttaccccattttgagccttccctttcaacatgcttaagcaaactagtgatttttacttactatttgtgtttcctttttctcagctgaatctgaatatgaggctagtttttgatgatctagagagaatgttgtaatttttggtttactccataactctttgcatcaggtagtccctattgtttttgaaatcaaatatagtcacacaattatgcaaattcgtgcttttggnnnnnnnnnnnnnnnnnnnnnnnnnnnnnnnnnnnnnn

SEQ ID NO: 71830 - DNA, 292 bp, Glycine max
  Clone ID: PAT_MRT3847_35876C.1
gacggacttatggtctatgtgttagagtacatcataaagattcgggtgattgattatgatgaagagtacccgttccgagagactaatgatggatgctactcatatttgatagatgctaatgtatgctctatcgatgactaatataatgtcggtgcatttgattagataatcttgataaaggatgtagcatatctgacagtgatcgttgttatttttggaaggagaagggaattttaataatatatatctatcgcgttcacgactagatgtggatcattactatatcatgttg

SEQ ID NO: 71831 - DNA, 113 bp, Glycine max
  Clone ID: PAT_MRT3847_35877C.1
cctaactcgaacacgtatactggaccgctatatgaccatgtcgtaccatccttgggtgatggctcgtctctgcgttgcattgtaactggtaatgatctgcatggataggaaac

SEQ ID NO: 71832 - DNA, 224 bp, Glycine max
  Clone ID: PAT_MRT3847_35878C.1
cgtgaagtgtctcatctctaggctcaacctcttcatcaccaccaactgcatcgacaaggcgtaacaacgagggaggcattcatacgacgttgggactttggtgggctcaagtattgtaggttcgatgatgttgaaactggcaaatggtgaatagggagatgatcactcccaagatgatcatgacccacaggatcatttgaactatgactaagatcatatgctat

SEQ ID NO: 71833 - DNA, 550 bp, Glycine max
  Clone ID: PAT_MRT3847_35879C.1
ccacgcgtccgactggtcacaccgcgcagcgcaacggcagcagcagctcatcgctagctccacggtcgtcggtgttccctgtgcctgtgcgtgcctactactctactctacatggcggcctcgctaggactcgcccacgaggcggccccgttctacgccgccgcctacccgccggccggcgctgcttacgcttacctcgcaccaccacccggcgacctcgtcgtcgagttcccgccgcgcgccgccaccatggctgacgactgctgctaccagttcggccaggagatgggcggcgcctactgctcgccgccggtgttcgacaatggcatgacgagcctgctgaactatggcgtcgaaggcgacgggaggaggccggtgggcggaccagctggcggtactgggaacggcggcggccggccccggccggcgtcacggatcgggttccggaccaggtcggaggtggacgtgcttgacgacggcttcaagtggcgcaagtccggcagaaggcggtcagagcagccccacccgggaacactaccggtgctcgcga

SEQ ID NO: 71834 - DNA, 191 bp, Glycine max
  Clone ID: PAT_MRT3847_3587C.1
ctcggatttatcgcacctagcttcctttgttgcaatttcggtctcgttgctctgattctgattttatgtgttccaatctctggcctgcctgcctgcattcgccattctattttttcagatcatcatagcctagccgtattacactgttgaatcaaaactgtgtcggaagattcttaactttccacacaaca

SEQ ID NO: 71835 - DNA, 149 bp, Glycine max
  unsure (1)..(149): unsure at all n locations
  Clone ID: PAT_MRT3847_35880C.1
anattccgcctttatacggcgcaacacgacatcgggggcttatactctttctaccctaccgacaccttttcgcaaccgaacccttctgtcgactttttgcatccatacccttctgacatcttttttcagccacacagacccatttttct

SEQ ID NO: 71836 - DNA, 273 bp, Glycine max
  unsure (1)..(273): unsure at all n locations
  Clone ID: PAT_MRT3847_35881C.1
attctcgtcgcattggtcgcttaaaacactcatcaagtcatcaccaatggccaaggctagttttttcccctttgtttctgctttcaagtggtgctgcttcgctttcagttccagagagcagcctcagcgaaacgagtgccagatccanaaactcaatgccctcaaaccggataaccgtatagagtcagaaggagggctcattgagacatggaaccctaacaacatgcattcagcgtggacaagcagatagcgaaaaacctacaaggagagaac

SEQ ID NO: 71837 - DNA, 1023 bp, Glycine max
  Clone ID: PAT_MRT3847_35882C.1
atggatactcagtgcatctgtgacatgatagggaaccacaattcggccttgtctttcaacaaaatatcaactctttgccgggtaacactcccttgtgatattgatcctcctgtgccacatgatccagtgtctccagttccaagcactgccccagaaagtgaaagccctgcaccaaccccttcagtgccaagtcaagaaccagaaagccctacatcaactccttctgtggcaccaagtccagaaccacaaagccctacatcaactccttctgtggcaccaagtccagaatcacaaagcccaacatcaactccttcagtacccagcccaaaggcacaaccaacaacaagtccaaaaccaaaacgttcttcagcatctcttgcagcacagtcccattgtcttttggttcttgttcttctcgctatatatattgcgagtatgagagataagtgggaaaatcgatttggctttgtacggtttattgatgtccagaatgagaaagtgttggaaagaaaatttgatcagataatgataaggaatggtaagatgaacgtcaacatcccaaagtttaggagagatgaaaaggggttacaagaggtgatatgtgaggaagaaaagaatttggaatggttagagaaaagttggattaaagacataatctttggtgatgacaatgcttctgaaacattaagaaagtcgattgacaacaatatcggtgtgcagaccgatgatttagggtttatgttaatagatcttaagaaactcgcttaccagaacccttgtgatgaaaggtggttagtggttctacacgacaaaacaattggtgttaatgttgaagatgatgatgattcactaattgatacttatgttagtcctttgtccacacaaatctcgcctaacgtcaatggagaagatgaagttaacgacgctgatggctacaccacccagctcctcccctcttattcttcttcttcttcttcttcttcctcctcctcctcctactgctactactatatcatgcactga

SEQ ID NO: 71838 - DNA, 731 bp, Glycine max
  unsure (1)..(731): unsure at all n locations
  Clone ID: PAT_MRT3847_35883C.1
cttatattctgcatgcacacgcctcctctctctctctctctctttctctcagtttcacccctctcttctctctctctctctccggttaccgtcgtccattcaaatctctctccggttcctctccgttcagattccgacaatcttccgatcacacttcattattcctctccacaacgcgcgaatgcgaatcccaaacctcacccctcgcggcacctcctccgcttaaaaattaacttccggtgaccggaacttcccctcgtgaacttccggcgaccggaggaaccactcgagcttcctctccggcttaatttcgagtctgtgtggaattggagttgtaaatggagtcaaggagctgcatgaacgtggcgtgcgccacctcgacgacgattcggtggcgcaaaggctgggccctgcgatccggcgaattcgccgatctctgcgataagtgcggttctgcttatgagcaatcaacgtattgtgatatgttccactcaaatgattctggttggagagaatgcacttcatgtgacaagcgtctccattgtggatgcattgcttctatgtctcagcttgaattattagatactgngtggtgtaagctgtataagctgtggaaggaattcangaccgcaacctattgcaagcaatgaaaagcctaatggatctgggacatcanaagtacaaaatgtcagtacacagcagcagtgcacatctctggctaaccaataact

SEQ ID NO: 71839 - DNA, 159 bp, Glycine max
  Clone ID: PAT_MRT3847_35884C.1
atgactattataactcttggtaaatttaccaaagatgaaaatgatttatttgatattatgaatgacgggttagaccatttcatttttgtgggctgcaacttcttaaccgctgcagtcttcactcccgctaatagtttagcacactattcaacaaaatga

SEQ ID NO: 71840 - DNA, 525 bp, Glycine max
  Clone ID: PAT_MRT3847_35885C.1
gtttcacccctctcttctctctctctctctccggttaccgccgtccattcaaatctctctccggtttctctccgttcagattccgacaatcttccgatcacacttcattattcctctccacaacgcgcgaatgcgaatcccaaacctcacccctcgcggcacctcctccgcttaaaaattaacttccggtgaccggaacttcccctcgtgaacttccggcgaccggaggaaccactcgagcttcgctctcccgcttaatttcgagtctgtgtggaattggagttgaaaatggagtcaaggagctgcatgaacgtggcgtgcgccacctcgacgacgattcggtggcgcaaaggctgggccctgcgatccggcgaattcgccgatctctgcgataagtgcgggtaatgatgctctagatttcgaatcgatgagcgtgtgttgaaattgacgcttctgcttatgagcaatcaacgtattgtgatatgtttcactcaaatgattctggttggagagaatgcacatcat

SEQ ID NO: 71841 - DNA, 281 bp, Glycine max
  Clone ID: PAT_MRT3847_35886C.1
attaaatattaatttaatttgtaaatagaacaaatatatatatatatataatatataatatatatataagaatattaggtacccaaagggtaatacatagcacagcattgtcataaacaaaagggatatgaagtatttatgccactaattgatataaatacaacatagtcccaatgacaaagcccaaaaacattggaagaaatggccaaaccaattgcaccgaatatatctactgcaacaaccatacacgaccgcggaagacaaataagtcgcaatacaaa

SEQ ID NO: 71842 - DNA, 864 bp, Glycine max
  Clone ID: PAT_MRT3847_35887C.1
ggaaagaactctcccttcaccctagaatcccaggcacatgctgtgattctagggtgaagggagagttctttcaccaaaccacatttagcatcagtttgtctgttgcaaaaaaatttattgaagatgtgcaaaagctagttcaattggagccgaagggattttgtggcatagagctttacaatggaattctcatgcgttatgtcaaggcttcgagtgcctatttggggaagcaagaggatgctttagacattgatatcacttactaccgtagcaaggatccaatgactcctaggctttatgaagacattcttgaagaggttgaacaacttgggattttcaaatatggagggctacctcattggggtaagaataggaacttggcatttgaaggagccatcaagaagtacaaaaatgcagggagatttttaagggttaaagagaagtatgatttacaagggcttttctcaagtacatggacagaccaaatgcttgggctaaaggatggagtgacaatattgaaggatgggtgtgcattagaaggtttatgcatttgctcacaggatagtcattgcaatccaagcaaagattactattgtaaaccaggcaaagtttacaaggaagcaagggtttgtactcatttgaaatccaaatgagaccaaattttacagaaattaaaggacatttttactactatgtatatgatataagtgacaatatataaagatatagtttacatcttacgaatagttaataaaagattgtgctgattacaaagttgaaaggctaatatattatgtgaaaggccatgtttactgatatatatatatatatattacttgacaaattataggattcaattcaagt

SEQ ID NO: 71843 - DNA, 143 bp, Glycine max
  Clone ID: PAT_MRT3847_35888C.1
ctgacaactcttggtcaggttcattctggatggatttttggtggaatagctgagcttgttgataattccagagatgccaaagcaactaagatggacatttttgtacgatctgatcaacttacagaaatctgcggaaggctgtc

SEQ ID NO: 71844 - DNA, 366 bp, Glycine max
  Clone ID: PAT_MRT3847_35889C.1
gaccaattgcggaacgacagctcactaggctgagtgcgcccttttcttccttttttttggaacaaaacttgaattgttaagaaagaacagatcaaaaccatgatatgtaaggcacagagtttacctcaaaacaagaaacatggatggcatacctattgccagtcaaaccattccaaaaatctaaaatgtttacctacaccgatactctaaaaaaaataactgcctaacggcctcaatatcaatcgccactcacaattgaattttggtactcctcatttacatatacaccaactgcctgttgagcaggaaccctatggttctttctttacacacgttctggacgaccaccaccaagtggtctggtta

SEQ ID NO: 71845 - DNA, 1838 bp, Glycine max
  Clone ID: PAT_MRT3847_3588C.1
ctcggcaggtacccgggtcgcgccggaatcccggcgtcgacccacgcgtccgcaaaaataacgtgtgcgcttttcttctctttacccgttgaaacatccttagttttcagattctgaaatcttgattctgaattcatcacaatgaattcgtcaactacagtgaggaagttgcaggtggtgtcccctgttcctgcggacatagacattgcaaactccgttgaaccagttcatatctcccagattgccaaagagctcaaccttagtcccaatcactatgacctttacggtaaatacaaggctaaggttttgttgtcggttcttgatgagcttcaaggatcagaagatgggtattatgttgtggtcggaggcattactccgacgcctctcggggaaggcaaatctactactacagtgggactttgtcaagctttaggtgcttttcttgataaaaaggtagttacctgccttcgtcaaccatcgcaaggacctacttttggaattaaaggaggcgcagctggtggtggctatagccaagttattcccatggatgaattcaatcttcatctaacaggagatattcatgcaataactgcagcaaacaatcttctagctgctgcaattgatacccgaattttccatgagtcaacacagtcagataaggctctttttaaccgtttgtgccctccaaataaagaagggaaaaggagctttagtgatgttatgttcaggcgtcttacgaagcttggcatttcaaagatcaatccagatgatcttacaccagaagaagtaaataaatttgctaggcttgatattgacccaaattctatcacatggaggagagtaatggacatcaatgatcgattcttgagaaaaattgctattggccagggacttgacgagaaaggaatggtgagagaaacaggctttgatatttcagttgctagtgagattgtggctgttttggcactgacaacatccttagctgatatgcgagagaggcttgggaaaatggttattgggaatagcaggagtggtgaccctgtaactgctgatgatctaggtgttggaggtgctttaacagttttaatgaaggatgccattcaccctacccttatgcagactctggaaggaactcctgttcttgttcatgcaggtccatttgcaaatattgctcatgggaattcttctattgtggctgataagattgcactaaagttagttggaccaggtggatttgtagttactgaagctggttttggtgctgatattggagctgaaaagtttatgaacattaagtgtcgttatagtggtttgacacctcaatgtgcgattattgtggcaactataagagcactaaaaatgcatggtggagggcctgcagttgttgctggaaaacctcttgaccatgcatatttgactgaaaatgttgccctggttgaggctggttgtgtgaatatggcacgacatatatcaaatacaaagtcttacggtgtaaatgttgtagttgctatcaacaagttttcaactgacactgaagctgagctaaatgcagttcatagtgctgcattatctgctggagcttatgatgctgtaatttgtacccatcatgcgcacggtggcaaaggagctgttgacctgggcattgcagttcaaaaagcctgcaagaatgtgacacagccattgaagttcctgtatcctgttgaactgagtataaaagacaaaatagaggcaatagcaaagtcatatggagccagtggtgttgagtactcacaacacgctgagaagcagactgagatgtatagcaagcaaggattttcacgtcttccaatctgcatggc

SEQ ID NO: 71846 - DNA, 480 bp, Glycine max
  Clone ID: PAT_MRT3847_35890C.1
ccggtccggaattcccgggtcgaccgactcgtccgtccacacatccttacagatgtgataagcgtcttattgttcgctgataccattcgggtagcgtgatcttcctgtgctgtgaacctttcactctctctctaatttcacattcaaatgaataatattccttagagatattacgaaaccattgctcactccaatcctatgatttttgttgctaagaattctaagaaaccttgtctccattccgttgctttctatcaccaataccaacattctatcgagtatgtctgaagaaaaccaccgaatgttttcaatcacttccttacttggctacactcttaactccattgctctgaatattttatgcttacataaagacgaacgatactcttttaatcaccatttacgcattagatttgtttatagacacagattacctcgtcatctatatcacttattgccacaagaaagctaaattcttta

SEQ ID NO: 71847 - DNA, 221 bp, Glycine max
  Clone ID: PAT_MRT3847_35891C.1
tagaaaacagagcactaaaggagcattggggcattctcatgtttgtctttggcctgataggattggaaactgctcttggattgctgagtggaattggcttagtcatcgtgcttcaattaagtaaatagcttgtaacttttgaaatgaagttaattcctggcctttagcacctgcaatgggcaaatactaaataaaacaaaatcatcatggtctctgttatg

SEQ ID NO: 71848 - DNA, 605 bp, Glycine max
  Clone ID: PAT_MRT3847_35892C.1
cacattctctttctttttctctcctgatttcgcttcacctacataatactaacgctgtaatacctattgcaatgctttgcttactctgtagtagtacttccacttcccttgcaccttctgtcgtgtctctgtttcattgacatcgtcaatgttctttctctactctgtacaagggcagacactgatgtagcaaggatatattcttactttgcatgagatgaactggcctaccttaactttcacaataggaatttgcataggctttgtggttggggtgagtttggcattatcgattgtatcctgcgtcatacgtggaaggaagcgcacagacattgagaggagcagttctcacagtgcagtgaccattcctgttcaggtccaagtggttgattctaactcaacattatcagagggtgaggaatcacccagaacatctgagtggagtaacacatgtatatgggtggaaagacttaggaggaattggtgcaatggggggtgtgtggtaatcaacggtgtattttttgatgtacaagaggctgcttggtgtttggcagccgtggtggggggtggaggcattgggggctgggggtggggcgcgggtgggt

SEQ ID NO: 71849 - DNA, 338 bp, Glycine max
  Clone ID: PAT_MRT3847_35893C.1
attttgattcgctgcactggggtccttggagaaactgactttcttctatcggaagacaacgagcaactagagttccacgccctagagcctttaggaaaccctgatttccacctggcttccgctcgtgccgggccactttacagccagatcaactaggttgtcacgacactggagagtgcgcgcagagtcaccctgggcgagcttctcatgccggatcctcaccgaaccgacctctcactgcgggtcttttctgactggttggatcagtggggccgcgagactgaccttcgtcttggctattgtggcggaagggaacgctttagaggcgcagggaccgg

SEQ ID NO: 71850 - DNA, 434 bp, Glycine max
  Clone ID: PAT_MRT3847_35894C.1
agctcggaattcggctcgagcttgactccaggttctatcaggattgctgcacttgagacattgttttctcttattactggggctggtgctttaaaatctgaaccatggagatcgaaagtagatagctctatcgttagatacatcaacgtactctgttatggaaggatcagatcgtgtagattgaagggtctaataacaaagggaacctgctgcgtcttccacagaattgcagctcgctgcattgcgtgctttattggtatatatactttcattcgctcgggtactaacttcatatttatactagggtcttgaacttttccttagagggaggacgcaaactggaactaaactagctgcggtctgtgcctaagctctgctaacctgagaggtgcttatacatcctatggcacttacaatggctgactatgcctatg

SEQ ID NO: 71851 - DNA, 272 bp, Glycine max
  Clone ID: PAT_MRT3847_35895C.1
tggcaattgaagttgaagtcttgccctcctctcttcaactccaaacacaagacatcatcatccatggctgcctacgtctccactgtctgagctgtcaacagagctcttttgaacccgaatgggtctggacctggggtttcagctgccagttcatgcttctttgggagcagcttgaagaaggctattggctcaagggtccccgacacagagacttcctatggaagcttcaagattgatgcatgtgaagagacgaccgagattgattagacccc

SEQ ID NO: 71852 - DNA, 287 bp, Glycine max
  Clone ID: PAT_MRT3847_35896C.1
gttgcgtgcaacccattgacaaagtctggatgtcccctcatccatcaatcaatgagattgacttttgggtcactagctaattcaaccccatacttgtaacgattgcttctgctaatcaattctgcctatctagcatcttcaaaatccttgaatacccaatttactgcattgcgtaaagaggactaactctagaaagatattgaactagcaatcgactacaagataccaatgattgctgagacttagaagtgaaattgtactcttgcatctgattcaccactgaattc

SEQ ID NO: 71853 - DNA, 213 bp, Glycine max
  Clone ID: PAT_MRT3847_35897C.1
ctatccataatttgtattttcggacgacccaacaaaaaaagaccgggaggagcgggttttctttttcagcctataccgagaccgaactcaaaacaagaagtaaacatggacaatagctgccacctgcagccagagtgaaaagcattcacaatcacacacaacataataacccgaagcataagcgagcaaaaccagtgcctgggagggagaaag

SEQ ID NO: 71854 - DNA, 484 bp, Glycine max
  Clone ID: PAT_MRT3847_35898C.1
aaaacaagtaaaaaaaattgcaataatgttaatattggaagaggttaatcaagaaataaggaaacagacatgtctccatctctaaattgatcttgatcactagccattaccatattggtaaagttctttcatacaattacaaacaaagaaaagaaaaacttagggtatgtttgcttctcttctcagtttttatttttttatttaacaaactgtgttttgaaacaattctacttaacctatcaatcaatttatcatctaaagtcacttaagctttgacacttattttccaaattccataccaaatgttttaaaaactaaaaaacagaaacagacaggagatgcttctttcccttttcatttctcaatggcaagcagatggagagaaaagaactagcatgaattcacatcaaatgcagagagaacgcagagaaggaacatccaaatggagctcagtgagctgcgtcgcagacttgcagataagcac

SEQ ID NO: 71855 - DNA, 345 bp, Glycine max
  Clone ID: PAT_MRT3847_35899C.1
caggacgcaaactatttcaataacatgggggcgcccggggttcaatactctaagaaagatcgggatattcaggcttatttttccttgattgctcaatgtggcgaacttgatgctgagagatcacttgatctctggaaagcgcaaagatcttccgattcttcaatcatctgcggcactgggtctttgatccagctgatagggatatctatggccctagactagaagatagacgactatggccaactcagaagctgcaaaacgcatcggctaacgcatgacatagcataatcccaggtcttcaatgatgagaacatcaccaattcatacagagaccaggttctcttc

SEQ ID NO: 71856 - DNA, 828 bp, Glycine max
  Clone ID: PAT_MRT3847_3589C.1
tagggccaatgttaagttctggcatgtgcactgaagtttttccagtttgatgtttctccaagtcctggagcaatagttcctgcaacatcagtagcaaatgtttccactgaaaaccgtcagaatgctaccagtgtcaaaaagaccaggaatagaagaacccttcatgagctcccagagccgcttaatggatctagtctgaacataactgaagaacgagtaaagaatttgcagaaagaccacctccatggtaataagtcttctatggtagtttcagtccttgttgatcccaaagaggctggcgatggtgatgttgatgttgacggcatgatgagaccaaagtcactctctcggatttttgtggttgtgctaattgatagtgtcaagtatgtcacttactcttgtggtctgcctcgtgcttctccccatttggtgactggttacgtatgacaatccttcggaaaaaagttttgatgcagccgaagcatctaacctgagttctagtttctgtaacaaaggatgtgggggactgggaaggaaagaaactcatctccagttttgtacatattaacatatttaaagtagcagtcttgaaaatgtacctgagaatttaggagctgggcttgaatggggttgaccaactgcgtgtactgagtttttttggtgaatactgggtgtagagttgagacctttcatagaaacttaataatatatgccccccttagagttttaaagtggttcccatgtcatgcgttattgaatttatagtcgaaatgtgtttgggacaaagattttggataattatgaattttataaaattgatttttgatc

SEQ ID NO: 71857 - DNA, 174 bp, Glycine max
  unsure (1)..(174): unsure at all n locations
  Clone ID: PAT_MRT3847_358C.1
cccacgcgatcgacnctttgaatttgagattggccttgaggttgatacgcacgacgacgacaaggtggaggggcatacttcgacggagagcggaaccgattcttctcagacgatggcaaacgatcagataaagatgacagacgcagctcctgcgcaggcaccaacgcagaacaa

SEQ ID NO: 71858 - DNA, 601 bp, Glycine max
  unsure (1)..(601): unsure at all n locations
  Clone ID: PAT_MRT3847_35900C.1
gcctgcggtcccggcccggatttcccggttcgcccacccgtccggggaataggaagcccatagaactaggcttctactctcacccgtaagaaaaacttggcatctcacatcgtttggatacctccggagtggtatccaagatatagcctagttctctataaagaggtttctttttatcttactaagcagtgttttagcattgtgagcaggagttttatagccaacttgcatccatcagaaacaagatgtttttttcttgctatctgtgcatcccccttaacacttgtctcttactatgattagtgtctcgacgccctgtcacacttttatccacctctttgagagcattgtgaaccgctttggagacaatcttttataactacttcataatgacaagagaaaacattaacttgcaagttatggagataatcaaaagattaatctcaagcctataatatatttgcacagttatggaattgtgattgnatttttctttcttgttaatacccttaatttgattaacttttggagcgctagtcacttacttcttataccgctggcgtctctcgagtttccttctaacattctcttcctttacttt

SEQ ID NO: 71859 - DNA, 228 bp, Glycine max
  Clone ID: PAT_MRT3847_35901C.1
ggctcgaggatcgacataacatagccagcatcttcattcagtaacatcaatatcatcggcaacggacaactttttcgggaatccgctggctatgactgcagttgtggtcgccccattgggccttcatcttgttcgcttacggcctcatcgattacctcattcaagctttatgctacgttggtgtgcggccggtgttcaataatctgaaccggcggatgaacagggggg

SEQ ID NO: 71860 - DNA, 402 bp, Glycine max
  unsure (1)..(402): unsure at all n locations
  Clone ID: PAT_MRT3847_35902C.1
agggatctctggggccactttccatctgatgttgcnaatggagctcagtaatgtccttaacaatctgaatggtacanaagaatccatcactaatgcccgaatttggttcatgccaagatcttcatttgcaccaaccctagcagaagctcttagagatagagtctttgcattggatgaagttgagagacaattacacataatatacctcgccaatgacatactttttgacagcttaaatcggaggacaagcaatagtgaccttgacaatgaagctcttgcctttaaacctgttttaagctccatgcttgcaagaatttatcataatccacaaagcaatgaggaatacaggaaaagaatgccgccaatggtggagttctggtcttcttagaaagtgttccatca

SEQ ID NO: 71861 - DNA, 217 bp, Glycine max
  unsure (1)..(217): unsure at all n locations
  Clone ID: PAT_MRT3847_35903C.1
aaaaaaataaggcaataacttttgttgcntgtactttttggggtttagggttttgcaccccctttagcnaaaacacacaagtggcaagcctatgttcaanttcaactccaagcgantngngattcngaanatnctaaattgnnngattatataaatgcnaaacatnaaaananggcaaatcatngngncnnagtggagccgggggnaggnnaaaana

SEQ ID NO: 71862 - DNA, 1206 bp, Glycine max
  Clone ID: PAT_MRT3847_35904C.1
gcctgtggtcatcgtggcatttgtgatgagtgtgttttggatatctactacagccggagagctggtgaactgcctagaagctataggtgtgcttcttgaactgccgccagcactcctgggtctcacagtgctggcgtggggaaattcagtgggagatcttgttgcagatgttgcagttgctaaagccggtcatccagctatggcaatggcgggatgctttgcaggaccaatgtttaacatgcttgttggccttggaactgctttggtcatacagacggccaatatatatcctagagcatatcagcttaatttccacgttggtatcgtgattgcatttgtattccttcttttaagccttatggggtctctcttggtgatcacttggtgcagattcagagtgcctaggttttggggcttctgtctggtaggcatctatgttgcttttacggcagtgagtttagtaatagccatgttttcagggtgattgcttttaggtagatttttatatttatattcctaatcaaacccaaccattaaaaatccacataaatggcattattgaaggaagaattcaacacctatagtaaattgacgacatagcgtatggtcatgaagagtttttcttttcggtttctccattgggtttgggtagatagaaatttttagtttggtcctgatcacaggaatttattatactgtattgttttacagtccaaagcagtccggaatcgtcccaatgcaatgcttacagatttattaccgcttctgctgactgattttttgttcacaattcttttactactcttacttagttgtttttttttttttggtttggtacctaaggtgagattgactgttagttgtattgaatggacttttaatcagtaataaaaaatgttttggcatgtcatgtatgtgataggatgagtagttttaaatgggctaaaatatgattagcttaattgtacttttaagttgcttagtcttgtaagcttccttagtcttcctctctacatggcatatccagtaaaaatcccttgctaactgaaattgctagttccttatttctctctggtctaccaaaccggacatttattttgagataaaatgtagcttttaagatttgaaaaaaaagaaaagaatactttcccaacactcacatgtccatgccccatctcccccccaccgaaaaaaaaaaaaaaaaaa

SEQ ID NO: 71863 - DNA, 231 bp, Glycine max
  Clone ID: PAT_MRT3847_35905C.1
ggctcgagctggcattggcaagcaatctggattctctctcctctctctctctcggctctgaggcgcaggttgcgaaccgtagtgggcacttggcagataattattgcatctaacgaggcatctgcaaaaattggggctctgaacgaccatcaagtgatcccacgcgattggaaagaacccttccaataacaaagattgaccactcggtaatcacatcgaaatttctggggg

SEQ ID NO: 71864 - DNA, 357 bp, Glycine max
  Clone ID: PAT_MRT3847_35906C.1
ttacaactcaagttctctctctttccttccttccttcccatcttcttccccaaacttccttgaaacttcaaaccctaaactaaataaaacttttaattcccccatcaacccctcatctaattactattattttattcaaataataattattaaaaaaagcattactcaaactcactcatttttttctgaaattttctttctttctttctctggttcttaaaaatgggcacaccaaacccaacccaacccgacaatgggccctgattcattccgccggcaatgggaaagcccggagaacaccaccttctgccttccggtgtcgccgccgaggatccgcggcggaatgcggcgtctccg

SEQ ID NO: 71865 - DNA, 796 bp, Glycine max
  Clone ID: PAT_MRT3847_35907C.1
gagagaactagtccgagttttttttttttttttttgtggcttttgtgggagatgaaagtatttaagagatgaaaaagtgaatagggcaaacaaagaagtttggttaagtaaaacctaaaacactagtaattccctaaacacaacttaccccccatgtacttgatattaatgaactctcgataattatccaactttcagctttgtcagccattacatatattttctcaatggaagcagtacagtaccaagatccatgcacccctccatagtggtggactcagagacagaagggtataccattatttctacctttcacagaaagggcttacagaagttagtggatagtttgaacctttaaggtccacctgaagtcaaaggctctctttcttcagaccaacataaacaaccgtgtgcatggcacagcaataaagtgaatatcactgttcactgaggccttggaccaaacgtcctccaagacataaaaggcataaggttttcaggaaacttgacctatagatgacattatgaatgttactgaagggaaccaatacaagctttaatctcttccacattttaaatatgaaatgctacagtcttggcttaggacccttccttctaggaatctctaatgcatcataatgaccaaagccatggtagagaactctaattgggttttctttgccgtactcttgaccatactcagcaattgatatcaaaccaccagcatctttagcatacatgtatactgtgataggcatctgcaaaacatgtgatgcaatgcacaattcgggttcac

SEQ ID NO: 71866 - DNA, 257 bp, Glycine max
  Clone ID: PAT_MRT3847_35908C.1
ggcactcgtatgtgcgaaggttacttgtggaactggcaaaaacaaagaaatgccgtgccatagtgacaattacctgcttgatgaacactgtgaaactcttaaagacgtgaactagagtactgccacattatcagacattctgtaaaaacactgtcaacagtattgactggatataactcgcagaaaggtatctataaaatacatgataaacgaagagtactcacaactagctgatgtaccaccagaccatgtcagat

SEQ ID NO: 71867 - DNA, 252 bp, Glycine max
  Clone ID: PAT_MRT3847_35909C.1
caaaattcaagtgtcatcctcaaatttgtagatatggtgaaggattttccattatgggcaaacagtttcaaggacagcatggtacataccaatttgcaaattcatgtacagcagtattcttaaactgaaagggtttgggaggtgagtgtggaatatctttctgatgtaattacttcttatgtcaacacaaactgttcatttttgttaacaaaatactccttttatttttcatgtaataaaaaattaaaaggc

SEQ ID NO: 71868 - DNA, 147 bp, Glycine max
  Clone ID: PAT_MRT3847_3590C.1
atcacgcgtacggtcgtatatgagcacttccaaagggcctcgagaaactgccacgctcggcgtgtatgtgacacgtagcaccattctcatgtacaccgtacaccacaatccacagatccttctcacggtcacggcacataggtgata

SEQ ID NO: 71869 - DNA, 846 bp, Glycine max
  unsure (1)..(846): unsure at all n locations
  Clone ID: PAT_MRT3847_35910C.1
gacatctttcactcgttctctgaaattttaattgacttttctcccctcataaaaaaaacctaccaatggctcccgcaaaggcagagaagaagcccgcggagaagaagccggcagagaagaagatatcgaaggaaggaggaagcgagaagaagaagaagagaacaaagaagagcgttgagacctacaagatctacatcttcaaggtgttgaagcaagtgcaccccgacatcgggatctccagcaaggctatggggatcatgaacagtttcataaacgacatcttcgagaagctcgcccaggagtcatcgcgtctcgctaggtacaacaagaagcccaccattacttccagggagatccaaacggcggtgcgtttggtcctccctggggagttggccaagcatgccgtttctgaaggcaccaaggccgtcaccaaattcaccagctcttgattggtttcgtgtgtttatgtcagggttttctgttagcccgatttaattaggggtttcttttcctttttatttctttgagtatgtagatgtaaaattaaagccttttatttttaaataatataattgccgttttgccgcaagcgcaaactctcgctgcttcctcttctgcgccgcagaatcctccattatcgttccttcctccaacctcaacatcatcaacaacacttgtcttgctctgtaactcttttatatatatatatatatataaggtgtgtgtgtgtagaatgatgatatgaaactaggtgtctgaagtatgcataaatcccgatttaagnaatggcgcaaaaataaggtaaaagggatgtgggaataaagagccgcctcgagccgaattccg

SEQ ID NO: 71870 - DNA, 843 bp, Glycine max
  unsure (1)..(843): unsure at all n locations
  Clone ID: PAT_MRT3847_35911C.1
cgggtcagcccactcgtccggtttttttctcccatcatagaaaaccgaccctctcctttccctcttcaccaaccaacgtacgggagaacccacgcgtccgtacggctgcgagaagacgacagaaggagatctttcactcgttctctgaaattttaattgacttttctcccctcataaaaaaaacctaccaatggctcccgcaaaggcagagaagaagcccgcggagaagaagccggcagagaaggccccagcggagaagaagccgaaggcggagaagaagatatcgaaggaaggaggaagcgagaagaagaagaagagaacaaagaagagcgttgagacctacaagatctacatcttcaaggtgttgaagcaagtgcaccccgacatcgggatctccagcaaggctatggggatcatgaacagtttcataaacgacatcttcgagaagctcgcccaggagtcatcgcgtctcgctaggtacaacaagaagcccaccattacttccagggagatccaaacggcggtgcgtttggtcctccctggggagttggccaagcatgccgtttctgaaggcaccaaggccgtcaccaaattcaccagctcttgattggtttcgtgtgtttatgtcagggttttctgttagcccgatttaattagggtttcttttcctttttatttctttgagtatgtagatgtaaaattaaagccttttatttttaaataatataattgccgttttgttaaaatgcgttttctacttcccccccccaaaatatattcatcccncttgaaaagaatcatgaaattattggggacgaaatgagtaatttgaccatgattttt

SEQ ID NO: 71871 - DNA, 784 bp, Glycine max
  Clone ID: PAT_MRT3847_35912C.1
aaaaaaaaaaaaaaaacggctgcgagaaaaaaaaagaaactcgttctatctaattcagtttttttctcccatcataaaaaaccgaccctctcctttccctcttcaccaaccaatggctcccccaaaggccgagaagaagcccgcggagaaaaagcccgcagagaaggctccggcggagaagaagcccaaggccgagaagaagatatcgaaggaaggaggaagcgagaagaagaagaagagaacaaagaagagcgtggagacctacaagatttacatcttcaaggtgctgaagcaggttcaccccgacatcggaatctcaagcaaggccatggggatcatgaacagtttcataaacgacatcttcgagaagctcgcccaggagtcgtcgcgattggctaggtataacaagaagcctaccattacttccagggagatccaaacggcggtgcgtttggtcctccctggggagttggccaaacacgctgtctctgaaggtaccaaggccgtcaccaagttcaccagctcttgattcgttttgtttcctgtgtttcgattagggttttctgttgaccccgatttgattcgcatttttaaattagggttttattttcctttttgttgcttttgagggtgtagatgtaaaattaaagctttatttttaaataatataaatgccgttttttaatatgccttgttttgaattgtgatccgatcgaaacgtctttttgcgtcttctttggttttctggtttctgattgtggaaatcgaattggctgtttgaccc

SEQ ID NO: 71872 - DNA, 1250 bp, Glycine max
  Clone ID: PAT_MRT3847_35913C.1
gaaccacccgtttctaatcattattagacttgatctcaacgatgaaggcaacactgcttcgtccttgttctggtcctctgattctcgacacacatagcaaccgaacctcggcaacgatgagacacgcttccaccgttgtttgttgctcatcgaagaatcaaccctacatcccgaagctcgagccttttagccgaaccaaatttgaaagggccgttaaagaccctcctttaatcgaaaaatctgagaaagagatcttaggtacgtccttttcttttctttttttcccaaatttctcgactttataatgaattcaaagaccccttttgggtaattttatttggggtatcgatttcagtttattaactccttttgatgtgtgtttctctgttgcttatcctatggacgatggaatctgattacgggtttcatcatgatctgttgttgaatgatatgaattcatccccggtccgacctcttgtctttgaattctgtagattattgttcaacgcttgaaggagaccaatcatatagctgctggcaggcttattttgagctgaaagatcttgaagtatgttcttatttctatagcttgtgttattggtctcctttccttacttgttttgtcataaactggcatgtaatttataagatatggcctagcttttttagtgtgttcgttttttttacatgtatcatttggtgtggagtacttatcctattatccgtttttttccatgactaatctctccttttttatgctctgttgtatttgcttttatttctctgaaaataaagcttttttgaataaatttatttctcttttagaattgtagagtgaaaggaaaaaagtgaatgtttatgcaacttccttccttctatgcctatgtggaatattcaagatatcttttggatgaaacgaaagaaaatacacttaaaaatttgaaaaaaagaaaataaaattagaaacaaattttatttctttttaatttaaattccaaaattttctccactcgtttattttctatttagcatttcaaacagtgtaaatgataaaaaaaacttggaaaaaattaaagatgtaggccaaaaagaaaaaacaatgaaagatgttcagtgacaagtggacacagaaggtctgctggtatatatatatcttgtaatgaaaagagttaatatacctggctaaatataaataggattatttaatgttgatgtgttgaatatcaaccatcaatgatattcattgctga

SEQ ID NO: 71873 - DNA, 154 bp, Glycine max
  Clone ID: PAT_MRT3847_35914C.1
tgctgcatgtacgatgtacatctagtccatctgatgcccagcttactttgcagcaacgccaagagtttttggaagtcataaaatccaatttagctgcagctcaacaaaatgaagttttatgctgacaccaacagatcttttcgaacatttcaga

SEQ ID NO: 71874 - DNA, 264 bp, Glycine max
  Clone ID: PAT_MRT3847_35915C.1
tctctagccgaatcggctcgagtacggctgcgacatgacgacagattaccatcgatgcaaagtctttgagcctaaagtgcagctctcctactgtctttcatctctctcttgctatccttattggctagtgtgcctgctgcaggtacaactccatgatgcgcagtgtcaagcctccatgtttccacattcatcagatgcctttgtccatccacgttactctgtggaatcggcacttctgcttaccatgccgaaggtgcagcaagt

SEQ ID NO: 71875 - DNA, 223 bp, Glycine max
  Clone ID: PAT_MRT3847_35916C.1
cccacgcgtccgatcacgcgttcgctcttacacacccaagcactactacgactagtttatctctagatatgggatctggtgctgagcaactgtactggatattggagatcatgcctagctaatgctaagaccaagacttaggtactgaacccatactaccacgcactacaacgacattaccacgacgatctagatcatgacttgcaccaggacgtaccatacc

SEQ ID NO: 71876 - DNA, 362 bp, Glycine max
  Clone ID: PAT_MRT3847_35917C.1
aaacagaacattttatctttgccaatgccaatatttgggaggtacaaaaaacgggggggaaaacaaggggacaagtctaatgatctcattcatcgatccctgggtcccccaaactatagtttgttataaaaggattatttctttacacataaccaaaatcccagacccttagatacattttgcatcacttgcaactttaaaaaacatcatgctggtcgaacaagccataattttatgcctgcccaactagcaaaacttttcatgcttgaactaaaactgcccgcgctggtccaattttacattcagaaagtgagcaccatatgcatatcccccatgggaactataggatccacccatggcct

SEQ ID NO: 71877 - DNA, 458 bp, Glycine max
  Clone ID: PAT_MRT3847_35918C.1
tacctaagctcggaattcggctcgagaaaaccataaaaaccaaaactttaactaaaatctttgtcacaacacaatttcatttaaacattttggacctatgggtcatggtacaatttgaaagtctttacatcattacataaaaacttaccccttccttgatgatcacatatacattcttattcatcagagctgttaaacaccctctttatatatcatgacacctatcaatttagcattccttttctttaactttgaaggttagtccacaccacttttgtatagtataccaagatgatcattctatactttgtatattacatagaccaagatgatcacccctttaactccacagaaatgcatgccacttcttccctactttctcgacatgaattatgttacgcattataatgaatgcaacaaggtgtgttgcactttattttgcagaaatttttttctaa

SEQ ID NO: 71878 - DNA, 329 bp, Glycine max
  Clone ID: PAT_MRT3847_35919C.1
ggaatgtgtgagataggagttcctgatctttcgcgaaagtgtgactaacatgagggtccgtgattccaacagtgaacgcacttctcagtcaccgcgatcgtccacatcgtgtcaggagtactttctgcaaagaaaactggtgatgtgacggatctgcaaagtggtgtgaggcatagaccagtcgcatgctgagttcaggcatacaagggtgacatattcaatcaatactgcagggtaaatttcagtgacagaacagtgatcgattctagctttgatagaatcaatccaattgaagttgagcttggaactgagttagtgatcacaggttg

SEQ ID NO: 71879 - DNA, 355 bp, Glycine max
  Clone ID: PAT_MRT3847_3591C.1
aaaaaacaatacataaataagaacgaaaaaatataaccatacaattaaataaaaaaactacgagtcatttatgaaatctatggactgatgatacattccaaatcatgaacatgacaagtctcattaattcgcatggatatcaacagcctaactctggttgctttatggtaaccataaaaaaaataccgacttagaagtgccctacctagatcatactaaaagacgatcgatctgttttcatttacaaagaatatacaagactcacctgaggttagacaaaatatgggccgtgagagttctatacctataagagaaaaaataaaaaatgtcagccgctctatacgaaccattgtta

SEQ ID NO: 71880 - DNA, 591 bp, Glycine max
  Clone ID: PAT_MRT3847_35920C.1
gaagagtgcaggctctatcagagcagcgacatggcccgcaactgatgccacaagcaggacaaaatcctcgaacatcaaacgtgcagcgtccaggtccaggttcaggttcaggtttggctccttccaaccacagtcaacctgtggtgcaaaatcaacagaactcaaatcagagctgaattgatgtgtttgtggcttctcttaacactaggggttgcagctgattgattttcattctagatttggaagtacttattgtgtatagggaattaaactttatttattattacatcttcactagacttctttgtacagcttgtggtagcagtagagtgacttagaatatagcttctcatgctatggaatatctgtttgtttatctaactgggaatttcaattttcaactcatcaaaaccagaaggcatcttgccttcatttttgtaggcttgggtgaggtaatgattttgtttttgatcatgagagtgatgaagaagttttgttttttagtttgtcttggaggtttgatcatttgatggggcaataccaaatgtaatgatgtagtgaactaaatgaagctttattcccttcccctct

SEQ ID NO: 71881 - DNA, 455 bp, Glycine max
  unsure (1)..(455): unsure at all n locations
  Clone ID: PAT_MRT3847_35921C.1
ttngggatttttttttttttnnnnnnnnnnngggggggccaaaaagaatttttttttcttaaacccccccctgtagggctccaaggcccaaagggggtttcggggcccatagctaagggggggaggcccaagtggtggggaaagttttcccgccccccaaaaaaaaaattttttttttccccccccaaatttaaaaaagggcccctgtttccccacccaaaattttttaaaccccccttcccaaacaaaactttttacccgggggttgggacataaatctaaggaatttttttttggggccctttccccccaaaaaacctttcccccccccccccccggggggtaatttttataattcccttaaaattggggctggggggatttttcataatgggggggggtggcccgctttttttaaaaagcttggaaaagtttttaaaacccagtttttcttt

SEQ ID NO: 71882 - DNA, 266 bp, Glycine max
  unsure (1)..(266): unsure at all n locations
  Clone ID: PAT_MRT3847_35922C.1
gcacgaggcacaatgcacgtgatgataaggttctctgacacagtttatggaattttgatgatggggaataagactataggaaaagcacagctgaataatgcatacatacattgcatatatgggtggtctccatatgatgtaaggaagaatatagctagtgaccagctaaggaaccatattgtgaaatgtatagcagctcttcaacgattatgaataaatttcgtgctatatattttcaaaaaanaaaaaannaaaaaaaaaaaaaa

SEQ ID NO: 71883 - DNA, 316 bp, Glycine max
  Clone ID: PAT_MRT3847_35923C.1
gtgccacccacaaaaacacttgctctgccaaaagggggcggggacctacaataaacacggcaagctctaatgattgagggtaaaccatttcctgccggggagaagaaccaaagaaaactttagagtcctaaaaggaggagccggatatccacctgcccatcacccaatattcatatcccccattttctcttcaccctctcggatagtcttggcacactccttaagcctctgtgtgtgctcttccttgaagagcacattgttccctctcagaacccctcctctttctgcatatggaggcaaactcaggaacccttct

SEQ ID NO: 71884 - DNA, 201 bp, Glycine max
  Clone ID: PAT_MRT3847_35924C.1
accaggaaatcttttttgttgatatcaaggacaagtgcaaagatttctcaagctcattatcaagaacatattcttcccaaagctaagcttctcgggtagttaattcatgacataatattaataaagcctcttgcctgtgatttgaagttaaaaaaaaaaaaaaaaaaaaaaaaaaaaaaaaaaaaaaaaaaaaaaaaaaaa

SEQ ID NO: 71885 - DNA, 915 bp, Glycine max
  Clone ID: PAT_MRT3847_35925C.1
ttcccgggtcgacccacgcgtccgcggtattcactttctctcttctaagtccataattgagtctttttgtgtctgtgtgattaaattgcagttttagtcctgaagctttggtttttaagttttaactgtaccgaatggcgtcggaggatccatccatgtagccaaccttagcttgtaggataaggctctgttgttattgttctagattgtcctctcactcttgcatttatgcaattttggtctccatgtaatgccctaatttttgaggtcttgacggctcacactttattgcacttcacactgtgacacttcacttatctttcactcaacttttctcatgattattgatagtacccaataaccaacccaagatttttcagcttgctttgttctcactcatatgctttcacaattaactatgaaattcttaagttatggactaccgaatagatgcatcttgttggtataagtagtatcaattaattccttcaagtcttcctcaattgtatagtgtcacacctgtatagtctctgaatccctctcattttggtgtgattaatcaggggtattacactctatatgtttaattgagtgattttggtgtcaaaatcttatcatatgttaaaattgggtcgctttgttcgtctcacatctaagtagtaatgaaatctgctaacatcaactatcttttgcttaattaattacttgatgtgtaagttactgatgatgtggaaccaataaggtccaacaaagttggtagatagctaggttctttaagcttgctgacaagagttagatttcctgggcttgcatatggagaagactttgttggaaaagcaaaatccactttggttatctctagtctcgaaggattagagtctcatggcttttggatggggatactttgttctttgc

SEQ ID NO: 71886 - DNA, 272 bp, Glycine max
  Clone ID: PAT_MRT3847_35926C.1
gaatacgtacgcctactcagacatccactttacaggttacacgaccataagctagaattggcgaatgttctaattccgacgcgctctaaccaggcttgactatattacaaattccatacattgattactcctaataagcattatctatcacaaacagaatctacatgttattacatcttattatgacaaactccatattatactcacttaaactattcgactatagtataagcttaaattcgtaacaaccttattgcatagataatcacttc

SEQ ID NO: 71887 - DNA, 354 bp, Glycine max
  unsure (1)..(354): unsure at all n locations
  Clone ID: PAT_MRT3847_35927C.1
ttatccctccccccannccccacctggtgccttattcagcggctagagatctctcctatccaatttgctaaaatttacccaaacccgccaccatcatcaatttcatcatctctcttacctattaatccccctcactcctccttggcacatgccttttctcagcgcaagctctactgctctatctcttcctctaccttttcatccaaatttttcttcattctcacgcgccgccgcggttttacccggcggctactccctattcaccgcgcatccattcactttccctgtcctagcttttctcttacataacaaaaaaaatccaaaagttctccgaagactgcgtattatcggtat

SEQ ID NO: 71888 - DNA, 344 bp, Glycine max
  Clone ID: PAT_MRT3847_35928C.1
acgcttacgcttacggataacttgaaacagtgtgatgaaaatgaaggctcttgtttccttcgttgctacaatcataggtagcatgggaatgccatgcgtacgatatgttgcctatgacaatgaacactggctatggtgcccgtactccggaggtgagatgcgcaagttggaggcttgctgcggaagcccacaacatttttgggtttgagaccattgctgaacagtgcgttgatggaacacaggaatacattcatggcgaacaatatagatcagactctcaaacagctaaccaacaagcttacttttatgtcagagacctcgaaagtcatcccaaggacacattt

SEQ ID NO: 71889 - DNA, 146 bp, Glycine max
  unsure (1)..(146): unsure at all n locations
  Clone ID: PAT_MRT3847_35929C.1
gcaataaaanttnatttaaaatttctgcgtcttccaccaacagnacgaacaacattccgaangggaccaatacattggttttcttcggngcgtggaccgacgttnggctaccttntaagtncttcaacgttgcatttgggganttt

SEQ ID NO: 71890 - DNA, 319 bp, Glycine max
  Clone ID: PAT_MRT3847_3592C.1
tacggctgcgagaagacgacagaaggggccacagaacctgcaacatattctatgccatgcatatgtggaccgtgtaacaggaccatgatagaagcataccatgtctctgttgttaacagcgtccagtaccatttctgctgaggataaataccatacagatagtgacaacactccaccatctagatattcagttgcgcaatagggtctggcatcatccggaagttcatatcagcacgaagattggaacactgttgtactaactcgctgttctgtaccctacctttagccgaagacactgttctatcctgggggaacactt

SEQ ID NO: 71891 - DNA, 340 bp, Glycine max
  Clone ID: PAT_MRT3847_35930C.1
ctcgagccgctcgagccgattcggctcgagagaatataatgctgcacactatcctttactagttatggcattatactttctgattttatgtgtagtttgttttgctagaagaaattcctgctctccctagtccagagttgataacttgtttttactatgtggttgttgttgtttttactgctagttttctatggatacttttaatcatctttctgccatttcctaaggtgttttggctcttcctgtatcatggatggtattcatgggggtgattctcggatacacataactgatggacagcatcctatacacgtgccatatgtgcaagaacacgagcatc

SEQ ID NO: 71892 - DNA, 303 bp, Glycine max
  unsure (1)..(303): unsure at all n locations
  Clone ID: PAT_MRT3847_35931C.1
ctcttcttctcttgcggcnnanggttttagcgcacttccttctagatttaaggnagatgggtaaggacaaggttcacatcagtattgtggttattggccatgttgactctgggaagtccactaccactggccaactgatctacaagcttgnaggcattgaccaagcntnttattgaganatttganaaggaaacctgcctgagatgaaccaanangtctttcaagtatgcctggggtgcntggataagcttaagggctgagcgtgnaagnagnatncccaattgaattgcccttntgggangt

SEQ ID NO: 71893 - DNA, 271 bp, Glycine max
  unsure (1)..(271): unsure at all n locations
  Clone ID: PAT_MRT3847_35932C.1
gctaaccgtacgcatagatggacacatatcacatgctcacgacgtgagtaacangcctgcggcttacgactctagcgatgtccataaacaaaagtgcacagccgaggggctgaacactcatgacctcgtcacactagatggtgcacataccactgtgactacaggtggcgcaggcttcaatgacatgatgcacaacttcaacgcgaatggcacatgaccctgccagctacactctatgcttaaagaaactacaatcactatgccctcaaaa

SEQ ID NO: 71894 - DNA, 274 bp, Glycine max
  Clone ID: PAT_MRT3847_35933C.1
tttttgtggagattccatgttccttgctgctctgctgtgttctctgtctttgttttcttaaaaaaaaaacttgttgcaaggtttcctgatttagttatttcaaactcttcatttcgattctgtcaatgagaatcctgatgaaagacaaatgaccggacagaattttagtatattgtatatttctttcacgtgttgggattattcatatgctcattgcccacgtcatcgacgcttacttatgccgagatgtctagtactttacgctggtcccaaa

SEQ ID NO: 71895 - DNA, 186 bp, Glycine max
  Clone ID: PAT_MRT3847_35934C.1
ggccccatggcccatgggggttacccggggcttttttaattggccagatggtgataggtgccaaaattccaaagtcaggactccagcattacctttttatgtaccaaaggttgaaaaaaattgttttaaagaagacaacttagcctaaagcttagccggttcatacatccaattctttccttccaa

SEQ ID NO: 71896 - DNA, 1215 bp, Glycine max
  Clone ID: PAT_MRT3847_35935C.1
ggtcctctcgaatcaatcgaaacctccgattgcgcaaatttcaagtgtccaccgttttattatgcttacggtgatggaagcttaatcgcgcgtctctatcgtgacacgctttctctctcttctttgtttctcagaaatttcacgttcggttgcgctcacactaccctcgccgaacctactggagtcgccggattcggtcgtggtttgctctctctcccggcgcagctggccacgttatctcctcaactcggaaaccggttttcgtattgtttggtttctcactcgttcgattcggagcgagtgagaaaaccgagtccactaattcttggacgctacgaggagaaggagaaggagaagattggtggtggagtggcggagtttgtttacacgtctatgcttgaaaaccctaagcatccttatttttataccgttagcttaatcggaatcgccgtcgggaaaaggactattccggcgccggagatgctacggcgggtgaacaatcgaggtgacggcggcgtggttgtggattccggcacgacgttcacgatgttgccggcggggttttataactcggtggtggacgagtttgaccgccgagtcgggcgagacaacaagcgcgcgcgtaagattgaagagaaaacgggactcgcgccgtgctattatttgaactccgtggcggacgtaccagctctgacgctgcgttttgctgggggaaagaattcgagtgtggtgcttcctaggaagaactatttctacgagttttcggacggtagtgatggagcgaatggaaacgggaaggtggggtgcttgatgctgatgaacggtggggatgaagcggatttgagtggtgggcccggggccacactcgggaattaccaacagcaagggtttgaggttgagtatgacttggaagagaagcgcgtggggttcgcaaggaggcagtgcgcgttgctttgggagagactcaatcgcgacaaaaactagcgtaaggtatcgtgcactgaacatactagattccctcccctgctttctgtcacgggtcgggttctttctgtaaattttgaaataaggcgggctttcgggccatgcgcttgtatgtctactaatagtaaggaaagctgtacactatcttttttaaaaaaaaaaagaagaagcctgaattgtattgtaagaattgtaagtaaacgtaaatgattgaaaataatattttttttt

SEQ ID NO: 71897 - DNA, 203 bp, Glycine max
  Clone ID: PAT_MRT3847_35936C.1
atcatctgaaaatgcggaaccctctgcatgacctggaatttgtatactcttccgcctgttcgttcgtttaataaaataaaggaaaccaggcatgaccctctagtagagattgctctgcctattcgaaaatctccacacctctcttaatggactgttagatgagtgaagtgtgcgctattctcacatatgctgaacggactgat

SEQ ID NO: 71898 - DNA, 462 bp, Glycine max
  Clone ID: PAT_MRT3847_35937C.1
cctctaaatcataaactttcttgggttctctttctcgttggaaaggttagaagaaaaaaaaaatccaagatttcacaacccccacctaattttaaactagttgaaatcaaatatagggcagacaactacaatcgtctttattcccatttgcaacagtttttttttatagaggaattaccactctaatgtacaagttcaaaaaacaatttctgaatgcgacaaaattgggccttcacgcttcccattgagggattctccactctcatcccagctaaaaaaaagctcaaagtcttgggctaataagcacattcgaatgtttacaatatactcatgtaaacaaaccaagactggcagggattaatgaccttctcaaagatagtcatcatatgtctaaaccatctggaatttttcattaccgacaaaccaaaggctccgtcaaatgcgatatggggggggttgatt

SEQ ID NO: 71899 - DNA, 562 bp, Glycine max
  Clone ID: PAT_MRT3847_35938C.1
atgaaaaaacataattatttaaaaaaaaggtgatttgcccgaattttaaagaagcataaaagaaaataaggagagacaccaactgaaaaaaaaaaaaaaaaaacaaatgggactatagatagattttgggggcgcatatgccccactagagtttaaagcattctagggattcgccaaagttaggtactcttgggctgttctacttttctttcctacatcctaatactgtttaatctatcagacaaaggaccaattgatgaacataaaacagatgcaatgagcagattcttcttcgtttaacactttccatgcaactgctctctcataggatactggccttcccatgctggataaacagataccacctttgatacacatgaaaccctgcaccaaaataatacatacatcgttacaaagtgaagtccaactgttccgagtaacaattaattaaaacagagaagcactgatgatatagcatttaaataaataaaattctacttagttaagtaatcaaaatgaaaaattatttttattcggtccagtaaaaaaatacatcttacct

SEQ ID NO: 71900 - DNA, 673 bp, Glycine max
  Clone ID: PAT_MRT3847_35939C.1
cttgtgtgttgtgttttttttttatgcaacaactagcgatgctaagtaaaattgattagtgtaaacaaataagttttgacaaatttttaccataaatatacaaacttttattttcgtctacttttgccttcaacgatgagttaattagagtccaagaagcacgaagtaaattattgttatgggcagcgaaatcaccgttccaaatatgactgctgtgcttattatatctgcgtggagattgtattctttagcaaatacaaaggagaggacagcttgaggaagagcagcttgaacaattgcaacacgcaaaagaactcctcggatgccgatgactatggaggttacagcgatcacggctggtccaaccacgaaccgagccaccatagaaattgttgtccaagtttttccacaagcaatggtcttgggttgtaatgccatgaatagacccaaactgaacatggccattccggtcccggtttttgacagtattaaaatggaaccttttgcaattgatggcattttgatgttccacctaaatgatatgagagaccatgcgagtcctaaaacacatgcgtaggtattaggatttctaatgagattcctccaaaccatggttagaacaagccttgtcatgacactaccacgtggcatttgctgctgctttttgtatgca

SEQ ID NO: 71901 - DNA, 619 bp, Glycine max
  unsure (1)..(619): unsure at all n locations
  Clone ID: PAT_MRT3847_3593C.1
gccttgacccggnataaacatttaaaaatgcatgtcatggtctcatgctgttgtaaattttgtttttgggtcgaaaatcataatgttgtagctaggaccctcattggtaccgttagtctatgctaagcatcaacctcattttcccaagtggcccacctttttccagtcaaacttgtttgacctaacgtttagagggctgttcgacctaatcgttttcctggtcaaacttgttattttcatgcattacttctttgcttcttggcttgttactctctctctctctcttgcacccaaattgttcttttagggtgatcatcggtcttttcaggctgttttttgagcattccatgtaccagaacctgagcaggagtctgaatttagaagcgttgccgaaaacaagatgaggggaatcaagattgatatgaatcgtcttgcaactgaaaaccgtaaagaaaggaagaaaaatgatttggcttcatcaaatgtttttgtgttgataatagtaagaaagtcattggttgggtaggctgggtcatttattgttatgatcgactttctaatttagatgcaaatagaattctgaaatatatatgcaattacttttcctgaaatactttac

SEQ ID NO: 71902 - DNA, 180 bp, Glycine max
  Clone ID: PAT_MRT3847_35940C.1
ctgaaactggatttactactgccgcgctaggtttgagatgcggctggcatcatcataaggcttttccaatatttcaatcatgatggacatcggaagctcatcttctcttcatggaaggggctgcatggtgtaatcaaaaaaagtggacagaacaggcaatgtacgagaccttcgcaaaaa

SEQ ID NO: 71903 - DNA, 501 bp, Glycine max
  Clone ID: PAT_MRT3847_35941C.1
cccgggttcgacccacgcgtccggtaccgttaaatttatatgccccaaaaactatacacccattggaacaacccaacgcttctctctttgctttacacacgcagaaagagagagagaggccatcatcatcttcttcttcttcttcttcttcttcttccattgcccaagaacatatttttttagttcatctctttctcctccattgtgagagctgaaaatggaatcccctcatgcgaagaaatcggggggtttgaagctcccagctggcatgtccggaacctcactccgcctcgacaccgcgccagcatcttcttctttccgttcttccatctcgaccctcaattctgcttcttctctccgctccatctgtatcctcacatcgccttcgaaatcgaactcggcctggcagcgaccggttcatcccgtgcagatcctcctcgaggctgcacacgtttcaggctcgttggacgggccgtctgccggtggaaggaagtggagtaa

SEQ ID NO: 71904 - DNA, 353 bp, Glycine max
  Clone ID: PAT_MRT3847_35942C.1
gttaatatatgaattaggtcactttatttaaaaaaagagtacacgtaggcagttaatatatgaattcacatgcttaacccatcgttttacttaaaaaactaagtaagctaatttgtcaacctgttttttatgttattaaattaattaattaacctatcaatcctagctaaaacaaaatatgttgacatttaatagtgcgtaagggtgctccttgatgatgcaccataattaacaattaggtcactttattagtgcgtactttatgtattgtacagatattttaaaatttaagtaaaaaatataagaagcttagatttaggaggaaaaaaaaaaaaaaaaaaaaaaaaaaaaaa

SEQ ID NO: 71905 - DNA, 367 bp, Glycine max
  Clone ID: PAT_MRT3847_35943C.1
tttttattttaacatgcgatttttttagggggcagaaaggggagaccaatattacataccacaaatcacgattctcatacagaacaagggaccaagagatgggaaaacaaaaggcaggattctgaataaaaactcctagtgatataggacaacagaagatcactgttcctaaattctaataacctgcgaggaccaacgaaaacaattaattgtaccaaatgtccctcactttaagaaacacctggacctcagataagacagaccatacgtgtaacatccttacacacaaacttggaatatagggtgctttacaagctctcatgtgaccaaggtggtgcctgaaaaccactccggcacttgttgacac

SEQ ID NO: 71906 - DNA, 442 bp, Glycine max
  Clone ID: PAT_MRT3847_35944C.1
agtgttttctttattcttatttattgtaagatgatgatgacaggtatttttaaatttttctgttggcgcgaggcaaacatgggcaaacaacaaaaaaaaattttctctggggggaatctggccgccagggaaatattcttcttcaaaaaatttttgaaaaaaagccctatacattgggaccccccaacattcggagctttgaagggaaaaagcatctaatgggtgtaaacccggctaaaacttaaatcgctctgaacagaaaactctactggggttaacactggcgggggaccccttgggccggggagcccgacttttatacgcatgggagtttgggggctgttcccggctaaccatcaaaggaaagatctgttcctgcttttttgtcctaggggggaatataccttctgggggtttacaattgggtgcgttaaaggggggg

SEQ ID NO: 71907 - DNA, 1502 bp, Glycine max
  Clone ID: PAT_MRT3847_35945C.1
ctctaggtcagatttcttcaaatttataatgtggtatgtttttacctgcaatctaatataaacaggtttaggatttctaactgttattcctattcaatgcaggtgtatggcctcatcattagttcgcacaggatttgtacgaggttctctgacccagggaaatggttgttatcagcacaggtgtatcaacaattctttagaggttgctaaggttggtagctggtcagtgtgtcctcaggctggtagacgtcttcacttctgggtattttatcttatcttattatttcatccatgtcaggatttctgtaagataactccagtgtttgtgtttttgtgatctccctgtgattttattttccaggccgattgtttgcattgaagatgccactggtttcttgggtgtcatgttcgtatttaaaattgactatcctgccatagaaattgcaccggcaatggcatgtgcctctccagtggaatttgtgaatgtaaatctggctatactggcattgactgttctactgctgtttgtgacgagcaatgcagccttcatggcggggtttgtgataatggagtttgcgaatttcgctgttctgactatgcgggatacacttgccacaacagctccatgctcttctccagtctttcagtttgcaaaaatgtgctgggaaatgatatctccgggcagcattgtgctcccagtgaatctagcatactacagcagctagaagaagtggttgtcatgcccaactaccatagattatttcctggtggtgctaggaaactatttaatatatttggaagctcctactgtgatgaggcagctaaaaggcttgcatgctggatctcaatacaaaagtgtgagaaggatggagacaacaggctacgagtatgtcattccgcttgtcaggcttataacctagcatgtggagcttcactggactgtggtgaccaaacccttttcagcagcgaggggggggatgagggtctgtgcactggctctggtgaaatgaaattgtcatggtttaatcgactgagaaatagtttttctttgagaaacagtttctccaaaggaatatctgtaagatataggcagttttagcttcaattgtttttcacttttggggaagtggattgtaatttttacagggttattattgtaggagttagtaattggtggcacgtaacgtcgtagatttagggccttgctcatccaaaattgtctagaaaaatgggggatgagaaggttactgatttggctttcgaagagagcctcttgtagagaaaattgaaagtctttggaattggatataggtaatgaggggaaaaaaagaaaaaagaaaaaaaaagggaagaacctcccctgtgtaagtcgtgattacttttggccgaaggccatcaaagggtaaagaaaaaaaattaagcttcagccttttgtttttagtgaatttggaaaagacctttcgaggatgcttgtgatacgctctgacactcgtgattggttg

SEQ ID NO: 71908 - DNA, 492 bp, Glycine max
  Clone ID: PAT_MRT3847_35946C.1
ggaaaaaagctttgattccaataattcccctgcattctaacacatctgcagatgaataaagggcaaatcaatgcaggacttttgcaggacttttctaggggtcagagaaagtataaagaatgaaatattgcttacattaacattacttaacattttcttacttctttcccatcctttccttttttaactacttttttcctattccttctttacaataattccatttgtatacatatatggatcagactctgctagaaaaatgaaaaatgacttctcgctatggagcagccaactggacagctgcagcagaaatcatttcaaaattggacgcatcctcacaattccctcagccccccactcccactgaaagcagataatcctacaaattctccaaaaaccaaaacctgaattagcaggtcagttttacctatatgtacaagcatgcaagagacaccagctgtggctgccccatggcccaatcataccagtggc

SEQ ID NO: 71909 - DNA, 1287 bp, Glycine max
  unsure (1)..(1287): unsure at all n locations
  Clone ID: PAT_MRT3847_35947C.1
acgagtgctaaagcaccttccacccctggtgggcagtttgacattaatggaagctcttcttctaaaagaaattctgctcctgtgagtgtgaatgggaaagttgatgtttgtaggaatcagccttcagcagtaaatgggcatgtgaaagattcagcttctttggagaatggtaaggaagattcttcattacccaccaggaatggcattgacgaaaataaagtttctgttgacaaattgaaaagaaaggagtcaacagtttcaaatggacacactggtaatcagacagttgatattcattctgtaaagtcagatctcaatgaagatactgacagaagcaggataatagcaggtagagtgcctgacaattttaagcatgaaagcaatgtcctcaacaacaaacctacaatattggggaataagagaaaactacagggggacccatgcattttacttgcacatgatggtcagtctcaagcaagagttcaagaactgaaggacattcttgggaaagaggcaaagtcagttttgaggtcaattggctggactgataaggtctacgaatttatgcgttcaaagaagttacgtgcacaagaagctggaaatttgacaaatggagatgaaataaggaagttgttaataggagatgcgcagggagctttcatatccaagattcccgagtcattgaaacaggatatgattcaacgactccaatcatttagccaagaaaaaatacaattttcaggaccttgatcagagcatgaatgtcgatctgtcgtgctagcgaggcgtggtgtgaatactctgtattactaattattgtagtgatggtggcacccttgctgggatgctcagtttgggtttgttacatactctaactctttgaggctggcgataatagcaggagaatgaggagacttgttatcattgaagcatggctttgttatgcttctaggtgcttcattcatatttgagatagaagttcagatttcatgtcaggccagttttctttcttcatggaggctataaagttctattgcatcttgaggagagcttgccaggaattctattcattctgtacaatcttatattttagcgatgtactgaagcaaaatcttaattttctataaaattgctcaacaaattttgcagcgaagatgaggctgtgcatgacttgtggatacactacaccctattaacagtgtctgtagttcttaaaaattcattcgctatgtaaacgttttgcccgagaggacaagatcctgaaatttgtgagatttataagnanna

SEQ ID NO: 71910 - DNA, 443 bp, Glycine max
  Clone ID: PAT_MRT3847_35948C.1
cataatcatcactcggatagtccgttatcaagcgaaagtagtatgatcatagaaggaatgagcagagcctgtcgatatagcccggaggagaagaaggtcagaattgagagatacagaagcaagaggagccagaggaacttcaacaagaaaattaagtatgcttgcaggaagacattggcagacagcaggccacgcattagaggacggtttgcgaggaatgacgaaattgacaagaacactacaattcaatggagccaaattggtgctggagaggatgaggatgaagaagatgagaattggatcactatgttagattccatagttgctgcaaattttgctcaagagtctcaaggaagttcctcctttggtttattctattagaataatttcatgttctataagcctagttcttgttcagtttgttttccatgttcaaagtattg

SEQ ID NO: 71911 - DNA, 129 bp, Glycine max
  Clone ID: PAT_MRT3847_35949C.1
ccacgacggagcggcatcagtattttcgtctggactctcacagaaaacatggcccgaaggcctgattacccgttgtcggcacactcatagctcgccgtagtagggggggggtgctgatttgtgactacg

SEQ ID NO: 71912 - DNA, 303 bp, Glycine max
  Clone ID: PAT_MRT3847_3594C.1
aaaaccggccgacggacgcgtacgacacgcttccgtacagtttcaaaaagactacagaatgggatgatgacgaggatgaggagcaggattaacatgggggtgaggtgtccatttaaaagaagatcttcagattttttacaacttgatggaagtatttttatcacaaatatatatacatatgtcatcatttcttatttaagatattaagcatttaatattacttcggattaactttcatgttttttttttgtatttattacttgacagataataatcattgttcttctgcctgtgttctcaata

SEQ ID NO: 71913 - DNA, 839 bp, Glycine max
  Clone ID: PAT_MRT3847_35950C.1
cggtccggattccgggtcgaccctcgcgtccgcttcacccttgcaacgcaacaacataacgttgctaattgcttgcacttcctcttatggttgcttcctttgtttctcattagctgttttggtttttgtcttagttctacacctttcctcatttccgcagtagcaacctgcgaaccaatctctctgagaaaaaaaaaatggcgtcgaacgggaatggcagcgttgcgaacgggaacgggaccgctaggaacggactggcgaagattcagacgcacaagaagcataacggaatttgtcacgacgacagcggtccgaccgtaaaggctcaaaccattgatgagcttcactcgctgcagaagaagaaatccgcgcccaccactcccgttacggggtttcaggctccgttcgccaccctcaccgaagaagaacgtcataagcaacaactccagtcaatcagtgcatccctggcatcactgactagagaaactggaccgaatctggtgaagggagacccagctcggaagtcagatacccagaaggttactcacgtgcaccaccatcatgtcagtactcccaccattgctgtcagcgacagtgctttgaaatttactcatgtcctctacaatctctccccagctgaactttatgaacaggcgattaagtatgagaaaggatcgttcatcagttccaccggagcattggcaacactttctggggccaagacgggtcgctctccaagggacaagcgcgtcgtcaaggatgatcttactaagaacgacctttggtggggaaagggttctcctaacatcgagatggacgagcacagtttcatggtgaac

SEQ ID NO: 71914 - DNA, 277 bp, Glycine max
  Clone ID: PAT_MRT3847_35951C.1
cccacgcgtccggagacatacataaaattgttgctgagggagtaataaaaaaacatggggaagaaggatcctaaccgaagccaaagtcaccaaagatagaccaaaaggggaggtgaatcttggcgagccggtttatcaggcgatgttggttacaataaatgttgttttattgtgtcgcactaattgtcaatttattggctagggagttacattttcggacaagggaaaacgtttgcaccatcaaatttaatctgttggtaccagatctgcttttttg

SEQ ID NO: 71915 - DNA, 208 bp, Glycine max
  Clone ID: PAT_MRT3847_35952C.1
tgtcatgttcgtggatggaaaggaaatcaaagttgtgtcggaccgcaaccctgccaaccttccttggaaggacttggagatagacttggtgattgaaagaaccagagtgtttagaaacaaagaaagtgcatggaaacacattcaatcaagagctaagaaagttctcatcactactcctggtgaaagatatatgcccacgtacgtagtt

SEQ ID NO: 71916 - DNA, 121 bp, Glycine max
  Clone ID: PAT_MRT3847_35953C.1
cccactcgtccgcacacgcctcccgcgccaccatacacacgtctttctacttttcccaccaccactcctacaagggctcttctggccttttctaatccctcagacgatcatacgactacta

SEQ ID NO: 71917 - DNA, 225 bp, Glycine max
  Clone ID: PAT_MRT3847_35954C.1
atatcatattttttaattgttggcagggaagcgatgagaacatccacgcatgcattgcacgggaaaatcagtagcgcttgggcaggactcgagctcacacagttttaggtaaccggtaccttttggacatgcattatatgcctctggacattagcactttttaacttatgcgcactacagggcataccgtgcagtgaacagatcttgctgtgcatccaacaatgc

SEQ ID NO: 71918 - DNA, 254 bp, Glycine max
  Clone ID: PAT_MRT3847_35955C.1
gattacttgagtgaagaagaactcaatcactctgaattatggtgcataaagctgactgcgtttatgatattatctgctactatgtctggcattgtttgaactttcactcgcagcggcttattcgtgtgatcttagttctctactctcattccaagcgtgggtgtatatcaaggtggcgtgatatgccatggtcgctagacctgttacagagctgatatctataccggcgacactaatggtgtcaaactcggaga

SEQ ID NO: 71919 - DNA, 284 bp, Glycine max
  Clone ID: PAT_MRT3847_35956C.1
ctcgagccgtcacatttgagatccctctctcactcttcctcatcatcataaggtgcatgacgtacctaaaaacaggagaaacaaaattgtcacaaattagagagatggaagggattagtgtgtgcaagaagagttcaaaattaggaaagaaagtgacctctatcatgttattcataaggtgccttatggagatagcccttatgtcaaagccaagcatgctcagttggttgataaggacccagaagcagcaatagtgttgttttggaaggcaataaattgtgggg

SEQ ID NO: 71920 - DNA, 250 bp, Glycine max
  unsure (1)..(250): unsure at all n locations
  Clone ID: PAT_MRT3847_35957C.1
gtcaaaattntnntttcatgggttaatttagtttttggtgggcaaattacaaccaaaggcagctatttcctctggtttttgtccatcagtatattatgatttgtgttttcttcatgtccaagaagtgttttcnactaagattttnagttacaaaactcngaangccattcttagggatganaaccctntccccngatnacnaggtcccccggaaancngaanaaaaagttcaaanncnggtttgccnncc

SEQ ID NO: 71921 - DNA, 229 bp, Glycine max
  Clone ID: PAT_MRT3847_35958C.1
caccataaacaattcaacataaaaaaaattcactcctccgcactgaaaacatataataatgcgccatgtttaaattcttcaattctcttggatccactgtttgggcccaggaaccccccctcgacccccaggaccccccccccccgctgtccctctattcaacaattcccatgggggcaaacttgaccaccttgggcctatctgattaatgagcccctaacaaggctat

SEQ ID NO: 71922 - DNA, 445 bp, Glycine max
  Clone ID: PAT_MRT3847_35959C.1
caaacatatgcgcactcccatgatgcccctagatgaagaccttctcactaacgacgccaggacttcggcgacgaatggtttgattgtgtcgatgaagaagatacttctgatgaagcctctttaaacgcagcactcactgaagacgttgattactactatatcgaacgaatccctcttgctacttctgatggctgacctgatgtgtttaccacactactatgctgactaatgtcttacgagacctacttctgcggattgcgaaaagatgacattaatcctgtttaaccatcgctgaacaagcttacaatcaatctaatgtgactagactgaaaaaaagtgttcctacatagactcgtgtcagttgttccaaggcttacacactccctcgtctaaaaactacgaacactcctaagacgctctgctagactactcttcctatgaagat

SEQ ID NO: 71923 - DNA, 213 bp, Glycine max
  Clone ID: PAT_MRT3847_3595C.1
tggctgtatctgccacaaggaaagaggactcggggatgccattgaaccagataatggtatggtacatcagcgccaaaacaccgcgcatgttccaatgaccgtgccagatggagaacaccatcatgaagctttccgccagggacgcgcaccgaaaaggctaggagctctgagacggtggctacggaccgaactggatccataggcgaacgggac

SEQ ID NO: 71924 - DNA, 463 bp, Glycine max
  Clone ID: PAT_MRT3847_35960C.1
aagggagagtagctacaaagagaaaactggtgattttgcaaagtgaggccaaaaggggacaaaaaaacgaacgattaaaaatttttctatacaaatgtcacaattcttcctttgttgcccaaaataaccatgtccagggaaaggaaagagggaagtgaaaagttgaaaagcgagagtttagtaacctcgatcaggggtcataacctttccagctttggcgcctaatcgggattctccctttatgccttcaccgaggccccaagaaatcttggggagcttgacgggatcttggtagtgagtagtagcgaggaccacggtaccagcgaacttttcggggttttcagatttgaagataccggatccaacaaagacaccattcataccgagctttatattgagagcagcatctgcgggagtagcgattccttcagccgaaaacattactactggaagtcccttgaac

SEQ ID NO: 71925 - DNA, 298 bp, Glycine max
  Clone ID: PAT_MRT3847_35961C.1
gtttttataaaccacagactgaaacttgttcttatatagaaggcggtgtacatggaactcgtttattattgcttccctactgagccaagagacttcctcattttcccgggaaagctcttgtgcgtggccccacgtgcatagtctccaaggctagaccctgatgcaccttatgactccactccaaagaacttaaacctttctgagaaactcctgacgtccgcgttgagagcaccgacatgactgggtatcgcttggatccagaccctttggccagagccccaaactctttctgtgggct

SEQ ID NO: 71926 - DNA, 356 bp, Glycine max
  unsure (1)..(356): unsure at all n locations
  Clone ID: PAT_MRT3847_35962C.1
gncnnnttatttttttttttttttaaccggtttcccccctaaacaatggggggaatggtccccagaaaaaaaaggtgggtaatagaaaatcccccaaaaaaataaaggggggaaaaaatggaaaaagaaaaaaaccccgggggagggaccctgttttttcccggccccggggtgcccccgggaaattcgggacagctcccggagggggacccagttttcctaatggggggccttttaaaagctgggggaaatatggggaatggtggttcccgggggaaaatggtttcccgttaaaaatcccaaaaaaattacaatccgaaaaataaaggggaaaggggggggggacctatgggggg

SEQ ID NO: 71927 - DNA, 348 bp, Glycine max
  Clone ID: PAT_MRT3847_35963C.1
gatctacgtaacggtcacgcacgagctgatgccccgagccgatgactcctgaaagcgaatcagacactgatagagtattcgtgctttgacagagctcactagatcgaagacagacgctgctgtgacggaactgcagtccattggcttgggagcgtgcgttcatgccagcttgatgcgcatcatacggcccgaaaatgacgaaccttctggaagcttgcgcacgctggcgataatgtgcatcgcgagggcgctgttgaacaagattaaaccgacggtgatgttcgctgacaagggtcttgtgtggtgcatctattgaatagacctcaggggcatgatcgagaatgtctt

SEQ ID NO: 71928 - DNA, 448 bp, Glycine max
  Clone ID: PAT_MRT3847_35964C.1
ctttcactgcagatgggccatgtttgctgtgaatgagttctgactcattcagtgcatatgtctctgggtagctgctcgagagtgggaagtcgttcgtgggggacatgacccatctataggttattcatttacatggggctctctacccagctttcgggacattgattaccgtgatatttgctgtgtttttttccaaaggcatgtggaaaaacccccagagaaaaaaatatactgtggcggcgcttgttactttttgatattctctagggactctaacactttctgtgtatacagtgccatagattttaaaagtgacaccctcgctgttggggtttgtgagattttgtgtgttacacaagcatcttatcccggctctgcatttgtggaaatatggtgtgctcttttgtgtgacccgtggcaccacaattttgaaaatttttttattccc

SEQ ID NO: 71929 - DNA, 217 bp, Glycine max
  Clone ID: PAT_MRT3847_35965C.1
atctcttattatagccaccgataaagaatgttttaattcagaacagctattcttcaagcaagaagccatcatgggggattagagctccagtccaggatgcccgctaaccaatactgggcttcccacttaaaatcggtgacaaaacattcaagtacttttaaattcccatagtaattatcactagcaaaacactgcggaagaagggcataaaccttca

SEQ ID NO: 71930 - DNA, 1805 bp, Glycine max
  unsure (1)..(1805): unsure at all n locations
  Clone ID: PAT_MRT3847_35966C.1
cctctcagtcactctttgaaattacttccccccagcccacactcctccattatccctccgccgccatgtccccgtcctccgaacaccacggcggaaaccatcgctttcccggggaagaaatcaacggcttcggcaatggccaagcggaaatgtccgctccttccacggcctcctcgtcggcggtgcgctgcatcgtcgactcaattccgtcgaaggagcgggagaagctccggagaatcctcgtcgcctcggcgaagggtttctcaatcggagccggcctcaagggaggcctcgctctcttcgcgatcttggcgcgattgacgcgcaaaaagccgccaaggaagggaattgtggtttcgaacggcgaagcgattgtggcggctctgaaggaaacgctgagatacggtttgtttctcggaaccttcgccggaacgttcgtgtccaccgacgaggttatcggtgctctcgcaggtcatcgcaggacagcaaagtggagggctctggttgccggggcggttgcagggttgtccatgcttctaacggggttagaagatcagcatacgagtttggccatttacattctcatgcgtgcagctgttttggcgtctcgttgtgggattaagagcaaacgatttgggaaaatctgcaagcctctcacgtggaagcatggtgacattttcctcatgtgtctatcctcctcacaaatattgtctgcttatatattaaagcaagacagtttgccagcttcatataaatcctttctcaataaacatggtggaaaggatctagttatcttacaaggtgaaaagatatagctagtggcaagcctttcactaatttgggtgcaatagagaaatactacaagaccatgggtgtcaatgtgaaattagacccaaatatgaaagtcccatgctcgattgtacatgggaatcaatcatgcagcggacacatcctttcgtttctcgttcaagcttaccaaagagcactacctgtttatcttccagtttacctaatcccccctccgtttctccttcgagctggcctttgagcacgtcccgcttatgttccagtttacctaatacctgcacttatagttcatagaaaaggacttttaaaaaggccttacacaatattagccaagggtctttttggcactgcaagatcaagcttgtttctgtctgtgtattgtgcttctgcctggatgtggacgtgctttcttttcaggattttgaaaagatgtaacattccaatggtggccatgggaacgttcccaactggccttgcattggccattgagaagaaaagcaggcgaatagaaatatcattatactgccttgcccgggctatcgagagtttcttcacatgcatagcggatgcaggatatctgccacaatcaagaaggatcaagagagctgatgttgtggttttcagcttgtcaacagccatcataatgcattgttatgcagaggagagggaagtgtttagatccaaatacttaaatgtccttgattgggtatttggtgtacctcctcctccttgtgaaaccccacgatgcaaagatgggtaggcacaagtgctagcccagaagggtgggtattttatcttgaaaaattgcccttgacttggtagtttatacatgattttttaccttctcaaattcattggtggccttgaacctgaattttgcaccaggaaacacactttctaacgcattatttccagcacattttttttattggttgtaattcatgcgtttctaaataatcaatgaaattctttaaatannaaaaaaaaaaaaaaaaaaa

SEQ ID NO: 71931 - DNA, 229 bp, Glycine max
  Clone ID: PAT_MRT3847_35967C.1
ttgatgttcgcggcgagtccgaactggatgcgcaaggccatgaagagcgccatcgccacgccggacaacgttctgcgggcggtcgggatcggttcggccgtggtcggcctgatcctgatctgggtgatgcggcgtccgatttaggcctcgcgccaacgccaaagtgaaggcgagggaaaaaaaaaaaaatatagggcaataactaataaaaattagaaaaaaattgata

SEQ ID NO: 71932 - DNA, 141 bp, Glycine max
  Clone ID: PAT_MRT3847_35968C.1
ggctcgagtaattgccgatgaagaatttttctatgatgcttctgttaaaagggtggcaagcgaatcttatgagcaagtcaccttgatggtcagtgtggaggacactggaattggaattcctttctcagcccaagataggat

SEQ ID NO: 71933 - DNA, 230 bp, Glycine max
  Clone ID: PAT_MRT3847_35969C.1
aagctcgcatcctctagacgggcgcttattattctttcggtttttgtttttttcagcccgacatagaccattacaagagtgaggtggtggtccttcgaaacagctctatgccaacatgggatgccgcttagtttctatccacaacaggcatcccacttttttcaagaaaaaggtctgcaagaagcagacaagttggagcttgctcacctgcctgctaacactaacctgtc

SEQ ID NO: 71934 - DNA, 617 bp, Glycine max
  Clone ID: PAT_MRT3847_3596C.1
cccacgcgttcgaaaaataaaaaaaaaaaaaaaaaaaaaaaaaaaaaaaaaaaaaaaaaaaaaaaaaaaaaaaaaaaaaaaaaaaaaaaaaaaaaaaaaaaaaaaaaaaaaaaaaaaaaaaaaaaaaaaaaaaaaaaaaaaaaaaaaaaaagggggagacctttttaaaaagaaaaatttttattgtgatggtgattaaattcatttattttaaaagggggaaaaaaaattaaatactggggaagctttttaaaaacctaaaaattggaaaaaccttggcttacccaatttaatggctttggaaaaaaataaatttttcccaattggggtaaataaaaaaaaggcccaaacaaatagcttttaaaaaaaattgccaatttttaaatgaaaaaggggacccccctttaatgttaaattaaagcgggggggttgggtgggtaaccccaatatgacacgttaaatttgaaaaggccaaagccctgtggcttttgatttttttcctttcttttaaaccaaaaaagggggtttttccctggaaagtttataaaaagggtttccctttaaggttcccaaattaaaagttttaaagggccttttaaacaaaaaaaaaatttttt

SEQ ID NO: 71935 - DNA, 1541 bp, Glycine max
  Clone ID: PAT_MRT3847_35970C.1
aaaacatcaagaacagagagagagagagagaaagagaaagaaagaagggtacatttttatgcttgttaaccatagaggcaaaaacccaaaagagcagcttcttcatcttgatcgaagtccaaacctttgtacccttttgtgtttccctctcgtttttgtgtcacaacacaatccttaaccacacaaaacctttcctatttgtggggttgattgagccatttttggaggctgcaagaggatatttccctctctttgttgggtggctatatagggaaagtctttgggtccaaaaggggtgggttagttcccagaaaaaaaaagcagtgaaaggaagaaccttgtaaaccccgtcattgtgaacaagggtggctttgtgcgttggacaagcagcagaggactagttttgagtagtttcatcactgtccaacttagaaaaaggtgggaaaaaaatgaagtatgtgttggtgactggtggtgttgtgagtggacttgggaaaggagtcactgccagtagtattgggttaatcctcaaggcctgtgggcttagaggtacctctatcaagattgacccctatttgacactggctcgaggctcaaagactcatatggggaactatgcgtcttggctcaagaagaacttactttgaagttgctgactgcaaatccgcaaaattgtatggcaatgtaagctttgttgatgagcgacatcggcatagatatgaggttaatcctgacatgatatcaccgctagagaatgctggtctatcttttgttggcaaagatgaaactgggaggcgtatggagatagttgagttgcctagccatcctttttttattggcgttcagtttcaccctgagttcaagtccagaccagggaaaccttctccgctcttctcaggattaatagcagcagcaagtgaatctaggaggacaatcatggtgccaagtaatggtcacgccaagttaactaatggaaatggaatgtgcaatggacactcaccaaaactgaaagcacaccaaaagggaaatggcttcaattcatccaatggttccttaaatggtatatataccaataatggggtgtatgtggatggtagttgttaggcctcatatcaagtgtttggtgcatgctaataatcgtggtataactatatccaagggcattcttcttgtcctcggttgcttgtacagttagtgagtggataggtcttttagatagggacttgtctccagcatgaaacaaattttgagtctaacagcttttttatatttcctagtgcggttgtgctatggtgtggcagttgcagccaccattggtttcactctttggtcaaatattggccaaaacttcacttgatcatgccaaatatttgggctttggtggctttttaagttgctgtttagggtttttcatcttattagtatacaggctgaaggtttaagattttactttcaactgagtgtcttcttttgagtggccattaatgtaaactcttatatattatgaacatttaagttgaattttgtttggtgcaaaaacc

SEQ ID NO: 71936 - DNA, 344 bp, Glycine max
  Clone ID: PAT_MRT3847_35971C.1
aattcggctcgagcgtgacatctgcctggctttgcattttatgttaggtttgtcaagattcagaagtcaccttttgtgcgccttaacgaaggtggaattcttagcctgttgctcgcaaagattcaagcattcttctgactggctactggatattatggccacaggagatttggatgccttcttacctgctgcaacacgtgagtatgctactatggtagatgaaatatggagagatcctgctgttcatggaacatgcaaaagaagaaaggaattacatggtcttcccgatgttgctaaatatttctcggatcgggcaatagaaatatcaagcgatgagtgtgaac

SEQ ID NO: 71937 - DNA, 1709 bp, Glycine max
  Clone ID: PAT_MRT3847_35972C.1
aaccaagatttgtatctagttagactattttatgtaagcggagaagttctggacacaactttctctatacaggttattccttgataataaaaacccactaaaatcaactaaatgtgaccatgtgtactcaagctaccactcagtgggaaacacgatactatgcctataatttctttgacatatgaaaaaagctacagctacatgtaccaagccatatgggcttgtacgaaaaactgcacgcaaaaaaaaaaaaaaacccaaagaaagaaaagaaaaactaatttcccccttttccaatcaatctcataaatcatattacatccatcttcctccgccttttattgggctggttcttctcttgctaaaggattccaatggactggcctattgttcaggatcaactaaagtaataatataaagcatcaattgggagcggagcagaattataaacagatcagacagaggagaggcaaaccacgaataaaattagagctacttccatggaggttgctgatgtttgtagctaaaaggataggtatcccagccaccatctggttcctttcttttcacactaactccaaaacttgaggattggggaagggtcctcacatgatcctccatagctctgccttgagcaggaaaaaaaaattgccttgcagtcaacatgtctctgttccctccatcaatcgggaagccagagttcaaatcaaagttggggcgtgaagatccaaccccatttaaaccaagctgtgtaccggtaatgctcacgataaatggaggttgagaataagatgacagggcagttgaggaagatcccccaacctgaggcacgactggacttcctcttgagtctaccatgtatggaattgggccaccaggtgatccatacatggctggtgaaaaagacaaagcaggcactgatgtcagtccgttgtacccaaaagcagttgaatgattgtaggatagtgtggggcccattcctaaaacgctacctgctcctgacaatggaagatccattgcaggctcaatagccttgccatttggaaaagacaaagtttgaggaatatattctcttgtaccaacttccaccttggcacccaaaatagagatcacaggagcatccgacttggattgtttatatgcttcaataatcgaagatgacttactaagcccttggtccactaaatcggtttgaaagaatggtctgtcattcagatcaatgtttcgtactaaaggttgcattgatgatgacgatgaagcaggtgatgggctccaataaccatttcttctgggaaaaagtggcccctccatcctctgatctgaaggttgggcatcaccatcatcaccgatactatttaaatccaatttgaacctgcttgatcttttaggactaagttccactgatgattggccagaaggaaggcctgaagattcaccaatttgttttagcagtccttcttcaccctcagccacattcagatcaaaatcaaggcaatcctgcctctgcttggaaatctctgaggagtttccaccaacagatgacattctcctcattatcagaattgttacgagggtatgctggacgaaaggcgctggtggcagctgaccctttccatccaagggtcccctcaaactgcaaaggggccattggcaaccgagaagtctgtgcaggttttgaagcagaaacaacaggtattggcatagtagac

SEQ ID NO: 71938 - DNA, 245 bp, Glycine max
  Clone ID: PAT_MRT3847_35973C.1
aagaatgtatttacaagaaggaaccactgctagctgggacattttgaacctgagttaaagtcagcatcaaacacttcggatcagttaaaaaaacaattatttcatctaatattttttttcacgtatcatgtgtgtgatgattgacatatgggtcaacatgtgccaacatcaaatattgtatgatgtttccttacatgcaatatatcattaattaattgacagaacttattttatgttttattttc

SEQ ID NO: 71939 - DNA, 269 bp, Glycine max
  unsure (1)..(269): unsure at all n locations
  Clone ID: PAT_MRT3847_35974C.1
aacccctgggcatgatngtcgcttagacgtacgcggtccataattagattccaggatcgacgatgctcactaggccgcggtcgccctttttttttttttttttcattttttaacattgttgttacaataaatactcctggggggtgggtaacggtacaacttcattggaatctgctgatctcgatttgaatcagcgctcgctcagattttcatgtaagcacttgtagactaacagctctattttggcataaccatataaaaattgggga

SEQ ID NO: 71940 - DNA, 1072 bp, Glycine max
  unsure (1)..(1072): unsure at all n locations
  Clone ID: PAT_MRT3847_35975C.1
acgtacggctgcgagaagacgacagaaggggatgtccccacttatctaacccagtaaacgtggaacacacctgacacctgatccgcgagcgagggtttgtgaagatgacgacgattcgcaggttttgctgcaacgatcttcttcgctttgccgccgtcaatctcgaccatctcaccgaaacattcaacatgtccttctacatgacctatcttgcaagatggcctgactatttccacgttgccgaaggccctggaaatcgaatcatgggttacattatgggtaaagttgaggggcaaggagaatcttggcatggccatgtaactgcggtgaccgttgctccagagtatcgaaggcagcagttagccaaaaaacttatgaatctgctggaagacatcagtgacaatattgataaggctttttttgttgatctctttgtgagagcgtcaaatgcaccagccatcaagatgtatgaaaagcttggctatgtgatttatcgacgagtgctacgctactattctggggaagaagatggtttggatatgaggaaggcattgtctcgtgatgttgaaaagaagtccatcatccctcttaaacggccggtcactcctgatgaattagagtatgactaagtctgcgtttcatgcaacagagttgcatgagcttattgtgtctcaaagtaaaccatgttgtgcttgataggctgtcaagttgaaaggagttgaacatattatgttggaacttcgaaggtttagtaaatgaaaaatgatcctagaagataatcttgctagtaaaatgaaaaatcttgtcttgtatccaatatgttataattaaatatcacttgcgcgtgttatttcattaaaaaaaaaaaaaaaaatcaatcaaactaactttgtaaaattctccaaaaaaaaaaaaaaaaaaaaaaaaaaaaaaaaaaaaaaaaaaaaaaaaaaaaaaanaaaaaaaaaaaaaaaaaaaaaaaaaaaaaaaagggggggcccctttaaaagaaccaaattttaggacccggggctggcaaggtaatattttttttttggggcccccaaattta

SEQ ID NO: 71941 - DNA, 656 bp, Glycine max
  unsure (1)..(656): unsure at all n locations
  Clone ID: PAT_MRT3847_35976C.1
canttagttctatgtcacgtgnnncncggccaaaacagaaaaagaaaagaaattaatgtcggaagacagacaaaaagtagaacatgtgtggagtaggatcctcgtatgtatctatagagaatgaattacaatggtatcagctcatgctcaactattaataagatcacttgccatagtagttttggaagttcatcaacttgctcactttaaatggtgaaggattcagtgactgcatccccccaagtctcgagtcgaggaaaaaatccccagaaaacatatatctgggagtgatttgtaccctccagattggctgaagcttggtacccattcacaaactcgcttgagcactccattataaagaaatcatgatctgattgtctctgcctaaagctttcacggaagcctctgtgcactnnncatattccaaagtgannnagcattgcctttgatcctattctgaattgttttcttgacaccttttttttattatataacatcattggttaaagagaggatcaaaatgaaggttaaggagtcctcctaagacagccaaaaggaaacgaaagggaagaaaacaactcttgaaacaaagattnnanngatgacggtnataaaaaaccctgannctgtnatcnnnctgttnnncaccaaacaaa

SEQ ID NO: 71942 - DNA, 296 bp, Glycine max
  Clone ID: PAT_MRT3847_35977C.1
gtggaacacacctgacacctgatccgcgagcgagggtttgtgaagatgacgacgattcgcaggttttgctgcaacgatcttcttcgctttgccgccgtcaatctcgaccatctcaccgaaacagtaagcgtttttttgtcctttttccatttgatactgaatctgactgtgtattcgcttaattgcttcattggtttagttcaacatgtccttctacatgacctatcttgcaagatggcctgactatttccacgttgccgaaggccctggaaatcgaatcatgggttacagtgagt

SEQ ID NO: 71943 - DNA, 214 bp, Glycine max
  Clone ID: PAT_MRT3847_35978C.1
gtttttggttggattgcagaaagtaatgaaaggtgattggagaggaatcttcaaaaactacgtcaaaactcgaacttcttcgcatgttgccagccatgctcataagtactttctatcgctaagcatcctcattcgttgtcgtcctaaatccatcctatttgacatcaccaccgacacggtctttgtttttcctatggatgaataacatgtccag

SEQ ID NO: 71944 - DNA, 2083 bp, Glycine max
  Clone ID: PAT_MRT3847_35979C.1
cgttttcttataaaagccttaccaaagacagctcttccaggccggctcgcgatccctttgtgactccaaacaaagcccacacaccaacttcatttccattcacaatgtcaatttcctccacttccaactccctcattccccccaaatctttaatcccccaatcccaccccctcattcccaacaccaggcccggcctccggcccaagcctggcccatccccttccatcctcgccgttcacgccgccgagcccgccaaaaaccccgtcgtcaccgacaagcccaagccccaagcccaacaatctccatccccggccgcggcccgggcaaccaaatgggccgtggacagctggaagtcaaagaaggccctgcagctgcccgaataccccagccaggaggagctggagtccgtcctcaaaaccctcgaggctttccctcccatcgtcttcgccggcgaggcccggacactggaggagcacctcgccgaggccgccatgggaaatgccttcctcctccagggcggagactgtgctgagagcttcaaggagttcaatgccaacaacatccgtgacaccttccgcatcatcctccagatgagcgtcgtcatgatgttcggcggccaaatgcctgtcatcaaggtggggagaatggcggggcaatttgcaaagccgaggtcggattcgtttgaggagaagaacggcgtgaagcttccgagttacagaggggacaacattaacggagactcctttgacgagaagtcgaggattccggatccgcagaggatgattagggcttattgccaagccgcggcgacgctgaatcttctcagagctttcgccaccggtggttatgctgctatgcagagggttactcagtggaatttggacttcacggatcacagcgaacagggagataggtaccgagagcttgctaaccgagttgatgaggctcttggattcatggctgctgctgggctcacagtggaccatcccataatgagaacaactgaattctggacatctcatgagtgcttattgttgccttatgaacaatccctcaccaggttggattcaacttctggtctctactatgactgttcagcccatatgctctgggttggggaacgaaccaggcagcttgatggtgcccatgtcgagtttctaagaggagttgctaatcccttgggaattaaggtaagtgacaagatggatccaaatgagcttgttagactcattgagatcttgaatccccaaaacaaaccagggagaataactgtgattacgaggatgggagctgaaaatatgagggtgaagcttccacatctcatcagggcagtgcgcagagcagggcaaattgtcacctgggtcagtgatcctatgcatggaaacaccattaaggctccatgtggtcttaaaactcgccccttcgatttcatcagggctgaagtgagagcattctttgatgtgcacgagcaagaaggaagccacccaggaggggttcatctagagatgacgggtcagaatgtgaccgagtgcattggtgggtcaaggacggtcacatttgatgacttgagctcacgttaccacacacactgtgacccaaggctcaatgcttcacaatctcttgagcttgctttcatcatcgccgagcgtttgagaaagagcaggatcagatcgcagcaacctcttgcccctctaggagtgtaaaagtgccttcaaaaccaacaagagaaagatatttttgttcttttttttttttgtcctacatatttattattaatcgatggttgtcactttgattttgtgttgtgtttgtatgtgtatactacctagtaatgcgtttggactggcaaggacaagagtacttctatggataataaagaaacgaaaacgtttcaattgcgttggctactcaaaaaaaaaaaaaaacaaaagccgccgatctaaaaaaaaaaaaaaaaagctgtaatgaggaaatcaatgaaatataatggggggggtcgcgaaattagaacaccttgctcccactaaataaacacggtccggtgccccggaggccccccgacttcctttttgggggtcaaagc

SEQ ID NO: 71945 - DNA, 444 bp, Glycine max
  unsure (1)..(444): unsure at all n locations
  Clone ID: PAT_MRT3847_3597C.1
gtttatctcgttgagatgtacaattggagtaattagaagccaaacagcatactttcaggtttcagcaggaacatccataggctttgtctccttgttgtttgttggtgtatttctatccttcagcttactaggacaaacaattttagtgcagttaactgactctgtcagtttctccatcctttagaatgtagacacacaaatagtatgaaaggaaactgtctggatccaattacaaggtattggacttgagtcccatattgaatgtatgggattctagtgtatgtatggtttataagtttttgggcttttcaattacaacaactatcttttgtggtgttgttcnctctaggcccccaccacaaactttttatttgtggggacagacattatcccattgtatgaaataaaatataacagtttgttagtgtttgaaaatgttttcag

SEQ ID NO: 71946 - DNA, 520 bp, Glycine max
  Clone ID: PAT_MRT3847_35980C.1
tagttaaaagttttaatgcagttctcaaatacatttcatatgacaatcttacataaatgttccaaaacacatagggtagacgtctggattcacttgtcactggctggctaaggctggaagcagtgtggcccacctagctaggcagcctctggtgtccttgctggctccccgggagtggccaggccagaggtgggaccacacagtccacaggatggtcagtcacctcagggctgtgctatgctaagggtgaccccggtggttcaggttggcaggcaagagggcagaaagtctcctggctccaaaaccttcatccagacaggtgttctcaggacccaacttacggagcccctgtgtgggctgggcaccacccagaagagcgtcaagtcagctcagcccgagtgtagcttcactcgacctggggagccaagccaccagagaacaagaggcagctgccacttaggcctggcagaggaaagccgagcaggcagcaggtcactcagcagaatgctgagctcagact

SEQ ID NO: 71947 - DNA, 304 bp, Glycine max
  Clone ID: PAT_MRT3847_35981C.1
gtcttgtggggttcaattctggataaattagaggggatttcacactacgtttgggaccacatacagcagggaacttcttataatataaatatgatttttttgtagtatcctgtgtctttgatttcacaaatctccattagctttttttcttttaggtaaaccaaattgctttatgtgacaagaaacttgagactgaaatcaaactccttgattatttgagcgcacaattgatttagtgttgattgaatgcgggatgttgcttttggttgaagccccatcatcctctaccaagccttcaatgagt

SEQ ID NO: 71948 - DNA, 541 bp, Glycine max
  Clone ID: PAT_MRT3847_35982C.1
ggaataatgggtatatgcatatccgttgcagaaggagttaacgatgataatgtgacaatatttcaagcaagaaaggtcccgaatgagagtcagagactttgctctgtttactcccaacagggtagcaaaggactcaaccaagatgctgcctctgttcacgaggtttgccttacagtttcattacttgcacatgaaataattcacaatattttttttgtaattgtttttatttttcacctatttttcatttcttggcatttaggcatctcacaagtattggctaaatgagaaggaacaactcttgtgtaattttttttatgttgaataaaaggagcataaaatttatattagagaaagacacatccccttataaggttaagaaagaccacgaacttaagcaaagatttatagtggagtttatttgtttagtaatagagaaaatctggtaatcaaatcaaattacaattagtgtgagcagaagactcaactagatgagtcaatcccacttagcatatcttatgcaagaatgatatatgatttt

SEQ ID NO: 71949 - DNA, 373 bp, Glycine max
  Clone ID: PAT_MRT3847_35983C.1
attattgttcttttttttttttttttttttttaaaaccgacactttcaggggagcgttgtttctttaaattgagcactattacgggttggacaacccgcggacatcgcaccaggacttgtgagcacgcgaaccgcccacaatcccagacaaactaaaagcgggcggcaataagggcaaagccagtcccggctaaaaagtgatctcaagaaaaaaaggcgcaccgcacacaatgcccacacaaaaagcggcaaacctggagagcctaaagcctgggggaaccaaaaaaagcgcccaccgaagacaggcgcgtatcgcacccggacccctttcgggccagaaacctgcggcacccaggcaaataacggaaatccc

SEQ ID NO: 71950 - DNA, 294 bp, Glycine max
  unsure (1)..(294): unsure at all n locations
  Clone ID: PAT_MRT3847_35984C.1
aaaagcttcnccaaccacaccgagtcaccgactcgaagccactcactcgggacttcgctctcaaccatccgacggccatgaatcttagctatgagcagaggctccaggttgtcgccagactcattctcgacgaagactcacgccccggagacgcgccgcttaccaggaggagcttgggctgagggtgaccctcaagccgcaccaggtggaaggggtttcgtggctcatacggaggtacaaactcggtgtcaagtcgtcctcggtgatgagatgggatgggcaagactttgcaag

SEQ ID NO: 71951 - DNA, 301 bp, Glycine max
  Clone ID: PAT_MRT3847_35985C.1
aaccccccctaaaaaatagccccggttttggtttctaaattgggaaaaaaaccatttcaacttttcccacaggcgcttttaattttttggacaggacaacctccaggttaccttaacagggcttggggcttattatcccggattcctatgacaaccatttttttaagatccacacattagcctaaagggcagttaactactttcccgtgcccgcgtgcacacatgcaagtttttgtaacccacaaactggttgtaaaaccgggtattcttttcccttttgggccccatatttaaccatttt

SEQ ID NO: 71952 - DNA, 395 bp, Glycine max
  Clone ID: PAT_MRT3847_35986C.1
ccctgagtaccggccgatttccggtcgacgggcgccggcattcatttactcggcctgtggtggcgcaaataaattctatcgcatgggatacctacacgccccttgcccactggccggcgtctcacgggcattggcaatcctcgagcagagcggatggtctgattctgaaacaccttctagagggctattactcgctgctaactgatctgacaggtctggaaggtggaagatggaagatcaacttctatcacccaaaggggaatccatgtgggtgactccctgggaccccactctatgtgggatctgctgactttgaagcgacagcgcaaagcatttgcagaaaacatggtggagattcggcaaaacccccacccttgcgaggtaatatacgcgga

SEQ ID NO: 71953 - DNA, 2010 bp, Glycine max
  Clone ID: PAT_MRT3847_35987C.1
cgaggctttattctgcggaagctctgaattcctgagattctcttatcattttttttcctcttttaaatgcacatctcatttgtagccacagttcattagagaaaaaataatggcaattggctttcagttcatactcacactcttctctctattttcggttccctcactcacttttgcttttgcccctatccttcccagatttccttcttcagcagttagtgcagagctgaagcaacgctcacattcttcccaaaatgggctttacagaacaaaattcttcacccagatactggatcacttcaatttcaatccccaaagcaatcacacttttcaacaaaggtatctcatcaacgataccttttggggtggtgccaagaacaatgctccaatctttgtctacactggcaatgaagggaacatagaatggttcacacagaacacaggctttatgttcgaaaatgctccttcttttcaagcccttttggttttcatcgagcatagattttatggaaaatcaataccatttgggggaaacaagacggttgcatatgcaaatactagcacacttgggtatttgagctcaacacaggcattagctgattatgctactctcatcattgatttgaagaagaatttgtcagcaactgattctcctgttgtggttttcggaggatcctatggaggaatgttggctgcttggttcaggatgaagtatccacacgttgcaattggagctctagcatcctcagctccaattctccatttcatgggtttggtttcgccagatatcttcaacaacatcatcacacaagacttcaggagcgagatttccgaatgttgcaaagggagcatgcgcatccatagccccattgccgcctcgcccgggtatcccggaggaatggaactgctgcggcaaacattcagaatatgcaagagccgtgagtgtgggccgggtccttgggatggttggctccggccggcggggagtcgttccgccctgtcagcccgcccgactccatccgctggcctcaaccccctgccggcgcatccgctgaaaaaggttccaattactagagtcttaaacttttattttatttttaatgataaaaaatatattatcatttggatttgaatagtattacataaataattttatattttcatttttaataagtttatgtatttaaagataaacaaagttaatacaaatgttatatcttaaaattattattattattattttattggagattgaatatgaaaaggggagactagaggggcagagtagacgaacatttaaattatttatttgggtaggaaagattcaaagaaatatttgacttagaattgtgggaaatttagatgtgcgaggccattgacagctcagtaacgggaaataatagattagccaagttgcatgcagcagccagtgtctactacaactatacaggcaaagcaagatgtttcgatttggatgacaattctgatcctcatgatcttggaggatggcaatggcaggtaacctatccattcatgattcttctcaatttccatatttcttgtgttactaaaacttacatgtgctgtgaataacacattgaaatatactattaaattttgtccaatctcaagcttaaattaaatcttttagaaatgcaatccgggtagagtagagggaaaaaattgaaggagtagccaacttggattagaaaacgccaattatcttttggatttttccagcatatatatgctaatggtagggatccaaggaaaacatgtgcacgtgacagcttcaaacggagaagtcaagtcaagcctgactcagagttgttaatattatatcatattccaatcttagattgttagtgcctcattttccattacccaaccagacatcatcaacttagagcttccagggtcttgcattgtccaacattgagatcaaatatttcgggcttaatggtaatttcgtctcctactgttatgatcaatgaatgagcttcatcttat

SEQ ID NO: 71954 - DNA, 932 bp, Glycine max
  Clone ID: PAT_MRT3847_35988C.1
gaggaggaataggttcattatcattttgcccacaaatgagttgacatgcttttatttttaaaagtaacacgtgacccttttagggtatggggggctgtttgagccattgacaaccaggagtttacccaggagggtccaatccttaaatttttcagtttagccaaaaattttttcaaaaaaataaacccgctccctaataatgctttccccttcaggcattggcctcgggatcaaacaccattcttaggttccttttggatctggcattggcaggaactgcactaacagccacttgatcctctaaaactgctaagacatccatttgctgatattcttcttgggagggattcatggaatcaacacgatatttcccttccgaaacctttgttatgcctccattgaaagaatcgtcccccattattctctcatgaatttggatattttcaagctcaacttgctttgatttaagagatggtcgtctagttcttttgagagccgagctgagcatttcatcatcagaatcatctcttgacgatgaatccacattaatgggttcaagtaattgttcagttgatactttgctatttatttttttcttgagaacagagctgagcatttcatcatcagaatcgtcttttgacaatttatcctcactggtttgcccatgtaactgtccccttgataatttgtcactctccattttcttcctttttaccagtgataccaatgtctcatcatcagattcatccatcctttcatttgaacgatccatgagatctgcaccctttgggtgcatttttcctccagaactcttcagaggaagagacaaaccaagctgcttaagttttcgagagacttgggcagtagtgaatttaccatccttatccagtgcattggctatcatgtaactacatcttctgcggacgcgtggg

SEQ ID NO: 71955 - DNA, 413 bp, Glycine max
  Clone ID: PAT_MRT3847_35989C.1
cgggtcgaaatctactagagcgttatcgctccttttttttttttgcacaaaggtatgtatatataaaaataacaaagtcgcccataacgttcataaattgccatataccaacacttcactgacattttgatatatacaaatgaataaaacttttagataacacctaacaaaaactttattatgaacttacactcttcctcacattttaaaaaaaatgtaaaccaactatttcaagaacccatacaaactatcacttccacagggattggtacaacaaactcatatgctaataaatctaatcctaagataaaaaaactgaatttggaagatgatcttaaaggaacctgcttaacccatgcaaggatttcatgaggcccagaccgttctccaccaaaacctagaaggtaaacaaa

SEQ ID NO: 71956 - DNA, 391 bp, Glycine max
  Clone ID: PAT_MRT3847_3598C.1
aaaaaccacgaacccacaaagccatgtaagggatgcatatccttgggatttcgacaggttcaagcgaattttaggaaattacagaccgcctccttcaggggagggcctcccagccccaaggggattcctttactactggaggaaccaagggggatgataacgggccatattgagctgaatctcccggatctggcccgattttaaatgcctcctacgtaaagcataatatacggatgcattttgggggcaaatgtaccacgttttttgttccctacaaccgaaaaatcagcacaatgggcttgcaaaaaggaactcaaagcccgggttttaataaaaaataagagctgttttcatttggctggggcctccggagaaaataacgcaagcaatt

SEQ ID NO: 71957 - DNA, 739 bp, Glycine max
  Clone ID: PAT_MRT3847_35990C.1
cccggtcgacgacgcgtcgaacgtacggctgcgagagacgacagaaggggggaagcttgatgaaaacgtgatcaaagctgtgaagaaactcaagttgtggtccaaaaagaaaaggaagaaaaagacccatggccatgagcatcctcctcactattgctgcagctgctattgttcctcatccatccaaccatcagctccacccttaccttcatcctcatgccttgattttgaatacagcaactatggaacattcttaccaaccccggagccggagccggagccggaaccgcaaccacaagagattgccagcctaaactcatcgtatcagcaatatatggtatcagtttcggaacctgtttatggcattccagtcccggtaattcatgcatctcgaacagaaagatcagctggtcaatttggatgtctttttagctttggttcttatttgttccgctgcttatttccatgtttctacatccgacaagtagtttgattaccgctttcgcaactcatgcatgctcctcttgttgatttttatgtaccaccccaaaaatttatgcatctttaagtgcttggagatcaaatatagaaaccctaattagtgtaaatggtaaaggttgtaataagtactagttgcatcacgtgcattatttcatcctttcacttgttggattaatcttttaataaaacctgcttataatgtttgtcgaaaaaaaaaaaaaaaaaaaaggccctaagg

SEQ ID NO: 71958 - DNA, 502 bp, Glycine max
  Clone ID: PAT_MRT3847_35991C.1
gtcaggaagactcattttatgggaggcattgtggactgaacagaattaatgagtacaaaagacgtatgctcatgctcaacactatcggaggccatatattagtacacctgtcgctttagatgtgaccacacaagatagatagacctatgagactgattatttgcgtcatgaagccaatgcagaggaagatgggtgggcgatctagaaggtccatgcatacgatcgcgacactgctaatatttatctcattcattcagaaaactaaatggaatcatcaggtgccagagtaactacaatatgagaggaggctccctgtctgtacaaagctaaggaaactacattggcggatacacacttgcatacaatgtggagacaacaaggtctggatgcactgagggtatcaagagttatgcagcctgagtggctaaagggacacacgctgatatggtacattcaacaatagcatcgaggacgactcactcttactgcctatcacatgaca

SEQ ID NO: 71959 - DNA, 377 bp, Glycine max
  Clone ID: PAT_MRT3847_35992C.1
ggctgaagttcaaaagctagaagctgatagatttcaacttgcaactgagatagccactactggtgacagttctctgtttctacctgttaacctgaagagacttatctggaatgctcagaagacatttaaggttgacttccgaaggccttctgatatgcatccaatggagattgtggaagccattgataagctccaggagcgacttaaggttgttcctggtgaagatctcttgagtcaagaagctcagaagaatgctactcttctgttcaatattctgctccgcagcacttttgccagtaaaagggtcttggaggaatacaggctttctcgtgaggcatttgagtgggtagtgggagaaatagaatcaaggttcttgc

SEQ ID NO: 71960 - DNA, 303 bp, Glycine max
  unsure (1)..(303): unsure at all n locations
  Clone ID: PAT_MRT3847_35993C.1
tttgttttcacccttttttcactttttaccaagccaaccnccaaaagagggggccacgagcggcaaaaggggtccacccgaaaaaaacagaccgccacctgaaagaaaaacagcccacccacaaaagcgttaaaccaggcgggaagggggacaaaaaggggggggaggggggcaaaaaaaccaaaaaccatccaaaacccacccaccataccccccgaccaggcccaatgaccccccacgcggggccaaaccacgggagacccgggcgggaacccgggagcgccccaccggcccctaaagggg

SEQ ID NO: 71961 - DNA, 677 bp, Glycine max
  unsure (1)..(677): unsure at all n locations
  Clone ID: PAT_MRT3847_35994C.1
aagcncggaattcggctcgagagatgcatcaagagacaagcttgaaaagcttgccttcaaagatcaagctagttcattctggcgacttgcaaaaatgaactctcctgaatggctttatgccttaattggttctgtaggatctgttgtttgtggatccccttagtgcattttttgcttatgtccttagtgctgtcctcagtgtctattacaatccaaatcacagacacatgatccaagaaattgaaaagtactgctacttgttgattggactatcatcagctgcactcctcttcaacacattgcagcactccttctgggatattgttggtgaaaatcttacaaaacgagtaagggagaaaatgctgactgctgtgcttaaaaatgaaatggcatggtttgatcaggaggaaaatgagagtgctaggattgcagcaaggctatctcttgatgccaacaatgtcagatcagccattggagacaggatttcagtaattgtgcagaacactgcacttatgctagttgcctgcactgcagggtttgtattgcaatggcggcttgcgcttgtactagtagctgtcttccctgttgttgttgcagccacagttttgcagaaaatgttcatgactggtttctctggtgacctgnaagctgctcatgccaaggccacgcaactagca

SEQ ID NO: 71962 - DNA, 997 bp, Glycine max
  Clone ID: PAT_MRT3847_35995C.1
ggcaaactcgaggaggttgttggatacaacaggaactctgattctctaacgaaatcatctgcaagacgtcggtatatcgtatacgctgcagtttgattgcattttacttcaaccatgtcgggtgatttagcatacaagagcattctccagagttcagcacttatgaagtacatctttgaaacgagtgcctatccaaaagagcatgaacaattaaagctactcagagagaccacggtacagaagtgccaggaaaattcggaatatatcatgaatgtgccagtggatgaagcgcagttcgtatctattctgcttaaaatcatgaatgcgaagaaaacactggaaattggagtattcactggctattctcttcttgccacagctcttgctctgcctcatgatggcaagataacagcaattgatgtaaatagaaaaacatacgagattggattgccattcattcaaaaggcaggaatggagcacaaaattgactttatccttggtgatgcattatcagttctcaacgatcttattaatgataagcatgaagactcatttgactatgtatttgtggatgcggataaagcagaatacataaaatatcacgagttggtgttaaaattggtgaaaaagggtggaataattgcatatgacaacactttatattttggtacagttgctatgcctgaggaagacgtaaagtgggatattctgaggcagaatagaaagcctttgattgaattcaacaactttatagcaaacgattctcgcttggaatcagcaattgtttctattggggatggcgtaaccctgtgtagacgtctgtgatcccttcaaatggaagagagataaaaagcagtataagaatagttgggtcacaactcttacaatttagtttgccaaataaaaacatcactttaaattttgtatccctcctgattatgttgcagaataaatgcttattacgttgaagaaatatatataaaagttagtaccgatg

SEQ ID NO: 71963 - DNA, 1776 bp, Glycine max
  Clone ID: PAT_MRT3847_35996C.1
ctcgagccgattaagtactacatattagctttccctgaattcaaatcttcttctcatctcacaccccactgtcacctgtattcacaaagctcaacaaaaattataacaatacacaaagaagggaaaagacgaatcagaagacagagatatctatcaggactgaaaaagcaatttagaaagagaaatccgaagatggaagacttagaagcaaagatatcagattcaaaaccagatgactcaagtcctctaaaactctacttgctcccttttcttgctccgggacacatgatcccacaaattaaccttgctcaagtttttgcctttcgtggccaccatgttactattcttaccactccttccaatgctaaactcatcccaaaacatctcaatgtccacatcttgaacttcccctccgaggaagtgggtctcccttcaggccttgagaatatctccttggccaaagacaacaacactgcctacaagatatggaaggcctcaaagcttctcaaacccgaaatcgaaaacttcttaaatcataaccctcctcacgctctgatcatagacatcatgtatacatggagatccacacttaacaatagcatccccacgcttgcttacagccccatgcccgtcttcgctctctgcgtcagcgaagccatcaatcgccatcctcctgctttggcttctgattcttcacttccttatgttgtgcctggtggtctcccacacagtgtcacgcttaattttaacccctcatcaacctagctctgtaatatggctcgtactttgctacacgccaaggaaaataacaaacatggtgttattgtgaacacatttccagagctcgaagatgggtacactcagtactacgagaaactcacccgtgttaaagtctggcaccttggcatgctctcacttatggtggattatttcgacaaaagaggcaagccacaagaggatcaggtcgacgacgagtgcctcaaatggcttaacaccaaggagtccaactcagtggtgtacatatgctttgggagcttggcccgtctcaacaaggagcaaaattttgagatagcacgtggaatcgaggcctctgggcacaaattcctttgggtgttgcccaagaacacgaaagatgacgacgtgaaagaagaagaattgttgctgccacatggttttgaagaaaggatgagggaaaagaagagaggaatggtagtgagagggtgggtcccgcaaggtctaatattgaagcatgatgccattggagggttcttaacgcattgtggtgctaattcggtggtggaggcgatttgtgaaggggtgcctttgatcaccatgcctaggtttggtgaccattttttgtgtgagaagcaagcgactgaggtgcttgggcttggggtggagttgggtgtgtctgagtggagcatgtctccttatgatgcgaggaaggaggtggtgggttgggaacgaattgagaatgctgtgaggaaggtgatgaaggatgaaggaggcttactcaacaaacgagtcaaggaaatgaaggagaaagcacatgaagttgttcaagagggtggaaactcttacgacaatgttactacccttgttcaatcactcagacggatgatgaatgttcatggttgatgttaatgcttcattagtttctttttttaatcaacttctggtttggaactctagatttgtttcatataatttcatcatggttattaaagataatgcttcattagtttgtttttttaatgaacttttgatttggaaaaa

SEQ ID NO: 71964 - DNA, 283 bp, Glycine max
  Clone ID: PAT_MRT3847_35997C.1
gagcggccaagaggtgtgggacggggcccagagccactgacataactcctccaagtgcttctctgaaacaggctgagaggttctgtgactgcaactgggaagtcagacccaagtcgcagctgagagaaatggttgaaagctcactttctcaaggtttagattagtggtgactaacttccaagcaaacttcatagatagagaaaatgaatgccgacattccttacttacctgcaggaagactttttgagccatagtttgcaaactttagtgccagcagctgttt

SEQ ID NO: 71965 - DNA, 804 bp, Glycine max
  unsure (1)..(804): unsure at all n locations
  Clone ID: PAT_MRT3847_35998C.1
tttgaccataggttaaangggccaagtggacaagaaggcagacccaagagtttttatcggaatccaccaaaagcactgntactccaatgaaccaaagggaaaaattcaataaagaggcggggcttgataaggtagagaggagcatgatataaaaagtncaaccgggttattgttttcagctttggttcggggtaggtttttttggagttcaaaaaagcaagacncagaggcagaatatgtggcaaccactacagctgtgaatcaagctatttggctaaggcgtatacttgctaatttacatatggaacaaaaggaacctacacagattcttgttgataatcaaacaactatttccatttcaaataatcatgtttttcatggcaggactaagcatttcaagatcaagttgttttttttaagggaaacacagagagaaggtgaagtcaaactaatttactgcagaagtgaagatcaaagtgcagatatcttaacaaaagtttttccaaaagttagatttgaagttttaagaaataaattaggtgtttgcaaccattgaggcaaagaggagatttgttgaaactgtgcctacaatagctgcctacaatagctacatacgtggatgttttagctaattttttaaattttaaaattatttgttgcttatgatatattatttaggagttatgattttgttcttatcatattagaaacttttttagtcatatctaaaaacaagagattttctgttttgtatatttgactctataagagcaaatgaataacacttatgtatccttccaagat

SEQ ID NO: 71966 - DNA, 465 bp, Glycine max
  unsure (1)..(465): unsure at all n locations
  Clone ID: PAT_MRT3847_35999C.1
ttattttttagagtatagtttgttgtctctgggaagatatgtgatcatgcatggtaagaaaaaatatacttgagaggaaaaatcagaaaacggttattattttgttatttttgtttcctaatcctaccaaacatgacaagatcatttttaatctctttttttttaatttatatacttaatgctcttcatttttttttaatttttcatttctgacacttgaagtagcttgttaatgtcacatgcttctaagtgttataagtgcggccatttttgtcaaaagtttcctttcccattttcatgcactctgatccttagcatgtttttcatataacctattatttcacatttcagaatgagacatactgattctgaatctatgattcataaaacatgtttagattttataagaatatantaaatgatatgcttgaaaaaatagaagtgtcactgaattgctagcgaaaa

SEQ ID NO: 71967 - DNA, 1871 bp, Glycine max
  Clone ID: PAT_MRT3847_3599C.1
caacagactaactggtgcattgagtcacaccattggttcactggttgagttaaccaaactcaaccttggaaacaatcagctgagtggaagaatcccatcagagatcttgtcttgctctaagctacaacttctggacctgggaagtaatagtttcaatggagaaattcccaatgaagttggtctaattccttcactggcaatctctctcaaccttagctgcaaccagttctctggtaaaattcctccccagctctctagtcttaccaaactaggagttcttgatctctcacataacaagctctcagggaatttagatgctctttctgaccttgagaatcttgtttccttaaatgtttccttcaatggcctctctggtgagttgcccaacaccctattttttcacaatcttcctcttagtgatcttgctgaaaatcaaggtctctacattgctggaggtgttgtaactcctggtgacaaaggtcatgctagatcagctatgaagttcattatgtccattctcttaagcaccagtgcagtacttgttcttctcacaatctatgtcttagtcagaactcacatggccagcaaggtgctcatggaaaatgaaacttgggagatgactttgtatcagaagcttgatttctccattgatgacattgttatgaatttgacatcagccaatgtgattggcactggaagctccggagttgtgtacaaagttacaattccaaatggtgaaacattggctgttaagaagatgtggttatcagaagagtcaggagcattcaattctgaaattcaaacattggggtcaataaggcacaagaacatcatcaggcttcttggatggggatcaaacaagagcctgaagttgttgttttatgactacctccctaatggaagcctgagctcattacttcatggttcaggaaagggaaaagctgaatgggagacaagatatgatgctatattaggtgtggcacatgcacttgcatatttgcaccatgattgtttgcctgctattattcatggagatgtcaaagccatgaatgtgttactaggccctggacaccaaccttaccttgctgactttggcctggcaagaactgcaactgaaaatggttgcaatactgattccaagccacttcaaagacattaccttgctggttcatatggatacatggctcctgagcatgcatcactgcagcctaaactgaaaagagtgatgtgtacagttttggcatggttctacttgaggttctcacaggaaggcacccattagacccaactctaccagggggtgcacacttggttcagtgggttaggaaccacttgtctagcaaaggagatccttctgacattcttgacacaaagcttagagggagggctgatcccaccatgcatgaaatgctacaaactctagcagtgtcctttctatgtgtaagcaataaagctgatgagaggccaacaatgaaggatgttgttgcaatgctcaaggaaattagaccccttgagacctcaagggcagaccctgatgtattgaagggaggtttaacagcacatagttcaccaccacctcctaagaatgtggtctcacatggatcttcgacatgttcctacaatttctcggataactcaatcaattgagcatgtatgaataagtttgcatctcatggagaagctatcactccaattgtacatagtctaatgcaatgccaatcagaggtggcctgaattattattagttaatgatattctagtaatctagtgtataattttttttccttttaatgtaatgtcatatagacgatgcaggtttcaagaatccatatattcatttgaaatatataaataaatataatttcttaagc

SEQ ID NO: 71968 - DNA, 1025 bp, Glycine max
  Clone ID: PAT_MRT3847_359C.1
ggaagaagaaaatatccattagaaaaagaccgtagactttggccattttttcactccacacggagccaaagccaaatccaaagccaacaacaacgccaccaactcaacaacaggaaagtcctcataaaccccataacccaaaccaaaacccattgtctccttctcctcccattgaactccttctctttccccctctctctctctctcacacacaaagaggccatggattacctcgaccatgatcatgatcatgacccattccacgaccacgacgacttcaacagaaggatactcatcatggccatagtttccttatcagtggtcttggttcttgtctttgcacttcacctctacgcaagggttttcctccgccgccaaactcgccgcagagccgccatataccaactgagcctcaacgtggcacaagcacacgccgagccacacaacaacacagggctgaaccctgccctcatcaccacccttccctccttccccttcaaacaaaaccaacaccatgattctgctgagtgtgccgtgtgcttgagcgttctagaagacggagaacacgtgaggcttcttcccaattgcaaacacagcttccacgtcagctgcatcgacacgtggctttcttcgcactccacgtgtcccgtttgtcggaccaaggccggaccggtccagctcgaaccggtccgcctcgaacctcagccccgtgagggccccactggcttggttcttgctgatgttgttgcacccacggctcctctattgtttgaaaacgtggaaggaacctcggatggtgctaataataatgggtcacctaaggttagtggttcgaattcgaggttgagttcgttcagaaggattctcagtagggagagatcgatgaggaggattctaccttctagccatgatgatgttgaacatgacttagagaggcagtgagaactgagaaattaattattgaggtaccaacaccatgtatctggttttgattatttgtgtgaagtgtctctgatttttatttt

SEQ ID NO: 71969 - DNA, 726 bp, Glycine max
  Clone ID: PAT_MRT3847_35C.1
ggtccggaattcccgcgtcgacccacgcgtccgcaagcttttatgtgcagaagccagtttctttgctggaagaaaacatcttgcagctttctaatgacatttttgaagagataggggttctctctaccaaagtggtcatcttatctctggatcccttaccacagtcaaacacgacaaaagtggtgtttgcagttgatcctgatagtaaatattcagaaatgtctgcagctgccattagtttgattagagcatcattcaaatacctggttatacgccaatcatatctccagctctctacatccttgtttggtgttccctctgtttttgaggtgctgaaatttaaaggagggatcactatcattccacaacagagtgtgttccctctgcaaatggtgcagacattattcaactttactttgaatttctccatttatgaaatacaatcaaattttgatgagctgacaagtcagctaaagtctggactacatttggcaccttatgagaacttgtatgtcatcttatcaaattctgaaggttctacagttactgctcctactgttgttcaatcatctgtcctacttgcagttgggattccaccatcaaaggagaggctaaagcaactggcacaaaccataatgggacatcattcatggaaccttggggtgaataacactcaatttggtaggggtaagcaggttcgactttcatctatcttgcaacactccc

SEQ ID NO: 71970 - DNA, 890 bp, Glycine max
  Clone ID: PAT_MRT3847_36000C.1
cccacgcgtccggccaagcgaagccgagtcaagtgaagccgagctgtatgacagataaggcgggtccactttgatgaccgtttctttctttcaccttcccaacctgaacgaacgtgtacgtgtgcatcttctttctttgtatataaagaatttcaccaccatcattcttcaacccaatcccctcttctcaattctcatattccaatgtcaaatcctcaaacaaacaataaccgccaccagcccagccgcctgcagcgccgcgccccctcctccctgcaaataaaccgcgccgtcgagtggaacgtcgccatccccctcctctccccgctcgcatcctctccgccgccgatggagctaaaaccgccgcaagagccgccgcagcgggaggcggagaaggtcaccgtgtcgttcaagaagtggcagcaccccgccgcacctttctgttacgagcccgctcccatggtgcctcccttcgttcccgtgtagatatacaaaccaaagaaaaagaagaagatgaaggaacagagagagttttaggatgctgctatctaatggttcatactactatttagatagaatgaagaagatctaacgctgtatttttaattaattattattgttcctttttttttgttggggagaggctttgccttgttttgcacacggggattatcatgttcatgcttcattcattcatgtgatatgaatgaacattacaccccctctgtgtttttttctctctctctttttttagcttttccccgtttttttttttatgccttttcattttggggcttaaattaaactacttacttcataggaatatctctcttttcttcttctcagcaaaaaataaaaaagaaatctctctcaatgtaattttttaacaa

SEQ ID NO: 71971 - DNA, 373 bp, Glycine max
  Clone ID: PAT_MRT3847_36001C.1
atgtgtgagaatcaaaaacatattaaaagacttataataatttatatatatttttaatcaactgagtcgcacttttttgttactaattcacttaatcaccactttgaatctcacatttcttttaacttacgaataagaataataataataataataacataggcccatctacctgggcctaccggcattggatccaggcccgggataaacaggcccaccctttatagcaccaccagccacttgatggaagccggcagaaccgtacacgtgtccctgatgcatcatgattccaccaggagcagcagcataactaggactctcgtaggcactgttggtagcattggaggaggagggcgcgttcttgtcacgcgcc

SEQ ID NO: 71972 - DNA, 234 bp, Glycine max
  unsure (1)..(234): unsure at all n locations
  Clone ID: PAT_MRT3847_36002C.1
cgcnccttattgcagncantgctaattncnagngttccgaaatgtncgctggctggangatngttaaggtngccngagtannaaaggtcggcggccctanataagaagccngntgcaatgttcngtcaatgccggtctccaattcnccgtcggannaantggccgttatttnagnaattaaggtactcccagcgtgtngtgtacccggttntcccgggttanntggccgngagt

SEQ ID NO: 71973 - DNA, 361 bp, Glycine max
  Clone ID: PAT_MRT3847_36003C.1
ggtttcctatgagtgctctttgaatccggaggaggctttttctatcttggagtggcggcaccatcctctctccttaattttttatgaggaatgttggcaacactttctttgacacactctttttaatactctctcagtaattgactgaaatttattggaaatcaccaaatcccacatctaaatcaagagagagaatcgttagattgataagtaagaccctctaaaattggtgttttttaacaaatttcagccaaacatagagagagtgttggaaagagagctcagagtgtgactaggatttctcaattttttttttgtattgattggattggattggatgatatggattttgaaatagtct

SEQ ID NO: 71974 - DNA, 1407 bp, Glycine max
  Clone ID: PAT_MRT3847_36004C.1
gtccggaatcccgggtcgacccacgcgtccgccactccatcctctctcccaacaagagagcgaacgagcccattcctgtttctccaccaccgaacacacacacgccctttgcttccttcctcacctcgcgctaacctgcaccccccttcttatcctgcgcaccccttctttatccaattctttcctcagattcggagcaccgcgcgcgccaccattgggaaaagaggttccggtgctgggggcctagggttagggtttctgagagatgtgggatgctccatgcattgatgagccttatcgcgcgctgttggaagccgttcgggcacggtgacgatgccggtaatgccgccgccggaagagaatgcaaggacggcctcctctggttccgcgacatcggaaagtttgcagccggcgatttctccatggccgtcgtccaggccaaccaggtcatcgaggaccagagccagatcgagtccggcgccttcggcaccttcgtcggcgtctacgacggccacggcggccccgattgctcccgctacgtttgcgataacttgttccgcaatctccaagcgatattggccgagtcacagagtgttgtgacatctgaggccattcatcaggcgttccggcggacagaggaggggtttacggcgcttgtttcggagctgtggagctctcggccgcagattgcgactactgggacgtgttgtttggttggggttatttgtcggcagacactctttgtggcaagtcttggagattcccgtgctgtgttgggtaggagagttggcaacaccggtgggatggccgcgattcagttgtctacggagcacaatgcgaattttgaggctgtcaggcaggagcttaaggaattgcacccgaatgacccccagattgttgtcctcaaacatggagtgtggagagtaaagggcattattcagacatggtttatgggagcacttgagtaatgagaaagccgtggatattgtaaacagcaatccacatgcgggtagtgccaagagacttatcaaggctgctctacacgaagcagcaagaaaacgagaaatgcgatattcagacctccgtaagattgacaagaaggttcgacgccattttcatgatgatatatccgttattgttttattcttaaatcacgaccttatttccagaggcacagtgctagacccggcactttcaattcgaagtgctctcgatcactgacttgtatcattgtaagcagtcttgtaccgatacctgaagcatacgccattggtttgctaggtacctggctacaatatgccattcttgaggcacgataatttattaagttataacatattatttgaattttattcgtgaagaaaaaaaaaataaatacaaaaacatcttttattcccttttctaaaa

SEQ ID NO: 71975 - DNA, 392 bp, Glycine max
  Clone ID: PAT_MRT3847_36005C.1
cccgcgtccggaagctcggattgcgcttcgaggccatacctctctcccaacaagagagcgaacgagcccattcctgtttctccaccaccgaacacacacacgcccttggcttccttcctcacctcgcgctaacctgcaccccccttcttatcctgcgcaccccttctttatccaattctttcctcagattcggagcaccgcgcgcgccaccattgggaaaagaggttccggtgctgggggcctagggttagggtttctgagagatgtgggatgctccatgcattgatgagccttatcgcgcgctgttggaagccgttcagacactctttgtggcaagtcttggagattcccgtgctgtgttgggtaggagagttggcaacaccggtgggatg

SEQ ID NO: 71976 - DNA, 2802 bp, Glycine max
  Clone ID: PAT_MRT3847_36006C.1
aattctcgggtcaagcgtcggatcacgcgtccgccacgcgtccgcacaccccgccaccaccgaacgctaacgtgcgccccttccttaccctgcgcctcggcactctcccttattccccctccttcataagctccgcgttcactctctctctctctctctctctctctctctctctctctcggatcggagcgaggctggcgtcggtaggtttcaactctgacctgtgagctggttctttttcatatatctctccgcgtccttggcttcgccatagctttcctcgattttcttcgcttctggagatgttaggcctgcggttccggcgttggggacgttagggttagggtttccgagaatgtggtatgctccaggcattgatgaatctgttctcgctgtgttggaagccgtttggccgcgatgctgatcatatggaatcgattccatcggagttatcggaagagaaggcaaagacggcttgctctggttccgcgacttcggaaaatatggctccggtgatttctccatggctcgtcgttcaggccaaccaggttctcgaagaccagagccagatcgagtctggtcctctcggcaccttcgtcggcatctacgacggtcacggaggacccgacgcatcaagatacgtttgcgatcacttgtttcgccattttcaagcaatatcagctgagtcacgcgggttgtgacaactgagacaatgtaaacagaaggaattcttcgcaggggtacatgtcaggctcgtggaatgctcgacctcatattgcaagtgctgggacctgttgtctagttggagtgatagaattaatatttcagcagacactctttgtggcaaacgctggagattcccgtgttgtattgggtaagaaagttggcaacactggaggtatggctgcaattcagctgtctacagaacacaatgcaaatcttgaggctgttaggcaggaacttaaagaattacacccacatgatccccaaattgttgtcctcaaacatggagtgtggagagtaaaaggcattattcaggtttctagatctataggtgacgtatatttgaaacatgcacagtttaaccgggaaccacttaatgcaaaattcagactccctgaaccaatgaacatgcctatcttgagtgctaatcccactattctttctcatcctctccaaccaaatgattccttccttatatttgcatctgatggtttatgggagcacttgagtaatgagaaagcagtggatattgttaacagcaatccacatgcgggtagtgccaagagacttatcaaggctgctctccatgaagcagcaagaaaacgagaaatgcgatattcagacctccgtaagattgacaagaaagttcgacgccattttcatgatgatatatccgttattgttttattcttaaatcacgaccttatttccagaggcacagtgctagacccgacactttcaattcgaagcgctctcgatcactgacttgtatcactgtaagcagtcttgtacgagtttttggcaactgtaccgatacctgaagcattggtaggtacctggctataatatgtcatttctatggcacatatggcttctggtaccgacatcattcttgaggcacgagaatttattaagttataacatattattagaaatttattcataaagaggaaaaaaataaatacaaaaatatcttattcccttttctaaccttatagttttacccgaaatactggattttatttatttgtttgtttttttggctgaacatagctaatcgaacagcatgttgattgaattcaaagttatttttcctccaattttttggatcaatttttgcacttaacttttataggtctcatctaacttctccaaaatctgaggtgcattagttgaatttaatttatgggaaaaaaaattattttctttttacaagtgtttatggaaaagtttattcagaggcctagctcatctcccagcatttgacttgtatgaaaattcaaatcactccccccacacactcacctctctctctctctctctctctgtggtcctttccatattctatgcttattaaaaagggaatcatgatgacattgtgttatttcgttgttattcaagaagcctgttttattgaattctttgttattcttccttgcgttgctattgtactacaattgtgttactgcagggtagtgccaagagacttatcaaggctgctctacatgaagcagcaagaaaacgagaaatgcgatattcagacctccgtaagattgacaagaaagttcgacgccattttcatgatgatatatccgttattgttttattcttaaatcacgaccttatttccagaggcacagtgctagacccgacactttcaattcgaagcgctctcgatcactgacttgtatcactgtaagcagtcttgtacgagtttttggcaactgtaccgatacctgaagcattggtaggtacctggctataatatgccatttctatggcacatatggcttctggtaccgacatcattcttgaggcacgagaatttattaagttataacacttgttagaaatttatccataaagaggaaaaaaataaaaacaaaaatatcttattcccttttctttagcaatttgtcaaatcccttgcccatatttacataatgctgtgattacaaggaagtgcttgatctaatttccgtgtcaatttcgtgcccgagcaaggttgtatcatgtatgtaccatttcctgaataatcctcaatcagctcgctgattgaatgaattcaattatttaatc

SEQ ID NO: 71977 - DNA, 1141 bp, Glycine max
  Clone ID: PAT_MRT3847_36007C.1
tttgatgcgtccataatgtacaggttgctattgcaactgcattaagatgaaccacttgcctttacaatttattaagcttttccgtgtccatttgagagacaaagggcatcatcagagatgtattatactcttttgtagccaaaatttataaaggggggggggacgggcaataagtgctagaagggtggtttatggtaccgcaacaggctaaaatttataataagagctcttgaacttttgttattgatatattttacaatacatagggctgtaatagattctatgattaagtccctcgtttcatttagacattgacaatgtatgtatgactgactctacgcaagttgcatcgcttcttcccgtttcaagtcaaaaaccctgatgagtgcatcttcaacaaccttgtctggtgtggatgcaccagatgttacaccaattgttattggaccctctggcagccagttttctttctccaccagctctccatggttcaacttgtatgctattttgtttcctggaccaattctttgctcactgtcaatccaataagaagggattccacgttcctccgctatctcttgcaggtgtgaagtattgctggagttccatccaccaactactaacattagatccaaatcttcctccaccaatttatacatagcatcttgtctctcctgagtagcatcacaaattgtattgaagctcatgaagtgctcattgatgttctccacaccatatttgtgcatcatagtcctctccaatagtttcccaatgtcttctgtctctcccttgagcattgttgtctgatttgcaatgccagcttttatcaggtctctgtctggatcaaagccctcagaaactgcaaatttaaatttctctaaaaaggcttccttggttgaactggatccattcaattcaccaccaagaatgtagtcgcaaacatattcagtctgcttcatattcttcacaattatatacttgccagcaaaagaagcagttgctagcagtttcgtcatgggcatatttaccatgaattacagaggtataatctccatgcatgtgtttttcaacagaattccatacctttgcaacccatgggcaagttgtatcaccaatctgaacattttcatcgctcaaagtc

SEQ ID NO: 71978 - DNA, 697 bp, Glycine max
  Clone ID: PAT_MRT3847_36008C.1
cccacgcgtccggaggctatcaggcaggagcttaaggaattgcacccgaatgacccccagattgttgtcctcaaacatggagtgtggagagtaaagggaattattcaggtttctagatctataggtgacgtatatatgaaacatgcgcagtttaaccgcgaaccaattaatgcaaaattcagacttcctgaaccaatgaacatgcccatcttgagtgctaatcccactattctttctcatcctctccaaccaaatgattccttccttatattcgcatctgatggtttatgggagcacttgagtaatgagaaagccgtggatattgtaaacagcaatccacatgcgggtagtgccaagagacttatcaaggctgctctacacgaagcagcaagaaaacgagaaatgcgatattcagacctccgtaagattgacaagaaggttcgacgccattttcatgatgatatatccgttattgttttattcttaaatcacgaccttatttccagaggcacagtgctagacccggcactttcaattcgaagtgctctcgatcactgacttgtatcattgtaagcagtcttgtaccgatacctgaagcatacgccattggtttgctaggtacctggctacaatatgccattcttgaggcacgataatttattaagttataacatattatttgaattttattcgtgaa

SEQ ID NO: 71979 - DNA, 1865 bp, Glycine max
  Clone ID: PAT_MRT3847_36009C.1
aaataattggaaagtgtatcaggttgaatatgaatttcatacgtccataatgtacaggtttcaattgtaactgcattaagatgatccatttgcctttacaatttattgtattaactattaagctattccatgtccattggagtgacaagggaatcatcaaatatgtattttactctccttgcagccaaaattttataaagataacatggacggccaatacgtgctaaaaagttggtttatgatactgcaactggcaacatttataagagctcttgaacttttgttattgatacattccacaatacatggggctgtaagcctgtaatagattctatggattaagttcctcgtttcatttatacattgccaatgtatgcatgcagaccgactctatgcaagttgcatcgcctcttcccgtttcaagtcaaaaaccctgatgagtgcatcttcaacaaccttgtctggtgtggatgcaccagatgtcacaccaattgttattggaccctctggaagccagttttctttctccaccagctctccatggttcaacttgtatgctattttgtttcctggaccaattctttgctcactgtcaatccaataagaaggaattccacgttcctccgctatctcttgcaggtgtgatgtattgctagagttccatccaccaactactaacattagatccagatcttcctccaccaatttgtacatagcatcttgtctctcctgagtagcatcacaaattgtattgaagctcatgaagtgctcattgatgttctccacaccatatttgcgcatcatagtcctctccagtagtttcccaatctcttctgtctctcccttgagcatcgttgtctgatttgcgatgccagctttaatcagatctctgtctggatcaaagccctcagaaactgcaaatttaaatttctctaaaaatgcttccttggttgaactggatccatttaattcaccaccaagaatatagtcgcaaacatattcagcctccgccatattcttcacaattatatattttccagcaaaagaagcagttgctacagtttcctcatgggcatatttaccatgaattacagaggtataatctcgttgcttgtgcttttcaacagaattccatacctttgcaacccatgggcaagttgtatcaacgatctgaacatttttctcgctcaaagtcaacatctcttccactgccgctccaaaagctggcaatatgactacatcacccttgttgacaacatcaaattgttttccaccttcttcgagaggaatattttgaacattcatctcctctagccgcttattgacagtggggttgtggatgatttcattggtaagccaaattgtctcagtaggaaactgttttctggcctcataagcaatttgaacagccctctcaactccccaacagaatccataggcttcagcaagcttcaccgtgacagtaccccatgtatactcatacccattttccttcaaagtcttaatgatatcactggtgtactcgcgattcatgagttggagggtctcttccttgtacccaaatcctttgcggttataattcttactccgagtaaggttcttccgaaacaccttcggatcgaactccgaacccacagagccggaaggggaatcgccggagcatcggacggagagaggtttccggcaccggattctggtgagactctccggcaaagaagtgtcagcgcgtgtggcggggaaacggcaaatatgcgcagagagagccatcggagatagcattacacaacacaacaatgtctgaatgtgtggggtttttttatggctgcaaactcgtgttctctgttgttgtttttcggacgcgtggg

SEQ ID NO: 71980 - DNA, 127 bp, Glycine max
  Clone ID: PAT_MRT3847_3600C.1
gagcctctcttccatcttcccagcccaaacctctctacatgaaggtcacattagagcccttctgccttgctgaccgttagcactccttgtagtccttcttcttgttcgagtaggtccttggcttctc

SEQ ID NO: 71981 - DNA, 428 bp, Glycine max
  Clone ID: PAT_MRT3847_36010C.1
tttttttttttttttttttttttttttttttttttttttttttttttttttttttttttttgggagggggggcgttgattaataatgtaggggttccaaccgcttgaaaaataaccaaacaaagagcccttaaaaattgggcagggaaaaaaaaaaaaatttttccaaaaaggtcaaaagcaaaaatccgaaaaaaaggggggggaaaaaaattccaatttcggcgacttaggggcgcaaaacacaaaccccaagatttttcccccctccaaaggtgtgttcacttggacaacccctggaaaaaagggcttcccagaaattgaatgggaaaagaaaaaaccgcccttgaaccaccaagggaccattttttgagggcccttaccccattggcattcctaataaaaaacttggaggtctttttcccctcc

SEQ ID NO: 71982 - DNA, 495 bp, Glycine max
  Clone ID: PAT_MRT3847_36011C.1
ggctcgagagcaaacagagtcttccccacaccatcctttcccccaagagaatgagcccgttcatgctcctctaccaccgaacacaccccgccaccaccgaacgctaacgtgcgccccttccttaccctgcgcctcggcactctcccttattccccctccttcataagctccgcgttaaccgtcctctctctctctctctctcggatcggagcgagactggcggctccggcgttgggggcgttagggttagggttagggtttccaagagatgtggtatgctccaggcattgatgaatctgttctcgctgtgttggaagccatttggccgcgatgctgctgatcgaatcgattccatcggagttaccggaagagaaggcaaagacggcttgctttggttccgcgacggcggaaaatatggctctggcgatttcttcatggccgccgttcacgccaaccaggttctcggagaccatagccagatcgagtctggtgctc

SEQ ID NO: 71983 - DNA, 2325 bp, Glycine max
  Clone ID: PAT_MRT3847_36012C.1
aattcggctcgaggaataagcccgttcatgttcctctaccaccgaacacaccccgccaccacctctcgctaacgtgcgccccttccttatcctgcgcttcgacaccccttcttttcttggtttactttttcccttattccccttccttcataagctccgcgttctctctctctctctctctctctctctctctctctctctctcggatcggagcgaggctggcggttccggcgttggggacgttagggttagggtttccgagagatgtggtatgctccaggcattgatgaatctgttctcgctgtgttggaagccgtttggccgcgatgctgatcgaatcgattccatcggagttatcggaagagaaggcaaagacggcttgctctggttccgcgacttcggaaaatatggctccggtgatttctccatggctgtcgttcaggccaaccaggttctcgaagaccagagccagatcgagtctggtcctctcggcaccttcgtcggcatctacgacggtcacggaggacccgacgcatcaagatacgtttgcgatcacttgtttcgccattttcaagcaatatcagctgagtcacgcggggttgtgacaactgagacaatcgaaagagcatttcgccaaacagaagaggggtacatggccctcgtgtcaggctcgtggaatgctcgacctcatattgcaagtgctgggacctgttgtctagttggagtgatatttcagcagacactctttgtggcaaacgctggagattcccgtgttgtattgggtaagaaagttggcaacactggaggtatggctgcaattcagctgtctacagaacacaatgcaaatcttgaggctgttaggcaggaacttaaagaattacatcctcatgatccccaaattgttgtcctcaaacatggagtgtggagagtaaaaggcattattcaggtttctagatctataggtgatgtatatttgaagcatgcacagtttaaccgagaaccacttaatgcaaaattcagacttcctgaaccgatgaacatgcctatcttgagtgctaatcccactattctttctcatgctctccaaccaaatgattccttccttatatttgcatctgatggtttatgggagcatttgagtaacgagaaagctgtggatattgtaaacagcaatccacatgcgggtagtgccaagagacttatcaaggctgctctccatgaagcagcaagaaaacgagaaatgcgatattcagacctccgtaagattgacaagaaagttcgacgccattttcatgatgatatatccgttattgttttattcttaaatcacgaccttatttccagaggcacagtgctagacccgacactttcaattcgaagcgctctcgatcactgacttgtatcactgtaagcagtcttgtacgagtttttggcaactgtaccgatacctgaagcattggtaggtacctggctataatatgtcatttctatggcacatatggcttctggtaccgacatcattcttgaggcacgagaatttattaagttataacatattattagaaatttattcataaagaggaaaaaaataaatacaaaaatatcttattcccttttctaaccttatagttttacccgaaatactggattttatttatttgtttgtttttttggctgaacatagctaatcgaacagcatgttgattggggtagtgcgaagaaacttgtcaaggctgccctacaagaagcagcaagaaaacgtgaaatgcgatattcagacctttacaagattgacaagaaggttcgtcgccattttcacgacgatataactgttattgttttattcttaaaccacgaccttatatccaggggcgcagttctaaatacgccacttacaattcgtagtgctctcgatcactgactcgctttatgatttgtaaacatgcttctcttatacgggtgttctggcaactgtgccaattccagaaaatacaccattggcacgttgctagaatataccattcatagtgctgccacgtatggttactgataccgagacaacttattgatgacgcacgaacttgtaacacttgttagaaatttatccatgaaaatgaaaaagaaaaaaaaatcagaaaagtaattttgtcttagcaatttgtcaaatcccttgcccatatttacataatgctgtgattagaaggaagtgcttgatctaatttccgtgtaaatttcgtgcacgagcaaggttgtatcatgtatgtacgatttcctggataatcctcaatcagcttgttgattgaatgaattcaattatttaatcag

SEQ ID NO: 71984 - DNA, 754 bp, Glycine max
  Clone ID: PAT_MRT3847_36013C.1
cccaaatatattggaaaaaaagaaccacaaagacaatagcaaacaaagggtaatgtaatgcggcgaggtgagaggaagagcagaagaagcaaatagattagattagagaattagaaagaaagaaaaaagagaaaatagaaaaatagagaaattcagtggaataagcgatgaaaaatttctctatataaagagatatccacatacaacacaatctctttcttcgtctgtgcttcggtaactgcagagagaaagaaagaacaaacgaagaaaagggaagaaggagaagaagcggtgaagcgtagaacgaagaaacacgcggaaggaggaatcggcggtgctccaccggcgatcgctcatcgtcgccggcgaacttcagatcgctgctcttgcttctccgaagtttgtgccttgcggtttttttcagaggcatttgttgttggaatcttgtagtacgggtttttttggctcactggtggaaaattgttatagatgggctgaggtgtgcttttcatgggaggtgtggaggatgaagaaccagctttgaaacgcatgaaattatcctctaaaggattagttggtctctcaaacggttcgtcttcagtggagtcttggagattgctcttctagtgacttgatggctcggcccctgtcatctgaaggggacggcgaagttattggttccaaaggggttatataaagggaggaatttgttaggataatcacaaaggcatttgattcgcttggttacaagaag

SEQ ID NO: 71985 - DNA, 264 bp, Glycine max
  unsure (1)..(264): unsure at all n locations
  Clone ID: PAT_MRT3847_36014C.1
gggtttgtttttttttttttgtttttttttgtttgtngttaaaacaaacatttgcttactaataagggggatttgtccatatagcggggtttctaatccttgttccccccgctcccaaaggttaagcctaaaaattttttcatttgctttctaaacaaacaaagggggactcaaacaaccttttacgggttgacgttgttattttaccctgctacaacagacaatttttccctttatttaaataccccggggaccttatttttg

SEQ ID NO: 71986 - DNA, 1358 bp, Glycine max
  unsure (1)..(1358): unsure at all n locations
  Clone ID: PAT_MRT3847_36015C.1
ggacgctacanacatgccggcanactangactctatctttaagggtgtttcaacagggacgatctcgtactctagctcgagccgccaaaagatgcatgctaatcattttcttgtcactaattacctcaagaacaaactgaagttcaggggttttgtcatatcagattggctaggcattgacaagattacttctcctcctcattctaactattcatactctattcaagttggtgttggtgctggaattgatatgatcatggttccctttaatttcactgaattcattgatgtcctgacttatcaagtaaagaacaatattatcccagtaagtaggattgatgatgctgttaaaagaatcttaagagtaaaatttgtcatgggcctatttgagaatccacttgctgatctaagcctagtgaatcaacttggtagtgaggagcatagacagatagcaagggaagccgtaaggaaatcacttgtgttgctaaagaatggtaaatctgctgagaaacctctgcttccccttcccaagaaagctgcaaagatactggtggcaggaagtcatgctgacaatttgggttatcaatgtggaggatggacaattacctggcaggggcttggtggcaatgatctcacttcaggtacaaccatccttgatgctgtgaaacaaaccgttgatcctgccactgaagttgtcttcaatgaaaatcctgataagaactttgtcaagtcatacaaatttgactatgccattgttgttgtgggagaacacacttatgccgaaacatttggtgacagtttgaatctgactatggctgatcctggtccaagtaccatcaccaatgtgtgtggggctattcgatgcgtagttgttcttgtcactggccgcccagttgtgattaagccatatctacccaaaatcgatgcacttgtagctgcatggcttcctggcaccgaaggtcaaggtgtcgccgacgttctctacggcgactatgagttcactggcaagctggcaagaacatggttcaagacagttgaccagctcccaatgaatgttggtgataaacattatgatcctctatttccatttggatatgggttaactacaaacatcactaaatattgaaagtgaaacctcatgtaacatgtccaagagcacactaccttttttttccacttggagccttgaaattgtctattgatgagtgaattgttaatttatgctttcgtatatgtataactagcatcagaacccttcaaaatatcaattcattatccttaactagggcagacttttcattttgttgactattgttaaccctgttgctttttgcttctcttatgcccacaaattaaaa

SEQ ID NO: 71987 - DNA, 748 bp, Glycine max
  Clone ID: PAT_MRT3847_36016C.1
aaaaacccagcttgcccccaaattggcaccttgtttaaaggcccacccactaataggtttaacccctccagcggacttataagcttaggggtggaagcagaagagagcatgcccaactcaaaagaggcctccaaaatacttgatcagcttgagggagagatgatatcagaacgccacgaattgaagcccctcctacacctagtgtggatagcagcatgacaccaccccccatcatatgaggaagtaaatggtgtatatgcttctcaagcacataatggctcaacagatagtatgggttacttcttaggagaggtgttatttccctaccatgctgagtctgaagttgaattgaatctatccgttggagattatattgtcattcgaaaggtgacaaacaatggatgggctgagggtgaatgcaaagggaaagcaggttggtttccatttggttacattgaaagaagggagcgagtcctcgcaagcaaggtggctgaagtgttttgaatgtttctgtttggttgagttggtggtttcctgcctcagggattatgtatgtgcgtatgttttggttttgtgcttaatggataacgtgtgcttatgcttagcatacaacaatcgatttgtgatatatagatgacatgttttttcttttcttgtgattatcgatcgctttaagattctcttttgtattagaatgataataggtatggtttagttaaaagtattacatatttatattcaccgtgtt

SEQ ID NO: 71988 - DNA, 280 bp, Glycine max
  unsure (1)..(280): unsure at all n locations
  Clone ID: PAT_MRT3847_36017C.1
gggggttaattttttgttttaatttaaactgattttttttaataaatttgtgttttattaaaanttganagatttttaaaataaccgtttctacttaagaaaatctaacatcttttaaaatattttttagaaccaaaaaagttgcattttgtttcttcagaaatataacaaacgctccccacaacttgataacattttagactaccggattgttcagtttcagtcaaaaaccaacacaattcttttttcctcaccatgctgacgccgattttcttctttt

SEQ ID NO: 71989 - DNA, 2306 bp, Glycine max
  Clone ID: PAT_MRT3847_36018C.1
ccacgcgtccgatttttcctacgagaaaatagaacttcaacgtctgacgtgtcaccctgtcgttgctccttccttcttttttttcctcacaacaatcacaagaagcactttcggagtctgagctttcacttcttccaacttcttcatctatctatatacttctcttgtaacctctcatctttacaataacactttttccctcagaaattaaccgtttttcctttctgggttttgtataattttgttgattttccattccttctatttttttgctgctgctaagtagcagtggtatgtatgacttatgagctttgagcctctttatattttgaaaagaagattggaattttttttttcttcttttgggaaaggcttctagtggttggatttttgtccatcaagttattgatcgaggagggggttatcacttatcaacctttggtagtgcgtgatcacgggatcttgtagatgatggagagggttttttgtgctttgtgattctgagatgtgaattaatggttggtgaagtaaagaatcaaggcagagtttgcatgataaatttgacttttggatcgaggtgggtccatttttgtacacaatttgttgtttgattctgtttccagctttctaagggagagatgggaggagggtggaacttgtgattttcttgtttgtgttggacttttcttgatttcggaattcgtatccagaagcagagagagaggtggacagatgaagaacataagaagttccttgaagccttaaagctatatggcagggcctggcgacggattgaagaacatgttggcacaaagactgctgttcagattcgaagtcatgctcagaagtttttttctaagattcttcgagagtctagtgggaacagtacaaccttggaggagtcaattgaaattccacctccgcgaccaaaacggaagccaattcatccttaccctcgtaagctagttgagtttccaaagacaggaatttccaactcagaacacccactgaggtctaattctctgaagtcatcagattttggtcaagaaaacaattctcccaagtcagttttatctacagttgtttcagaaactgttggttcctccgattcagatacatctagtcgatgtttgtcaccagcctcatccattagtggtgtccccacaaacagatttccacttgctgagcccaaaacatcatttaaggaagaagggtctgcaccaagttcagctcatgatgagcaacctcctgtgaaactggagttttttcacaaagaaagtgtttctaccagagatgatgcaacagaagaatcatctggtcgtactctcaaactttttgggaccactctactggtaacagacacatgcaaaccttcttctccaacaacggagccgtgcaaaccaacacctgcggctgcaatgtatcttatgcaacttcagaatgtttgttcagatgttacagaaggtcatgcttctattgttccttggtggactcttccccacaatactccatttatgccactgcacaaggagccaaaagggaagcatctatattctaatcttggagagtttgaacataaagaagttcaaaaggaaggatcatggactggttcaaacactagttcaattgatgatggagataacactgaaaaatcagatgatcaagccaaaagtcatgtacatggttttagcaaaagtgaaactttaactatatctgagctaagggtgaggcctaaaacatgtggaaaagggtttgtaccatataaaaggtgcatggcagagagggaaaaccagtgctcatcagtatattatgaggaaagggaagagcaacgtattaagctttccttatagtaccctcttattggcttttcttcaaagcagtttcccttttacaggtataatgtacctgtttctgttgctggatgaccttgcatgagaagaaagataagggagctgaaatttttgatatttctactgcattgttaattctccacaagcctgtgtgttaacctatatgagcttcaagactttgggagaaacactatccagtgaattatcccacctttttatatttcttcatgcctaggccttttgtatttcttcaaattctttctcccaccctccactcggatatatctagtgctttttttctttttaattctaattgtctttcaagtgtaagttacatacttatgtatcgcttattagtgtagttgttcatatttctcaaatgaagcaaattattatactcaaatcagctgaagttgaataaaattgtacttagtactccttccttttgcgacatta

SEQ ID NO: 71990 - DNA, 673 bp, Glycine max
  unsure (1)..(673): unsure at all n locations
  Clone ID: PAT_MRT3847_36019C.1
ccacgcgtccggtttgactcaactttttttttaaagataaaacttaaaataagaatttaataaataaaaagtacaagttgtttgccatttttttaaaaacttaaaactccttatgaattaaaagttatttcgacgtaaaaaaagttatttttttaaaatatttaaggctttgatttaaaattaattcttttgtccaataaaaaagtatatgtaaaacgtaacttaatttcataaaattactttaatgataataaaaaataattagcctacaaatatttaaaattttaatttttaaaatatcaaaatttactttagtaaataaaattttatcttaacggtttttttagaaataataaaaatctcaagtaggaatttggttaagaaaaacactggtggaatattgaaacagtaaattgnggtgttttaacttacgagaacgaaacttaataggaaaaaaaaaacatgcatgtgttttaaaaattttaaaagccatttttttttctgcaaagtttttaaaagtcattaaaaacataaataaaagttggaaatcgagggccgtcctccgaaagaagttagcgaaaagataagaaaaagctagtcaagataacttaatttaagacagcagaaattaagctgtatattgaattaatttttaacacaaagctattattta

SEQ ID NO: 71991 - DNA, 309 bp, Glycine max
  Clone ID: PAT_MRT3847_3601C.1
cgcacacaaagccatttccttattcatatctctgatggcttcattcacctatccattgttctatgctccttcatcgataataagccatggccttcacttccactctctctctctactctcacccgcaggttcgcctccgctgccagcggctgcaatcgctggccttcaccgccgccggcgtcgctcaatttgcgccgcttccgcctctgaactgccggagaacgtgttctccgagaagcttcgtggttagggcttcttcgagcgtggaaggaagtcgcgcgcgtgcccggggttctcgcagagtctatc

SEQ ID NO: 71992 - DNA, 245 bp, Glycine max
  Clone ID: PAT_MRT3847_36020C.1
ctgagcgtgtcagatctcctggagtttattagtcccgacccaaaaggaaacgatgctcggagcaaacagaggcgtgcaaagatactctcaacaagtgatgacaacagtcaagaacatgacgatgcaatagccaatgagagcattctttttgataactcaaaagatgctccaagtatgacagaagtcaagatagaagaaacaaatggcaaacttgattctcaagtacagaaagaaaatggtgattt

SEQ ID NO: 71993 - DNA, 868 bp, Glycine max
  Clone ID: PAT_MRT3847_36021C.1
aattcggctcgagcacacttttcctcagttaacccaacaatggcaggaaataagaagagccttgacacatttgcatgccaagcaatgtttggaattcttcagttgcaagcagagatgcatgaagttgtggactcaatggtccaaaagctacaaagttggagccagaactcaaatgggaagttcattgcagtggacttgagaactgagatggtgggaaaggagtgtcacaaaaaagatgtctcaggaagaaaactttgttaccagccacatgagataggtgaattcctcaagaagattggattcagtcctgagactactgttgtttatgtgactcaaaccaaatggaattctgatcttgatgcactaaaagatatcttcccaaaaacttataccaaggaaactgtgatggcagaagacaagaagggaaagtttctcagatcaaaaagctctgaatttgagaaggtcattgatttctacatatgttccaaaagtgaagtcttcgtgccctctattcctggcctcttctatgctaatgtcgctgggatgagtttgtgccctcggttcctcccctctcctgtgcttgtggtgctgggtggtccatcggatccagcctctgccagcttctcgtccctgctgtcccatcaagtccatctgcttcagcctcgcttttcttttctccccccggggctcagaagaaccattttgcttatgcatgcttttgttaaactacccctgttctctatgtttggttatgcaagaaccaactagagcattctgttcaagatggcaacagtggttataggtaaaataaaaagtgtgtagcaatatttttccatctcgtgagaaagttatcatgtgttagttgtga

SEQ ID NO: 71994 - DNA, 967 bp, Glycine max
  Clone ID: PAT_MRT3847_36022C.1
gttggctatggctgatgtttatgtgaagtggcttgagacaatggagagtgtggctagggatggagagtgtgcgggagagattgtgctgaatgggggagattgtgctgaaagggagtgcaatcatgatggggtatttcaaagatcatgaggcaacttcaaaggccttttttgggagtaataatagtaagggtgattggttcagaactggggatgttggagtgattcaccctgatgggtatttggagattaaggataggtccaaagatgtgatcatttcaggaggggagaatattagtagtgttgaagttgagtctcttttgtataggcatcctagggtgttggaggctgctgtggtggcaatgccacatcctaggtggggtgaaagtccttgtgcttttgtgtcattgaggaagaacaacaacaacaacaactcatcaaaaaaaattgatcatgtcactgaggctgagataattgcatattgcaggaagaatttgccacactttatggtgcctaaggtggtgaagttcatggaggagctgccaaagacttcaactgggaagattcagaaatttgaattgagggtcatggctaaggttactccaagaagtcttgccaagtgagtcaaaatagtattgttggggggtacaataatgagcaagttttggctgcgtctcgtctttgaattaattaagtgttcagatctatttagcaatgatctttgagtctttgtttatttggataaatgtgtgtacatatactagttctaagtatcagcgtcttgtttttggaaaaaaaatggataaatgtgtgtacatatacttaagtatctaaatggctataacttcgagtgttccgacgcattaatgtagtttctacttgctagtagtttgaactactggagcttgttttgggggcaagtgccacatgtataagtgccttctttctatttttcaaaaaaaaaaaaaaa

SEQ ID NO: 71995 - DNA, 538 bp, Glycine max
  Clone ID: PAT_MRT3847_36023C.1
gattactttgcttactaacttgaatgctggcaagaagcggttgtgtagagttgtgagggatgatcctctggtaatgaagagttgggctctgggaaggaggattcagcctttcgtgaactcatatttggagtatgaatcaaaggagcagaagaagaagttcatgctcaagttggggtatgtggagaactcaaagaagatgaatgagacgattaggttgttcagaggtaagggagctgagcttgaggagagacttgattttattgttaaggctgggttggattatgaggttgtctgtaagatgattcgagattccccgcggattcttaatcagacaaccgataggatcaacatgaaaattgagaatcttgtgagtttaggatattctatatcggatttagctagttttccttcatttctttcctattcacctcgaagggttaagcttcggtttttgatgtatgattggctcaaagagcatggagctgtagaagcggggcttgctttgagcactataattgcatgctctgataaagcgttt

SEQ ID NO: 71996 - DNA, 356 bp, Glycine max
  Clone ID: PAT_MRT3847_36024C.1
tccagcggctcgagcgagaagacgacagactggctcgaaggtggagggatctggcagataagcatctccgggggaaggggatattatggatggtcatatatatactacacattcacggtaagtgacctccttactgagtggtttcgctgcgcatgatcgcaagaattatcatctgatcgtctaaaacaataatgccacatgtttactttagataggcaagcatactgcatttacatcttgtagatcatgactgaacatagcggtgcagcatcctgtgaatactatctttgtgatctacataaatcatcagacattgaatgttccgacccaacaatgtcattacttagccaataacg

SEQ ID NO: 71997 - DNA, 376 bp, Glycine max
  unsure (1)..(376): unsure at all n locations
  Clone ID: PAT_MRT3847_36025C.1
gcggagccccagagaggccgcgtcccaccccagataaaaacacccaccgggggaaaaaaacaccgggggacaaaaacagacgagaccgccaagacccgacccnggaagaacaccaccagacaacaagaacaggcaaacagcaagacaccaacaaagcaaaggaaggcaaaccgcaacccggacccaacaagagcagaccaaagaaacacaaagagacacaaaacgacccaacacgacagtggcgggcgcaaccacaggaaaacacggcggcgccagcgggaaaaaagaaaaacaaagccccaagggggaaacaggagcaagacaaccaaccgcacacaccccgccaagagcgcgggggcaccaaaaaaaccccacc

SEQ ID NO: 71998 - DNA, 1378 bp, Glycine max
  Clone ID: PAT_MRT3847_36026C.1
cacaagtgtagtcccctacctcccaagctccctagcaccatatgctaaggtcgttaacaacttcaatgggaattgtatcagtagcaccaactcagactgtggtgtatttggtccctcggtatcctccatcaatctccacatatatctatgcttcttctcttaccaaggctaagaccattcatcaacccacacaatcttatgttcactccaaatcagtagaaactgcaatagagagtacatcacagttggtgccattcccattgttgacgaatgggaattacacagcatgcaccattccttggaggttcccttcagacgatccaagcattcccactcccaccgagctatcttggattaatctcctcctcaatactatccccaccttcaagaagcatgctgagaatgatacttctgttcctgatgctgcaaataaagctgaaaattttgctcaaaggtatgctagaatacttgaagatttcaagaaagatcctgcaagtcaaggcaggcctcttgatatccttattctatgcagacttcgtgagcaagtccttagagaacagggattcagagatatcttcaagaaaataaaggatgtagagaatgcaaatgccatatccctatttcagaatgttgttcatcttaatgatgccattgaagatgaagggaaacgactggagaatttggttagaggaatttttgcagggaacatatttgatcttggtgctacacagcttgcagaggttttctcaagggatggagtatctttttcgactacttgtcaaaatcttgtccctcgaccctggattattgatgaccttgaaactttcagaatagcatggagcaagaagtcctggaagaaggtaatcatatttgtggataactctggtgcagatgtcattttgggtattctgccatttgcaagggagctccttcgacgtgggagtcaggttatattggctgctaatgacttaccttccatcaatgatgtgacttactctgacctaattgaaattataccaaagttaaaggatgaagaaggacgtctcacgggtgtcagtacttcaaatcttctaattgccaactccggaaatgatttacctgttattgatcttacaagggtgtcacaagaacttgcataccttgctaatgatgtagatcttgtcatcttagaagggatgggtcgtggaatagaaacaaatctttatgctcaatttaaatgtgattcccttaagattgggatggtaaaacatcctgaggttgcagaatttcttgggtcacgtttgtatgactgcgtgatcaaatacgatgaagtttagagcttataattaagttgactctttactttgataaatacctaacactacatttgcaatttcaa

SEQ ID NO: 71999 - DNA, 1382 bp, Glycine max
  Clone ID: PAT_MRT3847_36027C.1
cccacgcgtccgacggctgcgagagacgacagaagggggaaagttgatctcactaagcaatgggtagtatatcacagccccagctggtgccatttccgttattgatgaatgggaattacacagcaagcaccattccttggaggctcccttccgacgatccaagcattcccacacccatcgagctatcttggcttaatctcttcctcaacacaatccccaccttcaagaagcatgctgagagtgatacttctgttcctgatgctgtgaataaagctgaagaatttgctcaaaggtttgctagaataattgaagatttcaagaaagatcctgcaagtcaaggcgtgcctcttgatgtccttcttccatgcagacttcgtgagcaagtccttaaagaactgggattcagagatatctttaagaaaataaaggatgtagagaatgcaaatgccatatccctatttgagaatgttgttcgtcttaatgatgccattgaagatgaagggaaacgactagagaatttagttagaggaatttttgcagggaacatatttgatcttggtgcttcacagcttgcagaggttttctctagggatggaatgtctttttcggttacttgtcaaaatcttgtccctcgaccttgggttatagatgatcttgaaactttcaaaatgaaatggagcaagaagtcctggaagaaggtaatcatatttgttgataactctggtgcagatatcattttgggtattctgccatttgcaagggagctacttcggcatgggagtcaggttatattggctgctaatgacttaccttccctcaatgatgtgacttatgctgagctacttgaaattatatcaaagttaaaggatgaagaaggatgtctcatgggtgtcagtacttcaaatcttataattgccaactctggaaatgatttacctgttattgatcttacaagggtgtcacaggaacttgcataccttgccaatgatgcagatcttgtcatcttagaagggatgggtcgtggaatagaaacaaatctctatgctcaatttaaatgtgattccctcaagatagctatggtaaaacatcctgaagttgcggaatttcttgggtcacgtttgtatgattgcgtgatcaaatatgatgaactttagagcttaaaattaaggctgattctttactttgataaatacctaacactacatttgcaattagtccaggcttattgtttcaactgcatatgcttccaactttccaagtaatcaaaattcaaaaacttaatttctcaattcttacaatgactatttgctccaacgtttataaaactttagagttcacgaagttatagagattgttgagttcaaaaaaaaaaaaaaataaaa

SEQ ID NO: 72000 - DNA, 465 bp, Glycine max
  Clone ID: PAT_MRT3847_36028C.1
ggatccacccacattccaaatatctaatcaaaaaaaaatcatcagggctttgaagggggaaattttaacttaaaaaccattcaaaagggccacagcacatatctacattggcgggacaaaagagatctccctcaaaaaaaaaaaaaaaaaccataatggccctcatcactaccctacgggttaaaaaaaaaaaaccccccctcatcatccaaaagggcccccccggaatcattaaaatttttcactgcttccaaatccccatagttttcacatagccccgaatagcccccactttctaccttggatcccccaaacggggatcctaaccccaaagcagcaaggctgttggcaaaagcataaaaatctctggtcccggggtaaaaaccacgactgccacccacaaggatgttgtttggctttccgccgggattagtaaaaatggcgggcagagggcccctcatcatc

SEQ ID NO: 72001 - DNA, 254 bp, Glycine max
  Clone ID: PAT_MRT3847_36029C.1
tctcgcgccgattcggctctaggatagctgcagtttatgtagaaaccattcaaggagaagatggaatttacagtgccacaacagaatttctacagtctctgcatagtgcttgttatgaagctggggctcttctcgctctcgatgaggttcaatgtggtttaggtagatcagggttactttgggcccatgaggcatttggtgtcttcccggatatgatgacccttgcaaagcctcttgctggaggcctacctatt

SEQ ID NO: 72002 - DNA, 460 bp, Glycine max
  Clone ID: PAT_MRT3847_3602C.1
caaccacaacaagaaaaaggtaatccttttttcccctccaatccaaatcatatgtgtctatctatcagatctaaatagataaattgctgctttctatgtccttttatgttctacctagctagccaaaaaaactttagccaaatattgttagattcagtttttttttctacttattattattatttggtcttggtgctttttgaaataagatgaagtacttagatttaaagtattttcaacatttaccttatgtacttataaggagctagcaacaaatactttgcatttatgccaccaaacattagatcagctagaatgggagttgttctagctaaatctgtgatcaagttaatttgagtctaataaatacagttgctataatagttgatttagaaaattttgttatttttagtcgtctcacatatttaaactagaagatatcgagtgatcaaatccaaat

SEQ ID NO: 72003 - DNA, 243 bp, Glycine max
  Clone ID: PAT_MRT3847_36030C.1
attggtccaagtatggcactggcatttcgagaaagagcatcaagacgccttactagatggagctgaattactatagttatcatgcacgaatggctatcttgcgagctgcatgcgtacctgtgcagtgcctttcgattgttaactcagaaaacaaggtaataacaaattggaccaagatttttagagggaagaaacaccactagctagcaacactctttctttctttaagctgggaattgaaac

SEQ ID NO: 72004 - DNA, 509 bp, Glycine max
  Clone ID: PAT_MRT3847_36031C.1
ccttgattttttttctgtctatctgtctgttccttccatacatacacccaaaaaaaatattggtaccttttaacatttttcaaacaacacaccccacaaacaccaaaatttaatttaaaaaacaaaaatcagaaactaaaatccagacaaggacgaagtgttgcagaatcgaatcttcccgccaacaaaaaactaacaaactaacaatattaacatttgttgataaaaaaaaaggacgaagtgtgctgcacatctcagccagtgagagtagtttaagtcaatacttccacagctctacattttgtgacactggcaacaaattcagttatgaacaattgttaataaacatgtaatcatccaatcacaagtagacatgataaatttgttaatttttattataatttgtttaaaagtcataataaaaataattgttgattaattcactgcatattaaactcaacacttactaaaacttcgctatactggatctctaacgtaataactacttt

SEQ ID NO: 72005 - DNA, 362 bp, Glycine max
  Clone ID: PAT_MRT3847_36032C.1
aaaaacttcatttcttcccttctacaattttgataaacacacacatccatacatactaggtgtttccaataagaatgagcggtgtctattacacccaaactcactacactaaatgcatcatatagcagctttctcttaaacacacaacaatatcccccatcttataccatctcctaaatattccgccaaaacaacaaaagaatccatccatagcgaacaatataaatcatactcctaaacaaccaaccaacaaactcacttttatgccaaagacctcccactccattccaaaaacacatttttattctatatagaaagcaccggactctttaatatttcaaataaacttattaagaaccaaa

SEQ ID NO: 72006 - DNA, 246 bp, Glycine max
  unsure (1)..(246): unsure at all n locations
  Clone ID: PAT_MRT3847_36033C.1
gacatcnncnacaatcactgccctggtctgcanagaaacagccaattgattnatattnggttggttttggtatcagctgctgtaatgttgntctttgatcttttggntcatctntgcaagagnacggcggcaccgcgttnatactagacagnttcattgnaggcnanatgtntngngacntaanctacattangtacattntngttctcaggnacatctgtgttatagaggtatnccagggntggg

SEQ ID NO: 72007 - DNA, 310 bp, Glycine max
  Clone ID: PAT_MRT3847_36034C.1
gaaaagcgtaaggacatgaaagagaaagctttgcaatggacggaattgacaaaaggtgctggttttacacctgtcggatcttcattagctaatacgtataacatatttcatgatgtatttctagtcaaaaatgttaactattcgaatcagaagaactcacatattttaacttactctataattatgtgaatactcatttttttaataaccttaccttcatccgacatgaaatgtaccacataccagcttatcatatgcataatctactaaatctttacacattcgttctaaaagatccaatcttacatac

SEQ ID NO: 72008 - DNA, 291 bp, Glycine max
  Clone ID: PAT_MRT3847_36035C.1
ggctcgagctaccacacaaaatgaaccttcgaaagtatgaaaacaaggatgcttcttgcccgaaacgtctgcccgtctacctgccgacctgtacgaaaccgagcctcaaccttattgaatatagaggagagcctcttcttctggctcattaagccctctcctggatctaccaataatataaatgcgactgttctggaattaggtccttatatatttgatttcctaaatatagggttggtcctcttggcggagaagttttatcataccctgtataaggtaacggtgttcaaa

SEQ ID NO: 72009 - DNA, 551 bp, Glycine max
  unsure (1)..(551): unsure at all n locations
  Clone ID: PAT_MRT3847_36036C.1
actaacagctcgccggccaaccaactggcgagtagcgatccggccttggcaataccggcggtttcgccaaggcgttcaacgagccattcgcacaacccggaaaaactgccgttctcctgcaagcgcaacagcgcctggtgttccagtgcctcgacaggtcgcaggcgcaccaccctctgccgacgccagatcagcaggcccgccgtctcagtcaagcgctcgggcgcgggtagcggcagcccttcgctgaggcccgaccagatcggctcggcgttgctggccagggcaccagttctgagggacgctgtaaatctcangcaggccgtctcccaatccatgctcgccagcacagccatgggcagcggctcggcatcggcggccacgaacgactcatcgagtgcccgctcgatccaggccagctcgtgcacctcggngctgtcgggaaacaacgtcgccagggtcgcggcgaatccttgcgggtaggcatccagggtccaggcatggggcggatgctgatcgatatgggtgacggcggcggtaaaaaaagcctc

SEQ ID NO: 72010 - DNA, 765 bp, Glycine max
  unsure (1)..(765): unsure at all n locations
  Clone ID: PAT_MRT3847_36037C.1
ctagcttgctgcctgcggttctgtacaacctctgctgtcctttcagctggtttaggtacaggttcagttgtttgagtgttatggttctggtctggtaaggtttgttcaagtttgtgcagaagtagtgcaagttcggttatctcaagagccaaaggttggtattctgagttttcagttggataggtgtttggttgctccccctgaatgccaactttggggtaatagtgctgattttcaaagaaggttacatccctagtgtggtaaaattttttagtatggggagagtaacacctgtatccttttttatgaggagagtaaccaacaaatatgcatttgatggattttgggtccaatttgctacgatgagggtttaggttgtggacaaaagctgaacatccaaagatttttaatggaatggaagaaaatattttgttggttgggaagaaggtttgaagtgtggagaaagggatcttaaagtcaaggatataggaagacattctatttgaggtaagttgctgaaaggacggcttctccccaaaattgttttggaacattggaggctagcatgattgctctagtcacttccagaaggtgtttattcttttgttccacaaccccattatgttggggggtgttcacacaagaactttggtgaacaattccaaccttttgaagatacgaatttagagcaaggttgtaacactcacgaccattgtcagttntgagtacctgaatcctgctttgaaattgtgtttgcacactatt

SEQ ID NO: 72011 - DNA, 409 bp, Glycine max
  unsure (1)..(409): unsure at all n locations
  Clone ID: PAT_MRT3847_36038C.1
ggtctctgaagactgaagctctgacaaaaaaaaacaaaaaaggcttaccttagcgtgttatttgtttgacccggataagtgtgtgttcttatgaaggttgcagtgctatggagtctatagatttcatgctgcagcttcattagataccaattttggtgaatcatcttgatagcttgttcttggatttttgttttggggtgttgatgaagatgtttatgggtggccaaattttcggtgctggtgttattattggtagtttctttctgctgatcctctgtggcatggtttgtgggactgacagtgatatattctgcttgaaaagtgtaaagagaacacttgacgaccnctacaattatttgcaatcctggaatttcaataacaatacagaagggtatatatgcaagtttac

SEQ ID NO: 72012 - DNA, 1157 bp, Glycine max
  Clone ID: PAT_MRT3847_36039C.1
atttctgattctctttctcccttggtctaggcttcctttgttatgccttgccctttccttcgggcaaagtggtgtttccatgttgtttctgagtttacttcctcaatatcccaggggggaggatatgtgtgtgttcttatgaaggttgcagtgctaaggagtctatagattttatgctgcagcttcattagataccaattttggtgaatttttcttgataacttgttcttggatttttgttttgtggtgttgatgaagatggctatgggtggcctaatttccggtgctggtgttattattgttagtttctttctgctgattctctgtggcatggtttgtgggactgagagtgatttattctgcttgaaaagtgtaaagagtgcacttgaggacccctacaattatttgcaatcttggaatttcaataacaataccgaagggtatatatgcaagtttattggggttgagtgttggcaccctgatgagaacaaggtcttgaatctcaaactttccaacatgggactcaagggcccgttccctcgcggcattccgagccgctcaagcttaactggattagacctttcaattaacaaactctctggaaccattccgggagacatatccactcttataccatttgcgacgtctattgatctatctacaaatgagttttctggggcaattcccgtgagtcttgcgaattgtacctttcttaatacccttaaacttgatcagaatcgactcactggccaaattcctccacaatttggtgttctctcacgaattaaggtattttctgtatccaacaatcttttgacggggcaagttccaatctttagggatggggttgagttacattatgcaaataatcaaggcctatgtggaggaaatacattggcgccttgccaagccacgccttccaagagtaacatggctgttattgctggagctgctgctggcggggtgactcttgcggcattaggattgggtattggaatgttcttctttgtgcgacgcgtttctttcaagaagaaggaagaggatcctgaaggaaacaaatgggctagaagtctaaaaggaactaaacgaattaagggttctatgtttgagaaatcaatttcaacatgaaattgagtgatctcatgaaggctactaac

SEQ ID NO: 72013 - DNA, 482 bp, Glycine max
  Clone ID: PAT_MRT3847_3603C.1
gctcagaccttggttgagttctttccatttgtttctctcgtgtatcgtgctgtgctttattctctgcctctctcaatcgttctacttcgcttcgctctctcactctctctgtttgattcttctccctgatttcgctgtaaatagctgaatctagcttctctcaatatctaagcagcagtataattgtagtgagtgagatggatcattatggttcttctggaggaagctggacgatgatcccaacccacaattcaagtattcaatcccaatcccaatcgaaccaggaccctaacctctttcttcaacaacaacaacaacagtttctccagtcacaaccttttcagcaagcactaccaccccaatctccatttcaacagcaccaccacctttatcagcagcagcaacaacaacaacaacagcagcgtcttctaccgcaaccgcaacagcaacagcaacagcagcaacaacaacaacagccgcag

SEQ ID NO: 72014 - DNA, 2651 bp, Glycine max
  Clone ID: PAT_MRT3847_36040C.1
atcaggttccctaagtcttcgtattgctccatagtctagtcgtctctgaagactgaagctctcacaaaaaaaaacaaaaaaggcttaccttagcgtgttatttgtttgacccggtgaatatctttctcttatgtgtgttctcatcacaattcatgaaacacgctctcttttttcccatcatcattatttctttgtgattctctctctctacactatccttgctctagtcttccttttctatgccttgccctttcttcgggcaaagttgtgtttccattttgtttccgagttgacttgctcaatatcccaggatatgtgtgtgttcttatgaaggttgcagtgctatggagtctatagattttatgctgcagcttcattagataccaattttggtgaattattcttgatagcttgttcttggatttttgttttggggtgttgatgaagatgtttatgggtggcctaattttcggtgctggtgttattattgttagtttctttctgctgatcctctgtggcatggtttgtgggactgacagtgatatattctgcttgaaaagtgtaaagagaacacttgacgacccctacaattatttgcaatcctggaatttcaataacaatacagaagggtatatatgcaagtttactggggttgagtgttggcaccctgatgaaaacaaggtcttgaatctcaaactgtcaaacatgggactcaagggccccttccctcgcggcattcagaattgttcaagcatgacaggattagatttttcgcttaacagactctctaaaaccattccggccgatatatccacacttcttacatttgtgacaacccttgatctttcttcaaatgattttacaggggagatacctgcatccctttcaaattgtacctatcttaatacaattagacttgaccaaaaccaactcactggtcaaattcctgctaacttgagtcagctcccgcggcttaagttgtttagtgttgccaataatcttttgacagggcaagttccaatctttgcaaatggtgtagctagtgccaatagttatgcaaataattcaggtctgtgtggtaaacccttattggatgcttgccaggccgaggcttcgaagagtaacacagctgttatagctggagcagctgttggtactgctgcgagaagacgacataaggtgggcattggaatgttcttctacgtgcgccgtatttcttataggaagaaggaagaggaccctgaaggaaacaagtgggcaagaagtctaaagggaactaaaaaaataaaggtttctatgcttgagaagtcaatttcaaaaatgaacttgaatgatctcatgaaggctactgataacttcagcaaaagcaatattattgggactggaagatcaggaattgtttacaaagctgtccttcatgatggcacatcactcatggtcaagagattgcaggaatctcaatattcagagaaagaatttctgtctgagatgaatatactagggtctgtcaaacatcgtaacttggttcctcttttaggtttttgtgtggctaaaaaggagaggcttttggtctataaaaatatgccaaatggtaccctccatgatcaactacatcctgatgctggtgcatgcaccatggattggcctctaaggctcaaaattgcaattggagcggccaaaggattagcatggcttcatcatagctgcaatccccgcattatccaccgaaacataagctctaagtgcatcttgttggatgctgattttgagcccacaatttctgattttggccttgctagattgatgaacccgattgatacacatttgagtacttttgtgaatggggagtttggggatttaggttatgttgctcctgaatatacaaaaactttggtggctactcctaaaggggatatttatagcttcgggaccgtgcttcttgaattggtgacaggtgaaagacctacccatgtggctaaagctccagaaacttttaaaggaaatttggtagagtggattcaacagcaatctagcaatgcaaaactccatgaagtcattgatgaatcactagttgggaagggtgtagaccaggagcttttccaatttctgaaggttgcaagcaactgtgttacagcaatgccaaaggagaggcctaccatgtttgaagtataccagtttctaaaagccattgggattaattacaatttcacaattgaggatgagatcatgctccctatagacactggtgatgctgataacttagaagaacttattgtagctcgagagggacataattgaaaaggtatgcgagatataattagggcatgtaatcaattttaatatgtaagtatctcttgccttgtggtcctaaaataaatgttagtgctatatataggttttatggtccagatccatttgtgtgctatcaatattgaaacatcaatttaatatcatcaaccatgaatgcccattatatataggtgactttgttataatccctattttgctctaatttccttgttctctcccttgagtgctgttttgggggtggtggttctgtcccttttgaggtgctatcaatattgaaacatcaatttaatatcatcaaccatgaaagcaattatatataggtgactttgttacaaaaaaaa

SEQ ID NO: 72015 - DNA, 195 bp, Glycine max
  unsure (1)..(195): unsure at all n locations
  Clone ID: PAT_MRT3847_36041C.1
tcgcangcncgcgtacgtnagctcggcnttcggctcgagncnnttctttgncttcncgnntgtctcancccgnctcgttggtggctgngattgnggtgnanacctctgctgntcncttttacgncaccttgnngggtangananagcatcgtnttcatgatgntgnccctcntcatntgccataaggtggaagtn

SEQ ID NO: 72016 - DNA, 336 bp, Glycine max
  Clone ID: PAT_MRT3847_36042C.1
ggggacataaatccaaaaacattttttaaataataaaacttcctactaaaaaaaaaaggcccccgggtggcacataaagattttatgacacacatacattggataaagatcccgtaaaatttgtcccctacaaatggcactttaactaagctaatttttgccccccctcaattggtcaaaaatttaatcatagggattcctaaaatttttcaaaaaattaggaatgtcgtaagctaacatgtcatcaacgggttggggcatttttgggttcaatttttcaaacttatcaatttttgaacccctcaatttttttttgaaaaacttttcatttggaaa

SEQ ID NO: 72017 - DNA, 1255 bp, Glycine max
  unsure (1)..(1255): unsure at all n locations
  Clone ID: PAT_MRT3847_36043C.1
ccacgcgtccgcccacgcgtccggnngctgcgaaaaacctaacgctgaaacgaaacagatagctgcttctttctctcacgcaaccgtcgtcgttcatcaatggctacactcaacctctcttcgttgcaagctctcgccttccatcgtttatcctcttcttttccccaaagtacccctaccctttccttcaatttccaaccaaaacccttcgctaacccgcgcccaatttctctgaaaccctacgtttccgagaaacctcgcgcgcgcgtggtggcgctggccgtgaagagcctcggcgaaacggaggcggtggcggtgtcgccggaagatggccaatccgccggagaactgccgtcgggatccggcgtctacgccgtgtacgacacgaacggcgacgttcagttcatcggtttgtcgcggaacattgccgcgagcgttgccgcgcactggaaatcggtgccggagctttgcggttccgtcaaggctggggtagtggatgaaccagacagagaaactctaacccaagcatggaagtcttggatggaagaatacataaaagttagtggaaaagttccacctggcaatgaatcaggaaatgccacttgggtcaggcagccacctaaacggaagcctgatcttcgattaacgcccggtcaccacatgcaattgaccgtccctcttgagaacctcattgatgcgttggtgaaagagaacaaggtagtggcattcattaagggccctagaagtgcaccattatgtggattctcacagagagtgatagccattcttgaaaatgaaggagtagattatgagagtgtaaatgtgctggatgaagagtataattacggattgagggaaacacttaaaaagtacagcaactggccaacattccctcagatttttgtggatggtgaactggttgggggttgtgatatattgacctccatgtatgagaaaggtgaactggctagcttgttcaaaaaataattgtgcaagttacctgcatttgagcattcttttgaacttgggggataggagtagaaagtgggagaggtaagggaagcgtgtaatgcaggttatttaaactctgttgtatgaattaatcttttagatccaaggggagaaaagaaacaaaagaaaaaattagttatgtatatttgatttttatcatagtacaaaatggttgtctttttcatttacggtttgtgcataaatttgatatgcattttatccaaaaaaaataattattttnaaa

SEQ ID NO: 72018 - DNA, 456 bp, Glycine max
  Clone ID: PAT_MRT3847_36044C.1
gttagaatatctaatacactaaactaaacattaatttgaagcaaaagtattactcatcattttcaacaattataaaatcatttaattatataatacaaaaattaacataattaatgagagtctacaaattttctctaaatttacattactataaaattgagaattcttgaacttataagcaatttaaaagtatgaagggaggaaaaaaaaagactaactagtagcagcatcaacaaattttccatcaaataagagttgggatgtgttctactttaactagtggtttaattggttcttcaatggcagcagcagtgctgaatttactgagccctgcaccaagagcaccacttccacttgaatatcagacaaaagggtcaatttattaaaataaaataagaccattaatgaaagctccaaagcctaaaaacaccaatcataaggcatgatcattcatca

SEQ ID NO: 72019 - DNA, 817 bp, Glycine max
  Clone ID: PAT_MRT3847_36045C.1
ttgatgctgaatcgctgctccatccatgtaaagttgcatttcttcgtaagggtgctgaacttccatcagggatttcttcatttgtgtgcaggggggtttacgacattgcaaacaggtgtttatggtggctaaatgatcaagattatattaatgattgtcaagaagaagtagatccactattatacagaacttgtgtaggaatgcatgcagcagtgcagccaggtggccgatctcttaagccactgagtcctccaacatcaacatcacagttaaaatctgtttcagatagtgtccagaacaatacttcttcctttccatctcacattaaggggaggaaaagggaaagggcagatcaaggctctgagcctgtcaagcgagaacgatcaattaaaactgaggatggagattctggtcatttcaggcatgataacattttgaagacagagattgctaaaattacagaaaagggagggcttgttgacaatgaaggagtggaaaaattagtgcagctgatggttcctgatagaaatgagaaaaagatagatttagctagccggtcattgcttgcagctgtcattgcagcaacagaaaaattagattgtcttagtcagtttgtgcagctgaggggtttgcctgtatttgatgaatggctccaagaggtccataaagggaagattggtgatggtgttgggtctagggatggtgataaatctgtcgaggaatttctcttgggattgcttcgggcacttgataagcttcctgtttaatcttcaagctttacaaacatgcaacattggaaaatctgtgaatcatttgc

SEQ ID NO: 72020 - DNA, 200 bp, Glycine max
  Clone ID: PAT_MRT3847_36046C.1
atatattaaatactttctttcctgctttctgtgtaatgtattacaagtggtgcaaagggacacacactgccactaccagccgtgaacaccctgaacctcacaatacaaaggtctcaggaaccgaaagcaaagaagaccacacgatacatcggatgcagaccggacgcgaggcccgacgcgtggcaccacccgggaaaccc

SEQ ID NO: 72021 - DNA, 716 bp, Glycine max
  Clone ID: PAT_MRT3847_36047C.1
aatttagttttccagcacattattttcagatgtgttccagatggcatatccagtttctccctttggggccaagatgttatttcaatttccttgaatagaatcgggcttctctccttgtctaaatctttgaatcaaacagatggacagtaatttattagcccccagctcatgtttgttatgtaacaaagtcagagaagcctgaggaacatatacttgtttccagcacttcggacagaacttttctttctcgggacttaagaatgaatttatcattgcagcccattattttcagaggtcattcagatggcatatccagtttctccgtttggggccaagatgttatttcaatttcccggaatagaatcgggcttctctccttgtctaaatctgccaatgaaacagatgggcagcatcacattagcccccagaaactatatatttctgataatggtcagagaagcttgtcagcgttatcaagtattagtatacttccattctctcgattgtttctcattggaaccgaagatggttatctgagaatctgttgttaaatatgcttcattgttttccttattttttatttttgtgaatggctgtgaagaatttatgtgtacattattataaattatatgaatcatccatggcgcccgggtcccatgttatagggacccacgacatagtagataatttaatgcatcattagttacataattatt

SEQ ID NO: 72022 - DNA, 379 bp, Glycine max
  Clone ID: PAT_MRT3847_36048C.1
gggcgaattgggtaccctcgaggccggccgggctagaatcctacaatagagaccgtccttcacatcatacttcactctatttagatcaaagcactgattattatgaagcccaagactcgaaagctgaggcgtgaagtatactatatgagtatagcccttccgattacacgtccttctgattccaatagctaagccatcgtaccgcacgcccttactctgatatcagtcacctctgacagctcatgtgctacaaatgaatccgaagggaaggatttcacaaatgaagtgctatacattgtcacctttactgcatctgaagctactgcttcctggaaagaccttacctctacatcaaacttgtccattgcccttctaactg

SEQ ID NO: 72023 - DNA, 1079 bp, Glycine max
  Clone ID: PAT_MRT3847_36049C.1
agcgcggggtggggctcgagtaatgcatcggatgacgatgattctagttacagaatttatacaattgactgggttgattgttgggcaggatataggggtttcacagattccaaagctggtgctagcctttgaagattatgcaaccactcctagggagtcagggaatcatgctgctgattttgaggatccctacataaagaagcttcatatgaggcttcaggcacttgaggctgatagggaatcaatgaggcaggcaatcatttcaatgcgcacggataaagcacaggtggtgttactgagggaaatatctcaacatttgtgcaaagagatgacaccaaaaaaaaaaagtagcaaggaaatccgttttttgcaggcaactctaactctatgctcttttcaatttttaagtggatctcatcaattgttttctggagaaagagagctcaccaaagcaagtatatgttcgggctaccgcttgagagtgtcggcttgctgatgctcctggacaagggaatgcatgcaaggccatggagatgcgtttcaagtacgcaagtgtgggattaactcttcaattccctagtcaaatgtgggagcaacaactgaattttagtaacactactacgatgagattttgatttttcccgcatggatcgttaaaattggtgtgttgtgcagtgttcttttattgatatttacgtgaaaaatgagtgtaatttgttggttgatttggtgaaacttggatatgatgtgacatacgagttttctcacttgtatggtttgttggagttcagtgcgaggtacatctttggacaaatcttgtatataacatattgctgcaagttttgtcacgctttatgcaatgtttatatccaaaatctcagttattactaactgcagctttgtgtagtatttgttgcccattcaaatgtacgtaccttcggcttccaaactcgcacattcaaatcttcagtgatgaagggatggtcgtgcatgttattataatcattagttcctttacattgattaaattcatgtatggtaatgtaaattcatttattaaattcatttgttttttatat

SEQ ID NO: 72024 - DNA, 207 bp, Glycine max
  unsure (1)..(207): unsure at all n locations
  Clone ID: PAT_MRT3847_3604C.1
angtnncangcacgngtacgtaagctcggaattcggctcgaggcctaagcttgattctatctatgtgtttgtcctcctcccagactccttcagattttgaataaggaacccagctgtgcctattgtctgacatctgaatagaatgaaccgcagccattgtagccagctagaggaaaacacatctgctaatcagtgcttctggacact

SEQ ID NO: 72025 - DNA, 628 bp, Glycine max
  Clone ID: PAT_MRT3847_36050C.1
ggggggcttgctttaatattttatgatcactgcaacctgatttggtctaccagctgctgcagcgtgacatactatttcatgttttttctgggatcaccggaatcagtcaagcaataggaataggttcaaatttgatacgctattaacataaagtagtaaatgctattatgttttttacacttatattctgttgaaaataatttgcaacacctgtgttgcttcacatcacatacatgatacactgaatgttttagccacatttttgctctagctttgacaataatgtagaatgagacagccaaaaaaaggaaaaaggaatcctcaggtttccaataagaacaatgaatacttcaaattgaaaaacacccgataatattttttaatttaatcacgataaaagtgatgaggtgaagtagtctaaaccccagttttttccatttcgcatacagctagaagtttgtcagtgtttgtaatgcagtccatgtaatggtttacaataagaattttacagaacttcctgattttggttaatgtgtattaattatcaggataagctaagcgagtcagcatgcaagattttaactgattatcaaactgccacagtgactcttttgacactattagcagc

SEQ ID NO: 72026 - DNA, 743 bp, Glycine max
  unsure (1)..(743): unsure at all n locations
  Clone ID: PAT_MRT3847_36051C.1
cttaactctcttcttcttcttcttcttcgcagttctctttcaatattggcatcctctctgtctttggtcacttggaagacaattatagagaccagcttaaggaaaactactgcatagtggagaaagggtacaattctttccctaacaggattcccggaactgtatactccaaagcactcttggcaaggaggagaatcagggagattataagtgagatcatttgtaaaagaaaggagcagagattgatggagatggatctattaggccacttgctgaactacaaggatgaaaaagaacaaacgctaagtgatgaccaaattgctgataatgtaattggggtactatttgcagctcaggatactacagcaagtgttctaacctggattctcaagtatcttcatgatgaccagaaacttcttgaagcaataaaagcagaccaaatggcagtatatgaagctaatgaaggagggaaaaagccattgacatggggtcagaccagaaatatgccaactactcatagggtgattttggaaagccttagaatgtcaagtatcatatcatttacttttagggaagctgtggttgatgtagtatacaaaggatatcttataccgaagggttggaaagtcatgccactgttcaggaacatccatcataatccagaaattcacccttctnctcacaattttgacccatcaaggtttgaggttgcttccaagcccaatacttttacaccatttggc

SEQ ID NO: 72027 - DNA, 344 bp, Glycine max
  Clone ID: PAT_MRT3847_36052C.1
ggatcccttgtattctattcttcgggattcacatggctcgtttcaagcacaacgctcttaagtccacaagaggatacgctctctacgaagcagcttgcaaccgaagctgcacgtatttctgcaacagctactggtggtgtgaagaccccccaccgttatcatcctgttaacgttgctcttcgtgtgattaagctgtacctgaagattaccgaccttttgatgcggaatctctccttccagtagctggttcttgaaattgctcatgacgtcacgactgatatgcgtttctagagtcacgccgtgcttgcattacaaggaactgctgtggctttccttgttaggct

SEQ ID NO: 72028 - DNA, 358 bp, Glycine max
  Clone ID: PAT_MRT3847_36053C.1
tatatacaatttttcacttctttttttacccgtgtagggggtgagggggacttttttctttcattacacccgtttctctttcttcgcaagacacaactctttggtataaaaaaacttctggggcaagcaataaagcgccagggaaactttttgcaatgttgggggggggtttttaaaccaggaggcattgccttctgtgggagggggggaggccctcatcggagagccaaggagtgtcctaaaccctttcggactgtgctgcctcgggaggctctttgtgttgaaccatacactgttttaaaaacttttctagggaagggccaccttgtaacaaagcttgttccgggggggggggggg

SEQ ID NO: 72029 - DNA, 204 bp, Glycine max
  Clone ID: PAT_MRT3847_36054C.1
ctcatgccggacgagccgcttcagtgcgctaatacacaagcgttcgttcatgagcatggtccagtagcctctaggttcccaatcaaggtgaattatctatatcctgggggtcgatgacctccagacgctagcgttgtagatgttacctgtggtagtggacgtggaggtagacccaccactgcttagaatcagactgcagttaac

SEQ ID NO: 72030 - DNA, 576 bp, Glycine max
  Clone ID: PAT_MRT3847_36055C.1
aaggaataatactatatatatatatatgcggcgggcgcgcaagctattcacaaaatggaaaacttggactatcaagcctaactattagcttgaatttaatttgtttgtttaactaaacaaacttcataagcacttaattcaactcatttacaatcctttgaaaagccatttaatacaaaacaccacttgtagccaaacaaggctttttgtaaaacaaacatgtagactaataagggagacttgattacaaagtaaatactcgtactctaaaataagggaggtaccagattgggaacttacctttttggtaagcttgaacgcccttgcccttccaacagcttgagttgaacttggatttggctcctctaaagggtggatcaagcactttaaaaaataaagtgtaataaagacattaattagaaaatcaacaatggatattataattaattttaggttttggcaaatatgtatttgattttatcacaattttcaaccatcgattttttaatcaatgattggaattgcactttatcctctaaagtacacctcacttcagaagaccaactacgtaaacct

SEQ ID NO: 72031 - DNA, 280 bp, Glycine max
  Clone ID: PAT_MRT3847_36056C.1
ggctcgagaaaaaattaaacgccgcacttcgagtttgaataaaccaaacaaagacaaccgggatgagcttgctttctcatccgaagacgcccaacctgatgtatatacttgtgtatcaaggtgttctgataggcaagcaacccacgctggttatagacctactgctcattttaactctccagatgaatctataataaagactatggctgctggggaatttaagaagaaaatctatcatctctgtgctgtggttgcatcatcggcgcacattgaaaatata

SEQ ID NO: 72032 - DNA, 887 bp, Glycine max
  Clone ID: PAT_MRT3847_36057C.1
gcgaagctcggaggggggcggaggcaaagagagagagagagaagaccaaaggagggtaaggaaaaacttcagcagaggaattccttgcagaagggtgcaactttactccctctctttctctcttgctctttcttgtcagggtttggtcatataagaagccatggccagttttggaggaaccacacaaaagtgcatggcttgtgccaaaactgtgtatcttgttgataagttaactgcagatagccgtgtctatcataaggcttgcttccgatgccaccattgccgtaatacccttaagcttagcaactactgttcttttgagggggtgctctactgcagacctcactatgatcaactctacaagcgaactggtagcctggacaaaagttttgaaggaatacccaaaattcagaaaccagagaaaccggtcactggtaatgagaatactaaggtcctcgcaaacgtgttcttgggcaccagagacaaatgtgtgtgttgcaacaagacagtgtatcccactgagagggttacggttaatgggacaccctaccacaagggctgcttcaagtgtacctatggaggttgtactgtaagctcatcaaactttatcacacacgagggaaagccctactgcaaacaccatcacattcaacttttcaaagagaaagggaattacagtcagctcgagaatgaatgctagctagcaatgtcgtatactactaccatggataatgcaccattgtcagcaacgcataatatatagtgttgtccttgtaaaatgcatgcattgatgagatagaaagtttgctgtgtgtgtgtgtgcgcattttgattcttgagaatgctttcagcagtttcattttaacaaagaatttttttaagttcat

SEQ ID NO: 72033 - DNA, 352 bp, Glycine max
  Clone ID: PAT_MRT3847_36058C.1
aaaaaaaaaagaaagggggaaaccttttcttttttcaatcttttggggggaaaacaacataatttttttccctaaacggataatttttttagcaaaaaccccaaaggaaatggcatagctttccttttgggtcattttaaagtttaacttattgggcacacataacttgggtggggcttttacatacaattttcgttggggttttgaattacacccaggccacagggaacttcgggatttccttcttaatttgaaaaggaaaccttggtggggggttttttttaaaaaccttaccatttttggcaaacaaaaatttttaaaaaatccacttttttaaaacacccaaaaaggc

SEQ ID NO: 72034 - DNA, 121 bp, Glycine max
  unsure (1)..(121): unsure at all n locations
  Clone ID: PAT_MRT3847_36059C.1
aaanagattttatacagaaatatncgtnttcattcacatagaattcaaccanaataaatgtgatannatctaaannaggngnaaaattgaattttggntnggtttatattantngttctaa

SEQ ID NO: 72035 - DNA, 669 bp, Glycine max
  Clone ID: PAT_MRT3847_3605C.1
cttgcagaagtagaaaccaaatcaattattcatgaaaagaattaataaaagaaatacagaaaattaattacttggcaaaggacaaaggaaggaaaatgccgtgagatcatacacttatatttcaaagggaatgactactcaaaacaaaactgaaaaggttcatctcaaatccgcaataaaaattctccgcgatttattttggcttggtgagaatgataaagcaatttcattttgcatggaacttcctgctaacggattcgtaactggggacattgaatacatccccataggatgccatagtgagaggtgaggaaataatcttctgagaaattttagtgatatcattcaaagtgattccatctactgccttaaagaactgctccagtggcttcctttctccataagtcaatatctgccttcctatatcctctgatgcaatcattctggactccaaattcattagaactgcagacttcgtggataccttagcacggtcaagctgtacctgtgaaacttgtcctggtgatgcaattgcaattaattctctggctgctaaatccacagcttttgccacaaaatcagagcccgtgcttgcatagatgccaaataaccctgtattgttgaagagactgttgaatgcaaaaaagatgaatctgttgatgttcattc

SEQ ID NO: 72036 - DNA, 1168 bp, Glycine max
  Clone ID: PAT_MRT3847_36060C.1
acaaaggcatcatcaaatcctggagctggtgacattttaatgggatttttaggatctgttattctctcattttccttctctatgtttaagcaaagaaagcttgtgaaaagacatgcagccgagattttcacctctgtcatcatctcaacagtgttctcactgtactcaacagccttagttggacggcttgttcaattagaaccatctttaactgtgtccattctacccagatgtatcacagtggcattggccctcagcattgtatccttatttgacggagccaattcatctctcacagcagctgtggttgtattaaccggtctggttggagcaaattttgtgcaagcaacccttgataaactcagctttcgtgatccaattgctcggggaatagcaactgcttctagtgcccacgggcttggaacagcagctttgtctgccaaggaacccgaggctctcccattttgtgccattgcttatgctctgaatggtatatttggatccattctttgctcgattcctgctgttagacaaagtttgcttgcaattgttggctgagactgtcatttatgtcacggcctggtgctattcattccattcaatgccataataactccagtgcttatctgttggctgcacaaaaatgtatagggcaatattatgaatcatatattcagtaacaccattgtgtcaattgtatagaaagcaatagtccattcatttatgatttgttgatattctatgaaggcaattatctatcttggataaccaagtgattgaacacaagcgttaatatgctaaagttaaggttgaatcaatcagatagtatcttattttgatctttggaagaaagaattattggtaagattttacttatctttcatttaaactttggattagtcaaaatcctttttcccagataaatcggagggttaagacaaaaaaattatctgtgttggatttcatattttctttaggagagttctcaaattaaaaacatgaaaatttctataatatggtgtgcaatatgaatattcataacttttgaaattaaaattaaaatttattattatgtttgatttgtactaaacataattggaccgtcctccccataagggaggttcattaatactaatggatcggcaagagagtgacacatgatcatgac

SEQ ID NO: 72037 - DNA, 304 bp, Glycine max
  Clone ID: PAT_MRT3847_36061C.1
tgcagctttctccgacagcttcattcaccatggctgatcagaccgagaaggcttttgtgaaacaaccaatagtgtttctcagctcgaagaaaactgcgacgggatagagacccgcaaagggagagaaccgattttggaaatccattgggcttggattgaacactcccagactagccatctaatgaacctacattgacatgacgtgccggttcactgccgctgaccacattcgcgtatggatagtggctgtaacacttgacatagctatgatcatcacgactaccagtgtgaggtggatttacgt

SEQ ID NO: 72038 - DNA, 1884 bp, Glycine max
  Clone ID: PAT_MRT3847_36062C.1
actgttttgaaaaaaaagacgcacaccaacctttcctaattcacactgcacacttcatttctgaacaaaaaaaataaaaattattcctgttttagtgcttctttcttatccatggcgagtctgcttcggaacgctaacacatccctcctcaaacgttctctcttccactccgaccttctaacgcgcttttgctttaaaccgggagtgttgggcacgtctcaagttttaagcttttcaactcgtaaaaggaggtctaaatcagatggaagtgactcaggtgaagagaacatgtctaagaaagatatggcattacaacaagctattgatcaaatcacatctgcatatggaaagggatctatcatgtggcttggtcgttccatggcaccaaaaaatgtacctgtggtgtctactggttcttttgctctggatatagcacttggggttggaggtcttccaaaggggcgtgttgtggaaatatttggtccagaggcttctgggaaaacaactcttgctttgcatatgattgcggaagcacaaaagctaggaggctactgtgcctttgttgatgctgagcatgcacttgataagacacttgcagagtcaattggtgtagatactaagaacttgcttctctcacaacccgattgtggtgaacaagcacttagccttgtggataccttaatccggagtggttcagttgatgcaattgttgttgatagtgtagctgctcttgttcctaaaggcgagcttgatggggagatgggtgatgctcacatggcaatgcaggctaggttgatgagccaggctcttcggaaattgtgccactccttgtcactttcacagtgtatattagtttttataaaccaggtgaggtcaaaaaattctacttttgggggatatggtgggcccactgaagttacttgtggtggtaatgcactgaagttttatgcttctgtgcggctaaatatcaaaagaattgggtttgtcaagaagggtgaagagactttaggaagtcaggttcttgtcaaggttgtgaagaacaagcatgcccctccatttaaaactgcacagtttgagattgagttcggcaagggtataagtagagaagcggagatcatagagttgagcgtaaaatacaaaatcataaagaagagtggttcattttttgaatataatggccggaatttccatggcaaggatgctctaaagagattcctggcggagagtgatggagtacaagaattagcaacaatgctcagggagaagattcttgatgctgagccagaactggagccagaggagcaggagatgatgggagatgttatggaactaatggaagaaatggtatcgcttgattccactgatgaagcagcttctcgtgctcctgcccctgttgctgcagaagcttaaatttgcaaataacctcaaaatatggggtggtctaatctccctgcttcaaaaatgtaccctactcaaaagggccctcacagatgaaggaggatctaaaaggtaaaaacaacggattccttatccttcctagttttgaacacttttcctccttgagagcatgaggcacattacctttgtaaattgaaatttttggtcattttatgcgagccgtgagttatggcgtctaagttttgtgactggaaggcaaaggccttctgatgaggaaggaatcaagggccctaggctgatcaatatttaagtcattgctgattgcttagaaggatgctaatcttcactttgtataattgtctgtgtatatgtattccttgcagtaagattttgcatgcatttatgcctccagctattcaaaattattagatgaagatctgtcagatcatcttatatcagtaaattagacttatttatgtcttaaaa

SEQ ID NO: 72039 - DNA, 264 bp, Glycine max
  Clone ID: PAT_MRT3847_36063C.1
cggctcgaggcagattgacctccattatagtttgttatcatccttgtcttcagcttcttctattggtgaacctttataacctaattactacatatagcaattgtatagctcaattgctaaccttgtgagttctgagcaattgttacaattagaaaaccccaaaacatgggttccttggtcggagactaaaaaggtttggtgaagtgggaatcctagagggctaataagggccagggaaggctaagggtccaaggggctttatta

SEQ ID NO: 72040 - DNA, 134 bp, Glycine max
  Clone ID: PAT_MRT3847_36064C.1
taccccttggggcgtggtcttgttgctgcaccaccgaacaacttcccctgtaaatcgcgcttcgtttgtgcaaggttgtaaaagatggctgatgctgaagacattcaaccatctagctgatgataatcggaact

SEQ ID NO: 72041 - DNA, 441 bp, Glycine max
  Clone ID: PAT_MRT3847_36065C.1
agttattctagatcatgaaaagaagcaaagaattgtatggtcccttgcactttaaatgaaatgcttaatgacgttggtaggtttgtgtcatttcaaatgcaatgtaacaacttaaacaaaccattgcatagctgtttggaatccttgggagaaaaaatacaaggcaacagtggatttgggtgataaagagtacaaagcaattgagaaaccaatcactttgaattcaggcgaataatgaactggctgcttggagctctatatggtcccttcaacttgatatgaaatgaatggagatgcaaatgaagtaggatgaattttagctggagtaatttgcatgtattttgttatcaaaattgaaattttattttgacaaaaaatatctaaggcaggtgctggagttgtctaataaactaccaaaaacacccagcattctttttggca

SEQ ID NO: 72042 - DNA, 305 bp, Glycine max
  Clone ID: PAT_MRT3847_36066C.1
tttttactaatcaatcaagtttgatttttttatttataaacattttgtgggaattaatagagtcatacattctgtttatttcaatactagtgcagattttcaagaatgttaagtgagaatgagatctgagggacaatgaaatgggttgaaaacgtagtttttaactgtttgaacatgctttcatgtaggtattgttctggattctggtgatggtgtcagccacacagttccaatctatgaaggctatgccctgccacatgcaatccttcgtttggatcttgcggggcgtgacctcaccgatgccc

SEQ ID NO: 72043 - DNA, 428 bp, Glycine max
  Clone ID: PAT_MRT3847_36067C.1
tggtcgcctgcagaccggtccggattctcgggcgcccagcagccgaccacgcgaccgccacgcgtccgctggattccagttagcaaccttgaaagagcagctgcaaaagagaatcctgacgctcttaaggcagcgcggaagttattaaagggagcagatggcgaacctgttcctggaatctcctatatagaggagtgcacggaacacatatcgcagccaaaaatgcccgggaaaacaggagaccagcccgtgacatcaggcttggaatgcacattgcagccatagagacagcacgatctggacttggcgtacaagatgctaacagcactgaatgtgagcccgataccaaaagaccatacatcatattcatgccggagggatcaaaatcacatatgggaggcaccaggcgccttggatctaagaggaca

SEQ ID NO: 72044 - DNA, 1323 bp, Glycine max
  Clone ID: PAT_MRT3847_36068C.1
tcggctcgatcatcatgtggataacatatataaaggagatgccaagaaccacaaactcaaccaccagccggcgcgtggcttcagttgcaaaaacatggtggttttaaagtccacttctctcacttgccaacttcttcaacctctcttcctcctcctccaatttcatctccccacaacactctctccgccaccaccaccaccaccaccaccaccatgctcaccccaccaccacgagactcacttcaagagttgcacagttcactgttaaagcctacatggagaaccccaacacgttaggtagtttcgccaacagggtcattggtgcactccccgtggtgggactcattgccaggattctcagtgatgaaggtggcgttggagatgacctagtggattttgctgagttcagaaggcgcgttggaaagaagtgttcccaagctgattcctctgccttttatgagttccaagatcgacgaggaagggcaggggatcctctttatgttctgttatgctgttggctagcagccattggtgctggtcttctcaaaaccgaggatattctggaaggggtggctcggctccggatcttcaacgacattgaatttgaggagcagagtttcatggctttgatgaatgagtcaaaggagagacgggcaaggcaaaacgctgatcctcctgcagtcccaatggagattcgagctgggaaggctcttgatgctatctatgtgtgttgctttggaaaggactccatagaggaagaagacgagagacttctgactgcaatgctcggtgctgttttcccgtcagttcagcgcgaagagagttgtcgccttgtcaaagacaaggcagagaaagtagcagcaggagttgatgaggaatatgttacagaactcagttgatgatcaatatgtttcagaactcaagcctctaacaaaagaagctgtggaactacaaatgaaagaccttcagttccttcaacaaaatagtgagacttaactaggtgaagcctgtgatttccactacacagtgatgcattgaatgaaattatattttgtgaactaagccgatttagcctttgggggctactcaaagaaaaaagacagtcatcatagatcacactattatttttcagatacatgttgaaatgtggggtcatgacttttctgaaaatgcagaaatttcatgtaacttatgttagcattataaatggacaagtaatgcatgtctccaatgccattttattatttaaactcttgaagtgatctagttctttccttcaccttcactgttgaaatgaatagcccaattgtttcaccccaaaaa

SEQ ID NO: 72045 - DNA, 333 bp, Glycine max
  Clone ID: PAT_MRT3847_36069C.1
tttggctgatacaatctacatacacctttgtgagttattatgaagatacacatgtttgttgtgaaccctatatgaataccaaacagatagcgcaaaccgcccgaatcaacgtctccttttttaatcgcgtggcgggaataatgccaccattctacaagtcttgcatttcaaacctcatcaccttgccattttattttgagcctacgctctgtgggcccttactgtacgatacaagctattcggaccaccatcttgaaggcgctccgaagcagggtacacccttgccgaatgagctcatgtcctgggggtgccctactgccgaaatgcgggcct

SEQ ID NO: 72046 - DNA, 349 bp, Glycine max
  Clone ID: PAT_MRT3847_3606C.1
tcccactcatcttattacctggttcaacttctcgatagttctttgggggattttaaaacctttaacatgaatcctccccctccaagtgtcgaatcaactgcgaatatcaagaacgagagtccttctttacctttcaatgttcaaagattgatcattggtttaccctaattgagaacaaataaaaaggggaaacataaagcttccaaaaacagccacatatcatacgcgctcaacaagctcatggagcataccaaacatgctgttaaagttcttgagtctatatccccacccactttcaatgatttacgtaaagatacctttatggaacatttggtcaaacaattttaac

SEQ ID NO: 72047 - DNA, 241 bp, Glycine max
  Clone ID: PAT_MRT3847_36070C.1
actatcctatcgtagcaaagaaataaagaaagaaaaccctagcttagcttttgaagtttcaagatgctgatcttcgttaagacactcactggtaaggcaatcacccttgaggtggagagttcagtaccatagataatgtaaagtccaagattcacgacaaggaagggatcccaccagaccagcaacgtctgatttttgctggcaagcagcttgatgatggacgtacacttgctgattacaa

SEQ ID NO: 72048 - DNA, 665 bp, Glycine max
  Clone ID: PAT_MRT3847_36071C.1
caatttcttggtgaaagtaacattgaagatatacaacaattgctattctataactcagaaagtggaatacttttgagcaaattcatagagaagctttgccaaacacttgaatcatttgtatcaggagtcaacaaacaatttgcttttcaagaaaatgaggtatttcctatctttagaaagaactgcacaaatggaatgcaagagagacttctaagcttgagcctatatatgatgcctcttgggttactaagatgtgttataacctggttttcagttcgcttgtctgaaaaagagtctagctccattctctattgcataaagaaaggaaataattctgtctgtaaagctttttcatcactgttacatgagtggttccgcattggttattcaggtaaaacctctattgaaaaattcagacaagaactgcaacatatgtttaaaagaagatgctctcttttacccgaacaaattaaggaagctcatgaattttctttcttaaattctgagaagcagcctcataaagtctctggccagaattgattgtcctattcctcctcctctggatccaataatgtaaacaagtatgagacaccatactccacaggaattaatctgcatatattttttgcttccacagttgcggagctacacaggataagaagaat

SEQ ID NO: 72049 - DNA, 1127 bp, Glycine max
  unsure (1)..(1127): unsure at all n locations
  Clone ID: PAT_MRT3847_36072C.1
gcgtccgcaagtttcaacacccaaaaccacgcggggtcttgcttcatttccttattttctcagcagagcgaccacgatttcctcatatctgttatctgttatatatacctatatcgtatccgcatttccgaaaggatatatctgatctagtagggttttgtgtttgttcaacaacccaatcgccatgggggggcaggagagtatcgaaaagatgctgtcacggcagaattaccggaagttatggcacaccgatctcttgagatccattcaggccgatacaccttattgttgcctcgcgttgtggtggtatgtgatctggaacttcctctcactatggcgatgttcttgtcaattcttgttctgtggatctgatgattggtggttgtagggtgaaattgtataacagataacagatatgaggaaatcgtggtcgttttgctgagaaaataaggaaatgaaggaagaatccgcatttccgaaaggatatatctgatctagtagggttttgtgactgctcaacaacccaatcgccatggcgtcgcaggagagtatcgaaaagatgctgtcacggcagaattaccggaatttatggcacaccgatctcttgagatccattcaggccgatacaccttattgttgcctcgcgttgtggtgtgcgccatgtgtgtcttaccttcttcgcaaaagagccctttatgatgatatgtcaagatacacatgttgtgctggctacatgccttgcagtggtaggtgtggagaaagtaaatgtccagaattttgcctttgcactgaggttttcctctgctttggaaattcagtcgcctcaacccgctttctattgcaagatgaatttaacattcaaaccacgcaatgtgataattgcattattggtttcatgttttgccttcaacaaattgcatgtatattctctattgttgccatgattgtgggaagcagtgaaattcaagaggcttctcagctgctgtcttgtttggctgactttgtgtactgcacggtctgtgcatgcatgcagactcagcacaagattgagatggacaagcgtgacgggaaatttggaccccaccagcnatggcagtgcctcctgttcagcagatgtcacgcattga

SEQ ID NO: 72050 - DNA, 983 bp, Glycine max
  Clone ID: PAT_MRT3847_36073C.1
cccacgcgtccgaaacgaccacgatttcctcatatctgttatctgttatatatacctatatcgtatccgcatttccgaaaggatatatctgatctagtagggttttgtgactgctcaacaacccaatcgccatggcgtcgcaggagagtatcgaaaagatgctgtcacggcagaattaccggaatttatggcacaccgatctcttgagatccattcaggccgatacacctttgcgccatgtgtgtcttaccttcttcgcaaaagagccctttatgatgatatgtcaagatacacatgttgtgctggctacatgccttgcagtggtaggtgtggagaaagtaaatgtccagaattttgcctttgcactgaggttttcctctgctttggaaattcagtcgcctcaacccgctttctattgcaagatgaatttaacattcaaaccacgcaatgtgataattgcattattggtttcatgttttgccttcaacaaattgcatgtatattctctattgttgccatgattgtgggaagcagtgaaattcaagaggcttctcagctgctgtcttgtttggctgactttgtgtactcgcacggtctgtgcatgcatgcagactcagcacaagattgagatggacaagcgtgacgggaaatttggaccccaaccagcaatggcagtgcctcctgttcagcagatgtcacgcattgatcaacaagttcctccttttgttgggtttccaccacaaccagtttatggacagcctgctcaaggatatccccccgccggttaccacccccctgctacatatcctccaccagaatatccccccgccggttaccccccccctgttgtatatcctccaccaggatattctggccaccctaagtgattagtttagcatgccttgtgttggtttacagcaccaattgattggttcatagaacaagggtacatgtttgtggtgaaatgcaatagttcgattgat

SEQ ID NO: 72051 - DNA, 1670 bp, Glycine max
  Clone ID: PAT_MRT3847_36074C.1
ggtgcgtcgccacagaatttaaggataggagttggctgctttaaagttcaacgcctaaaacccaaaagcaggggaattcttcttttacacattcagttcatttccttattttctcaacaaaacaaccgagagttcgtcatatctgtatctgtatatatacctatacctatacctatacctatatcgtatccgcatttccgaaaggatatatcttatttagggtttttgtgactgtgctccacaaccgagtcgccatggcgtcgcaggagagtatcgaaaagatgcaggcacggcagaattaccggaatttatggcacaccgatctcatgagatccattcaggccgatactccttattgttgcctcgcgttgtggtgtgcaccatgtgtgtcttaccttcttcgcaaacgagctctctatgatgatatgtcaaggtacacatgttgtgctggctacatgccttgcagtggtaggtgtggagaaagtaaatgtcctgaattttgcctttgcactgaggttttcctctgctttggaaattcagtcgcctcaactcgctttctattgcaagatgaatttaacattcaaactacgcaatgtgataattgcattattggtttcatgttttgccttcaacaaattgcatgtatattctctattgttgccatgattgtgggaagcgatgaaattcaagaggcttctcagttgctgtcttgtttggctgactttgtgtactgcacggtctgtgcatgcatgcagactcagcacaagattgagatggacaagcgagacgggaaatttggaccccaaccagcaatggcagtgcctcctatgcagcagatgtcacgcattgatcaacaagttcctccttcggttgggtatgcaccacaaccagcttatggacagcctgctcaaggatatcctgctccgggttatcctcctactggttacccccctgctgcttatcctccaccaggatatcccccttctggctaccctaagtgattggtctacagcgcaccaattgatcgtgcttcatagaacaagggaacatgtttgtggtgaaatacaacagttcgattgattaattaatttccattagtcttataattcgtgaattaaccttataatccctatcgtgatgtccattctgatacttcgacttctgtttgtatattgttcccgttggtgttcatacatagttcacatgtttcgcttgttatgtgcaaggatatccccccgccggttaccacccccctgctacatatcctccaccagaatatccccccgccggttaccccccccctgttgtatatcctccaccaggatattctggccaccctaagtgattagtttagcatgccttgtgttggtttacagcaccaattgattggttcatagaacaagggtacatgtttgtggtgaaatgcaatagttcgattgataaattaatttgcttttcccctagcaagttttgtcttgtgacttgaccttataactcctatcgggatgtccattttaatacttcgacttcgtaaaaggatgcgtagggataacaaaagaggccgtgttgccttaatgtgagtagtttgatcaatgtaaacgaaaagtttgagtaatgaaaatactattacaatagtgccagaaaaaaaaaaaaaaaaaaaaaaaaaaaaa

SEQ ID NO: 72052 - DNA, 297 bp, Glycine max
  Clone ID: PAT_MRT3847_36075C.1
acatccacacatttatagaacagaaggaacacgtatgcacaaaggacttaatgaataatgcgtcattcagagctgcggacagaggtggcaagaagatcaagactgacatgccttatggaattaatggtggcatggctttgatggaaggagacgaagcatcagactcgataggaaagggaaagggcgtctaccaaaattgtagacaaataccgggctaacgtcgatggctacagtcctatctactataccaaagactggtcgccatgcggagatgtgcactctggctgtgcgactggc

SEQ ID NO: 72053 - DNA, 170 bp, Glycine max
  Clone ID: PAT_MRT3847_36076C.1
cggaattcccgggtcgacccacgcgtccgacaagattgagggggcccctaaccaaacctaatggcttcagaggatccatgatgcccactcaccatgcttgcgccggcatttttggtattatagggagacagtgatttgtgtgatggggtacttgggtgcggggcgggcgg

SEQ ID NO: 72054 - DNA, 250 bp, Glycine max
  Clone ID: PAT_MRT3847_36077C.1
aggaaaatcctaatcacgggtttgacgtaggaacacttattactggcgtccaggtaagatcaaaaaaatttggctcctacaaatcttcaaacgaacacaactatgttattaaaaaacttaccaccccattgcccaaaggctcttttctatgcgaaagcataggagactgctacatgaatacatattgctaccctgcaattaggctcccagtgctgtacctccatggatcatacacatgaatttaatggtg

SEQ ID NO: 72055 - DNA, 684 bp, Glycine max
  Clone ID: PAT_MRT3847_36078C.1
cggccgctcgagccggcgggcgggaatttcaaccgtaactttgagatagctaggaaatggcataccaaatgcaaatgcaaaagcaaaacctgagataccgagggtggtgcccctcgaacgattaccaagtccatgaagtaatagggcctgcactactacgcaagggccttgatcgtcctcgacatcagaagggtcgcgtggcgttcaaaaccgatctagaagagtccataacagtagcagaaccaacccctgtgcctgcagaaactgaaacccctactactacaaaccatgcaaatggttttaggagcgtggaccaaaaagctgatgcgtttattaagcaggagcatagaaggattgaacttgccaggctcaagtctttgggacaaatataattagcacttagcagctacttattataataaggccatgcatgtttctcatatcatatcatatatacttacatacaaacatgcaataatctccaccttggctactctggaattagcatgtgtctttttccttcttttttttagacgtcttagattagattagagcatgttttgcattttcattttcaccctaaataatgcttctagccctcgatcaccctagtatacggttacggtgtgctttaaatatataatttcttatttcgtaaaaaaaaaaaaaaaaaactcgagacta

SEQ ID NO: 72056 - DNA, 265 bp, Glycine max
  Clone ID: PAT_MRT3847_36079C.1
gtgttctacattacacaatatcccttcgatcaccgtatttacagatctattactgccactgggggtctgtggctttggtgaatttgataatcatctatatatccaacaggccatcgtgactctgaccggaatgctgctgacagatgaacatgcgtatgatggaccctcgcttctcctgcttgagagagtacagccgagtgacatagctaagttctacagaggtttatgcaagaaactgactgaatcaaccactgatgatgaatct

SEQ ID NO: 72057 - DNA, 261 bp, Glycine max
  Clone ID: PAT_MRT3847_3607C.1
attaacactattagttttttggaaaaaaagaaaatcggggaaaacaaatttaaaacccatccccagaaaaaagaaccgggggggttttaaaaaaaccgtggggggaaccacaacaaaccccctttgtgacccggtatcgtaaccccccaaaaattttgtccccctaagaccccaaaggggtgaacccatttgggcccaaaaaaattcaatggagggggggggacccccggggggattttaccccaaaaccgaattagaaaa

SEQ ID NO: 72058 - DNA, 476 bp, Glycine max
  Clone ID: PAT_MRT3847_36080C.1
ctcataccgcataacctaacctttcctcattctcctctccgttctctctttctccggtcacccgccggcgacagaggcacacagaacggggttgagaagctgcgctgcgtttagcgtgttacgtgaataatgcggcagacaaaaacagattgtgctgttgcgacaattcgcaatcgtgccgtgtaaggcgaataatgcgttaagtgatggtgaagacgagagatacagcagcgtcaatgacggacgtcatagaggagcagggaaacatggctctgtcaaatgcccaggaagagagaatcttcgtttccataagagtaaggcctttgaacgagatagaaaaggccaggcatgatgtttccgattgggaatgcatttctggcaacaccatcagatacaagaacaacggacatgcggaaccgcgaccactctcaatggatacctatgcctttgatagggtatttggggagaagtgcaat

SEQ ID NO: 72059 - DNA, 260 bp, Glycine max
  unsure (1)..(260): unsure at all n locations
  Clone ID: PAT_MRT3847_36081C.1
ggccgggacggaaaaaccggatcgacccacgcgcccttgaatacaaccccccacgcgnccggaacngggaagggggcaataaaaagaaggagagcgggtcccccccagcacccaagaagacctcccccaacattaaaagaacagacccccccctcaaagcatntggaaaaccggctgaagacacccaaaaacaatgaggccaaaccccacaaagcggagccgcaaggagagacccaagaaaaaagacgcaacgaaaaccc

SEQ ID NO: 72060 - DNA, 163 bp, Glycine max
  Clone ID: PAT_MRT3847_36082C.1
aacagataggcttacctgtgcatgaacttcttgctcctatgagaaagaatacctctgcaaacaacaacattgagcacagaccgtgcttgtgagtccgtgactaaactttgacaggaacttttatcggatctcaagagctgacctactggtactcactatgcta

SEQ ID NO: 72061 - DNA, 1621 bp, Glycine max
  Clone ID: PAT_MRT3847_36083C.1
gcgtacgtgagttgggatttgccttgatcttagaaaaatctatgtttcttttgttttgaattcaatactcagtgctttgattgtgcattttgcatcagaagcaggcactgctgagtcacagtatggaggccaaaagctcaaaccagataaaagaggaaagcaatgattccaattatgataggaaagctgaaataaaagcatttgatgattcaaaaactggtgttaaaggtcttgtagattctggtgtgaaaaagatcccacgcatgttcctttccggcatcgacataactgaaaacgtagccagtgactcgaacttgagtattcctgtcatagacctacaagacatacataacaatcctgcactgcataatgaagttgtcaccaaaattcgaagtgcatgccaggagtggggatttttccaagtgatcaatcatggaattccaattagtgttatggatcaaatgattgatggaatccgaaggtttcatgaacaagatactgatgtcaggaaacagttttactctagagatttgaagaagacaattctatacaattccaatactagcctgtacctagacaagtttgctaactggagagactcacttggatgttctatggctcctaatccacccaaaccagagaatttacctacagtatttagagacataattattgaatactccaaggaaattatggcactgggttgtacaatttttgagttattgtcagaggctcttggccttaatccatcttatctaaaagaaatgaattgtgctgaaggacttttcattcagggtcattactatccaccttgccctgaacctgaattaactttgggcacgtccaagcacactgatagttccttcatgacaatagttctacaaggccaactgggtggtcttcaagttcttcatgaaaaactatggtttaatgttccacctgtgcatggagctcttgttgtaaacgtaggagatattctacaacttataacgaatgacaattttgtcagcgtttatcatcgggttttatcgaatcatggagggccaagagtttcagtagcaagcttcttttcgaattcgcatgatccagcaaaaggtgcatcaatggtttatagtccaattaaggagttattatcagaagaaaacccagcaatctatagggacactaccataggagagatcatggcacaccattttgctaaggggcttgatgggaactctgccttgcagcctttcaggttgtgaaatgaacagattaagacctagaaaataacgatgctctcctgattctcatggaggtgcttgtaatgtgttatttctgatgccttttattttcttaattttcttcttcacacaacaagcttcaaattaagaaaccttctgggcagacatatgctcatctgtctcatcctaggcttcttagcttgtgttgtaacgaataatttcgtgccattcaagaaaaatatgtaagagattccattagaatggatatgacttaacaaaggatgataggacaagttttaaatgtatcttttagtctcctacagcattaccgaaataaataataaaaagcactgctcctctaatgtatgaactctgttctcgttttgtgcgctcttatt

SEQ ID NO: 72062 - DNA, 136 bp, Glycine max
  Clone ID: PAT_MRT3847_36084C.1
gattgagcgtctacacgcatacataaagctgtcgcctgagtacacgctcatgtataagatggagctttgtaggatgcagtactcgctcaatcgcatacgctgcagcgcacgctgtcttcataacatcgacgagaac

SEQ ID NO: 72063 - DNA, 159 bp, Glycine max
  Clone ID: PAT_MRT3847_36085C.1
tacctcggctttcgtccttctttttttttttttccggtactggcgacggatcttatgtgtgaaaatttacgagcgcggactttcgacatcagcaccattcaggagctgggacgccaaagccctactgcctgggctgttcatcttacccttcatgaaaag

SEQ ID NO: 72064 - DNA, 143 bp, Glycine max
  Clone ID: PAT_MRT3847_36086C.1
tagatttgcccgtgtctctcactcaatcactcactcattctctcgtcaaattctaatcttcgcggatcgacaacatctctcttctatactcttaaaacttactttcaatttactttaactatctactcaattcttatttcatt

SEQ ID NO: 72065 - DNA, 3035 bp, Glycine max
  Clone ID: PAT_MRT3847_36087C.1
gcagataatgcttcatgatacatgcatcaaaaaggaaaataatgctacaactgaatatcgaaggtcatgcttgaacataattcactgcgcgtaagatcagaatataataagcactaacatccaccaccacttacagtgccgccaaaaaatgttggacaaatgaaatttgagagcctagcacataaaataaacctaacccagactttggtgtttggtccacctatgacctacctctcaagaagcataaccaattcacagtgtggagtatgtggaaaaagatcaacagccatagcctttacgggatggaatgcctctgagatgggcatagacttggccctgtgccgtgctaaaccagcactgctcatgtttctccatcctctgttgtctttatttcctttctcaatttttacgggggatggcgtacaaagctcaatagcatttgccaccaaagtttcaggattacaggatatgtaaacaagcctccgcaggcctggatgagttctcaaagctttgatcacagttggatgaagtccagcacgtggaggatcaacaatagcaacaacatttttgaactgttgcagtgaagtcttcccatttttagaagtgctacccttctgaacctcacctccaacttctgcattgttactttctgaatgagatgtagtttcaccattttcaggcactgggaaggtactatcctcaggaatgtcattcccacttccagagatatttggataatcactttgctccttgggcatatttgcatcatcccttaacagagatcccatcacgtcctctgcctgttcagagataccatcagcttgttcacaagtgctacccttctgaacctcacttccaacttctgcattgttattttctggacaatgagatgctagttcaccattttcaggttctgggcatgcactatcctcgggactgtcattgccctttccagagatattaggatcatcaacttgttccttagtcacattcaggtgttcccttaacagagatcccattacgtcctctgccttcgaacatataaatttaatgttttttatgccattaatctcagcattcctatgcgcatcagatacagcagaagcattcatttcaattccaatcaccaactcgatgtgctaatgtcaggccaattgttcctgtcccacagcatatatcaaatagcagtgtgtcaggacctaagcatgaccaatctccagcaagtgagtacaacttctcagcagcaagagtgttaacctgaaaaaatgctgttggagatatagaaaactggagattgttgatatgatcatggattcttacatccttggcattattattttcatccacctcaggatcaccagctgctttaggaatgggaagtgaatgcagtggtgcatcagctggtgccacattggatattccttggtgatcctgaacaaccagagctgtaaggggtaatattgggcaatgcgaagtagctccggcaacaaatgcctgagcaagcctcttgaactcagcagctacttttgcatcatcaaagcttgcagtagaaacctataatcaacaccaaaggcaaagagttctgagtgacgctttaaaaaaaaagaggtatacaaatcataagcttcaagtaatcaggggtcttgtctccctgcacaataagcatgacctctgcaacaccactaaacgtttcagcatcaacaacattcccatttgttctcccttctcgaaccgtcaattgacgccaaaaaccagtatttttaaatctgttccaaactggtaaatcactgtcctgtagaaattcctgaaagattgtagcatatttgcaagcaactgttgaaacgtttgggcagtccactgcttcctcaactgctgttacaccttccctgaagtttccaagcatgaaacctactgtcactttgccttccagagaatatccaacagaaaactcacacttgttacggtatccatttacaataggggatgcaataataccctctagtttgcacggaagaccacctatttccctagacttgagaatccattcaggaagagaaacaccatttggacaagctttacgagcatttctagtaagttttttgagaatctgaaacctaacccagactttggtgtctggtccacctatgacctacctctcaagaagcataaccaattcacagtgtggagtatgtggaaaaagatcaacagccatagcctttacaggatggaatgcctctgagatgggcatagatttggccctgtgccgtgctaaaccagcactgctcatgtttacaatggcattacttttcttttcgaatgacccaggaagaacattagcaacctttaccgttttgttgccaattgattttccttctaattccatggttgaactcttcaactgtttcctcatcttcaaaaggtatctcaaagccaatcatcatgcctttctttttcttagcatgcttaaaaggtatgccctgttcgcagagaaaagtcctcaaattctcggagctccatttccgcggcaaatgcaccaagcatatgttaagcgcgtgattcgcgccacaaccgtcatcaccgtcgtccacgacggcctccgtcatcatcacttcctccgagacggcgcgcttttcgtccgactcggtcttcagcgctttcttcgcgcgctcggaggtcgggtcccacgtgttgtcggggcgggggcggagctcctcctcgccgtgcgcgtatcggcaagcgccgccgtggctgcacgatccgttgtggctccggaagtaagagcataggctggtcttccacagcggatgcagcgaacggtcttcgacgtcgtcgtccctcttccgtttcgcggttggaacaacgtcgtcttctcgattgagctgagcgtcttccggagccgtttgatgcggttccgaagtggaatcgtgaccgttggttgggtccagggttttggaagaagagagttcggtgtttgagagaggttccgccattgcccgctacacacaatgcaccggacgcgtgggtctgtttctgct

SEQ ID NO: 72066 - DNA, 149 bp, Glycine max
  Clone ID: PAT_MRT3847_36088C.1
ctcagatttttagtacaggggtactgcctagctgaatgaggagtcattatgtttgatgaaacccggactgttatatatatgcaataattcatcagtgcttgtgtctaaaatgttcgctgcttgaggcttttacagaactggctagatct

SEQ ID NO: 72067 - DNA, 213 bp, Glycine max
  Clone ID: PAT_MRT3847_36089C.1
attaataataaagggtctatgagtcaagctgtctttctactttcttgtaactcccccagttggcgaagcactcagagcgttatcacgtgtgtatattatattgacttcgattataatgcttaaaattaaaattaaaaaaaaaaaaaaaaaaaaaaaaaaaaaaaaaaaaaaaaaaaaaaaaaaaaaaaaaaaaaaaaggggcgttttttttaa

SEQ ID NO: 72068 - DNA, 1783 bp, Glycine max
  Clone ID: PAT_MRT3847_3608C.1
gcattcggctcgagtacggctgcgagaagacgacagaagggggattagcatatttgacaaagtcatcatttcttttcctaactatggcctttgaataacaatgaaggaaaagtaaccttgccatattggaaaatttctgtgaaggtagaactcaggatcaatttggtttctgctgggccaatttttcaatggaaaatttcctaaattgattttaagccgcttctggagggtctaatattacatgcattggatcattggctaacatttttgcatgcttagagacagatttgaaaaaaaaaaacagatgcatgaattttgcaattctgtaaatgtgggtttggttagatcaaatatttaggagtggaagatgagtttcttttcatgttgcacgtcacaagagaagatagacaagagcccattgaaaaggagcagtaagaactaccatcacgcaaaagctctgccatcgttagccagcttgtgttttaaatctggtaccagcaaacggaggtacatgaattcggctcgagcaaaaattgggaaagggaatattacctctcagactttttcttatcacgagctatgtgttgcaactcggaactttcaccctgacaatatgattggcgaaggaggctttggaagggtgtacaaaggacgcctcaaaagcataaatcaggttgttgctgtgaagaaacttaatagaaatggattccaaggaaacagggaatttcttgtagaggttttgattttgagtctcttgcaccaccctaaccttgtcaatttggtagggtattgcgcagatggtgatcaaaggattttggtatacgagtacatggtgaatggctctttagaagatcaccttcttgaactatctccggacagaaagcctttggattggcgtactagaatgaacattgcagccaggtgcagctaaaggacttgaatatttacatgaagtagcaaatccgcctgtgatataccgtgatttcaaagcatcaaacatactgctagatgaaaacttcaatccaaagctctctgattttggacttgcaaagcttggtccaactggagacaaaacacatgtgtccacaagagtgatgggaacatatggctattgtgctcccgagtatgcatcaaccgggcaattgacttcaaaatcagatgtgtacagttttggagtagtgtttttggagatgatcactggaagaagagtaattgataatgcaagaccatcagaagagcaaaacttagtcctttgggcacaaccacttctaagagatagaatgaagtttacacaaatggcagatccattgctagaagataactaccccataaagagtctataccaagctctagcagtagcagcaatgtgtctccaagaggaagctgatactcgacctttgatcagtgatgtagttacagccattgagtttttagcaaggaagaaagtagaagtggatgaaccacgacatacaaaagaaacttcttccactcaagatggagatagtagtgaacacaatgaatctgatgaagaatctgatggcgaggaagacgatgagaatgaagatgaggagaaggataagaacgttgaaatcaacaaaaaagaatgatgtatgtgtgaatggaaatgcaactaattaattcaagtcctttgtccaacccactctctagtgtccacaaagtgattaacaaggagaaagaaaaccatgcatgcacattataaagttataatgcaatttcaacacctactacgtacttgccaatttttattggcgatgtgcctttc

SEQ ID NO: 72069 - DNA, 433 bp, Glycine max
  Clone ID: PAT_MRT3847_36090C.1
ggacatgttctggtttaacattaaaatactttaataccgcacacagcttggggatgatgctacaggggaccccgcccctttgtctgggtttgtctaccacgctcaaaacgcctttttttggggccaacaagcttccaaaactggatttgccgttccattttttccaaatccgactttacaaggataccttaacacgacccttaggaccacctgcctgcagggggggcaaaaggtaggtgatgtcctcccaaggatgcctgtaaagaccaatcctcagccttttttgggcggggaagggagcaatcaaaccaatggggcgtccgaggacaaaaagtccgttgaggacacccattttcaggtagttttcggccttttcgggagtgaaagcgccaccgttgcgaacgagggtaacgaagcaaacagggatacagcc

SEQ ID NO: 72070 - DNA, 463 bp, Glycine max
  Clone ID: PAT_MRT3847_36091C.1
gcaaagcgggcgtgaagttgtttgttgataaggctaatgttgcgattcctaccgcggactaatcttgagcggttggagtgggctaagtgcccatagaaaatcactacattgtggtgagagagcggtgcaaccggtttgttgaatggattgatatgatcatcttgtctggacgcaaccatgcaattcgtttgatgcgattagcagacaattggtgggcaggtttggagatatatgatgattcatcggtgacacggccggcaccaagtaacttgccatatgaacggattgtgtttgacattaactatattctactgcaggcaagaagaaaggaatttggagatggggcgttaagttgctgaacaagatggaggataaaggcctaaaaccctgctgtacggaatggaatgcagctcttgtggcctgttataaggcttcagaaactactgcagctgggcaaatattc

SEQ ID NO: 72071 - DNA, 796 bp, Glycine max
  Clone ID: PAT_MRT3847_36092C.1
ggctcgagtttgcctcacacgaagaaacaatgctgcttaagatctgaaacgatgccgtagattagattcaacccttgtctaaaaccctaatttttctaatcacctcaattcaattccaatccttccacccttcaccaaaaagcaatgtcaaattgaaaacctcagcagctgtattcacctccaatggatgtgaaggctttggcgaaatcaaagagaaaccacacgcagcaccatagcaaaaaatctccccatagtcacaagcccaaagccccaacatcatcatcgtcttcttctgtgggccccaatgacgctgcgaagaagaacccattggggaagcagcaagtgagcgaggagaagaagaagaaaagccaccattccgcgcttccctcgaattgggacaggtacgaggatgaggaagaagaattggattctgggtccggaattgcgagcaaaaccgtcgatgttgtcttgcccaaaagtaaaggtgcggactttcgccacctggttgcggaggctcagtccctagcggagacgagtttagagggattccctgctttcaatgatcttcttcctggggagtttggtgtgggattgagctctatgcttgtggtcaggggagagggcattgtgtcgtgggctggagatgataattttgttgtagaggataagacaaatggaaatctggaggcatcatttttgtccttgaatttgcatgctctagctgaaagttttgccaaagttgacttagcaaagagattgttcattgaggctgacctattacccactgagttgtgtg

SEQ ID NO: 72072 - DNA, 1266 bp, Glycine max
  Clone ID: PAT_MRT3847_36093C.1
taaagttttcgcctttaggatccaaaccatgttggtgaaacaaacaaggacaatgggagtggtcctatttcttccccagttccacagccacaaccacaacctttgcccaaagtgatgaagaatacaaatgatgatataaaaaaggacaatgattcagctcctccagtgagtatacctcctccaccgaaaaatgatgatggtggtgacacgggtatgcataaagggaaggacaaaactgagggcatgaagttttcacatcatagcaccactgagacttgtgacgggttcaagaagtgcaccgacgatgatgggggcatggttgcttgcatttcgaaaattggtcaacatcacacgaagtagcagtgaaagtacccaactgactttaaatgctggaaaaggggattgtgtgcttcacatggtttcaaatatacctgaagagaatttcattctgcgtcttccttcttatgacaaaattttaacaccagtaaatggtgcctatttcctcatattgatggtactagtctttggagggacatgggcttgctgtgcatgcaggaagaaacatcgcaatgaggttccatatcaagagcttgaaatggcactgcccgagtctgcttcagctaccaatgtggaatccgccgaaggttgggatcaggactgggacgatgattgggacgtcaatgtggcagtgaagtcaccggcagcacttgcaggaagcatctctgcgaatggccttacttctagatcttcaaacaaagatggatgggagaataactgggatgattagggttatcaggaggcaaaggataagggagatgataggattaaccaaaaagtggaaaaggaaagaaaggggaagcatcagagttggggaagattaagagcaagggatgtgagaaatgtggctgtgctggggcctaattttgatgcatgtccatgcaagggactgcaaaaaagaaaagaggaagtgtaatagttttaacacattggaattttttatttttttttgtattgaacgtgtaatagtgaatgccctggcccaaacgggaaactaaagaaactgtaaatgaaatataggaggtaaagtatattttggctttatcaaatttatatacacactattccagtgatcacagaaaaaaaaaaaaaaaaaattgttattgaaaaaaaaaaaaaaaaaaaaaaaaaggggggacaacaaacatataaacatttaaaaccgggggcttatttccgaacgggaccctgaacccctaaaattttttc

SEQ ID NO: 72073 - DNA, 507 bp, Glycine max
  Clone ID: PAT_MRT3847_36094C.1
aaaaaaaaagggccctatatataccccgaccaatcccatacccaggggtccagcttggcaaccaaccaccccgggaaaccccccccataaaaacccccaaggggggccaattaaaactaaaaaccccaaacccctcaaattaaaaaggaaccataaccccaaatccggggccaaaggtggccccattggaccctttcccttttcaatccccctataaaaattttaaccccccaccataaaaacccctccggggccgggggacacattttaaaaccaaccccttggccggccccggagcgggggaaacaacaccgggggccccgggggcagaaatcttgacgaacccaaccttttgggggcccccaaccccgttttcgggggaggaaaaacccccaaaggcggcgggggggggccccggggaaaaaaccccccaaacaaggcccatgggggggggggggagggccccccacccacccccaaaaaggagggcgagggccaccctgagga

SEQ ID NO: 72074 - DNA, 481 bp, Glycine max
  unsure (1)..(481): unsure at all n locations
  Clone ID: PAT_MRT3847_36095C.1
ttccaatgacaggtttcccgatcatcactgtatgacgatccgccgatctttggccggtcggttggggggcgaaaaacgtaagattatgtagccgagagtctggggagagttaagcgtcgatagcgtaacatacaggaaacttacacctataacaatactaactaagcagttaggttcgaatcccataaagttggccataatataagcctaaattctgaagtttgagctatcggcatattagccatggaatttggcacactcattttaccaataaacctaactatgttaactgctaaatgtatccgcaaattaatagaacacctgtaacgccccacagttggccgagtattagcccgtatgaggtagattttatgcgccatacccatggactgtggagagttgtggccccctaactctttgggcgttgggttccaccttcacgttccacattggatcccaactataccggacncccacaact

SEQ ID NO: 72075 - DNA, 425 bp, Glycine max
  Clone ID: PAT_MRT3847_36096C.1
acgggaacaaaaactatgattaagaaaggcgcaagggaaatttacatgttagaacctgtagaagcattacacacttccccatcctatggaaaaagcttcaccaactgaagcaaataaaaatcttacaatggtgaagtgggccatagaaaagagttaagtatacctacatttctatatcttctatacaaaacccaaccccaaaatgggaatttcaaattcaatctcctaaccatcaaaagatttgtttgctcaaaagacgagtttaaatcactattgaaggctttacaccacccccaccacctcagctaaaaaaattatgggtttcaacagactaccctttaaaagattggtagcttcaccactctcgttgttaccttcagaacgcttcaagtgcagctgcatatggtactattaaattgacgact

SEQ ID NO: 72076 - DNA, 286 bp, Glycine max
  Clone ID: PAT_MRT3847_36097C.1
ctctgccgtttcctggctccacttcactctcaacaagaagaagaacaagactcttaaccagagacggggacatgcaaaatttgcgttgtcatcgcaaggaactaatgttgggaaccgggtcattgatagggagattcttggttttacggaatttcatagggataacactcttactgagattgggaagttccatgatcaccatggagaggactaccgtgtctttgaggaaaacgagatccacattcttttttgaactcttcagtggtgcaaaatttttttaataatt

SEQ ID NO: 72077 - DNA, 491 bp, Glycine max
  Clone ID: PAT_MRT3847_36098C.1
aaaaaaaaaaaaaaaaaaaaaaaaaaaaaaaagaagaaaaaaaaaaccaaaagaagggaaaaaaatacgagcaagaaaaaaaaaaaagaaaaaaaaaaaaaaaaaaaaaaaaaaaaaaaaaaaaaaaaaaaaaacggaagaaaagggggacagaaaaggggggcggggttttgacccggacggcctccaattcccggaaagaccccgccctcctgggaaggctttgggcccctggccgcgggccccaccccaaaccgggggaaaacccataaccgggggggggaggcacccgcgggggggaaaggggccccggggggggaaaaaaagcccccggggggggccggggccactggggggaaagtcctggggggccctgcggccccttagaccccggggcccgcaaggggaaggggccttgggggggcccttggggggataaggggaacaaggcctttctgggtctcgcccggttttccccaaaggccccgggc

SEQ ID NO: 72078 - DNA, 237 bp, Glycine max
  unsure (1)..(237): unsure at all n locations
  Clone ID: PAT_MRT3847_36099C.1
agttatttgaaaaaacccaaaatgnnattcgcccagcctgtttttgtaggttcgcacacccaaactctnnggacgaaattttaaaatggggaaagggttacaaatagttgaagagggatgagaacacatgggcaaacaacacgcaaaggcgagtcggggtagaagtcacatgcggaagtggacgaggaacctgacacaaccccgaagggacaaactatctgctgaccgtgtctacct

SEQ ID NO: 72079 - DNA, 300 bp, Glycine max
  Clone ID: PAT_MRT3847_3609C.1
cacacacatcacagcatggacgccagagagaaaacagagcaaatcaggatttataacaccagctaacaaccggatgcgagaaaacaacatttttttttctttctagaaccagcatacataatgctaggtttagagtcacataataacatggaactcacccagaagatgattttgctaagtaaaacccaaaaactacacaataagcgatacggatttaatgccctttgggccgtggccatacaaaacataagggatcctaaatgcgaccatgccacaaggactcgggcggaacctttccac

SEQ ID NO: 72080 - DNA, 152 bp, Glycine max
  Clone ID: PAT_MRT3847_360C.1
cggaaacaaaacatactcttactaaaacaacaggggaagggggagaaataacaatcttatttctttaaagtctgaataaaagcataatatcaaataacacaaactgccgcaaattcaaagacacatgaacccaacattattcgttaatacca

SEQ ID NO: 72081 - DNA, 1301 bp, Glycine max
  Clone ID: PAT_MRT3847_36100C.1
ccggctgcgagaagacgacagaagggggatggagtgagggttttacgccacatttgtattttttttctgttttttttattcacaaagcagatttccaatcttaagtaatagttgaaataatggaatggaatgtgaaaacagcgtatagcggccttctcaggagttatttaaaggagaaactaagattgcgaaaatgaaaatgacataaattaggcataaaatgcagtagagagttcaagtgtagatgggaagatcggtccaggcaccagagacatgtccattctcacaaacataagccctaaccataggctccccatcgtcatggaagccaaagccaggcatgaagcaaaaggaatagtgcatatcccaggtgaactcagaaatgcggaaggcgcaagggagatccatcttcctcttcttcccagcctgaatagtcctccaaaccatagttcgcctgaagttcttgaaaacccctctgaagaggcagtacttgcgcttctcctccttgtgcacgcaccctggccactcgcacacgtacaagcaatcgtaccggaacttacgcgccaggagcttgcttccttgttcacggcttagtgtccagcttcccgaagccaggtgtgagctccacgcgcgggagagcttgcgcttcttgctgcacgcgctgatcgaagccacatccacgcccgctcttacgctaacggattccgttaatcgcggcgactcggactcggttgggacgtagagcgtgtcgtagtagaggtcatcgtaaagggaccaacaagaggaagaacaatcatcggattgaggaggttgttgttgttgttgttgtggtggtggtggtggtggtggtggagtggtgttcgaaggagaatcatcggtgatgacgttgaagttgccggggccgaggtcgcgttcgaggccgaaatcggaggtgtcgaacaggaggccggcgtggcggaggccggggcagcagaaggagagtttgtggagggagagaggggggtcggaggcggcggcggagaggaggtcttgggggatggtgagggagcatttggtcttccaacagaaatccctaacgagggaagagaatttggtgcagacacaggctaagcgagcccagtggcgaggatcgtcttcgagtttgtagaagatgttcagaacgatgtcgtcggttagttccgaaaacaggttcttcttcttttcaatttcactatccatcttcttctctttccccttctctcacaactccattactatttatttatcggacacagcactactgacaaagcacggacgcgtgg

SEQ ID NO: 72082 - DNA, 466 bp, Glycine max
  Clone ID: PAT_MRT3847_36101C.1
gaaaacccgggacgacccacgcgaccgtggtgagaacacagaaagagaaacagaaacagggggagaagcaacaacgacagggggcctcggaaaacacactcagaaaaacgaactaacggagacgcagacgaacgggaacctcagcgccaagaatgaggccgcgagggagataaggaagatggatcggaaaacgacgacgacgacgacgaagacgcgcgcgaagctcgccgcagcgggagtgaatgaaccgcacgagcagacgcacactactaccaacgacgacgcacgccaatccacgcacctcgcccaacacaaccacgctggacgcaacgaacgaaacaagggcaaaaaacggacagaaggtgccacgccaccaccgggggagctccccaagaagcaaaatagcagcagacgagaaacagccacaggtgcaaacacgacaccaccagctgccgcatccaacaag

SEQ ID NO: 72083 - DNA, 107 bp, Glycine max
  Clone ID: PAT_MRT3847_36102C.1
gaatttgaaattggatttttcactttcattcgatcaatcaggataagtggaatctccaattccggctccaaattcgcaacccctaataatactccttctaataaatt

SEQ ID NO: 72084 - DNA, 285 bp, Glycine max
  Clone ID: PAT_MRT3847_36103C.1
caaaattcaactcaaacatccctaacacatacataacagaatcagaaacagagacacaccataaaacaaaaacctacaaaatattataaagcaattaagaacaaaccataccccaaatcacatttctaccataatattcctaatcccaaaatcaaaatttataatattaatataaagcagacgaatattaataaatttcctttctatatccatctaattaattaaaagacggcaaatatttcaaataaaaccctaaaaactactcgcattacttacaacaaatac

SEQ ID NO: 72085 - DNA, 408 bp, Glycine max
  Clone ID: PAT_MRT3847_36104C.1
gggggaactggagttaattttattcagggtacgtgcgataactatcacagcgggtaatgatttgtggcttgactggctagcatagagaatgacagaatacacgcgtaaacatgtgctaaggagttacacactgaataacagttcattgtgcaaattagttacatccatactatactggtgcccctaccaggtttaggcgtacatgcttgtatttaattgttagaaacatggatagcagcgtcagttgagaccatttagttcaccccacatccattgcgacctctgcggatcttgtagaatacctggtttgcccaactgtaccgccatgaattctttatgagccagtgaggattttccttaaaacgaactggagcatataggccagaaccataccccaccaaaagaacc

SEQ ID NO: 72086 - DNA, 286 bp, Glycine max
  Clone ID: PAT_MRT3847_36105C.1
aaatgccctttttttccacgaaaataaaaagacccactgttgagggcctataaacaacaagccggggggaaacttttttaaacaaggcttacaaacacctttgaaggacaaaaaccccacacaccttcgatgctttaaaacccatccatgcaccaactctatccatcgggtctttataaaaaaaaaatccagagccgtgtcaaaaaaaaaagcgccaaacgggtgatggtgcaaaacgggcccttcacactgggggggtcttccccaccttaacactgaaatcggg

SEQ ID NO: 72087 - DNA, 277 bp, Glycine max
  Clone ID: PAT_MRT3847_36106C.1
aactgtatttatgcccccaaaatggtcattaagctatcatcaatgccattcgagatattgatctgacgagagagttctggaggttgcaaaaacattccggagaaagagcataccttgtgatgtgatatggatggataacagatacatggatggttatcgttgcttcacctatgacaaggagcgatttcgacatcccacatctttagtgaaagatctacattatagtcgatgtagagctattcggatgctggatcctggaattaaagtcgaagaaggt

SEQ ID NO: 72088 - DNA, 382 bp, Glycine max
  Clone ID: PAT_MRT3847_36107C.1
catactcgtgtcgtttcctattatgcaccgtcaataatcaccggatatcaacatctgatccaactgttacatgttgacccaagtctaccgctttgcattgtgctgttgtaacctgctcatacaactgtaagtcgtgatctgtaaactgtgagtgcacaatacatcagatcgatgcgtgacaaatgattctctgttctgagctgatgattatagatcgatgaatgcaggtgccgtcatactcgacgattgcattacgctctactgtgtggtgatagatacctgactgaattccaaattctgctactatgactaatgcgtataacagacactgtaccaagaatcatagactgacagtcatagatcaatcgctcagtctgaaatg

SEQ ID NO: 72089 - DNA, 562 bp, Glycine max
  Clone ID: PAT_MRT3847_36108C.1
ctcacgaagtacagataaacattggctctctaataatcaccagtggtacacccacccccatttgtgagtcgagccctgaatagactggaattcttaccacactctctacacatataacagtactttcggggaaaagaccagaaaacattgccccgcccgaatgtagggaaatctacccattccacagttctgcctctgatgtcatgaaccctttggacttatactccacgctccctccttggaatagtgaaatttatgccccaagggtaatgaccccccttgtccccaagatccatgggaccccccctttggatatatgttttaacacaccttgcccttgtggctacttccactgccattgtagcctcactcccagtcctggccaaccttccataaatcctctcacgttctggcccactgaatgtcaacacaccagaaaagttagcgctcaccttacgtgaacgaccaaagacgggctgaggcccgagctccactgatgggggcggtgtaactgggggggcacgccccacttgctttgtacttccttaaccgtggacctaac

SEQ ID NO: 72090 - DNA, 462 bp, Glycine max
  unsure (1)..(462): unsure at all n locations
  Clone ID: PAT_MRT3847_36109C.1
tagaaactctagacgtccaagaagcagagaaattgtacatgaaagcggaagtacaagaatatcagaacgaacagtgcatggttatcaaagaagaaaaggatgaactgtgcccgaacaccaaagaaaaaatggacgaattacaactcccagagaactacaacacatgtcatcacttctatcatctgtggaaagatctatgcatgcctaccattacattttttcgttcactgcaacttcttggtaaagaactgggaattttgtttaaagatctatgcaggttgattagtacatgtgcatcaggacacaagagagagaaacaagaagatccagagaaacatcaacaatgtcaaatatcaatggcagaagatctgggccatgagcatgttccaccaaatttggtttcatgtcttcagtctgtgaagcttgcatacatatatactcttggcctttcgggagnagggg

SEQ ID NO: 72091 - DNA, 305 bp, Glycine max
  Clone ID: PAT_MRT3847_3610C.1
tacggctgcgaaagaccaccgaaggggggagtgagaccccattcataataatgagggagggggtagtggcgatttcaatgaagcaaacaccatgcaagccaatttgatgccaatcacttgctaaaatctattgtgtggacctcttatagaggtatcgatccttaccaataacaggaatgcaagtgatctatgtcgcaagaacaacatcacttgagctctcatcctcatgaaagatggctgggacaataatcctacactaaggtcatccgcaactgtgatgctctaaaaatcatcattatgatcac

SEQ ID NO: 72092 - DNA, 1266 bp, Glycine max
  Clone ID: PAT_MRT3847_36110C.1
ccacgcgtccgcgggcggggttttaggttgctcttcttcttcaaccttagccatggagtctctcccaaaaattcgtcattctcacatctcactcaatcactcactacttcaacgaggttctcagtgccatcgttcttcatttccgacacccttctcttccctctctccaccactccctccattctctcctatcagagtctcatcttcaccatcaccgtcacccaaaccccaaaaccccttaaccctaaaccttcttctccctcctctcgtcaaacccacctgcatcgccatagccgcgaccgcattcttcttcatgcgcctccactctccccccgttgcattcgcatcgacgccggtcgctccaccggaatccgccgagtcggaaactctacccaacgaaagcgccactgaggagcaacttcgcaccaccgacaccgacgcgcttcaatcgctccttcaaaccaagatcagagccctcgaaatcaacgaagcgattcgcgttttagaccgtctgaccgagctcgagcccgaggagtccgagtacccgctcctaaaggctcacctgcacatgcgctatctagagcacgagctcgccgcgaacgtgttcgaggaattgcttcacagagatccgttccacgtggaggcctatcgcggcctcttaatgctgacttcagagacaaacaagccaacggaggaactattgaagagaatcgaagaggccgccgcgaaggtttgcgaggaacaagagagggattccgatgtgagggaccttaagttgttgattgcgcagataaaggttatcaatggggatttatccgaagcactgaaggtgtatgaggagcttgttaaggaagagcctaaggattttagaccttacttgtgtcagggtattgtgtattccatgctgagaaagaaggatgaagctgagaaacagtttgagaagtatcgtgctcttgtcccagaggatcatccttataagcatcattttgaggaaaatactcagtttttggagaggagaggagtaggtggtgcaaagagctgagattgagagtaaggttctttgtttaggaaaatgaagaatatgttttttttttaatgctgatagcttagttttgttaaataattcggatggtgatccgggtatccgggtgaatggtgttattttatttttaggtgattaggtttgctgagtgggattgtttcgcaaataaaaatatatccaattgtttcccggaaaatttttgaaatgaaaaagaagtgttcgac

SEQ ID NO: 72093 - DNA, 248 bp, Glycine max
  Clone ID: PAT_MRT3847_36111C.1
ttaacttattcacaactaacacccattatctctaattcccctcttcacaccaactctacttcaaatcattctctagcatccaactatcctaacatatttaataatgctactgcatctataaagattatccattctccaaacgcctccaatattataaacattcaacttagaataacatcatccatatggtatagaattgtccaaagaacaaatgttcacactcctaagagaccaaatatatctaacat

SEQ ID NO: 72094 - DNA, 238 bp, Glycine max
  Clone ID: PAT_MRT3847_36112C.1
gaccgacgcgtgcggtgagcaatatgaccccattttagacagcattcaaccatcatcctattctctgaaaaaaatgcatttagatcataagaacgaagctacacctgaatccaacatcattctaatgcccaaaaattcttacatgtctttatactctaatgataataacaatctttaacaagtttatcctgatatttctaccacttcttaaaatatatcattaatatcttaatataca

SEQ ID NO: 72095 - DNA, 386 bp, Glycine max
  Clone ID: PAT_MRT3847_36113C.1
gggaatcttacgagttttggagctaaacacatttgtgcaggacacatatacactttttaaggctatcattttgtgagacactggtgctaatcgatgtctttgtactctttagccttgcctttttcacaatgtgtaccctttgatctaacattgaagatacaactctcactatactgactttattatatattatgcaatccctttgctacttatagctttgatttgtgagaaggacattatctaatcgtgatcaaggcagaacgatggatcatatcactactgaggccactgtttaccgatgctcaattggtccttctggcattattgatcggacaatagctttcaggggtctttattgccagtctatctcacattgtaggcaccac

SEQ ID NO: 72096 - DNA, 386 bp, Glycine max
  Clone ID: PAT_MRT3847_36114C.1
aacaaaactcaaatgaagtgaattaaacaatgcagaggacttggggttgaaacaggtactgctttcattctcctttgtatatcagaagttgctgcctggcttggctcaaacaaaaaaagaagagcaaactcggcaccaaagaataacttttgcagttcatacatttggttgacttacaagtatttggtgtaattctcatttttgttgttgttgtgttgtgttaggaaggtcagagaaattgcattgcaggaatcactgaaagagcaagttagaaatgtttgctggtgttatgtgagggtgaatgtcctttgatatgaaagccgtgtgagagagtgattgtttttacttactaattcaaaagcataaatgtgaaattttttacaata

SEQ ID NO: 72097 - DNA, 375 bp, Glycine max
  Clone ID: PAT_MRT3847_36115C.1
ccccaattgcttttatgatcaacatcctttgttgtgtggatggaaaattcttgcgtgaatggacgcacccactgttgacttgttctttaaggatagcaatttataaaaaatatgtttgcaaagtttaatgtggaatcccttctgaacttccattcacagttatttccaatagcatgtttaatgagatgctacttaaatatagctatgaaaaattactgcgccaggctcaaactacaagtatgtttttacaatccttcaaaaaattcgtttcttcgagtgtgtatggtgatgatatcttaattagtgctcatgaatttatcaagcctcactttaatggttctatattgaaaaactctttagcttgtcataacatca

SEQ ID NO: 72098 - DNA, 141 bp, Glycine max
  Clone ID: PAT_MRT3847_36116C.1
aatcttttcatgtgtatcacaaaagaaaaatggagatgtcgtcgatggaacaaaagaaagataccgaactggttgaaaggaaaaagggtggttacagaaccattccctttatcatagcaaacgagacctttgaaaaggttg

SEQ ID NO: 72099 - DNA, 280 bp, Glycine max
  Clone ID: PAT_MRT3847_36117C.1
aggaaccggaccggaacccacgggccgacccacttttaggttgaaaacccaaaacaagccaaaaggggccgggggcaattacaacaccgcaaccccccggcgcgaaaacgagagaacaacaacacagccagggcggacaacgcggcaaccagaacggagccaaggaccgggaagaaaaccgcgacgagcacggaaccgaccacaccggaaagaacagcggagacgacgaacccaaaagggaacgcaccaaggacaaccacaacgaggccagaagaggaag

SEQ ID NO: 72100 - DNA, 330 bp, Glycine max
  Clone ID: PAT_MRT3847_36118C.1
ccacgcgtccgcttctggataaaaactcaaaagaagctaagttcctattttcttaacacaaaataagaaataaaagagaagaaaaatgagataatttctatgtgatttcagtatacaaataaacatatgcataacacttatcatatttcatgcagagaaatttcctgtcaatttagaggtcgccaatccaatactatctcccaggcatgcttctaacttgggattaaaacctggttctacccttgataaggttggggcttagcaatccaaaatgaaagaagtagcagcaacaaaggccaatgaaactagaccaaatattaatggttcaac

SEQ ID NO: 72101 - DNA, 365 bp, Glycine max
  Clone ID: PAT_MRT3847_36119C.1
tataagatttgattgaaaggactttgtgaatttcatattactggagtcatattacaggaaattttaaaagatgtgaatttaaatacattgaagaggcatgttattggagtgtggtcaattggaaagatgaatctagtttcgtatatgggagcgggttgagcaagtatagcagcgattttgacatctgcaatgcaagcattagtgatattagggggcgtgggttatccttttaccctaccatgttcaggcacttattgtgcttagaattgtgtacaaacgggaaattattaagtagtggacatgattgtgaatgtctatattgtctgtacagatagagaaaaaatatgggaaaaaagaaagtccaa

SEQ ID NO: 72102 - DNA, 510 bp, Glycine max
  Clone ID: PAT_MRT3847_3611C.1
tgaagagaatctgaaagatttgtattattgatttccgtaaaatgtacaaaaggtgctaagctactgggtgtacaaactatatatagcacagagcttagactaatcctaggactaaaaatatacaattgaaactaaagagaaatggtattccatatgcttggtcttggcatgcagtataggattgtgagagaaacaatattctgattgtcataaaaaacagagtaggttgagtaacagaaaggagctagcaattcgaaggagagtttgataccaaagtagctcagtagtaaattgagccaaactacaatattctgcttcttcagctgtgcttctggctacaactgtttgtttcgttgaacccccagaaattgtagcaggtcctaaatagacatcagcccatgaagtagagcaatggtcatcaggatcagatgctcaatcagtgtcacaaaaggtacatagcaccaaaggttgtggcaacactcaattaggaaaaaagaaatgagctctgtc

SEQ ID NO: 72103 - DNA, 397 bp, Glycine max
  Clone ID: PAT_MRT3847_36120C.1
aagacgaaaaactcaaacttaaaatccaactttttttttcaggatttcccaccttggttttacccctggtgaaaggaacaaaaaaaagctgctttgcaacaaagtagatttaaattttcaagacagggaacggccccccaggtgtttttaaagaaagaaaaaagaaaaaaggggaagggaagggtaaaccccaacaaaaaccaaaagatataagcttttttgggggaaacccttaaacccaaaaaaccctttggggaaagcctgtttggaggtaacccctggtaacaaaaccccatggggagggggggggggtggcattttatgaagaaactcccccccgcccatctcaatatacaagatttttttttttactagggaaccaatcttttttttttga

SEQ ID NO: 72104 - DNA, 445 bp, Glycine max
  unsure (1)..(445): unsure at all n locations
  Clone ID: PAT_MRT3847_36121C.1
aggcaccataaactctgagggaaaaacacaaaggctgaacctcaacaaccgccggcatcacgatgtggtggagcatcatgggaacaaccctgaccaccaactgaggctctgaagtgagggccctagtggttgaactttatcacccgtacgggacccctgccacacgggtggaacacgcatgatcccgcatcgagcgagggcgcccatgatacaccagaacgacgtgctgaaaaacaaaacagaccgcagagaatcaaacttgggcgtccgctagggaaagaaataatggaggggaagagaatgacccagcggatcccaccacaattcttgcaatcgaagctacagcacaacacacacccaaaggagtgaacctctaaacacgcngtcgcgtgagtggtgcgccatgaactaacaacaacagaggtgcgcctcccagatgcaggta

SEQ ID NO: 72105 - DNA, 368 bp, Glycine max
  Clone ID: PAT_MRT3847_36122C.1
tggcagatcaacgatatatagtatggctcgatcaccatatgcaagagtttatccgggctctatgctcaagggtggtggggtggctgttgaaggtgagccgtcatcttcagctcgccatgcgattgatcatgatatgctttctggatccaagcaaggggtattaaaacgtggaagttctctattaggtaatgatataggatcctttggtccaatacgccgaatccgtcacaagtctaatcttgtatctgctaaaagccttaccttacctcatttgggaaatgctctacctatagataggagtagagttggcattgatgctgctcaccaaccttcatcttccatgcagaagcctaatctgttgggtgaag

SEQ ID NO: 72106 - DNA, 489 bp, Glycine max
  Clone ID: PAT_MRT3847_36123C.1
catggtcgaggtggagaaattatcggcactcaagtatctggaggtagcatgcgccgagggccgcgagtacccggatctgccgttgcagctggaggagctcgacatatgtaatataaccgagaatcagctgcgttgtgtccagcgcatgcccgggctgagcagcttgcagatacacagttaccatggtccgaacatgactctccctgcctcgcagtacggcaggctgctgtggctcggcgtgaccttcgatactgaccacaagtcgaccatgctgtcacttatccgcgccaatgcctcctctctgcgggaactccatgtttgctgtgccccctgtgccgaaactgacacggagtattacttccccgatctgggccaggagctcgcgccactgggcctgcgagtgctgcggcgcctcgtccttgcacgtcctgaggcatcctgggcctcacaccctttcgctaaatgtgtgctgcagcggcgagctgttca

SEQ ID NO: 72107 - DNA, 628 bp, Glycine max
  Clone ID: PAT_MRT3847_36124C.1
agtgagtgtgtttagcgacttgagggagcttgcttcagcagagagcctggatacctttacactcatctatacaaatatactcgaacatcaacctgactgcccgcctgaagttgttgagaaacttgttggtctacgagaaggcattcctcggaaggatgccaaggaggtcattcaagagtgcaaagagatatatgagaattcacttgttgatggaagacctccaaaggcaggttttgtttttcgacgtgtgaagtgcttaacagcaaccaagggagggctttggcgtaaactcacttgaagtcgtcattctcataccctaccaccaacagaatgcactctcctcaatttcttcttaaaatacgaattagcttggttctaccttatgttgctagcaaagaagaagctaacgtatttgttagtagcatgacactgctatcaccctccaagaaaatgcaagaatcttaaaatgttattaactattccaaaatatttaaacctattatttaatattaaaatgcacatttatttatcacttgactcaatctcaaatatccacaattgatgagtgagtgttgtaaatcttatggtattgtatttgattccttaaaaaaaattcattgttggatta

SEQ ID NO: 72108 - DNA, 369 bp, Glycine max
  unsure (1)..(369): unsure at all n locations
  Clone ID: PAT_MRT3847_36125C.1
tttccgtcatcactgtatgacgtcctccttctttggggggggggggggggaaactagtaaaataacggtgtaagccggggataccagaagagcgtataacgtataatatacccgttaggccgcttatgggcaagatagcatataggcagaaatagagagtataaagaggacggagcaaggaggagagaggaaggttagcggtggaggcctataacgtgacacttatatgacgggacgggagatagcctagacagaatccggcaatcgagataatgggaccgcaataggtgcgatgctagccgagggccgatagccantgcagagcggtgctgaccaataatgcgaacaatattcgcgaatgggaaaagt

SEQ ID NO: 72109 - DNA, 2480 bp, Glycine max
  Clone ID: PAT_MRT3847_36126C.1
aaaaaattctaatcagccggtagaggagtttaatctttctaaaaaaatgtaatctttttccctttgtttttcatattccagggttgttgaaatgcaagaaatccttgatcaacagattgcagaagaagcagcgtgaggctgaaggggatggcgcaatggcatcagttgcaaatcctcgtaacaacggcataaaatcaacaagtgcaatggcttcttcaaaaaatttaacgcagcaaaaattgaaggttcaggggaaaggctataaagataaatgctatgagcaaataaggaagactgtagaaggacggtttaacaagcttctaaatgagcttgtgtttgaggacctgaaagcagctttagaggaagcacgagcgattggggaagagcttggagatgtctatgactatgtagctccctgctttcctccaagatacgagatattccagctaatggtaaatctgtacactgagaggtttattcagatgctaagattgcttagcgacagggcgaatgaattaacaaacattgagatattaaaggtaactggatgggtggttgaataccaagataatctgattgggcttggagtcgatgagtctctagcccaagtgtgttctgagagtggtgcaatggatcctcttatgaattcttatgttgagagaatgcaagctacgactaggaaatggtacttgaatattttggaggctgatagaacacagccccctaagaaaactgaaatacgaattagctttatcctagcttattttgctactaaagaagatactaacgtatttgttagtaacatgacactgctatcaccctgatctcatatgatagaatcttaaaatgttaaccattcaggtaatgattgattttcaatcagctgaaaagaagagactagaagaaccagcttctgaaattggtctggaacctttatgtgctatgattaacaacaatttgcgctgctatgaccttgcaatggagctaagtaatagcaccatagaagcccttccacagaactacgctgagcaggttaattttgaagatacctgtaagggatttcttgaggtagctaaggaagctgtgcatcaaactgtcagtgtgatatttgaagatcctggtgtccaggagttactggtgaagctatatcagaaagaatggagtgaggggcaggttactgagtacttggttgcaacatttggtgactattttggtgatgtaaaaatgtacattgaagaacgatcttttaggagatttgttgaagcctgcctggaagaaacagtggttgtttatgttgatcatcttttaacacagaaaaattacattaaggaagaaactattgaacggatgaggctagatgaggaggttatcatggacttttttagggaacatatcagtgtttctaaagttgaaaacagagtgagtgtacttagcgacttgagggagcttgcttcagcagagagcctggatacctttacactcatctatacaaatatactcgaacatcaacctgactgcccgcctgaagttgttgagaaacttgttggtctacgagaaggcattcctcggaaggatgccaaggaggtcattcaagagtgcaaagagatatatgagaattcacttgttgatggaagacctccaaaggcaggttttgtttttcgacgtgtgaagtgcttaacagcaaccaagggagggctttggcgtaaactcacttgaagtacgattccattcagttattcatatagcttgttttgcctgttaaattatttgttccttttgcctaattcccaaatgctttgctgtcaatagaaaagttttgtaaaattcatttaaacaagtccgtagttcatgacaccctcagtttatttcagctcccgttctcagttttaccttgaaccaaatgtgctgttgacattttcaagattacctacctctctgggtgattgtattcaaaagaattaaaacagttaatcttgtttgcttaacgttggaaaccacgtaggtgaatgtaatccgggaatatttttgttctgtgcgatttagggtttttttttttaaattaggaatgacactagataggatcttataatactcatccccatacccatttctaaaaatattactctttatcggtttcgtcattctcataccctaccaccaacagaatgcactctcctcaatttcttcttaaaatacgaattagcttggttctaccttatgttgctagcaaagaagaagctaacgtatttgttagtagcatgacactgctatcaccctccaagaaaatgcaagaatcttaaaatgttattaactattccaaaatatttaaacctattatttaatattaaaatgcacatttatttatcacttgactcaatctcaaatatccacaattgatgagtgagtgttgtaaatcttatggtattgtatttgattccttaaaaaaaattcattgttggattaaaaaaaaaaaacaaaaa

SEQ ID NO: 72110 - DNA, 451 bp, Glycine max
  Clone ID: PAT_MRT3847_36127C.1
aaaaaaggaaaaaaaagtatcggaccaattagaaaaaccattatagcccaatcaaaaaccccggggttgcaagggaagaaaacccttttggtgcccaacattatgggtcctaccccgaaccccccaaggcccaccccaaaacacctttctctctttctttgcccctttttatcccaaccggtctttgaaatcaaagaaattccacccaagaagaaccaccctcctcattcattcaatccaactaaagtccgaaggtttacacccaaaatccagctttgggttcacctgggctcggataaacctttccaggcgggaaattcccccagttaaacccaaagcctctggggggggcactttggtagagcccgggggaaaaaaaaaggggtcaccgggtccccccaggggggactcctttgcaagggcagctgccgaatatgcgccccttggggcc

SEQ ID NO: 72111 - DNA, 445 bp, Glycine max
  Clone ID: PAT_MRT3847_36128C.1
ggaaaggaaaagggatcatttttattccggaaaaatccgccccttataggttcaaataataggggaaactaatatggggggaaaagggatagattcggaaactagcaataaaaccccccaaaaccgggtttcagttcaccaagcaaacggaaaaaccctgggatcccaacttttgaaaccccgagttaaaaacccaaattttttcccacaaaggaaatttacaaacccccagccttggcaccaagaaaatttttggctaaaaaaaattagggccccattaacttcacgaatgtacccagaatcccaaaattacgggttctggaaggaccccatattttttgagaagcccctgaccgggtaaaatagctccggccttttttgaacacgtttggtagaaatatccccaaatttttttgaggccccaagtggaaacctctgaaatgcc

SEQ ID NO: 72112 - DNA, 581 bp, Glycine max
  Clone ID: PAT_MRT3847_36129C.1
cagcagtctagaaacaaatcaatcattgcagcaaatggcttggtcaataaattctcatcaaggcaccaatacccccatggaagttccattcatcctcatgacagtgatttgtcagataatatgtatggacaacaacagatatcacggttccagatcttgagcagcttgcagaagaatcagagatttatgcaaatagaaaacttgcctccattgaagcttgccccacctgctgtgtaccatgaaaaggtaagtaaagtggcaaactttctgaccggagaaactagcaatagttccagtgctattgagaaacaaaatagaaacaagcataatcgggagctgagatttaagggttcatcaattcgatttcctttaaaatcaactatatttggcaaggagaagaccaataaacggtgactaactggtttttttttaaaagaacaagagactgtgtaggcgagagagatcaggcactaacaaatgtacagactaacaatagatatcttcccccgttagtttttatgttgggggtgaatgtaacataggttgatgattattcggcctgggatttacttgaaaaaaaa

SEQ ID NO: 72113 - DNA, 458 bp, Glycine max
  Clone ID: PAT_MRT3847_3612C.1
cccacgcgtccgcccacgtacaccccatagggaaaaaatttcttcacatttacaatgaagctatccactctattcctattcctattccacctggctcatgctgctctgtctgacgaagctactttcattagagatggcctcaaatcctattcccagcttgatctccctcactcggtttttggttctgaaagtgtagccttcgattgccatggtaaaggaccatatgttggcgtgtctgatggtagaatcctcaagtggcacgagacaaagagagagtggattgactttgcagttacctcgccacacaggaacaagaaattatgtgatgggttaacaaatgacaagatggaatcaatgtgtggaagacccttgggcctcaaattcaacactttaacttgtgaactgtacattgccgatgcatactttgggcttctggtggtaggaccaggtggtggtgt

SEQ ID NO: 72114 - DNA, 259 bp, Glycine max
  Clone ID: PAT_MRT3847_36130C.1
aggaggaaataagcccatatcatttcttggtggagggaccaaccccagaaacaaaatagcccttgggacaaacaggcttggttggttttttcccccgggtttttttgttaaaaaaacccaattacacaaacccccccccttaaggccttgggccccagggtttggcaaaccattgggagagattttttatttaagccaaatggtttaatttttggaacctaaaacccgcttccaaaaaaggccaccattaccccccccc

SEQ ID NO: 72115 - DNA, 393 bp, Glycine max
  Clone ID: PAT_MRT3847_36131C.1
atggtcaatgggtccaaaatcttgggaaagaaggcaaaaaaaaaaaaaatactgaaaacatttaataaccgtcctgtcttcccgagcaaccggaaaggaagaagggtgagggacaaggggagccccgatcaatgataattaaaaattgacccaatagcaagatttgggggagggggccgcccccttcggacacggcgaggggtattataaaagcctacggctgaagatccccctgcgtgcccccaaccaaattggccaatatagttttccccccacacagcagtggggggccccccattcccatttggagtgtggcacccccggacatggaaacccgcttgggaatgaagaaaaacccagcccccaaaaacacattattttggggggagaacc

SEQ ID NO: 72116 - DNA, 226 bp, Glycine max
  Clone ID: PAT_MRT3847_36132C.1
gaagagaaaaaccaatttgtttttgatttttggggggtccaccccaaacagtagttaaaaacttcatggcaccattccaaacccaaaattatggcagggccggttttcttttccatgggtttataccccccttggccccttttggttccctagaataaataggacaaaattttttttcccaaaaaccacaaggggcataactgaaactttataaacgtcatacttt

SEQ ID NO: 72117 - DNA, 250 bp, Glycine max
  Clone ID: PAT_MRT3847_36133C.1
ctgtccttggatcgggtgctccgctatccttccccgttttgctgcctgtgctcgtggtcggggctctggttcgcggcgggggctactctgctctgtcattcgtttcggcccatgcttgcgccgcatccttgaactgtaaagtttgtgtttagcgaatggttttacttgcgggggccacttccgctggcagagacgggggtcatctggggggtgcctgtccgttttgccaacccttttacgctgccattta

SEQ ID NO: 72118 - DNA, 578 bp, Glycine max
  Clone ID: PAT_MRT3847_36134C.1
ggctcgagctcgaaacttgtatttttctttcttctttggtggagaaaaatcagtaatctttagaattggtcgtttatgaagtttcttggaaattcttctaattgattccatcagctcttcattttttgtcaaaaaaagaaaataggcagagaaatgaattgtttgacttggtttgagagtcaagctgttgataatacagggtagaagaagaaacaagtaaactaatgttaacagtgcgctgactctgaagagtgcctaatttctttctggttcctgtcaactgaatatttcggctattgctttctatctcttcaattcattgtaagcaagttgaaagttgatgatatgataacactgatgactcggattttttcacgcagacagcagattatgtcaaatctgtggcttataacctcccagaagagagaaccttgacaactcaggactatatctgttttgttgccatgagtatcaattagcagctttctctaggccactgttgtccattgttctgcttctacatataatctgctggaagagatcacttgaactactataacacagttgagaccaagtca

SEQ ID NO: 72119 - DNA, 214 bp, Glycine max
  Clone ID: PAT_MRT3847_36135C.1
acttaattgaatgaaaaatgcgggcataagggccaacttgtgtacataatcaggacaaattataaccatatacgatattaaacaatgacaatttcaaaacccccaatcgatcggttaatcctaaagaactcaccctaaaggatctctgtttaactccactttcaacaccaagcaactatttacactctacaactgattgcagcacagctgctat

SEQ ID NO: 72120 - DNA, 463 bp, Glycine max
  Clone ID: PAT_MRT3847_36136C.1
acaaccaacgttgcccctttactaaggggggattttaaacaatggttaaaattgtaaagcttttgacagggaaacatcgggggaaaaatttaaataaaaaattttttacctaattcagagttaataaaatcccggctgaatttggtttagggggcaacttttcttttaaccatgggaaaatagttcggcatgaatttatcaaccctttttattttgaggggcctcaaagggaacttgaacaaacaattgtccattccagggcaccacagcccacctctggtgagtatcaattcttgaagggaagctgacaacctttttgaaagggggccccccccatggattggcaaaatttttgggctttccaattatgaccaaacgttcagctgggtctgattgaacacccccctttttccgcagaagggccggaactaaagcatatacctcaaaacaatcttttgttttt

SEQ ID NO: 72121 - DNA, 191 bp, Glycine max
  Clone ID: PAT_MRT3847_36137C.1
tctggttatatctgagtctcgatctgatgcacttgttcatatagctgcattggcaattcgaagtgagaatggtttactgctctaaaggtggaacataatcccgacgatcatatgcagtcttactcaaggtcattacttcagtgatgccagatactctcggtgacagactgattgggcttgtgatttcaaga

SEQ ID NO: 72122 - DNA, 432 bp, Glycine max
  Clone ID: PAT_MRT3847_36138C.1
acaaaagggccaaggcaacaaaaagggcagggcgaaaggcaagggcagcaaaaaaggacaaaaatttttaaaaactggccctggccccaggccattggaaggttggggggtcaaaccccaacaaaaaaaaaaaaacagtttattttgcccaggcccaatggttccaaggccccaaaaaccaaaaaaaaaaccggggggcaaggttccaggacccaaaaaaccgcccccccccataatcaaagggggggttaaaaaaaaagaaaaaaaaacccccccccaaaccacctttggggggccaaaaaaccaaatccacccctcccactttgggaaccccccaggctggccaaactggccaggctttccaggctggccaaactggccaggcttcccaggctgaaactaaccggccccgggcggttgaaatttttgggg

SEQ ID NO: 72123 - DNA, 882 bp, Glycine max
  Clone ID: PAT_MRT3847_36139C.1
gactcgaaagtggattttgcccatctaatacctcattcttttacttaaaagtattaactttgaactctctaggagttctagtggagtcacacgtggatctaggttttctccttcaagctctcactccatcttggaactccgttcctttgcttgtggggttcttcacttacttggccgttgctggatccattctccctggaaaacttgttcctggcgttgcactactcgatggaactcgtctacactattgctgcaatggtctgctctcgcttcttctgttggttgcacttctcgggatcggtgccaagatgggttttgtgtctcccactgccatatcagacagaggacttgagctgctgtccacaacttttgccttcagttttcttgtaaccctgatattgcatttttccggttgcaagtcacaaagtaaaggttcatcactaaagcctcatctcagtggaaacctgatacacgattggtggtttggtatacaactaaatccacagttcatgggtatcgacctcaaatttttctttgttagagctggaatgatgggatggctacttatcaatttatctattcttatgaagagcattcaagatggtactttgagccagtcaatgattctctaccagctattctgtgcactatacatcctggactattttgtacatgaagagtacatgacatccacctgggacataattgcagagagactgggcttcatgttggtctttggagatttagtgtggattcctttctctttcagcatacagggatggtggctcttgatgaacagtgtggagttaacaccagctgccattgaagcctattgctttgggtacctgattggatcatggtttttcgaggagcaaacaagca

SEQ ID NO: 72124 - DNA, 1510 bp, Glycine max
  Clone ID: PAT_MRT3847_3613C.1
tctcgagccgaatcggctcgagacggtagacgacagaagggggattcatgtccatttaatttttcatgtgaagtatatccctagggaaaaataatttcttcacatttacaatgaagcaatccactctattcctgttcctattcctattccccctcgttcatgctctttcttacgaagctgcttatattagagatggcctcaaatcctattcccagcttgatctccctcactccgtttttggttctgaaagtgtagccttcgattgccatgggaaaggaccatatgttggagtgtctgatggtagaattctcaagtggcaagagacaaagagagagtggattgactttgcagttacctcgccacacaggaacaagaaattatgcgacgggttacaaaatgacaagatggaatcaatgtgtggaagacccttaggcctcaaattcaacactgtaacttgtgaactgtacattgccgatgcatactttgggcttctggtggtaggaccaagtggtggtgtggcaaagcaattagccacttctgctgaaggggtcccatttaggttcacaaatgccttggacatcgacaccaaaactggtgaagtatatttcacagatagcagcatcttgttccaaagaagggtatacatatcaataattctgagcggggatagaactggaaggttactaaaatacgttccaagtacccaaagtgtacatgttttggtcaaaggtttagcgttccctaacggtgtggcacttagcaaggacaattccttcattctagtagcagaatcaaccacttttaaaattctcaagattcaacttagagactccaagaccaacaacaacaacaatatagagccttttgctcaggttccacgctccccagataacataaagaggaacaacaaaggagaattttgggtggcacagaacagtggcaggggattgattcagaaattgggaaatgaaattgaaaccacacttccttggaatgcagatcctgtggcaattaaatttgatgaaaaggggagggccattgtggtattagatggagaatatggaagacaattggactctgttagtgaagtggaagaacatgaaggaagtttgtggataggctctgctgtgcaaccattcattggtcttataaaagcttaggcctttatttacgtgtttgtggaaaaattattaagtggtcctcaatcactaccttattcatggtgttagcagatttttatatgacacataattaagtatgtgtcacgtaaaaattagttaagactatagataagtaatgatttaaaattacctaataatttttcgtgtttgtgtgttttattttcaggtcaaattttaaaatccaaattccaaaataaaatgtattttggataaaataaggttgggttagttttctttatctgatgttaaaagacttttcttctgattttaagaataataaaaaatggtattctcattcttaaaaaaaaaaaaaaaaacctaaaaaaaaa

SEQ ID NO: 72125 - DNA, 431 bp, Glycine max
  Clone ID: PAT_MRT3847_36140C.1
aaaaaactgtttttagtttttacactaaaaaaaatccctttcttctattgagtccatgtccaagaatcacgttggaattgcggatcggagctccggtggattttgtggccgttgaagccagcaagggtggtgccgacacggtggttgccgttgtgcttccaattttttccggcaagggcacttgttagttccttcctcagattaaaaggtcaccggttcaggactcgccctcaactcggacaccaactcaaccaccttgtcctaatgtctgtggagagcgaaactgggtcgtttcgggactctgaaactcggaacaatcttcgaagaattcttgagtcatgctctaaattggcggaagctggagattttcatgaatctgaaaacacagcagtttcagagcttgtcgagttccttgattctttgttggatgc

SEQ ID NO: 72126 - DNA, 205 bp, Glycine max
  Clone ID: PAT_MRT3847_36141C.1
ctagagcgaaatgcgccaaatgagatcacgacttcactgtttaagataccaagggaaacgatattgaccttggaggctacaaaggaatggtcacttatcattgtcaatgttgcctcacaatgaaggcttgactaattgaaagatacactgtgctcagactgatgtttgaaaaacacaaacagaaaggtatgggaattcatggcat

SEQ ID NO: 72127 - DNA, 239 bp, Glycine max
  Clone ID: PAT_MRT3847_36142C.1
ggggggggcccaaaaaaaaaaatttttttccccccacaaagggggtcctttcctttccaaactttgcccgaaaattggaaagcccttttaaaggatgggggttcgaccaaaaaaaatggtgaaaaaagccgccgccccccattaggaatccttcttaattggggcggggggttggtttccaagctcccggttcccaccccgccccttgaagcctgggtgcccaaatttttttcctaaaa

SEQ ID NO: 72128 - DNA, 507 bp, Glycine max
  unsure (1)..(507): unsure at all n locations
  Clone ID: PAT_MRT3847_36143C.1
tgacggtgttaatatttagtgcaaagtgaataaaccttccacttaacttgacggtatccccctccaccaccaccctccgccgtcaaatacgacacatcgatcgctagttgtgccgctcgtgttttcctgctcctcactccgtcggagacttgcacggttaaactgtgcattttgtggcgctgcctccgcaaatttcgttttagtgcggcaagaataatggaaagcagggaaggcaaatcaatttctgatttggaggaagaattttttcacaaattcagagatttcatgacagggattacaaacattgatgagttgggaattgctggaagcaagctgctgtctggctttcaacaaacacttgagtttattaagaggcctcctatagacatgaattctaaattagttcacaatataattgtagctaatgaaactgagagagttaaggcctatattaattctggatgtangaaactaaatgaaagtatccacactgtnacatacttacac

SEQ ID NO: 72129 - DNA, 421 bp, Glycine max
  Clone ID: PAT_MRT3847_36144C.1
aaaaatgcttgcaaactataaatttattcatgtcataaatggggaacataaaatgaatacataattgtaagaggaagtttctgcccaaatgataaccttcaccaagcaagaggctgggttagttatctgatttatctgacaaacttcctgaagaagcacaaggctttacctcaatgataccagatttgaaagaaatggcaaaaaacaacaactcaaaagacctaaaagagacagaagttgaaatcagtactttgcttgcctgtatgcttgaagttaagcttacagtaatttgttaaaaatttattgtttttgcttccaatttggaaagccatttacaggttagcaaattcaattttgtcaaaggcgagcccagtatgtaatttttgttgcgccaaatgtaacttctaagaactggttttaa

SEQ ID NO: 72130 - DNA, 625 bp, Glycine max
  Clone ID: PAT_MRT3847_36145C.1
ctcatcaccccactgccttgatctctttgactggccccaacacgttcagaatttttgcagacacagttaaaatcttctatgatgcaccacatctagctggctttcttgcttaatcttttttatttcctcccataaagctctcttcaatactatgtcacagggtgcatatgtatttacaatggcaattctttctccatcttccttccaaatgccttcaagcattatgaaaccactacccactacttcctctgcattgcaaatgattcttcactccatatagacaaaactcctcctgctgtatttattgctggactttctgcccagcaaacttcagaatcaccccacaactccatgcaaatggatctatcaattcagtgcccagcaaaactcctcccgctgtatttattgctggactttcttttttcgtctcatgcaaacagatcatatccacctgttcttttagtaccaatctccttattgaacttctcttaacaccatcccccctcctaggcctctgatgttataagtgaccaacttgattattctccatgtcctcttcccagcacatctgcattgtttttgtctcttccttctaatattttgattctggatatcatccttatct

SEQ ID NO: 72131 - DNA, 451 bp, Glycine max
  Clone ID: PAT_MRT3847_36146C.1
ggctccgaacctttgggctgatttatgtgcttgcatggtcgtgagaagatgatagaagggggtagtgtccgacccgaggttaggtaagtgcgagctaattattatattctgttcggcctatgtcattttccctcgtctcctcctcattccctaagccccaaaagcacaaagacggtagagataccttcacccattctagagctggcgaatgagggatatttcgataagtctcgtgattaaactcctgacgtcgcttctgatgtccgttctgagtaggatttagatagtaaagccgttcgtgaaatacgtattaaaattaatccggctacggctcctggagaaaccatgattaacgttaatgccgatcatcagaagacagcgtgcgatattcctaggaatactggtcccgctctaaacgacgcgggatcggacgttgataatcgtaaggctt

SEQ ID NO: 72132 - DNA, 320 bp, Glycine max
  Clone ID: PAT_MRT3847_36147C.1
ctcgatccgaaaaaacgacagaggcaggggttgtcagcttttgttgcccatgttgatgatgaggccgcctgggctaatgactagcgtacttaatggcgcctcacttttctctctcaataaaacatgtctgaagcctgtgtgtttatcaaccatgtcaaatgggatcatgacatcgtaaatgaccaaattatctttgctcataatgtggatgcttgcctgcgtggagagggtactgcttgtcgctaattgattgatgacataaaatgctcgctaacacaaatctttttcgaaacgtgtggcacaatttaaaagctcttatt

SEQ ID NO: 72133 - DNA, 233 bp, Glycine max
  Clone ID: PAT_MRT3847_36148C.1
cccgcaaaaaccacgaacccgaggggaagcaagagacgccgccaccggaagcaaggaggacacgaatgggcacacggaccaagacaccaccggaaggcggaacgaggagcacgccaccaaccaaaacagggccgacgccggcgccaccaacaagaacagccccaacaccggagacacaaaaaccgccccggccaacgaccaaaccaccacaaacacaccaaaggacaccacaa

SEQ ID NO: 72134 - DNA, 412 bp, Glycine max
  Clone ID: PAT_MRT3847_36149C.1
ggcagatagtgattgagaattgggaattgcgatggatgggagaaacggaagcggaagcaggaggagtggggaagcaggaggaatggggaaggcgataatcgcgttggtaattgggagtcttgtgtactatcactgtgcctaccgcaattctacccttgtctctcttttttccgatgtcttcatcgtccttctctgctccctcgccattctcggtcttctattccgacaaatgggcatccagagagtgcgaacgcgatcgtggcatggttggccaatacgattggtggcgccgagtcagtgttcagggtggcggctactgggcacgacaagaggctgtttctgaaggtcattctttccctatatctcttctctgctcttggaagactcgccagagggattacagttgcctatg

SEQ ID NO: 72135 - DNA, 382 bp, Glycine max
  Clone ID: PAT_MRT3847_3614C.1
gtgtattcttttttgctttaatagttttattaacatttttcttatttactgggggaaaaaaaaaagcccgtgaggggggcagggaaaagggggaatagaaagaatacaaaaaacaaacccgcgggggggggggggaaaaaaagggaaggactgggtcttgctcaaaacctctgggtaaaaaagggacactgaggagcacggccgggtctaccgcaagaccaggggcgaaaccaaggaccccaccccaaacaagggggctaaagggggggcccgggcccaagcctaaatacccccccctgcgaagggggggcgggcctatagcgcaacccaaattcaactccccgggcgggggaaaacaaagtctttactgggggaaccctgg

SEQ ID NO: 72136 - DNA, 864 bp, Glycine max
  Clone ID: PAT_MRT3847_36150C.1
gctgcgagaagacgacagaaggggggtccccatagatagtgatggcgtattgggttgtgcgatggtgggggggctcgcttgcggcagctcgaggagtgggcgggcaggtcgtatggtagctgtttggttataaaattgaaaaaaaaagacgggaaaatagaatggacgcagatagtgattgagaattgggaattgcgatggatgggagaaacggaagcggaagcaggaggagtggggaagcaggaggaatggggaaggcgataatcgcgttggtaattgggagtcttgtgtactatcactgtgcctaccgcaattctacccttgtctctcttttttccgatgtcttcatcgtccttctctgctccctcgccattctcggtcttctattccgacaaatgggcatccaggttcctgttgatccccttgagtggcaaatatctcaggagagtgcgaacgcgatcgtggcatggttggccaatacgattggtggcgccgagtcagtgttcagggtggcggctactgggcacgacaagaggctgtttctgaaggtcattctttccctatatctcttctctgctcttggaagactcgccagagggattacagttgcctatgccggactatgcttgttttgtctttacatctttgccgagtgctctcaatcaattaccttcttcgggagaactactgaaactgaagaacaagacaccatcatctaattgtaacataactactcattttcgctattgtatgtcttccccgtcaagaataaatcatctttgctgcactattcttttcaggtaagcctttactttccaacgatcaaaaaaaaaattttatgataaaaaataaaatactgcttgt

SEQ ID NO: 72137 - DNA, 2100 bp, Glycine max
  Clone ID: PAT_MRT3847_36151C.1
cccacgcgtccgacggctgcgagcagactatctttcgctgtccctctgcgtttttgacaccgtgtttgttgttgtgtgtgttttccgcggaaaatcaaaatgggtatcattgaaaagatcaaagaaattgaagccgagatggctcggacccagaaaaacaaagccacagagtatcatctcgggcagctcaaggcaaaaatagcaaaactgaggacacaattattggagcctccaaaaggttctagtggaggtggagaaggatttgaagttacaaaatttggtcatggacgtgttgcactgattggatttccaagtgtggggaagtctactcttttgacaatgttaacgggcacacattctgaagctgcatcttatgagtttactactttgacctgtattcctgggattatacactataatgatactaaaattcagttactcgatcttcctggaattattgaaggtgcatctgaaggcaagggacgtggaagacaggttattgctgttgctaaatcttctgacatagtattgatggttcttgatgcttccaaaagtgagggtcataggcaaatattgaccaaagagctggaagctgtgggtttgcggttaaacaagagaccacctcagatatattttaaaaagaaaaagacagggggcatttcattcaacagcactttgcctttgactcatgtggatgagaagctttgttatcagattctgcacgagtacaagattcacaatgcagagatccttttccgtgaggatgctacagtggatgatctcatagatgtcattgaaggaaaccgaaaatacatgaagtgtgtatatgtctacaacaagatagatgttattggtattgatgatgtggacagattagcccgtcaaccaaattctgttgtcattagctgcaatttgaagctgaacttagacagactgcttgcaaggatgtgggatgaaatgggtctggttagagtttacacaaaaccacaaggccagcagcctgattttggtgatcctgtggttctttctgctgatagaggtggctgtactgtagaagacttctgcaaccatatacacagaagtttggtgaaggatgtgaagtatgttctggtctggggtattagtgcaaggcactacccacaacattgtggtcttagtcataatcttcgtgacgaagatgtggggcacctatatttttttgtcacccaagtgttgtaacatcccctccccctcttttgaataatagtttttatcagttatgaagtgtgcatctatgatttgaagagaagcagaaagtaaaggaaacgggtactgcatcttgaaaattgtgtgtattttgaccaattcagggtgaaaaatggatttgcgccctgggctgaactgggtctggttagagtttagtgcaaggcactacccacaacattgtggtcttagtcataatcttcaccaaacttctgtgtatatggctgtactgtagaagacttctgcaaccatatacacagaagtttggtgaaggatgtgaagtatgttctggtctggggtattagtgcaaggcactacccacaacattgtggtcttagtcataatcttcgtgacgaagatgtggttcagattgttaagaaaaaggaaaaggaagagggaggaaggggacgatttaaatcacattccaatgctcctgctaggatatctgacagagagaagaaggcaccactgaagacataattatatgacactgcctgtgatatcattgatttttgcctggtggatgggaaaaaatgactggaggtgatgatacatccaaaggcaaaggttcttatcttgattgctcatgcaacataggattgaaagttcttcctgagcactaagtggggcacctatatttttttgtcacccaagtgttgtaacaccccctccccctcttttaaataatagtttttatcaattatgaagtgtgcatctatgacttgaagagaagcagaaagtaaaggaaacgggcactgcatcttgaaattttgtgtattttgaccaattcagggtgaaaaatggatttactcccttagcaaaacttgaataaagttgagccaaaagatctcaattgat

SEQ ID NO: 72138 - DNA, 229 bp, Glycine max
  Clone ID: PAT_MRT3847_36152C.1
catttccggagctcaccgtgtccatgttctacattttttggatcaacgtgccacagcttgttgcatttatgtcaagactatatccactctcattgtgtctttcagatctggtgcaccaccacatggtggctccagactacgggtggaccgtgtagggttgctcttctgtggtctttatagcattcggaagacataactctttgctagcgacccacttatgatagcgcca

SEQ ID NO: 72139 - DNA, 345 bp, Glycine max
  Clone ID: PAT_MRT3847_36153C.1
gggcaaaaggtctggggaatttaaaagcatttttctcccatggatagattggtgtccaaagtacatgcccgtttaaaaatccgtttacccaaacacgcacaactttttactggtccagggtttatttatttacctagaaacattaactttttagctttaagcacaggtgtttttcaaaacttaatttttattggaaaccacgacgtaaatgccccacgactttttccaaaggatttggtccttaccatgttatgtcgggagaaagttccctccaaatattaaatgcttgggggagatgccttaacggaaaccaaaaaagagctcaatttaaatgggagttagcaa

SEQ ID NO: 72140 - DNA, 700 bp, Glycine max
  Clone ID: PAT_MRT3847_36154C.1
cctcataaatttatcctgaattgagatctttcggctcaactttattcaagttttgccaagggagcaaatccatttttcaccctgaattggtcaaaatacacacaattttcaagatgcagtacccgtttcctttactttctgcttctcttcaaatcatagatgcacacttcataactgataaaaactattattcaaaagagggggaggggatgttacaacacttgggtgacaaaaaaatataggtgccccacttagtgctcaggaggaattttcaatcctatgttgcatgagcaatcaagataagaacctttgcctttggatgtatcatcacctatagtcatttttcccatccactaggcaaaaatcaatgatgaaatcacaggctgtgtcatataattatgtcttcagtggtgccttcttctctctgtcagatatcctggcaggagcattggaatgtgatttaaatcgtccccttcctccctcttccttttcctttttcttcacaatctgaacaacatcctcgtcatgaagattgtgactaagaccacagtgctgcgggtaatgccttgcactagtaccccagaccagaacatacttcacatccttcaccaaacttctgtgtatatggttgcagaagtcttctacagtgcagccacctctatcagcagaaagaaccacaggatcaccaaaatcaggctgc

SEQ ID NO: 72141 - DNA, 230 bp, Glycine max
  Clone ID: PAT_MRT3847_36155C.1
catgtctaacattcacaatcttctccttcccaagaatgctggtggatcatccaatgctgctgctgcaaacgatgactcttaaataagggttttttttccgtgaaaagttatccaatttattctctttggattctcactgtctttgtagtttttcagtttttgataattgcgttctgtacatgtaattacgttttcaatcactgatgtgaatatagaacactcattttctc

SEQ ID NO: 72142 - DNA, 412 bp, Glycine max
  Clone ID: PAT_MRT3847_36156C.1
ggctcgaggaagcttgcaattaacatggttctgctagagaagctctgggatgatgttgaggctgggcgtcaacctgagcgcggactaggcgagctcacaaaactcaccaccctcaacactattgatgaaggagaaagtagcacgctgcagaagacgatgccacgccggtggccactacacctacgagggcgtcgtcgacgtctacgtcgcctgtgtcaccaccggctgcaccacgccaccggaaagatcgcttggcaccacgtgagcaattctcctcacaaataccacactgtgctcagatgttagaccaaacacttctcaacactaccaactggatatcactcggctgaacgaccaggatgaccacagggccggtccgaacaaactgaacggatcagctctgatgaccatt

SEQ ID NO: 72143 - DNA, 164 bp, Glycine max
  Clone ID: PAT_MRT3847_36157C.1
agtaggctcgagtgttccttctcaaaattgagagggaaaaacttgattcttgaatttatcaatagaaaggtatctattctgaatgataagaaacagcagaatacaaatcggcactagatcaattcaagaatcaagtttttccttctcaaaattgagaggggctt

SEQ ID NO: 72144 - DNA, 114 bp, Glycine max
  Clone ID: PAT_MRT3847_36158C.1
gaaaagaaacaacccagttgggtctttgggctataagtagggacagtggactctggtttgcacctcctgatggagagatgttgcttggtatttgctcttaccgcactgcctatc

SEQ ID NO: 72145 - DNA, 256 bp, Glycine max
  unsure (1)..(256): unsure at all n locations
  Clone ID: PAT_MRT3847_36159C.1
cacttgccatggcagcagcagcgtcaatgtgtatgagcttcaacatggcaacagcattcaagggtctctcttnttcttcttcttcctcatcgttctacgctggacgtagtagttatgctctccgagttggtaccacatcggtggtgtcattgaaccgacgctgcacgctgtccatagagaacgcctatactaagggggtgggtagcaccatgaacggctgcgactcgcatggcaagcgtctcgtagtcaagatata

SEQ ID NO: 72146 - DNA, 1462 bp, Glycine max
  Clone ID: PAT_MRT3847_3615C.1
agtatccatttaatttagaggttggtagtattgactattgattctgaactgttcgatataagtgatacgtataactaaattaacttgtacatatttatattatgtgactttaaaacaaacatgagctaattctcattgatgatcatttccaggattgcatacatacaagatcatcgtcgtcgtttctgagtattggtagaagcacgacaatcttctacaaggtttaagacattcaaattcatttggtgtacacaaagtggggtcgacgactataatacacagctgtacaacacttaattttgctagtttccttcatttctgtaacttattccccaatatactcctgatgaaaaattatcaggaataagatacccataatacccctatattcttcagaactgaccctaacaagctaattagagctcatgggctgatttacgaagattagcaagtttgtctctccatatagctgcatctttaaatctttcctgtttgatagctatacgcatattatgcatcatacttagttcttgagctaccaaatctggaccatctacagcactgtcaagcaatacatcataaatagtctttttattacacactccgcccattccataaccaattctgatagcatctgtgaaaacaatttctttacttacatatattgcagccttgcatctatttgcaacattaatggcatctgagggacgggcatccacactgataagatcagttttccctggctgactaaggtataatctggcaaagtaagtgctgactactctctctgtaattctcaccattatcacttcatggtctagtcttccaactaggttttccacaaactggtactggtcaggacattccacactttcatgttcagattccgcatccataagtttctcaatagcaatctgccctacaacaatgggcagaatatagtctccatcgcaagaaatcctgagaaaaatcgtaggattcttgaaacgctgtaagaagccatgtctcaataaagtattatccgttctggacaagggaatcgacggcgtagacgatttccattgaaactccggttgaaatctatgcttccacatatgatagtgggagaacgtttctgagagaaggagagaagcttcgagataatcgttgttgttgtcgtgagagtcgccggagctggatctacggcgggaggaatcgcaggaaatgaggatggatctgcggcggcgggaccggaacggtgagaggtggagcggcgagaagtcgacggcgacggagctcggaacggagcgggcggtggaggcggcattcgtgtgatccgctgcggcggagcccacgccggatacggtgcggacgcagaaacgtgaacccagcattttgtatcgaaacaacgacgtagaatgctgggaaggagagagagagagagaggagagcggagaaggttgttgagattgaatgcgatgag

SEQ ID NO: 72147 - DNA, 146 bp, Glycine max
  unsure (1)..(146): unsure at all n locations
  Clone ID: PAT_MRT3847_36160C.1
cttctatgctagaagcacttcaatgggttggtggatttncagancaacactgtttcgtgaattgtacttccctcancctttactgtcntcaaagnngcaagcatcctcagaattacttcatncaggtncncctcctganttgnnnc

SEQ ID NO: 72148 - DNA, 506 bp, Glycine max
  Clone ID: PAT_MRT3847_36161C.1
gtttgcccttaatgtcgcgttggacaaaacccagtcttcacttgccaaacctaattctttgatccagcattatattgaatattcaatttttttaatatttggtttctgaatatatatgttctaccgttggattgccttaggtacagaatttatttagtattttaatctaatgactcctttccgttaaagcagaactatgacaatttgatctgtatactgatattttcacatgctgtctctcttctctatgttctctgcctcagctactaaaccaagcattgaattgaataatcaagaaacatattttacttgattctctaataccctgccagattgtccgagactgatcatgtcaagcacctcatttagctagaaaatccacaaactgattactttcctggaaaacatgcttcaaacttactatcacactcgttgctattaaatgaaaaagattatctgttgatattttttttttttgcaagagattccttttgagatcctctctg

SEQ ID NO: 72149 - DNA, 279 bp, Glycine max
  unsure (1)..(279): unsure at all n locations
  Clone ID: PAT_MRT3847_36162C.1
attcttgtgacccaaataaacgacataccatattgttggagcatatagaaccgatatgcaaggtattgcttctaaatagttacaaaggaaaacagacccacaacatatgttttttttccccttctgtatttcatgaatgttataataacttggtgccccatatttttcaagatgaaactagaccagaaacatggaccgcccatctcaattcacgttagtcttttattttctataaaaacatcgctaaagaatnaattattaaattaaaaagagaccaga

SEQ ID NO: 72150 - DNA, 254 bp, Glycine max
  Clone ID: PAT_MRT3847_36163C.1
ttccattatgtataaattcaaacatagtggttgagcaaacttctaaatcctttgtgtgatatatgataaaatatggaaatttcattatctgattctgttcatctctgttctattgattatgaattagcattttttatgaaaatgattatgcttgttgaggaattatcctttttagattatgcgatctcttatggataggggtgccaatcaaatccagcagcttggttggcccaaaaagagctcagaattgagcc

SEQ ID NO: 72151 - DNA, 332 bp, Glycine max
  Clone ID: PAT_MRT3847_36164C.1
aatgaaatgactatgctaccattttttatgtcattataattcttgtttccaaaaggcaacatagagtagcacaattttcctcctcaacacctcaatgctaagctgaagacaaaaatacctataaggtttgtacaggacagctttccccttattgggtcattcaccttaaataatccacaatcacatgtttgatcccaaaggagttaattctaagtaaaattgattgactttaaaacaattatcaagtaacttgtgtgttagataaacaaatttattccgaattttacttcctttaaaataaaggaaatctaaattccaatcacttcaaattc

SEQ ID NO: 72152 - DNA, 148 bp, Glycine max
  Clone ID: PAT_MRT3847_36165C.1
atgacattttctaagcattgttggatttgaagttgtaatttttcgattggcagattcggatatatttgcatggaaattagtgagttgatgattcttttccgcctagcagtcaactaaaattcaatgtagagtggattcctgtgtgttt

SEQ ID NO: 72153 - DNA, 207 bp, Glycine max
  Clone ID: PAT_MRT3847_36166C.1
tttcacatgagtatatcaaaggccaccatatatactactttgatgcagatattgatggcaagaagttgctgattttggacttgccaaacaaagtatggagggccagtctcatctcacaactttagtggctggaactcatggatatctaacaccaaaatatgcactctatggcaacttactgagaagagtgatgtgtatagttttggt

SEQ ID NO: 72154 - DNA, 172 bp, Glycine max
  Clone ID: PAT_MRT3847_36167C.1
aagtaagaaattattgggaccgaaaattacaattaaccgattttaaatggttaacccacattcacccattcttaaacccaattttaaggttccaggctttaacaaattcaaaccttacccgcttaccattaaaagaaaaagttttcgaagaattttggcaaattttaaaacc

SEQ ID NO: 72155 - DNA, 376 bp, Glycine max
  Clone ID: PAT_MRT3847_36168C.1
cctacactttcgaggacacgtgggttgagacctacccaaaacactgtgcttactgcctgccgggaggggaccattaaaacctgcattacacctgcggatgctgagagccaatctttcacttttaaaaacttgagagctaccagcctgatggaaaaaccttaacttacaagcaggatcagcaacaagtgtagctacatgcaatgactaaatagtactctaaagggagtggtacgagatttttgtaatatgtcctgacaatctgtcattcattggacttactatgctaacagtgtgattcaagatacgatgaaccaactgtgctatggtttattcagtcattaacggatgagcacaccattgatggcactgagaggat

SEQ ID NO: 72156 - DNA, 386 bp, Glycine max
  unsure (1)..(386): unsure at all n locations
  Clone ID: PAT_MRT3847_36169C.1
aaaagttttcgtggctccaacccaaagcgaaccaggtgcagttgctaaccctcaagctacagctaaggttctgttgctggcttatcacgtggggccgcctctttatggatcccttttgggggtcgctttgctgaattccccatttgtctaaccgcctaatccgtagggggtcctcccctgcctcttgggggcataaacatcttccatggcagggacggtcttgcggcgtgcgtgttcagtgttggggccagcgtcgcgaatgacgttttctagaatggtcttgtgaccaccgcgggtttcttcttagataagaccactgtttctcttgtcgcccccactgtttggcctgttccnctttattgcgggcttggtgattccctgaatgt

SEQ ID NO: 72157 - DNA, 327 bp, Glycine max
  Clone ID: PAT_MRT3847_3616C.1
acccacgcgtgcgcccacgcgtccgtgcacagatgcagatcttcgtgaattctttgaccggtaagaccatcaggctttaagtggagtcctacgacaccatcgataacgtgaaagctaagattcaagacaaggaagggatcccacctgaccaacagagacttatctttgcggttaaacagcttgaggatggtcaaacccttgccgactacaacatccaaaatgaatccactctccacctcgtgcttcccctcatgggtggcatgcaaatctttgtcaagactttgactggcaagaccatcaccctcaaggtcgaatcctcggacacca

SEQ ID NO: 72158 - DNA, 533 bp, Glycine max
  Clone ID: PAT_MRT3847_36170C.1
cttcaagagacctagtaaaagtatcagcctattgttcattggaaccaacaaagtcagtcatgatttcccctgacaacacctttactcttgcaaagtgacaatctatctatgtgtgtttagtttgttcatggaagaccatattagatgcaatgtgaagagcggtttgattgtcacaaataagcttagtgtcctgagtgcctaagtcttgtaatttcgcatgtagctgctaccatggcacaatgttaagctttgatgctgaatctagcaactatattttgcttcttgtttctccatgagatcaaattccctcaaagcaaaacacaataaccagaggtagatctcccgtccatggttatcgaattgaaagattcgaattgtgaatcagaaaagctatattacgaatcgtgaatcgaatcatattatgaatcgtaagatacatgatcaataaaatatatgacatttttaggtaaaaatgagtgactcggaaaaaaaataaaacctaatatatcatatattcaagtcataaatcaaaa

SEQ ID NO: 72159 - DNA, 262 bp, Glycine max
  Clone ID: PAT_MRT3847_36171C.1
atttaatgtagccggtgggcatcatagaaaagggactggagtcatattactgacatcatctatcacatgtacctactacaactccttctcagtgccttatacgcctatcgtttagacaattcctatgacaaacaactctcatccatttataccttgtatttatgaatatcatgtcatagctcaaacccagaaagaccacttcactaacggacacattttccatacttactacgctacacattgacttataatcataaaccac

SEQ ID NO: 72160 - DNA, 509 bp, Glycine max
  Clone ID: PAT_MRT3847_36172C.1
ctcctgtcgtttgggggtggggggggggggtggggggccaccacacacagaaagtaagggaggagtataggtggaagtcgacagaaaggaataggggaaacggggaaacgagggaggagtaagaggaaagtaggctaggaattggtaatgagtgggatgccacgtttcaaccgatgggcgggcagacaaactaaggtaagcgttaatgtgaggcggcaagcccacccagggtggccatgttgggctggttagacataacggtaccaccaataaggaatacgtctgcgttgttgatttctagcgttggcgatgttgaaagttaatttgggaacgatgcgggttttgtgtacaacccttgatagtaaagttagaccgtcggttgttggtaatgtttaggttggcctgatgacgtagaaaccgcagatgtggttaggccataatagacgcaaggctaatatcccagtttgggggacttgtactgttaggtttaattggtaaagtagacgatg

SEQ ID NO: 72161 - DNA, 1175 bp, Glycine max
  Clone ID: PAT_MRT3847_36173C.1
tgaagatgccatgccagtatctagttcaaagccaagtactagaggtcgaaaagggtcatctggtgcgtctcaaactacaaccagaggaaggggcaggggaagaggaagaggtagaggttccagcaccatgaagcagacaactattgatggagctttagggtttcgcgtttctcagaggtctgcatcagttgctgcagcaactgccatccgaagtggtgctgacgatgataacttggcttctgcttcaagtgatgatgccaataaaaatgatgttgaagagatcgatgatagttcggaaaatgaatccaatctaccaggacagaagagggctgcttcaaagggaagaggtagaggatctacacagtcttctaaacgcggaaggaaatcagataactcttcaatccatagaatgctcgtgaacaatgatgatgacgatgacgatgacgacaccgacatcagaaagagattaaataagtctcaacctcgggttactaaaagctatggagctctaagaaggtgaacaatctgttagatgtgatgttttctaccagccccggtatcaagataaatgctgtcataggctgaattaatagctgtattacattatatagtaaaatattgagtgagtgtgagttcgactagcttagtaacgtcttgcctgagattcggagatacaccggttcagcagaatagagttaagtaatgttatatgtgggcactgacgaaagcaaacccagctcgagaatgggttctgcagcattgcagccaggttgtgttatgctgaatgctttctttgtctggccaactacttaagaagttgttcttgagtttcaatgactacttacaagaattgtgttcaacacaagaagttttagggttgtcggctctagaccagaacccatttagtagtgggccacttcctgatttttctaggctttcatacttaaagacattgagacttcaaaataccaacattgttgggccattatcatttgaccacttgccccatcttgatgttttggatctaagtttaaaccatttgagtggaccaattcctatgttcaaggtcactaaatttgcctcattatactatttggacctttccaacaatgaattgagtgggaagctttcatatactattggtcaactttttaatctcatacttattccaagag

SEQ ID NO: 72162 - DNA, 493 bp, Glycine max
  Clone ID: PAT_MRT3847_36174C.1
ctgaaaaatagagctcagaccattgatcctgcatttgattaaactctaagtgagtcttctagatgaagtttcttcttagttattggaactcttagaatttgggcttatggcctaactcaacctcacaaaactgatttttaaggtagggattgcccaagcattatgagcaccacttaggacttatttttaattgatgtgtgatctcaacctgctaagagttcacttcctggtggctccacacttcacttggcctttctggtcagcccctttgtagatagtcttttctgagacactgacccaggggtgaccataccacaactaaggcaactttccaaccaaaacacaatgttaaattgtctaatttgacttttatgtagtcctttagtttcacctttaaattaatatatatatatatatatttttttttatcagcaaacttaataatatatattaattgagtaccagaggtactaacagtacaagtatcagtcca

SEQ ID NO: 72163 - DNA, 1384 bp, Glycine max
  Clone ID: PAT_MRT3847_36175C.1
ccacgcgtccgcggacgcgtgggttgggatttcatatgccttcggaatcgagataaagcaccacacaccgtttcactccatttcccactctttctagggtttccctgctatcttcctcaattcgaacccttcgcctttccacccttcgatttcttatcttccaattcgtcaagcgtatccgcgagtctcgatttccttctctgcaagcggattggtcgcttgtgaaggaggaacatgtattcaagagggagcggcggttacggccaatcgtacactggtcaatccgcatatggccagaacctgggtggcaattattctgggagttctgttggagggcatgatgtgggtcagcattctgtggcttctaggcattcaacaattttaggtggttctcaggacgttgatgttggtgggtataggccttcggctgcgacccagtatgggggacagtatagttctgtttatggctctgctgcattgagcagtgcacagcaggtcccttcattgagtaccaagggttctgcatcatcagctttagatggtcgtggaggctatgctttgggtgtctctgattcacctaagtttgcatctggagattatgtctcgtcctcaagccatggatatggtcacaaatctgatcaattgtatggtgacaaaggtttggaatattctggaatagataggagacaatatggtgaacggcagagtggttaccttggtagggacttaacaagtgatccagctggaagatatgctgctgatcctgttggatttagtcatcagcgtcagcaatcagaaatttatgatcgcattgatcaggcagctttgcttcgacaagagcaattgctgaaagctcagtctctgcaagctgcatcacttgatgggggtgctagacaagctgattatcttgcagcaagggctgctgctactcgtcaccccacccaagatcttgtgtcttatggaggaaggatggattccgatccccgtgcttcatccatgctaagtgctacttcatatagtggacaacatgcgccatcaatattaggagcagctccaaggagaaacgtggatgatctcttgtattctcagaatgcttcaaatcctggttatggagtgagccttcctcctggtagggactatgccagtggaaaaggtcttcatgggaatgccatggagttggactatcctggaaatgtgctgccacatggtgggcatactgatcgcaaagatgaccgggcaagttatctacgagaatttgagctaagggaagaagagcgtcgccgggagcgcttgcgtgagagagagagggacagagaaaaagagaaagaacgggaacgattgcgagagcgagaacgagaaagggaacgtgaaagggatcgcatta

SEQ ID NO: 72164 - DNA, 244 bp, Glycine max
  Clone ID: PAT_MRT3847_36176C.1
actaaagagcattaggttgctttgaccaatcagattacaattcttattgtcaccacggttttagtgtggaacagatatgaattatgttggtaactaatcaccataaaaaaactggatgagagttttctccaaaacaaattttttaactatccacaaaatttaccgagacttagccgtgcagagacctaatacaggtccaaccaaactgggtagataactaaacttaacacgtgtactgtaattt

SEQ ID NO: 72165 - DNA, 457 bp, Glycine max
  Clone ID: PAT_MRT3847_36177C.1
cttcccctggctgaagacaccagacgggggtgatagtattataattcattaccatctttcggtgtggtctgtccacccaaacgcctaactctcaacaccttgtcccctttggtatacgtcatgaatggcggaaagcccaacgcctaatctaaaacagccgaacccgaacttgctgtgaataacaaaggagcctacacctacgctaagcaactcgacgaaaaggggaaggcaccctaagacgctaacaagcccaacaggccttcaagtgctttctacggtttcatggacgagttcaggaaggtattcaacaaacaacatcctgaacacaaatcactgtctgcttggtcaaagctgctaagagcaaaactggacaccatgtctgatgctgaaaaagcaccttatgtggcgaagtgtgtgaacaggaaagtggtgtaccagatgaacatgacagcctata

SEQ ID NO: 72166 - DNA, 715 bp, Glycine max
  Clone ID: PAT_MRT3847_36178C.1
aaataatgttactgtaaacggacagcccatatcagattgcatgattaagaaggctgaaaagctagctggaccaatccagcctgggaattactggtatgattctcgagctggattttggggtgtcatgggtggaccatgtcttggaataattctgccattcatagaagagttccggcatccaatgccagataaatgtgctggtggaaatactggtgtttatgtaaatggtagagaacttcaccaaaaagatttagatttgctttctcgtagaggacttcctcgtgatagcaatagatattatattgttgagatttctgggagagtccaggacgaagacacaggagaagatctggacagccttggcaaacttgcaccaacagtggagaaagaaaggcgtggatttggcatgaaagtacccagagcagctgcataatacaagtgtagaaataaaatttcttctgagatttgagaagatctttgtttcacccttccacagatttggaaacattttttcggatcagatcacgggaaatttttgaaatcttttcatgatttttactagaatttattcagtctgctgccaaggtccaaaccattttccacgtggcttgcatagattatatacatgatatgtaaatttgtcattcttgtactataaattttttgtcataaatggtttaccaaaaaaagcataaacaattttttgctcgcaaaa

SEQ ID NO: 72167 - DNA, 174 bp, Glycine max
  unsure (1)..(174): unsure at all n locations
  Clone ID: PAT_MRT3847_36179C.1
ntgaaaactacgttaattacttctgtagagaaccaacaactcctcggtagtgttgtaatccagtcaaaaagtatttttcactggattacaacactnccgaggagttgttggctctctcctgtcgctgttggcgttttctgcacctcgtgccgccttccgcgctttcgttcgcgt

SEQ ID NO: 72168 - DNA, 305 bp, Glycine max
  Clone ID: PAT_MRT3847_3617C.1
ataaaaaaactaaattaaaatttattgaaacactgcattttaatattatataaaaaaaacactgatcaaaaaaaaaaaaacacttttcaacaattactttaataattcttaaaaaaaaacgttattttaacaataaaccatccttgtaatttttcaaaaactgtatataatagtcttataacaaaacataaagaactttctcatttggcctaaatatgcacagaaactatataatgaaataccttcctaaagaatattctcttgtttcattaaacaaaattctcgaacaacataaacaattcgct

SEQ ID NO: 72169 - DNA, 197 bp, Glycine max
  Clone ID: PAT_MRT3847_36180C.1
tcggtgaatggctattccttattgccaagaaataaggatgcatgaatgtgcatatatgaattgggatcatgtgcttacttattaggcctatcctgaagccaaaggacatgagatcggaatccctcggggaattccaattccacattgtcaagaaataaagacgcaaacgatgtcatatatgaaatggaattatttgt

SEQ ID NO: 72170 - DNA, 479 bp, Glycine max
  Clone ID: PAT_MRT3847_36181C.1
tacggctgcgagaagacgacagaagggaggcccctttctttaaagcagtaatggcctgtcaataagatcaataaaagacttcagccagcatatataacacatctgaagataaaagaaaacttataacatattataggaatcaataaataagcacagttcatggataacattcaactggcaagcaccaagagcagctactaaagtctaaaaattcaacaacatactgtcaattagtcaatataatagtaacagtataatgcatttgccttgtattcctgtggcaaaacatggtatttgacacccaaacaatccataaaagagaacgataattaaatagaaagatctccaaatggtcaaattagtgaaacataaattcaagaaaaaattaatctaatattcacatagtcaaatatctaaaatgtttagtccactaaaaaagcatccaaattttctaacaacactcagaagtcacaacacat

SEQ ID NO: 72171 - DNA, 866 bp, Glycine max
  unsure (1)..(866): unsure at all n locations
  Clone ID: PAT_MRT3847_36182C.1
agcaaattaaagatatatatagtcattcacatagtaatcatcattaatttcagaagcgccaatatatgatgaatggtagtggcggttttatgatgctgacgcttaagtccggcggttttcctgtggaagtcaacacccaaaagctgaaacgcactgacagcagacaaacgggcgtgttctctgtggaaaggttcatcacatactcggtggttggtatgcagcgactcctttcattgaagataactaaggtaatcaaagccgagaaagtgaacatagtaaatcttagcttcgcagaaaaatctggtaagagctctttagccaatttgaaactgcagataataagaaatgacaggtacggtgttctatgtttcatggacaatgaattatctgggtcgtacgaattgcgcaagataaactattgcgtgccagcattggacacagaaattgtatgctacgtttgtcgtgagagcggtgacagaagttgcttcactctggaaaagaagaaggcgaacgactatagtaacgtggtggagagggtgaagggcacgcattcctttgtggttggcgacgagactctgaatgtgaaagtgaaaataacaaatgacagcagagttggtttacgtgttgatgtggatggccccgtgaaggttgcgacggattattcggaatatgtcttggagaaaatccaggagaagattaatggtgagactgaggctagtgccatgttacattttggaaacagcaccgaccaacctccgtatgttacgaactccgggagatcctgctacaaaatgaaactatctttaccaaatgagtaattaaacctaattaataatatttggatactttttacttgttctnnnnnn

SEQ ID NO: 72172 - DNA, 380 bp, Glycine max
  Clone ID: PAT_MRT3847_36183C.1
tacggctgcgagaagacgacagaagggggtgtgaaagataccctacctagccacaatgcacatatctcgcgacaaccctaactggcgaagactatatccctcagaggtagagtcatcggacacattcgacaatcgtgaacgcgaatatccacgacagggagggcatgccgctggaccaacaccgcctgatcttgaccgtttagcagatgaaggacgggcgcaccttcgccgactacatcattcagaatgagtccgcgcttgacctcgtcctcctcctacgaggtggtgccacgaagcgcatgaggaatacctacaccgagccctgcaggatcaagcgcatgcacacccatagtctagctaagtccttcttcagttctaca

SEQ ID NO: 72173 - DNA, 412 bp, Glycine max
  unsure (1)..(412): unsure at all n locations
  Clone ID: PAT_MRT3847_36184C.1
agctcggaattcggctcgagcagttcccaaagtttattaacctttttggttatgttttatgcattagcagtgatcacgtttggtactgctgtgccagctggtcaatttgttcctggtataatgataggatcaacatatgggcgtcttgttggcatgtttgtcgtaaagtattacagaaggctcaacattgaagagggaacgtatgctttgctgggagctgcatcttttcttggaggctcaatgcggatgacagtatctctctgtgtcattatggttgaaatctcaaataacttaaaatttttacctcttattatgcttgttcttcttatatcgaanngctgttgtgatgcttttacgaaagtatctatgangagcaagctcaattgaggggcattccattactggaaatcaa

SEQ ID NO: 72174 - DNA, 261 bp, Glycine max
  Clone ID: PAT_MRT3847_36185C.1
aggggggtctgtccaacacatgctatcagcagcgcagactagcatcactttgaggcgtctcccacagaaagcctcttgcagagcaattgctctggctcgaatgacagcgtctcttgtaactagacccactgctacttcaatcaaagacttgcacctaaggctagcctcccacataaacccaatggaaattgatcggacaggaggaattatcatgactaggagaaacatcagggactgagcaccacctttgccgagggaaca

SEQ ID NO: 72175 - DNA, 435 bp, Glycine max
  Clone ID: PAT_MRT3847_36186C.1
caacatatttggatccaagccagatgagtttgcagaggataaacagaacctctttgacattattcaaatgtaccaccagttgaaggcacggcaactttctgtgcagtcagatgcaaattccttgatcacttaccctgaatatattcttccatacctagttcatgctcttgctcacaattcatgtcccaatgttgatgattgcgaggatgttggagcatatgatgatatataccggcagttgcacctaatactgtcaatgctactgcaaagagaagaagatgcttagtcagaagttactactgacaaagagaaggaacctatatctactatcacttctatctttctgagtatcaagcattctgaagacatgggtgacacatcaaagtcaaagaattctcatgcattatgtgagcttgggttagcaattaccaaacg

SEQ ID NO: 72176 - DNA, 1077 bp, Glycine max
  Clone ID: PAT_MRT3847_36187C.1
ctcatattccactcactacccagaaactagggtttaccgtcacaccccaatcgtagccgtcgcactttgcgttttctgcgtcatctccgattccccgacaatggccacccaaatgagcaagaagagaaagttcgtagctgatggagtgttcttcgctgaactgaacgaggttctgacaagggagttagccgaggacggatactccggcgtggaagttagggttacgccgatgcgcaccgaaatcatcatcagagccaccagaacccaagccgttctcggtgagaagggaaggagaatcagggaacttacctcggtggttcagaagaggttcaagtttcccgagaacagtgttgaactttatgctgaaaaggtcaacaataggggtctttgcgctatagcacaggctgagtctctccgctacaagctccttggtggcctagctgtgcgcagggcttgctatggtgtcttgaggtttgttatggagagtggtgctaagggatgcgaggtcattgtgagtggaaaattgagagcccagagagccaaatctatgaagtttaaggatggttacatgatttcttctgggcaacctgtcaaagattacattgactctgcagtgagacatgtgctcctgagacagggtgttcttggcattaaggtgaagatcatgcttgattgggatcctaaggggaaacagggtcctaaaactcccctccctgatcttgtcacaatccattctccaaaggaggaagaagaatacatccagcctgctccagttttggctgctaatgatattgaggtccctgttgcttgaaaagttatacactggagaagtaattcatagtagctgagtgcctagtttttcttgtgtgcaatgtttgttgtcaaagacatgttcaaaattttgtagtttcttgaattttgaagaaattgttatactcagttacaagtattctaagttatttgttttatctttttcataccctttgtcttatgtagtttgaagtcttttgtttgtgattcacgtcatagatacagttctgtgttattttccttgttttaaagctttgtttgtttacc

SEQ ID NO: 72177 - DNA, 1290 bp, Glycine max
  unsure (1)..(1290): unsure at all n locations
  Clone ID: PAT_MRT3847_36188C.1
gctattttgggcaaaaaaacacgttttcgtgaagaaaaatcaagtcgaagtacttccgtaacgcttccgtaagcgattctgtggaaattcttcatcgctcttcgtcgttcttcaccgttcttcatccgttcttcgttcgttcttcgttcttcaacggtgtgtcggcctctacctatatattccactcactacccagaaactagggtttagcgccacactccaatcgtagccgtcgcactctgtgttttcagcgccgtctccgatctccgacaatggcgacccaaatgagcaagaagagaaagttcgtagctgatggagtgttcttcgctgaactgaacgaggttctgacaagagagttggccgaggacggttactccggcgtggaagttagggttacgccgatgcgcaccgaaatcataattagagccaccagaacccaagctgttctcggtgagaagggaaggagaataagggaacttacctctgtggttcagaagaggttcaagtttcccgagaacagtgttgaactttatgctgaaaaggtcaacaataggggtctttgcgctattgctcaggctgagtctcttcgctacaagctccttggtggactcgctgtgcgcagggcctgctatggtgttttgaggtttgttatggagagtggtgctaagggatgcgaggtcattgtgagtggaaaattgagagcccagagagccaaatctatgaagtttaaggatgggtacatgatttcttctgggcaacctgtcaaagattacattgactctgcagtgagacatgtgctcctgagacagggtgttcttggcattaaggtgaagatcatgcttgattgggatcctaaggggaaacagggtcctaaaactcccctccctgatcttgtcacaatccattctccaaaggaggaggaggaatacatccgacctgccccagttttggctgctaataatgatattgaggtccctgtccctgtcgcatgaaatgttatacactggagcagtaattcatagtagctgagtgcctagtttttcttgtgcaatgttttttgacaagttcaaaattttgtagtttcttaaattttgaagaaattttcatactcggttacaagtattttaagtaatttgttttatctttttcataccctttgtcttatgtagtttgaagtcttttgtttgtgattcatgtcattgatacagttctgtgctattttccttgttctaaggtaatgtttgttaaacaatttttgaagagnnnnagaatttaaaaaattacaattca

SEQ ID NO: 72178 - DNA, 1007 bp, Glycine max
  unsure (1)..(1007): unsure at all n locations
  Clone ID: PAT_MRT3847_36189C.1
ccacactccaatcgtagccgtcgcactctgtgttttctgcgccgtctccgatctccgacaatggcgacccaaatgagcaagagaaagttcgtagctgatggagtgttcttcgctgaactgaacgaggttctgacaagagagttggccggggacggttactccggcgtggaagttagggttacgccgatgcgcaccgaaatcataattagagccaccagaacccaagctgttctcggtgagaagggaaggagaataagggaacttacctctgtggttcagaagaggttcaagtttcccgagaacagtgttgaactttatgctgaaaaggacaacaataggggtctttgcgctattgctcaggctgagtctcttcgctacaagctccttggtggactcgctgtgcgcagggcctgctatggtgttttgaggtttgttatggagagtggtgctaagggatgcgaggtttgttctgcagaagggacttgggtttgaagtttgtgatattggggtgttgctttgtgtgatgattttggttgtttggtttgagcaggtcattgtgagtggaaaattgagagcccagagagccaaatctatgaagtttaaggatgggtacatgatttcttctgggcaacctgtcaaagattacattgactctgcagtgagacatgtgctcctgagcacagggtgttcttggcattaaggtgaagatcatgcttgattgggatcctaaggggaaacagggtcctaaaactcccctccctgatcttgtcacaatccattctccaaaggaggaagaagaatacatccagcctgctccagttttggctgctaatgatattgaggtccctgttgcttgaaaagttatacgctggaggagtaattcatattagcttagtgcctagtttttcttgtatgcaatgtttgttgttgaagacatgttcaaaattttgaagaaattgttatactcagtnacnagtattttaagtcatttgttttatctttctcat

SEQ ID NO: 72179 - DNA, 1410 bp, Glycine max
  Clone ID: PAT_MRT3847_3618C.1
ccgggtcgacccacgcgtccatatcgatccagcaaggtcctataaatttcttccatattcacaaactcgtagaccaaatcgaacagcactagaagaagagaagacgatggagaaagaggagagcacggaacagcgaaagcaagcgaggcttgccattatggagctcgccaacatgataagcgttcccatggcgctaaacgccgtcgttcgcctcaacgtcgccgacgccatctggcaaggcggcgccaacaaccccctctccgccgctgagatcctcccccgcctccttcccgccggcggcggcgacgccgagaacctccagcggctcctccggatgctggccagttacggcgtcttctacgagcacctctccgccggcgagcggaagtactccctcaccgacgtcggcaaaacgcttgtcaccgatgaacaaggcctgtcgtacgcgcattacgtgctccaacaccaccaggatgcgttgatgagagcgtggccaatggtgcacgaggcagtagtggaccctacaaaggagcccttcgagagggcaaatggggagccagcatatggatactatctgaagcacccagagatgaatgacctaatggtgagggccatgtcaggggtgtcagtgcccttcattagggccatgttggagggctatgatggctttcaaggtgtggagaagcttgtggatgtgggtggtagtggcggtgattgccttcgtatgatcttggaaaaacaccccaccatcaaagaagggatcaactttgacctacctgaagttgtggccaaagccccacaaatcccatttgtaacccatgtgggtggtgacatgttcaagtttattccccaaggagatgctatcttcatgaagtgggtgctaacaacatggactgatgaagaatgcaagcacataatgcagaactgtcacaaggcactccctgagggaggaaaactaatagcatgtgagccagtgctcccggaggactcagacgagagtcacagaacgagggcattgcttgaaggtgacatttttgtgatgacaatctacagagccaaagggaagcacaggactgaagaacagttcaggcaattagccattgatgcaggcttccctcgtttcagagccttccatgttgaccatttctacactgtccttgagtttcagaaatgaaatgaaatgaaggcagcaactactcctctctgtttcaactttgaattaagtggttattggtcatgtgatattggaaaagagaatttgaggtattgattgttgggtagtagaatgcttaggtccctatcattatcatgtgtctcaaaataagaatcatacctttgcaaaaattgacaagtaacgacagagttgtaccctaaaattaaataaaatatcaattcaagaaagaaaaagat

SEQ ID NO: 72180 - DNA, 1321 bp, Glycine max
  Clone ID: PAT_MRT3847_36190C.1
ggtgtcggcctctacctatatattccactcactacccagaaactagggtttagcgccacaccccaatcgtagccgtcgcactctgtgttttcagcgccgtctccgatctccgacaatggcgacccaaatgagcaagaagagaaagttcgtagctgatggagtgttcttcgctgaactgaacgaggttctgacaagagagttggccgaggacggttactccggcgtggaagttagggttacgccgatgcgcaccgaaatcataattagagccaccagaacccaagctgttctcggtgagaagggaaggagaataagggaacttacctctgtggttcagaagaggttcaagtttcccgagaacagtgtcgaactttatgctgaaaaggtcaacaataggggtctttgcgctattgctcaggctgagtctcttcgatacaagctccttggtggactcgctgtgcgcagggcctgctatggtgttttgaggtttgttatggagagtggtgctaagggatgcgaggtcattgtgagtggaaaattgagagcccagagagccaaatctatgaagtttaaggatgggtacatgatttcttctgggcaacctgtcaaagattacattgactctgcagtgagacatgtgctcctgagacagggtgttcttggcattaaggtgaagatcatgcttgattgggatcctaaggggaaacagggtcctaaaactcccctccctgatcttgtcacaatccattctccaaaggaggaagaagaatacatccagcctgctccagttttggctgctaatgatattgaggtccctgttgcttgaaaagttatacgctggaggagtaattcatattagcttagtgcctagtttttcttgtatgcaatgtttgttgttgaagacatgttcaaaattttgaagaaattgttatactcagttacaagtattttaagtcatttgttttatctttctcatacccttcgtcttatgtagtttgaagtcttttgtttgtgattcacgtcattgatacagttcttgttatttttgttgttctaatgctatgtttcttgcctttatgaatagataattttttgttattaaaaaaaaaaaaagagaataaagtaaaaaaaaaaataaaaaacaaaaaaaaaaaaataaaaaaagaataaaataaaataaaaaaaaacaaaaataaaccgggggggccgttttaaatgaaccaagttatcctacgcttcaatccgacgcaataacttttttataggggaacataaataaaattacctggccggctttttaaaccttctaaactggaaaaac

SEQ ID NO: 72181 - DNA, 591 bp, Glycine max
  Clone ID: PAT_MRT3847_36191C.1
cccgaaggggcgcccgtgaaaaagaaaacacactgacgaagacagttccttctagaattgatagtatgcctctacacattgcaatgctcccgtggctcgcagtgggtcatgtgaacccttatttggagctgtcaaagattcttgctcaaaagggacactttgttacctttataagcactccaaaaaacattgatggcatgcccaaaatcccggaaaccttacagccatccatcaaattggtgaggctacccttgccacacacagatcatcatcatcatctcccagaagatgctgagagcacaatggacattccctcaaacaaaagctattacctcaagctggcttacgaggctctccaaggccctgtatcggagttgctcaaaacttcaaagcccgattgggttttttacgatttcgcaaccgagtggttaccaccaatagccaagagcctcaacattccctgtgcacactacaacttaaccgcagcgtggaacaaagtgttcattgatccacccaaggattatcaactgaacaactcaattacgcttcaagacatgtgtctccctcccacgtggcttcctttcaccacaa

SEQ ID NO: 72182 - DNA, 304 bp, Glycine max
  Clone ID: PAT_MRT3847_36192C.1
gttggtttaccaggacctccttacaggtgatgagcttctctctgactccttccgttacaaggaaattgagaatggaatgctgcgggaagttgaagggaagtgggttgttaaaggagcacttgatacacacaatggggctaaaccctttctggtgagggtggaagagaagatgaaggagttgatgatgcagcttgtcagggttgttgccatggtggacgcattcctacttcaggagcacgcaggatgtgcggcgatgcagacagttacgttcatggacaagtcgagcattaaatttactggcccg

SEQ ID NO: 72183 - DNA, 424 bp, Glycine max
  Clone ID: PAT_MRT3847_36193C.1
ggccaccagtaccctccttcaaaaaataataagggaaccccacggttggttaatggacccaccccctggattaatggcgtccctttcgaaggacattatgcggattttaatggtgataatcctgggcccaactaatcccccttataaagggggagtttccaagtggaattatttttggccaaaaaaatatccaagggttgctccaaaggttaggtttttgccaaaattatataatccaaccatggttaacctggccaggatttgtttggacattctgaaaaataatggaagtcctgccttgggaatccccactggacttttgaatattcaggcctctctaagggcccctacccaagagaatccacttcctgagacctttgccaagcatttgaaatctaatgaaggccaggttgtggaaaccgcc

SEQ ID NO: 72184 - DNA, 223 bp, Glycine max
  Clone ID: PAT_MRT3847_36194C.1
gccaaacgacagcggtctgagtcttttcttcttcgttaccctctttacatgccttctctctgctacttcccactatgaccatattttcctaccaagacgcctccatgaagatgactcagggagttgcactgacagcgacccacacctcaggtaccaggcgcccatccaaatcaacacccacaccgacgacgccgactctaaaaccatccacaacgaaaccgga

SEQ ID NO: 72185 - DNA, 287 bp, Glycine max
  Clone ID: PAT_MRT3847_36195C.1
cgctcgagagcgttggggaattggagggagaagagagaggggattagcacatcagcagcataagaagaatgcgttggatggaaccgtgcgagggctatgggactcgccggtccacgagaagagaggggaaatagggaagcagtgaatgcctcaagccatatccaagcgacgcgtcgtttttccaatcgtcgggcaagactcgtcttcgattgccacgcttctcttcaccattctacaacgtaaccacgccaagtcacacctcgacgttctaattgcttctgagtcta

SEQ ID NO: 72186 - DNA, 740 bp, Glycine max
  Clone ID: PAT_MRT3847_36196C.1
ggtggcatgccggatcagtggagacaatagaaacatattgatggtaggaaaggctgtcccagaagtggtgttaaactctggccacagcatgcctatgcttggctttggcactgcaggtgtacccctcccaccacttgatgaactcgtccctgtgtttgttgttgccatcgaagctggctaccgggggggggacactgcaactctgtatggttctgaggaggcccttggtctagctctagcacaagcacagcgccaaggtcttattaagaatcgtggtgagatttttgtcacaaccaagctatggtgttctgattcccatcctgaccttgtcctcctagcactcaagaaatcactgcagtaattatatctttcaattttctgttttacatcaaaatttgtattttttttactttatcgctatgaatttaattagaatggactgataatgtaattttctttccattttcacataatcatgaactgtggcatgtgataaaatagttgacttttgtaataactatatcattaaattttctgttttacatcaaaatttacatttattctactacattgtgatgaatttaataagaatgcattgatagtgcaattttttttacattatcacataatcatggattgtggcatgtggtaacatagctgactcttgtaataattaattcaagagtcatactttagggcgatttctaattgattgacattgaataagtcttcatattgac

SEQ ID NO: 72187 - DNA, 497 bp, Glycine max
  Clone ID: PAT_MRT3847_36197C.1
ctcgagccgtttttttaatgcaattgcaatgcttttgatatttaacattacggattagttattttttttaaaaaaaaaaaaaaaaaaaaaaaaaaaaaaaaaaaaaaaaaaaaaaaaaaaaaaaaaaaaaaaaaaaaaaaaaggggcggcccgccaaattagggaacctcgtcaaaccgggaaaataaattccggaaccggaccttgaaggcgaacaagttttcctaaaaggaagtcgaataaaacctgggcgaaataagggaaaaagttgttccctgggaaaaatggtaatccgttaaaaattccaaaaaaaaaacaacccgaaacaaaaaagggaaaacccgggggggccaaaggaggaaccaaactaaaataaatggggtggccctaattgcccgttttcaagtgggaaaacttgtcgggcaagttgaataaaaaaatcggcaaacccccggggaaaggcggtttgcttatgggcccccaggggggtttttttt

SEQ ID NO: 72188 - DNA, 476 bp, Glycine max
  Clone ID: PAT_MRT3847_36198C.1
atatgagactacactgagcatcgtctagctatctcgatcgaactgtccaaggtcctgtcacgcgtcagtggcctatgtatatagccccagttattggcactaagtggtggaaaaatagagagacaagtgaagtatatgggggtgttctggttgctaatgcaaaagcctacacatggttaatcgtaatcctcgtgatcgtcagcaacaacaataacaacgacgaaacggcaactacaaaatgtaaacacgcaaccaaattggcttccaccgttggaattgtagtcttgttcttaggtgtggtttcgaattgcgttgatgttccagtttgatggtctctcagtaaatgtgttcgtcttcattatgtgttgtgttggtttcaagtggttaaaaatgttctttgtcatcggtgttgtgccatgtcttctcctatgtttggttctttctgtggtcgtagtgttcggcccatccggatgggg

SEQ ID NO: 72189 - DNA, 188 bp, Glycine max
  Clone ID: PAT_MRT3847_36199C.1
ggctgcagatgacacagagtggtgggttatttaataagatgtgcataattaagcatacatcttaagttttgttagtaggaccttaagacaaaaggcaattttcattattgagagatgattaaacttttgtagctccccatgatatacttatacttgactaaaaaaaatatttgaaatcttaggtgctt

SEQ ID NO: 72190 - DNA, 1185 bp, Glycine max
  Clone ID: PAT_MRT3847_3619C.1
ttttttaaattaatttgtgcgtatttatattatgtgactttaaaacgaacaagagctaattctcatagatgatcatttccgggattgcatacatacaagatcatcgtcgtcgtttgagtattggtagaagcacgacaatcttctacatgttttaggactttcaaatacatttggtgtacacaacgcggggtcgacgactataataaacagctgtacaacagttaattttgctagtttccttcatttctgtaacttataccccaatatatacctgatgaaaaattatcaggaataagatacgcataataccccatattcttcagaactgaccctaacaagctatttagagctcatgggttgatttacgaagatttgcaagtttgtctcgccatatagctgcatctttaaatctttcctgtttgatagctgaatgcatattatgcatcatacttagttcttgagctaccaaatctggaccatctatagcactgtcgagcaatacatcataaatagcctttttattatgcgctccgcccattccataaccgattctgatagcatctgtgaaaacaatttctttacttacatatattggagccttgcatctatttgcaacattaatggcatctgagggacgtgcatccacactgataagatcagttttccctggctggctaaggtataatctggcaaagtaagtgctgactactctctctgtaattctcaccattatcacttcatggtctagtcttccaactaggttttccacaaactggtactggtcaggacattccaactttcttgttcagattccgcatccataagtttctcaatagcaatctgccctacaacaatgggcagaatatagtctccatcgcaagaaatcctgagaaaaatcgtaggatttttgaaacgctgtaagaagccatgtctcaataaactactatccgttctggacaaaggaattgacggtgtagacgatttccattgaaactccggttgaaatctatgcttccacatatgatagtgggagaatgtttctgagagaaggagagaagcttcgagataatcgtttttgttgttgttgtcgtgagagttgtcggagctggatctgcggcgagaggaattgcaggaaatgaggatagatctgcggcagcggaagcggcggcgggaccggagcggtga

SEQ ID NO: 72191 - DNA, 1171 bp, Glycine max
  Clone ID: PAT_MRT3847_361C.1
gctcgaggtgtacatggcctagagatggccctggatgaaatatcacatgatttggcagtttcaggtggcagggtttccaatattgatgccacagaagacacttgttgcaagctacctggtactgactttttgagttctaaattctggaagaagacagaaggtcgttattccacatcaaggttctctttaggaagcataccatcaacagatgctgtgcatattgcaaccaataaagatggaaaaagagaaatattaactgcaaataacaatagattgcaacatggtaagggtggatattttgtgaatccatcggcagaagttcaaagcgatttgaaagggcatcatacgtataaagtgtctaaaaacatggtccaagacgccatgaggagatatgatggcattcaacctgctactgaatcactgaggaaccagaatatcaggtcatccgtgtagtgagacacagcatttctcaatggctattttattgcagcaagcatcacagagtcacggatcactaatttgtagggataaatttgcgaaagtcaatctttttgctcgttggttcagcttgcagtgcaggagagttgtttactttaaagcattagcaaaattattatttagagaagaaggctattttctacaaaattgtccatattgaggctgagtcatcagagtgtggattcggatgcaatatattggttaaagagttttactgaggtgtggcttaaaggaagaaatatgatgcaggcttagagttctcttgatgtgtcataattatgcgtctttgccatcttcattagaaagtggggaaaaaaatgctgtgctcttcagaagagttccgagcctctgccataattgacccatggaatgggtattgtctaggcgtggcaaggaagagggtcggggccgagtttgactttttctatctagatttttgtcggagcaggttcaagagtgagaatttagaactgcagatgaaaaattaaaattcaatcctagtgtcggaatcagaaagattcactccacttttattttaaaaaataaacattttaaatatccttgcatatatattttggacccttcagcaaaaaaaaaagaaagaaatttggaagtcttgggatttccaacatcttacatgttaaaaaaaaaaaaaaaaaaaagcggacgcgtg

SEQ ID NO: 72192 - DNA, 256 bp, Glycine max
  Clone ID: PAT_MRT3847_36200C.1
acgaaagtaaaacgaaactcaatcatgtacattcaccctaagcatacttggagaatgatttgttatcaagtccccattagtcatgttggactattcctttttaatgtgttacatgaagtaaatgtggttggtgctgtggaatttaatgatgctacgttggcagtgaaaaaaaaaaaaaaaaaaaaaaaaaaaaaaaaaaaaaaaaaaaaaaaaaaaaaaaaaaaaaaaaaaaaaaaaaaaaaaaaaataaaattgg

SEQ ID NO: 72193 - DNA, 413 bp, Glycine max
  unsure (1)..(413): unsure at all n locations
  Clone ID: PAT_MRT3847_36201C.1
acacctgcaaaaacacttcataaaaccgttctactntataattccgcgctcttttaacacccccgtcttcttttcttattctctntttatatttnttttttctctcacctcaaaatctcttncttccatattaacctcccttacataaacttttttttttctgcaacaaataaaaacgctgcaaaatgtacccacactttagctacacttagtcaaccaccacctagacctttgtcatgggactctcacctcttaatgctcaatttcatgcttcttaaatcgctctcccccctgaaaacgatagctacaaatattgaccaaacttctccttcaaccccttcacttccaactaaactttttctataccaaacttcaaacagagataccccttaattaccaataatgataaacta

SEQ ID NO: 72194 - DNA, 489 bp, Glycine max
  Clone ID: PAT_MRT3847_36202C.1
ttttttttttttttttttcattgtcaattggatttcaaattcatagacattcgtaccaactcacattcatctagacaatcgtctaacatgcattcacgaaaattgaaatgacaatcacacttcctaatttctgtgaattcaagcgccgttaatagttgacttaggaaatcaattgatctcctaacctcaaaacaaattatatcggatcaattaatcaatggatctgatctaatctatgccaattctcaaatgcattgtaatcatgaacacaattgaaattggaaagagagaggaagaaatgtatgaatccgcaattaaagacgaaactcaaattctaaccgtaacgtcggaaccttgaattgattgcggatccagccttccatggcgaagtccattgaagatcagagatcagagagcatagactcgtgagagagaagagagaaaattctaatttggtatcaagatgaaaaaaatgaattccaagttctg

SEQ ID NO: 72195 - DNA, 322 bp, Glycine max
  Clone ID: PAT_MRT3847_36203C.1
acaaagaaaattacttttactttaaacataaccttacaatcgtaagacaacacatgctcttagtttgtgcctacctaacacattattaaaaattatccgattgaaaaagtctctaaaattgttgtcaccctagatagaatgagtgtactcacatggcggggtaatcctgagcaaaaggaaaaatgttgaagttccccatgaagtaaaattactgtcaagataaactatataaatggaagtgtaggcatgagtgtcgaatagctttgacttattttttgcattcatgactttcttgctggctttttttctttgaatcggggag

SEQ ID NO: 72196 - DNA, 417 bp, Glycine max
  unsure (1)..(417): unsure at all n locations
  Clone ID: PAT_MRT3847_36204C.1
taacgtaagcttgcattacttcgggcggtcttttttncctttttgttctttcccccggggaagggggcaagggcaacggattttctttaacatttttccgagtattccgggacattagatgatgtagaaaaatggaagccatggttcccaatttcatgtacaatagcgcatgactgatcaggaaatctggcaaaaaacgaaagggtcccacagactcctgcaagtcaagcacattgttctgtactggttttgaaactcctagcactaaacatgagtatgctaaaatattattgtgcccagtttagggggaccttagttttgctctaactatgtggaacaaaaattttgtgccaacgaaaaaagttataagtatgccaccaaggacagggcaaccttccttgtttaggaaagaagaaa

SEQ ID NO: 72197 - DNA, 1090 bp, Glycine max
  Clone ID: PAT_MRT3847_36205C.1
cccagcccctcacgcggtcttcttttatcctttctctcattctttcatgttccaaactaaaatggcatctaactctctccattactccatccaacaccaccaacattccctcaccaaacgccatcacccctcagacaccccaccccccacatcacttttcctcaaaccccctacaccccccatacaccacaacatcactctctcccacactcccttcaaactcatatatcacctattccatctctcaaaccaccccttcctccaccacctccccaaccaccccttcctttgacctcctccgccaccacctctccaacaaaaacttcgaattggccgatgaggagacgcgccgtctccttatcgtcctagctggcgaagccgcgcagaagcgtggctacgtctttttctcggaggtgaagttcatctctgagggtggcctgcgggccatagactccctctggagggagtacagtggcgggaaattcgggtacagcgtgcagaagaagctactggagaaggccaatggggacttcaccaagttcttcatcaaggttgggtggatgaagaagcttgacactgagatggagcaatacaactacaggtccttccccactgagttcatctgggagctcaatgatgacaccccagaggggcatttgcctctcacaaacgctctcagagggacacagttgctcaacaacgttctcaaacacccagcttttgatgtagttgatgacaaagaagaaaaagaaaaagatggtgagaacaaggaaaatggaggagcaatctctgccacaggattaaaggataatggttcttcttcaaagaggatcttcaaaacggactatagcttctgagtgcatagaggaatggatgtactttaatttggaggttaaattttacgtataagataaacatatagtagttattagtattaatttattatcaaacagtgcaactgtgcaagtggtttcttcattgtatcttcgggggagcaatgtgctcttaaactttctttgcctttataattaggctgaccgcattttacaaaaaaaaaaaaaaagggcgggctgactgcgttttacaaaca

SEQ ID NO: 72198 - DNA, 586 bp, Glycine max
  unsure (1)..(586): unsure at all n locations
  Clone ID: PAT_MRT3847_36206C.1
tcatcaagcttgggtggatgaagaagcttgacactgagatggagcaatacaactncaggtccttccccactgagttcatctgggagctcaatgatgacaccccagaggggcatttgcctctcacaaacgctctcagagggacacagttgcttaataacgttctcaaacacccagcttttgatgtagttgatgncaaagaagaagaagaagatggtgagaccaaggacaatggggcaatcacagataatggttcttcgtcaaagacattgggtcagaggatcttcaaaccggactatagcttctaagtgcatagaggatgtaccttaatttggaggtcaaattttacgtataagataaacatatagtaattagtattaatttattatcaaacagtgcaactgtgcaagtggttacttcattgtattttttttttttcatttttctttttttaccttcttgctctttttccattatatctgttttttttttgggccaatgtgctcttgaattttctctgtctttataatttggctgactgcgttttacaaacaaatcaacagaanggttcacttgtttgttggttttt

SEQ ID NO: 72199 - DNA, 213 bp, Glycine max
  Clone ID: PAT_MRT3847_36207C.1
aaaaccaaaccctgtgctaaaaaaaacccgataggttacaatcccaagtggggaacttaagaagtcccttaaacaaaaatccttaaattttgtgaaatgaaataacttaaaaaagtctggcctaaaataaatatacaatttgctacctccccaaaaaaaggggtgggaaaactttttaattttgaaccttttattggccatataatacaaagt

SEQ ID NO: 72200 - DNA, 379 bp, Glycine max
  Clone ID: PAT_MRT3847_36208C.1
ccggcattccccctatgctcccctttccccccttcatgcctattgtctcatgtggtgatcaattacaaggaacaccagagaagtccgtgaccatggatgcatacagtaagatggcttccctgtatgatcagcagctgtttcatcctccagcttctagttccaagaactgagctcttcgtgttggtctaccttcctcacaatatgataagaaataaattaattaagagtgtgcatgtgtgtatatttttggtgagaaagattgaagtgtggagagccaacagctttttttttttatcagcataataaaatgtaatttcattcaaagagacaagcaaaataaaatgtaatttctttgtaccaatacaaataagatgtttgg

SEQ ID NO: 72201 - DNA, 328 bp, Glycine max
  Clone ID: PAT_MRT3847_36209C.1
ggttttctctactaagttgttattttttgttggaaggactgtgaggaggacataaaaaggagacaggtgatttgattccctttgtgtgagggggttttccttggtattttatattttctttggaggctcatgtttgccatttgatgatgattacttcattggctgcctagttaaattttgagcttctgtcaaactttttgagtccttaggacttggatatcttattttcttgattcactccttaaattaagattttttttatgctcgccactccattgttatgagtcattgaacacttatttgcttaatgtattgcagatttgatatt

SEQ ID NO: 72202 - DNA, 489 bp, Glycine max
  Clone ID: PAT_MRT3847_3620C.1
gcagtagtgccgcaatctgtcagtgagctgtacactcgctgtgaagtggaacagcagcgcagcaatgaagtcattctactcattcaagacttactatcctatgaagatcaacatccacattcattgcaaactccacttgaaacactgtatcaaacactgttgtatcatcgtcagtacagtgcttgtctgcaagagatgttgagtcagtgtctgttgttgacagatgaagtgaagagtcaagtcgatgcattactgtcagagaatgatgaattggccacaatgattgaattacatagcactattgaaaaagaaatagtctatccgaaatttacacgattggcttcacgttatcgttcgctagttcagaaacagagattatgtgatgaattgaatcaacgactgcaactgttgaaacaaaactcccaacaagcagacagcaaagcagacatcaacacagcggacacacaactcatccacagacacatcgac

SEQ ID NO: 72203 - DNA, 497 bp, Glycine max
  Clone ID: PAT_MRT3847_36210C.1
cagaactgaatattaatcttatatattcctcaacaatttcagcatcagaattttatcaaaatggaaggacaaacaagtgattcattaagtaaacaacaatgtttggagacaacattaaccaacgagcttcaaaatgtggaacctccagaaatgtatggattcgatatgcaatgcatttatagagtaccaccagccattcgtgaaaataatcccaaagcctacacacctcaaatggtttcaattggcccttttcacaaagcacgtgacgctggaaaggaagacagcatttttgagtcaatggaagatcttaaagtgaagtatctcaaggcatttctaaatcgaacccaagtacctgtgggaacctttgttgacacacttcaaaacttggaagacgaaattcgaaggtgttatgcagtgcatattaaatataacagcgatgatttcttaaagatgattctaattgatgcttgcttcataatcgagcattttttgagatg

SEQ ID NO: 72204 - DNA, 380 bp, Glycine max
  Clone ID: PAT_MRT3847_36211C.1
tccacgcgttcgaccacacgttcggccacgcgttcgtacgggtgcgaaaagacgacagaaggggacacaactaactaagaaagtcttccatagccccccaaaaatgaagagcaccatcttctttgctctctttctcttttgtgccttcaccacctcatacctaccttcagccatcgttgatttcgtgctcgataatgaaggtaaccctctggaaaaggggggcccatattatatcttgtcagacataacagcattgggggggaataagagcggccccaacgggaaatgaaagatgccctctctctgtggcgcatcctcgcattgatctcgacatagggatgggaacacttatctcgtccacatatcagatgcgttttatc

SEQ ID NO: 72205 - DNA, 128 bp, Glycine max
  Clone ID: PAT_MRT3847_36212C.1
atccctctctcactctctctagagaatccctgctttcttagagaatctagggtttccaactccgaaactcagtcttcagcttctaaacaaacgcaggagtcaagatggcatgtcttgtttccacacaa

SEQ ID NO: 72206 - DNA, 501 bp, Glycine max
  unsure (1)..(501): unsure at all n locations
  Clone ID: PAT_MRT3847_36213C.1
ggaggatcctccgcatttgtatattaaccagtccgcacgcccggctgatccgctacctttgtacaaatattacccctgcacaaaatggctcacgttatggactcggtccgcgacaagctgggcttcgacctgcacgccgtgtacgccccgctgccgtggacgctgctgaacattagcgccgggatggacaccgtcagcggccaccgccgtctcctgccgcgcggcctgcagaactacctgcctcctcagggcgagatctcgatcgtgtcgcactacctgaacggcctcggcattgtcctcgcgctgcccgcgacggtcaccggcgcgctggagtacctcggcctggtgcagggcaagaacggtcagcgcttcaagagcggcgcgaagcagttcgaccagaacaagtcgatggagagcaacaagcagaccgccaaggaccttgcctcgcgcgaggagaccaagatcctcggcctcgcgaccgtccacggnctcctgaacgcc

SEQ ID NO: 72207 - DNA, 3421 bp, Glycine max
  Clone ID: PAT_MRT3847_36214C.1
aagacgacagaagggggggcctgtgttgttgtatactataatagcagaatcttgagtaacagcagagcagaacaccgataaatcggtcctctcgacccacgcgtccgtagtgggatgtgttgagatccactgctgcagaatccaatttgtgaccctaaatccaagttactatgactgctcagacccaagaggagcttcttgcgcaacacctcgaacagcaaaagatccatgatgatgaacctgtcgtcgaggatgatgatgatgaggaagaggatgatgatgatgatgatgatgaggatgatgaccatgccgaaggactagaaggtgatgcatctggtaggtcgaagcagaccagaagtgaaaagaagagtcgcaaggcaatgcttaaacttggaatgaaacctgtcacaggtgtcagccgagtgacagtcaagaagagcaagaatatcctgttcgttatctcaaaaccagatgttttcaagagtccaacatctgacacgtacattatatttggggaagccaagattgaagacttgagctcacagctacaaactcaggcggcagagcaattcaaggctcctaatttgagcaatgttggattgaagcccgaatcttctgctgttgctcaagatgatgaggaagtggatgaggctggtgtagatcccaaggacatagagttggtgatgactcaagctggtgtgtcaaggcctaaagctgttaaagctctcaaggcggccagtggtgacattgttgctgccattatggagctaactaattaatggtccggtttgtttgaattttagaatgtgtagctatttttctttgttgatcgaaatttttgttttccttgaatttgaaatactggtttgtcaattatctgtgtaattgtccccatggaaggaaaagactgtagacttcatttgcaacaaatgcatgttcaatgccaagaatgtcagtcataattaacaattatctgatattgatacaacccagttacgatcttgagtgagatttatatacgaacactgctgcagacgccaatttgtgacactaaatctaccgttaatatgatttggcagacccaagagagaagctctctgctcaacccctacgaacagcaatacaacagcgatgatcttctaaaccctattggacgacgaaagcccaaagccaaaagggcaacgcagtcgcttctccgtccggggacatatcctggaccgccatgctcaccacgttctagacggatgccatcgcccctggctccactccaatccatgtgcctctattccaacccgatcgcgccgcatacgcctccctcaaaaactacgcagatgcattagcggatgccaaaaagacagttgaactcaagcccgactggtccaagggttacagccgtctcggtgccgcgcatcttggcctttcccaatacgatgatgctattttggcttacaaaaggggtctcgaaatcgaccctcacaacgagccccttaagtctggtttggcagatgcgcagaaagccttggccgcggcctccaggcctcgcccctcggcctctaaccccttcggtgatgctttctctgggcctgagatgtgggcccgtgctcacccgcagtacgcccaccactagggcttacctccaacagcctgatttcgtgaagatgatgcaggatatccagagagatcctaataacctcaacttgcacttgaaggaccagagaatcatgcaggccctaggagttttgctcaacgtcaagattcaaacccctcccacgggggctgacaccgatatgccggattctccatcgccctctgcggcagcgtctgagaggaagagagctgcggaagccgagcctgctaagcagcccgagcctgaacctgagcccgagcccgtgcccatggaattgacgggggaggagaaggacgcagagcagaagaaggctgaggctctgaaggaaaaggaagcgggcaatgcagcgtataagaagaaggattttgataccgcgattcaacattacaccaaggctttggagttggatgatgaggatatttcgtatctcactaaccgcgctgctgtctatttggaaatgggaaagtatgaggaatgcataaaagattgtgacaaggctgttgaaagaggaagagaactaagatcagattttaagatgatagcaagagctttgacaaggaaaggaaatgccttggtgaaaatggcgaagtgctcgaaggattacgagtctgccattgagacttatcagaaagcactcactgagcaccgcaaccctgacactttgaagaaacttaatgaagctgaaaaggcgaagaaagaactagaacagcaagaatattttgatccaaagttggctgatgatgagagagaaaaaggaaatgaattcttcaagcagcagaagtatcctgatgctgtgaagcattacacagagtctatacgaagaaatccaaaagatcctagggcttatagtaacagagcagcatgctacactaaattgggggcaatgcctgaagggttaaaggatgcagagaagtgcattgaacttgatccaacctttgtaaagggttatacccggaaaggtgcagtccagtatttcatgaaggaatacgacaaggctttggagacatatagggaggggttgaaatatgactctaacaaccaggagttgcttgaaggcatcagaacatgcatacaacaaattaacaaggctagccgtggagacttaagtcctgacgaattgaaggagcgacaggccaaggcaatgcaggatccagaaattcagaacatccttcaagaccctgttatgagacaggtattgattgatttccaggaaaatcccaaggctgcacaggaacacacgaagaatccaatggtgatgaataagatccaaaagctggtcagtgctggaattgtccagatgaagtaagtttgtggcaggtggcagttcgtgtgaaaaagcaatcaagcaatcgataatgatgtctcagtgtgactattttgacatttaaatagatgtgactgggaaaaaagttgggaaattttgagttgtttttacctttgttttgttttagtgaattcatataatttacgaatatcaggtgcagtccatttatatttcaatggcttattgtggtgacatgacttccttttaatttaaaatcggtagggggcgaatgtgaagtgcggtttagtttttaaggttaataactctaaatcctcgtatcctatactttataatgtttctatctacttattaatcttcttttgtatgataaataataatcttcttttgtatgatattccccccgtttcgatcttgagtgaaaaacagatgttttccccccatttgtcttgctattttttaagacaagacttggatgacgcgccccggggccgggggggcgggggcggcgg

SEQ ID NO: 72208 - DNA, 173 bp, Glycine max
  Clone ID: PAT_MRT3847_36215C.1
gtccctaggtcccatccccaaccagcatatgcctgtgttgacagaatggccttaataactttaacaacccttaaccttcggacgctttattatactacaccctcctcttattaacctaagcaactgggccgccaaaccttcttccttcaaatccccaatatttttccccgcgc

SEQ ID NO: 72209 - DNA, 128 bp, Glycine max
  unsure (1)..(128): unsure at all n locations
  Clone ID: PAT_MRT3847_36216C.1
aacanatttctaagctcttctttctcactctcancaccttnacccatggccaaagaccgagagaagaaactctacgtagccgtgctcggnaactangccgccgaantcaaactcctcctcnncacgct

SEQ ID NO: 72210 - DNA, 371 bp, Glycine max
  Clone ID: PAT_MRT3847_36217C.1
agatcaagaaattaatttaattcaattataaatgagtaatgctgaaaatggatgttaataatgcatgcatgtgtatggatcgatcgagaagcaaagtgaagcagaagaggaattaaaagaagctttcaaactgtttgacaaggatcaagatggttacatatcacccaatggttcagttaacttcttacagaagcatcagaattaattaatttgtttgaccataaactttagtgtaattaatcatatataattgatttttatgtacagttgttatctgcgatgagaaatattggagtgaagatcacagaagaagagctggagcatatgatcagactggctgatttggacggtgatggacgagttaattatga

SEQ ID NO: 72211 - DNA, 157 bp, Glycine max
  Clone ID: PAT_MRT3847_36218C.1
attttctcagcatggacctccagctatatgcattctttcagctaatggtgccatatcaagtgtcacactgcgccagccctactcttatgggggcacattgtcatgagggacagcttgagattctggcattgactgtctcatacatgcccaatgaaag

SEQ ID NO: 72212 - DNA, 537 bp, Glycine max
  Clone ID: PAT_MRT3847_36219C.1
cccactcatccttccactcttccggataaattaaacttcttactcacatggatcttgctaatgtgatgaccatgaaagatatcatacatgctccacataaggaaaacttcaatgatgcggacccttgtaccctgatgtaatggaccacaggatcgtcgcatcaaatattacaacttcatgcatcagtaggctgatgatcattgtcctgttatccgccttaatgagggcggaggcgctcaaatatgacacattcaatcaaatggtgacctacccaaatctaccacctactgatctactatgtgaatgccaagtgtgaccttaatattgatgactttggacttgttagaaccacattttaacctgactatatgactgctattgatgacactagatggatcctaacatccaaacagcttcttaattgtgaacactatacaaaatccattgcaatctgtgaatgatggttgcatacttggggaaaccataacaagaccaccgctctttcctggcgaaaattatgatcataagctgacactt

SEQ ID NO: 72213 - DNA, 260 bp, Glycine max
  unsure (1)..(260): unsure at all n locations
  Clone ID: PAT_MRT3847_3621C.1
ctgcatggtaagctgcgtaagcacacgaattaattncttggacgacccgctcactagtctggggacgcgcttcgagctgttttttattaacctaaagtctatctctccaaatttccataacacgggagtaacagggaggaactcggatgcaaatcaaactgagacctattaaccatgtccatcattcatgcaaacactgggcattggataccaagggtgagcccttaagagtcatcggtctcgaactcttgcggcagcat

SEQ ID NO: 72214 - DNA, 382 bp, Glycine max
  Clone ID: PAT_MRT3847_36220C.1
gcaacatacaaacctgcaatctcacaacttccacatccccaacaccaccaccacctccactgccaacaacaacatttcttcttcattccttcatcatcatcaacaccccaataagagcatgataacctcacccttccgtgacctccacgagcgcacgcaacccccctccaacgctgccacgtcagcacacctctcatccactgcgttgctccagaaggccgcgaccgtgggtgccgccgccatcacgggacccactcacatgactcaactcagcatggccgagctaggaaccgagacgactcatctggactcagtgccattgccgcccgatcaacgctacatgagcatgagaggcatcaatagtaacaatgacggcctcacg

SEQ ID NO: 72215 - DNA, 953 bp, Glycine max
  Clone ID: PAT_MRT3847_36221C.1
aatgatggaagtccctcttagaagagacaagtaataagtgggattctctgccctatgaaatatgcatgctcttcacaaaaaagatacttcacattaaacaaacactgatcaagtccattgcttcatctcaggcttccctactcttcttatcttcccttcctaccccacttctttttgtcaacctttttcactttttcttttcttcctcaactttttgtatatacatcacattgcattgcaatcataaccctacatatatatttaatttaaaaaaacaaaaaacatgacccaaaactccactgccagatggcatgcaacaaggaattgaattactcaaaaacaaatccgtgcatggtatatgtttggctaaccgtcgcaaacaaacggtggaaccaaaaggggtttgcaaaaacatctccaccgtcccttttgagtccccatttgtgttgaaccattggatttggttcaggaattcgtgtacaggaacttagaccgcaagccaaacatgctcccagtcgggcgagtgaactaaactcagtcgagtgcatgactcgggtgaatatctttgagaaggcccaacacttgctgcatggtgggcctcttccccggcgactcggctgtgcacaaatacgcgactcggaggctctccaccatctcactctccgagtcgccgcttccaccgccgagtttgagcctctcgtccaatgccctcaccgcgtgaccctccctcaccgccttccgcacccaaaccaccgtctccgccgtgccggccctccccgtcagcagctccatcagcaccaccccgaaacagtaaacgtccgtctcggttgaacaattcgccgtcgcgctttctcgcccgaacttccgaaacccgaaatccgcaattcgcggctcgaagtcgtcgccgagaagcacgttggacgtcacgagagtgtccggacgcgtgggtcgac

SEQ ID NO: 72216 - DNA, 485 bp, Glycine max
  Clone ID: PAT_MRT3847_36222C.1
aattcggctcgaggagtgtagtgttgtgaattagagttggaccttaggtcaggggttttaattttgctaaaatacccccattttttgctaaaccacataccttattttatattttaatctttaatagagattaaaatattggtgggactcttgggtaaggctaaaaagttcacttttaaaaggattcaaaaaatgagactcatatatatatgtaagtttcgtgggtagcctgtgcacctgaagccatttgtccatgtatttttatacatcaacacgtgagaaacattatcctagagaaataaaaatccaataaacaagcctgacacacctaaggcattatctgtttaactcttacacgcttcatctcctataaatatttatttaagcgtcgaaatccttccttgtaaatacacaactagaatttggcttatgtacagacttcgaatattccaccccagatatttgatctcgtgaactagtagtgt

SEQ ID NO: 72217 - DNA, 199 bp, Glycine max
  Clone ID: PAT_MRT3847_36223C.1
gggggcggtgtcgatggcgaagaagagcgtgggggacctgagcgcgccggacctgaaggggaagacggtctccggtagggtcgacctcaacggcccgctctacgacaaccagaacatctccgacgacaccaggatgcgcgccgcctttcccaccataaagcatttgatccacaaccgcgccaaagacattctctccagc

SEQ ID NO: 72218 - DNA, 397 bp, Glycine max
  Clone ID: PAT_MRT3847_36224C.1
gaacaaaaaaacaaggcttcccacgggaaaagaagaaaccaaccggaaacacccagagaaaaataaatcccaaacaacccctaaaaaagcaaagaaggacccgcgggccattgttaaaccccatccggaagaaaaacaacgcgggcccaaaaaaaaaaaaaaaggcacctataataaaggaacagggggaaaacccagggggggaaaggcccgccagaaaaaaaggatctaaaaaaaaggggcccaaaaaaacgggggttccaaaggaaagggcccttcaagcaaaactgccaggggaacaaaagcaaactgggagacccgcccccggggcagtgaacccattttgggggaaggctcaccccaaaagcttggggataaaaggggcactttaagaaaa

SEQ ID NO: 72219 - DNA, 388 bp, Glycine max
  Clone ID: PAT_MRT3847_36225C.1
gtcagggttatgctaatatgttggctgcgaccgctatagggcctcataaatcctatggaggacactttagttcttacagcgccatcaacaacttctatcgtcttattcttcccaggaactctatgttgcctacacaaactacgattgtgtgattgctttttttcgttcaaatctgattattacaattggctgaggctctggatgatgatgatgatggtactagccccatcctacctgggctgtctgatgatgttataaaacacttgtttgcactcgtgccttgttcgaactatccagccatggttggtgtcttgtagagtatgaggggttttttttcaagtcaatgtattttttacctgtgtgtaaattgggcttgattcatttggta

SEQ ID NO: 72220 - DNA, 1760 bp, Glycine max
  Clone ID: PAT_MRT3847_36226C.1
acgagggcccatgaagccattagaccaactgacatacgcaagttgccatcaatgctttctgcgatacttgatgaagaatccttgaagctctacacacttatttggtcacgaacagtttcgggggagatgggacctgctgtctttgagcagatacaacttgatattggaaatcctgatgagtctattatattacggtcttccagctcaagggttgagtttcctggatatcgggcagtttttacggacattgttactgaagctgttcaagataaagacagtgatgaattcagccgtgatcaaacatttggagtactaaattccttgaagacaggggatccattacatgtggttcagactgaacctaatcagcaccatacacaaccaccaccacggtactctgaagcatcattggttaagaagcttgaggagcttgcgattggaagcccatcttcatagccctccacctgtaccgcttttctggtttgacactccgtgtctgggaagtgccgtgctctgtctcctgtgtttcgcgggtccatggtttcagcttgtccgtcgcttcttgcctctgaggtcttggactacggttttactgccgatatggaaaccgagctggataatgtttctggtggattaactgaatggaaaggcctccttagagactattggacacgatttaaatcatattgtgagcgtacatctaatgttcatattcatcaggttgagaagatgttggaaaaaaaatttggcgattatttatttgcttctctcccagatcagagccgggtgtgtccaagttgtatggaaggcacacttatttttaaagtaagtagatttggtgctggctactttataggctgtgatcaacatcctaggtgcaagtacattgctaaaacattatacggtacagaggaggaagaggatgcatctcagccaaacagtagagtagaggaaccaaaactcctaggtgttactagtggttcatatgaaaaggttcttttgaaaagtgggccttatggagtttatgttcagctcggagaagacaggaagggatatatacctaaaagagcttctgtctctcatatcaaggatgtggattctatcaccctgaaagatgcacttgaggtgctacaatacccattgacattgggtaatcatcctaaggatgggcagcctgtcatattaaagcttgcaagagctgggctttgtgttagacatcggcgcacggttgcttctgttcctaagaatgtgaagccaagtgatgttaccctggaaaaagcacttgaatatttatctggtgatgatgttagacgatctggtcgtccaaaaggcaaatctaaagttcaagaagttgaagttattgaagcgttttaaggttttggcctttctcttcagcatatttataagcgttttaaggctttggcctgtctcttcagcatgcctgcttttaactagtggcaatttccaacaagtttccaaccatagtttgcaaatcaaatcccagacgagtcctggaagattcttttatggagccaaatgtatatttattactgttttagaaattttgttgcgcgtctctttttttggttaactgtccataacgtttggccaatatgatatttactttagatagaaatttgttatagcgaatcctgattgaacttgattccaagccctgccagattttgagaagcctaagggttgatattcttttattgtattaacaaattcatagagacgcatattcattacaatgtctt

SEQ ID NO: 72221 - DNA, 716 bp, Glycine max
  unsure (1)..(716): unsure at all n locations
  Clone ID: PAT_MRT3847_36227C.1
agttcgagctacacttttttttttttacagaattggaggttacgttcttcaaatacagtgagcattaaaaaataaagtagttcataaactaaactacaactttacaagtattgaacaacaatagctataacaagtgaacaaacaatgataaaagcagaacaagaaaataaaacaggggaataataacacaagaattgcaacaaatcttcaaactgcacaaacaaggataataagatcaccaacaattgtaatccacaaaaacaaaggacaaaagattctaacagagaaataggataacaaaatattccaaacaggcttcagaaacaaagacatatcttatgatacattagccttattttttgttttactccccaaggtacctgaattggatagttgcataaacttgtctcctttttagtattgttaggcataggcacgctgcttgccactttagaagcagctgaaacaactttagaggcagctgaaccactttagattgatatatactaatatactactaacataaagtaaaactatatgtaacttgctccaatgaaagacttctccatcatcaatacttaatttattttttgtcaaaaaaataaaacttcatgcacaaaaagggtttagatannacaaataatttaaagtagaaaattgctactcaaattnattgtcacaaattcatgtcacaaacccatgagttaaaaaattta

SEQ ID NO: 72222 - DNA, 278 bp, Glycine max
  Clone ID: PAT_MRT3847_36228C.1
acacgttgctgtaggagataagattgcagtagtgctaaatgctaacacctacagtgaacaacggcctatgcatgagcatctctgctcaaggcttcacctgttcttgacaagtctgagtaggtgaagggacaaacccttcgtcaaccttctgcatcagttgtgagattcaaccccaccaccccatcagggctcaccatcagcgctggatcctatgctgatgagtcgttaagatcgcgaaaacagtgggttcaccacggacgggtattttggccatggat

SEQ ID NO: 72223 - DNA, 274 bp, Glycine max
  Clone ID: PAT_MRT3847_36229C.1
tttttcactcaacgtccatttgcatttattgaaaatgggatcacactcaaaggaacaatcaattatttggtgcctagaaggctacaattgggctcttaacttgatgcttgccaaaatccaaaatcaatgtatcaaacattatagacgcgtcaattgttccttcaattatgacgaacaatgactttttctggcctttggaagtcaaggaaagagcactagggtccacttgaatattgaacaaggatggagcacttacttgggccttataagtaga

SEQ ID NO: 72224 - DNA, 459 bp, Glycine max
  Clone ID: PAT_MRT3847_3622C.1
catctgaaactagcgatatataatggatttagtgttagttatgaccatcatggaatatgaacagagttttattgataaaactccatgtaggacatcttacatctatgttgaccgaaaaaatgtataccagaattcttagtaggtcatgaaacaagatgttatgagaacttccggatgaagaaagatgtatttatgaatttttgtgaaactttaaaggaagttggtaatttatgtgatggtaagaaagtcaacatagaggaagcggttgcaatgttcttaattataatatgtcataacttgtgtcatcgggtagttgctgaacggtttcaacattcattgcgtcatcgggttccgaattatcctaaaagcagtttacaagctaggcacgggcataatccatcaaagaaatcaaacaagttcacatcctcatattaggggcaatccaaaatactacccata

SEQ ID NO: 72225 - DNA, 519 bp, Glycine max
  Clone ID: PAT_MRT3847_36230C.1
ggctcgaggagaaaggttgagataatggatactcttttggaagatgttttggtgggaccatcgcaggtgccagaaaggttgcctattgtagcactagctcagggtgacacagcctacaaagaacctctcccagttcttttgatggagccggacgcggtagatacatggtccttatacggagtctgcaatagcagaagtagttgtcactttattgtttctagactttaccatagcaactggcatgggtgttaacacatcaccctctgagtgaaccgctgttggcattctacgtatgcgctgggtccatggtggcatgacctatgcctcttcacgacggctctgatggaatgtctaggctacacatattgctagctgtgaccattggtttctcattggccaggaatctgttcctgacacggactgtgctctacattatcatgcacggtgttggagctatttctggagctggcctggtgcaggcttatgaagtcaaagctaggcatgagatgcataaaggtg

SEQ ID NO: 72226 - DNA, 336 bp, Glycine max
  Clone ID: PAT_MRT3847_36231C.1
aaaggggggaattttgggaccttaatggattaaaaaggggctttccccaaaaaagcttagtcccaataggcgggggagttttaaccctttttaatttaggccccccttttatgggggccccatataactcccgcccaaaaagggatggccggggcttatacctttccccatttgaagaaaaattcccaatttttttttttttggtgaaaaaaaaaccccacaaccttttccgaaattggggaaaacccagggtttgaatcccccctcgggattgagaaatggagttaattacccaaggcccccccccccaaaaggcatcaagcctaatgttttttt

SEQ ID NO: 72227 - DNA, 287 bp, Glycine max
  unsure (1)..(287): unsure at all n locations
  Clone ID: PAT_MRT3847_36232C.1
aaaacannnccncacntgccgactnntcanncnggccttcngctcgncacanncanactgnactgtnctggcaacgnnacatggcaagactggtggcactccaanaganggaaatatctttctctaacttagcttcctctctttctgacttcagtggaannagacttgaaactcaaattnagttnaagagatcagcnatgntatcgaaaagggtatttctagtatnagnatagagtaagaaganaatgtaataatgggaggcancggtttattggtgtgtttttntc

SEQ ID NO: 72228 - DNA, 451 bp, Glycine max
  Clone ID: PAT_MRT3847_36233C.1
ggctcgagactagttctagatcgcgagcgcccgccctttttttttttttttttagtctcctcagttaaaattctgtatccaaatacactctaattgagatacaaaatcatttgttgatttcaatcaacaagactgtgaaaaatgggaagtagagcggggaggataccttctcattcacatgttaaacaggcgaaagtacctagccatgagaggctctgaccgcgttgcaaagataaccgatcacacttgactggttggccaaaatatttgtgacaagctcctttggtgctggtaatgcggtgaacttctcatgaggtataaacaccacagcgggatcagtgggaactggagctcatgtgggaaaaaatgcagggacttaacacatttgggggtgtgagttctataggatagagctacaaagccggaggggacttaagccacacttatacac

SEQ ID NO: 72229 - DNA, 766 bp, Glycine max
  unsure (1)..(766): unsure at all n locations
  Clone ID: PAT_MRT3847_36234C.1
ggaacaagcctgagataattttattaaacaccaaaattggaacaagatgtaccagtttaggcgtgaaaccaacattacacaacgaatacaccagaattgcataactctacttcctcttaattcacatgacatcaaggacaaacattattaataaaatacgttcctcataattcacacatgacatcagggacaaacattataattgatcaaactgaatagaaagaatgggattgcgaggaaagaaataacaccttaacctttaaactatgcctcgctagtaatccactcttgtatagcaatatacaacctacaacattctacacaacccaccagctatatccaaacataaccattatatgtatagtcaatttagtatccaagctaacaaatgctccaactgtatgatggttattgttaagacattgcaaaatgtgaagaatcctttcagctgtatcctttcaccaagtgctgccaaaaaataataacgacctttcgaaatatcttgtaccaaaaatccacagctatatattgggatgctgctcagtcatgtctttcctcattcagctttcaatctcaagatctccttagccgtcctacgccgaaagtaagacatgttttccgggttaaaacacaattccagacccctgctataaaagtctgcatatttgatcataaacaccccacaatcatacccatttttctgcacaggaaggtctttcacaaattctnttttccaggtatttacatcaatatgttttccagtctt

SEQ ID NO: 72230 - DNA, 276 bp, Glycine max
  Clone ID: PAT_MRT3847_36235C.1
cctcaatcacacttaatctctctctcctgcccaaaactcatggtcatgaatcacatagttggcaggcgtacccatctctctatactgtacacttatgactcactccttcataggaaatacccactctttctgcatctctcctcaaaacactgacacaaaataatgcttccccattaaaccctccagcattcttaccaccattgtcccacattctaccaaataatcttcccgacccatatcctattgctaataatatggtatctccatacctttaca

SEQ ID NO: 72231 - DNA, 326 bp, Glycine max
  Clone ID: PAT_MRT3847_36236C.1
cgggctcgtccgacagctgcgaaaggggtacagaaggggggtggagacaggggcaatgaatcatacccaaagtattcgggggcagcttcagattgcatccggattgtcgcctactcttattgttctcttcgcctcggatcagttctaggtcttctatctcagttcgacattgcagatgagcaaagatcttttctctgcgacatgcacatctctcttcagttctgagctctggactacatctctgatttaaatatcgttcatgcatacgtcctgcacacttacccgttccttcattgcggtgtcacaacgtgaatgttaatggctgc

SEQ ID NO: 72232 - DNA, 499 bp, Glycine max
  Clone ID: PAT_MRT3847_36237C.1
gattcttgcaactagtattgttgcgtcaggggcttatgctgatgatttggataattcagatggcttgatatatacagggcagggtgggaatgtgatgaacactgataaagaacctgaagatcagaagcttgagcggggcaatcttgctctgaagaacagtattgaggaaaagaacagtgttagggtgatacgtggctctgaatcaatggatggaaagtgcaggatatatgtttatgatggactgtatgtggttgagtcttgttggcaggatgtgggaccacatgggaagctggtttataagtttcgactgcgaagaatccttggtcaaccagagcttgctttgaaggaagtgaagaaatctaaaaagttcaaaacaagagaaggtgtatgtgttgatgatatttcttatggaaaagaacgtattccgatatgtgctgtgaacaccatagatgatgaaaacccccctccgtttaattacataactagcatgatatacccc

SEQ ID NO: 72233 - DNA, 298 bp, Glycine max
  Clone ID: PAT_MRT3847_36238C.1
ccctcccgggggggaaccgctcaccttttaaaaaaaaaaaaaacttttttgcaatccccgtttgtggtttatgttaaccaacctctattttcccgggggttggggattttttaacaccctagagcccttttcttccctatttatcaaggccgggggtttaattctcccctcccccggttccctcttttgccaaaagctccgggggggttgaatttagaagccgggtccttttgggggcctgccctgtttccgatggtccctccttggttttttggcgttccgattggttaacctgggg

SEQ ID NO: 72234 - DNA, 244 bp, Glycine max
  Clone ID: PAT_MRT3847_36239C.1
ggtttttgtttctcgtttaagccatcatagggaggaggggcttgtcgggtcaaacaagtgcaacagagcgagatctgagtcgtaattcggagtcccttttgaaaaaagaggttacttggattttgtgaggttgtcttggagttggagtcatggcagttgaggttgtgggatttgagatggttcaaggaccagtggagaatggtactggaggaaaacctgttttaaatgagaaggagaatggcaa

SEQ ID NO: 72235 - DNA, 326 bp, Glycine max
  unsure (1)..(326): unsure at all n locations
  Clone ID: PAT_MRT3847_3623C.1
tgctaccaatggtttttgtctctgtcccaatgnacaacctatgatcggatgatgaactctcaaacgacgcctgtgcggcctattcttggcctattcataaaattaaatacaagcgttggggtgattcttacccaagaacataagaaccgctgcacgttttatgtagagggtgggcgagcatgggggtgatccctgaaataaaggtgaggcataacatatatttcttcatagcacgagctcttacagatcgctcgattcgcgataacctcatgccttgccaattctacgctattcttgccatcgatttttatgcatgccccgaccta

SEQ ID NO: 72236 - DNA, 2358 bp, Glycine max
  Clone ID: PAT_MRT3847_36240C.1
gacccacgcgtccgggtttttgtttctcgtttaagccatcatagggaggaggggcttgtcgggtcaaacaagtgcaacagagcgagatctgagtcgtaattcggagtcccttttgaaaaaagaggtcttttttgctgtaattcacttggttctccatttgggttacttggattttgtgaggttgtcttggagttggagtcatggcagttgaggttgtgggatttgagatggttcaaggaccagtggagaatggtactggaggaaaacctgttttaaatgagaaggagaatggcaagctggaaaaagatgtgggagctgcggatgccatcaaatttgggacacatggagaggaatctgcaaaaacggaagggattgatgtttcggacgtgaatgccccgaaagatgctgctgaagattggcctgcacctaagcagattcattctttttattttgtcaggtggcggccttatgatgatccaaccatcaagtctaaaatcgacttgtctgacaaagacattagcaagaaaaatcaagcccggtttcagatcactgaagcactgaaggcaaagcggtcagaacgagccgagttgatttctcaggtcaagtctctaagaggcgacagtaggcaatttcagagtattgtggatgagaaattgaaagagattggacctctgcagcaagcactgggcaagctgaggactacaaataatgccggtcggggtggtttgtgttcatctgaggatgaacttaacagtgttatatatagtttacagtaccgcatacagcatgagagcattcctttgactgaggaaaaacaaatcctccgagaaatcaaacagcttgaggggacaagggagaaagttattgctaatgctgcaatgagggccaagttacaggaatctatggggcagaaagaaaccattcaagatcaggttaagcttattggtggggatttggatggagtgaagaaagagagagaagcgattcggtccaaaatcaagcaaattgatgatgcactgaaagccatagacaaggatatccagtctctacaggaggaactgacagctgtttctcagaagagggacaaggcttttgagagcatgcagcagctaagaaaacagcgcgaggaggggaacacctatttctaccaaagtcgtacagttctgaacaaagcacgggagctggctgcaaagaaagatattaatgctcttgatgaagtttcacagacagaggttgagaaatttatggcactctggaacaaggacaaagcatttaggaatgattatgaaaaaagaattttggcctcattggatatgcgacagttgagtcgggacggacggatgaggaacccggatgaaaagccaatcctggaagaaccaaaacctgctgaagctgaagcattaccaaaaactttcacaaaacagccaaaggaggagcctaagccttctccacaagaaactttgcctgctcagaaagaatccaaaaacaaggggagggatttgaaatccaaaccggagagtaaggatgtagcagaaactgatgaatatgaatttaaaaatccccaaaaggaggcccctgccaaagagtgtgaaatcgatccagcaaagctgaaagagatgaaaagagaggaggagattgcaaaggcaaagcaggccttggaaagaaagaagaagttagcagagaaagctgcagccaaagcagccatcagagcacaaaaggaagctgagaagaagcttaaggaccgtgagaagaaagcaaagaagaaatcaggtgctgcagctgtggccaaccctgaggatgaaccaaaagatgaagttgtcgaggctacagagccagaaaaggttaacgatgatgtccaagtcctggctccagtgaaggaaaaggtccaaaaggagagtggcatcaggtccaggggccgagcaagaggcccagactcgattccaaaagctattattaaacggaagaagtctaacaattacctgatatgggctgcagctgcggctttgctagtcctcctgttggcagtgcttggatacatctatcttttctgaaaagcttagatgtagaaggagctgtgaaaccaattttctgagtgggtggctaggtttgtgaggtagcataagttatgttcatgtttctatacatcctcttgggagaatagatgaaacacactttgttgtgcttagctcctgctttggggagaaaactgcatgcatacatttagctttgactatgtactttcaaaattttgttcagatttcatttactgaatttgcttctatagttaatttgtcataggaatggtaccatgatatactgaaaaacttttatgatgatagattttacatgttggttaac

SEQ ID NO: 72237 - DNA, 1193 bp, Glycine max
  Clone ID: PAT_MRT3847_36241C.1
gcagaatcagagtccacgcgtccggaaagaaaaaacttgatatataagacaccagcagcttcctatggagtattgaatctcaatgtaattgtcttcaatcaagtggtggatctgaatcagcagaggcagatggcgagagcaagttctggtctgcaatacccagagcggttctacgctgcggcgtcttatgtggggtttgatggatcctctccaaccaaatccctcacctccaaattcccccagtccaccgctcttcttctctacagcttgtaccaacaggctagtgtaggaccttgtaacatcacagaacccagtacatggaaaattgtggagcatggcaaatgggccagttggaaccagcttggaaacatgtcctcaactgaagccatgcgtctttttgtaaaaatattggaggaagaagatcctggttggtattcaagattatctaactctgttgtagaacctgtcgtagacgtgcaaatgaatcataattccaaagttgagccagtaattgagaatggaaactcttatccagagacaaagactatttctatttccactcaaaatggaagtgaagttggaacacaggataaagatactgttgtggaaggctttggttcagttgaagtatatgatcaatggattgcacctccagtatctggaggaagtccaaaagcccgatatgagcatggagctgcagtcgtgcaagataaactgtacatatatggtggaaatcacaatggtcgataccttaatgatcttcatgttttggatttgagaagttggacttggtcaaagattgaagctaagactggagttgagtccccaacaacttcaatcccttgtgctggccattcattgattccatggggaaataaacttttgtcaattgcagggcatacaaaagatccttctgaaagtatccaagtgaaagtgtttgatcttcaaatggctacatggtcaactccaaagatttttgggaaagctccggtatcacgtggaggccaatcagtgaaccttgttgggaaaaccttagtaatttttggtgggcaagatgcaaaaaggactctcttgaatgatcttcatattcttgacttggaaaccatgacatggggacgaaattgatgctgttgggggtgccgccttctccaagtctgatcatactgctgctgtacctgtggagcgatacttac

SEQ ID NO: 72238 - DNA, 250 bp, Glycine max
  Clone ID: PAT_MRT3847_36242C.1
cttgcatgtcgctgttggtactgttgccggtggctatggaggtggtggaggcagcggcggtggtggcgcggtagaacatggtggacgtggatatgaagaccgagctggaggacgtgcatgtgctggtgctggatacgcttcattcagaggtgtagacagtggtggcaacaagagcaatactgacaagccttatggtattaatggtggcatggctttaagggaaagagctgatgcaacttgcaggagaaga

SEQ ID NO: 72239 - DNA, 193 bp, Glycine max
  Clone ID: PAT_MRT3847_36243C.1
cttctaaatggtttggtgaaaattagaaaaatggtcccgcctggttcacactttgaagccaagggttcccaactattatattccgggattaaggttattggcttgcttggccaacggaccaaatttggggaccttgaacccttgaggaaattaaggaaggaattattgacccattgggatggacttttgacaa

SEQ ID NO: 72240 - DNA, 321 bp, Glycine max
  Clone ID: PAT_MRT3847_36244C.1
agttttcgtacaagccattaagaggacaacatcaaaattctgtcttatgcacaactgcaggaactgagtcctcctggcaccatggaacaccactaggctcactctctaaaccccattcaccaaaccattccaggaacacaccaaattgaagacatgtaacaccagaacatggaacgtgcaaaccaatactacactgatatggccgacctcgatcaacagacaatggacgcacttgcaccatacattgaacttcactacaacatctttgaatatgatacagcaccatatgcataagaagtgacagaactcatctcatctgaa

SEQ ID NO: 72241 - DNA, 799 bp, Glycine max
  Clone ID: PAT_MRT3847_36245C.1
tgcatgcctgcagtggaaattcagtgcagtgaagagtcctacgatttgacaattctacatggggatatcaggtccgctttgctcttgtattatgatgagtttttatataattaaatattatatatgtgttttcctcgtggaactaaaccatattattctcaagaacatttaattactgcaaatctgttaggttgtatagatttaattggacagtaggacattggtgtcatgtacgtacgttattacaggttggattactgggagagcaattagaaatatacgaagaaaaaagtaacagttctattcaatggagtccactagggaatacttgcaatcaaacactcacttggtataaggtagttgctgtttatgcgatccaaatggcaccatttttctttacctgaaattaatatagagtgatgatcatactgtagacggcatttgattcacccaagggtgatgagcctgttgcgttgaaccttgagtccatgggaaaaggtcaagcttgggtgaatggggaaagcattggtcgttattggatctcgttccatgattccaaaggccagccttcacaaacgctgtaagttacatgaaactcaattctgaaattctatcttcacaaaactcaattctgtaaagtagcttttgcgtgctaatgatggtttttatttttattacattcataggtatcacgtgcctcggtcgttcctcaaagacattggaaacagtttggttttgtttgaagaggaaagtgggaatcctcttcatatcttcctcgacactatttcatctacaaata

SEQ ID NO: 72242 - DNA, 144 bp, Glycine max
  unsure (1)..(144): unsure at all n locations
  Clone ID: PAT_MRT3847_36246C.1
agctacaaacaagtatgccaactaagcatctaaggagacagcccagggaggggngttggcatcacacaggggagggctgggactaacagaaaagatgctaggacatgatcgaaacagtagcagagaggaacagcataggatcca

SEQ ID NO: 72243 - DNA, 434 bp, Glycine max
  Clone ID: PAT_MRT3847_36247C.1
gggaacaggtaaaaggtttccaaatttttttaatgggggtaaattcccctttgggaaaaaatagtttatttttgaaccaggatcccccggatttccaaacatacggggggtggccgggtttttttcaaaatgggaacaggggactagcctaagcctcaccattaattttccccgggattttctccaaaacatattccaaataatccgtggaacccttgggggggccttccacataaacccgtaaaccaacttgggggggtttggttttttacacttcaacatcgagggtctgtgccccaaccacaaaggaaggggggcctttaaccctttccaccaagttactttaggggttccccttttttttttccaaagggaaaaactttttgtgcccgttttcacgaaaaaggaggaatacaatttttggggccaagggg

SEQ ID NO: 72244 - DNA, 145 bp, Glycine max
  Clone ID: PAT_MRT3847_36248C.1
gttgcagctcctactgtctaacaactacgctgaagcagaaggtctagataaggagttcttctcttcaggcaaaaaaaaaaatggaggattcgttggagaattggatttcactgttggaaatggaagattatcatgatgggtcatt

SEQ ID NO: 72245 - DNA, 309 bp, Glycine max
  Clone ID: PAT_MRT3847_36249C.1
tctttcgcccttgcgtccgcccacgcgtccgtccactcgtccggccactcttccggaacagtgttcctacatctgggaggcattgaatgtcccaaggatgagaaccttcctcgccgcaaatatcttgacacatctaagacacgttgcttgactattgttcctatggaggttaatcatgcggcccgccagaagttcttataatatgtgaggttcactatgaagaaaagggccacgcttcgttggcaagctggaatcaacccatactccatggaatggactggtctggccaattggttcctggacaagggc

SEQ ID NO: 72246 - DNA, 372 bp, Glycine max
  Clone ID: PAT_MRT3847_3624C.1
atcttttttttactgcacactctggttgtgatccagccattccaatgcttgttttactgcagtctcaatattgtccttttcatcagactacaacttgtcagcaagctagaccttgacaccgatctggtgtttaatgtcgtagacataggtttcaagactgccgatagcatcaatcctgtcctcaacatcgttgacttcctaggcatactcctctgcttcacgaaccattctatcaatttgtggctggctaagacgtacattgacatacgaaatggagagcttgtctgatttaccagagccgttgacttatgcctgaacatttagaatgccgagggcctcaacttaaaaggtcactacaatttgaggggtgcc

SEQ ID NO: 72247 - DNA, 390 bp, Glycine max
  Clone ID: PAT_MRT3847_36250C.1
tgtctttctttgaagcattgcttccatttgtgagcgttgaaacagttcactcttcaaaccttcttactggatctgcatatgcctaccgcttcgatctttgatccttggctaagttagttttgtgcaatttattcctgcggtcccttggaaagggattataatgatttggagaaccaactttgcagagagttgcaatcccgagagaattggggaggactactggccctacaaggcgttctacaaaagggcaatggacaccgtaggaggatgattccttactgcatgctgacgcgagattccaaggaaaaaagaggaaacaaattgctttatgctgcatggatagaactgatgtgcactgcctacatctgtggcagaaagttttaaatcctg

SEQ ID NO: 72248 - DNA, 240 bp, Glycine max
  Clone ID: PAT_MRT3847_36251C.1
cgccaaaccggcttgtacttattgagcgggcccttatctgtctagaaccaaacggtggattctttctctctcgacatccgtaaacagcgtctcccatgtttctaaatcgccctgtgttattcatactgcggcggaaagagatccagcggctataatgacagacctacggtgatctacgcacataggcgctcgcaagacctgtgatcctatcgattgcaccgaggggaccggaaacttcac

SEQ ID NO: 72249 - DNA, 269 bp, Glycine max
  Clone ID: PAT_MRT3847_36252C.1
ccgcagccggattcggtgttgttcgctcccctctcgtgacctcatccggtcccgtgggtgttagcgtgttgttcgtgtcctcctccagtccgctgcgctttcccggtttgtcactccgctccccctcgctccgtcacccgccctggtaagcatgcccctcccctctccctcccctttccgttacggtttccggcgcggttcgttcgagcggccttccgcttggttcaacccgcgcgttgaaaaagcgaaattctttttgagacaacctg

SEQ ID NO: 72250 - DNA, 198 bp, Glycine max
  unsure (1)..(198): unsure at all n locations
  Clone ID: PAT_MRT3847_36253C.1
gggactaaaggggtngggtttttttttttcttttatttatgttccctacaaagggcccaaaggtatcccactttttttttctttcttaggaaacacccctccacattgcacgaaatggtttccccacagggtttttttgatagggaacacttgtttcttttttactaattggtgaaccaaaagggggcctttaaattt

SEQ ID NO: 72251 - DNA, 269 bp, Glycine max
  Clone ID: PAT_MRT3847_36254C.1
acaaacattggaaaacccaaatcgaaagaaaaaaacaataacacgattactgaaaaaaataacgaaataaaagggataggcgaactcctccattgccggaggacctgaacaccccagaagcaaccacagagatttgaagcccatggcattggcaaacctatgatgggaggccctgccccagcagcgggtgagaataacgaccgctccgggggggcccggagagactgacttgcattgagggtgagggctgcttacaaacaaggcactgc

SEQ ID NO: 72252 - DNA, 304 bp, Glycine max
  Clone ID: PAT_MRT3847_36255C.1
attggattaatggctatgggagaaacaagtgacactcctgctaatgctgtctcagtcgctgctggtcaacagccggtctacattattgttgccctcgttccggttgtcaatggcgcgtttggttataaagcatgtacctcccatcagagctctggtgatgtcgcttgtgctttacaggaatgatcgtcgcattctcttgatgatagccactctgatttcacagctctttgtgacggtgacttgctggctgccttctaccgtggtcccaatgacgccgatgatgcacatgccttatctgcatatc

SEQ ID NO: 72253 - DNA, 358 bp, Glycine max
  Clone ID: PAT_MRT3847_36256C.1
gaaaattttcttaaccacttatcacttgggaatgagaaaagcgcctgtgcaagaatggaattccccgaagattaaaatccacaattcaaacaagctaattcatattattcaaatcggtttttgcttgtccgtaccacttttgggttgactgttcaacccccgggtaaaaggccccgaagggcccgttccaaattcgtcccattaccggcacgctactacccgctttctccggggaaacaactcgaggagtccaccgacggcttaaggattcgggcctgggaccccgagacccagccctcatagccaaccctttggccgaggttactgacccattttgccccctcaccttgatctacat

SEQ ID NO: 72254 - DNA, 226 bp, Glycine max
  unsure (1)..(226): unsure at all n locations
  Clone ID: PAT_MRT3847_36257C.1
cggcggcgngaggacggcgattgcacggnggcggaccagagggccaggcggggcannccaccaccaaccnccgccaccggangcggcacncnncnccngcccaggcgcaacngggnaagcngcccaagaagcnngnggcaaagggggccaccagcaagaanacagagcaggngnnggagcagnngccngggggggggggggggggggacncacacannggaaaagg

SEQ ID NO: 72255 - DNA, 145 bp, Glycine max
  unsure (1)..(145): unsure at all n locations
  Clone ID: PAT_MRT3847_36258C.1
gaatacccggccggacccacgcgtccgcaggcacgtgagataaaagaaacccaaaatttcgctcactctctcgaacgcttnccgaaggcatgtgtaaaccaaaccctacgcgcaggatccccaatgcttcaacacccacgaggac

SEQ ID NO: 72256 - DNA, 299 bp, Glycine max
  Clone ID: PAT_MRT3847_36259C.1
aaaccccaacatttttgggacttccgcttaaagcaaaaaagggaacaggtggcccttgaccttacaacattggagggttctttacttcacaggcaatgggggaaaaaaaaaaaagggggcccccagggggggaagatcaagaaagcttccccaaaaactagcgggcaaagactttatacattcaaaatccccggtcaagggtaaaccaggggaggggtttatttttccgccctaattggggttttaaaattgggagggcgggaaaaaaaaaaaaaattttcctttaaaggccggggggg

SEQ ID NO: 72257 - DNA, 398 bp, Glycine max
  Clone ID: PAT_MRT3847_3625C.1
actcggtttcggaatgttccgggtgcgacccacgcgtatcgcattgatatgggagttataggaccatatgaaattagcacatgcgtcatcaaaactgggcattctggtggtcactcgaagcacaaattactcgctgaaaagagagcacttcaagcacagagttgtgcttgcctcgttgacacagaatataccctctgatagggcttcatatggtagagcttgaagagcgacaaaggggtctgatatatctttgtggaagctatctccaatgtgtcattgagccacaatgtgtcagattatgatatcttggaaactggcaaaaaaggtcatgtgagagagcacaattgagcacactatgaggagaatttatacctgacacaggtgtagagaggggtagc

SEQ ID NO: 72258 - DNA, 654 bp, Glycine max
  unsure (1)..(654): unsure at all n locations
  Clone ID: PAT_MRT3847_36260C.1
gctcaaatgttgacgtatattgccgagaagatggttgtgactaatgtggctgagaaaatggaaaattctcgatcaacactcaccaacctagctctaaataaagtgagttatgttgctcaatttgcttcttctagtaggtcaatccaccctaccctgcttaaggtgggttgaaagcaggctgaccgctacttttgccacccttgaaaaatatacttcaaaagataaaacaatcaaacttaaaaatgaaatagtcatatagtatgcatatcggtaatgatgcatcacatgattatagatttggtgggaaaacttttggctcttctcacaacaaagagattaatgttgttatagcaccaatcctctcacactccttcccctttcattgctgtacctaagatgccaacatcaaacttcaaaaggatcaagattcaaaaatatcgaagtgaagttgtaaccttgatccctgtttaatcttgggcccaggggagggtacatttcagttggtccaatgtgaggggttatcattaacttctatgacatgtcaggtacaccatcgtggngttgtgggaggggaaagttggttggatgctaaaaaggatctagcaattgagatggtggcacctgcatatactttgatgttcaagttagtaaaag

SEQ ID NO: 72259 - DNA, 239 bp, Glycine max
  Clone ID: PAT_MRT3847_36261C.1
gacgaatctcgtaattccctcgaggacgggtagcccttaataacaggagagggtgatttctgttttatgaagagaagaaaacaaaaggggttgtggtgcattttgaattgggaagaggcgaattccaacgaatagttgtgatacggtttttgattctcatatagctatgagtgatagtaacgggaacagcatcatgctaaatgttgaagatcaagatctgttactgtacttcttggagg

SEQ ID NO: 72260 - DNA, 370 bp, Glycine max
  Clone ID: PAT_MRT3847_36262C.1
ggctcgagatctacggttttttcattgcctctccttcttcctccaaactcagcttgagtctggcacgccgccctggccaccgctggcgggtactctctattcaccgggcaggcattccggtgccctttactagctggagtcactaaactattctgatacaaactgctgctaagactgcgtactgtcgaaatggttcactgatacatgtggtgctgagcgaactaggacaacattgcgagcagtctcaagaggagggggatgagattcaggtcttgaagtctcaggaagctcaggcaccaatctgtgaatttgtcatgggtgcagaaggagagccatacggtatggttgaggcaatagaggaccggatgac

SEQ ID NO: 72261 - DNA, 583 bp, Glycine max
  unsure (1)..(583): unsure at all n locations
  Clone ID: PAT_MRT3847_36263C.1
gagcggccgatattttgtttttttttttattatttttttgcaagcacgcaaacactgtttatgagttatataatacccacgacctcactcttatattccaacatatttaacaaaatgcgctacagtttaacccttcaggatcctaactaggaatcctacaattttctttaacactgcgcataaaagttctctcaaggtacacactggtcgggttactgtataactcataactcacatgacaagtaatatctctacaaatatcaatcacacactcattcacaaccatatttcatgtctacagtctaacatttcacactctaactaattacaaaatatactcaacaattagataacaatttatcataataataataatatacaatatttaacttcaaggcttataaacaagtaactataaaatacacgtaaaatatatatataagtatattatattcaaaatatataacaaaatatatatattaacgtaaacgtaaacgtacatatcacatataacatataaaacgtnttaaatatatattaatataaagtaatcacaataatatcaaatatattattaagtaaa

SEQ ID NO: 72262 - DNA, 413 bp, Glycine max
  Clone ID: PAT_MRT3847_36264C.1
tttttgaaaaaaaaattatggaaataacaaaagagacgcccgccaactaaactgcctctgagcgaagttacgatccattgaacacatgacctgacatttgagattaggtagggaaacaggggcttgtcgttgcacacattcacgtacacataatgcaatttcaacaggaaatatgtcttcaacagagagtgactactcactcaacaaattgggctacaccaaaaacgatgatgcgtgattcttcaaatgcaaggctttgccttgtagcgaaagcatgcatgcctcctttcggtccttggatttgtgcagagcctgtacttgtgaaccggttgactaaaacctgactcgacacatttaatcacttgcaggaatgggtgttttgtcatccgaaaactcagatgaactaactctga

SEQ ID NO: 72263 - DNA, 486 bp, Glycine max
  Clone ID: PAT_MRT3847_36265C.1
aataattctctatttccaaatttgaaaattccgttccctttacactttttatttttattattatagatatataaatattttgcctttcttgtattttatttaatatttatttattattcttcctttaccttgtgtttgtgtttcaccacaacagtttcctcgattggttgatctgctttctgggccatgttggtgtcgatgaggaggatcacgttcagaggcatccacagtgagttgtagaatagaagcaaaagagaagttcttggtggcgatttcttagatgggtcttcttctgtgggttggtggtggggtgagggtcaaggaggttcccaacaaagattcttcttttaaggaagctgcttctgttgttcctcagtctcacctccccagcagggttaactcagataaatcaaaatcacgaaatggcgctgatattaagaaggacacaccggttccaaaggatggcccaacggcccatattgctgc

SEQ ID NO: 72264 - DNA, 583 bp, Glycine max
  unsure (1)..(583): unsure at all n locations
  Clone ID: PAT_MRT3847_36266C.1
gccgccttttttttttttttttttttttccgaattcacaaattctaaaccaacccacctcaggattccccctggcttaatctgtgcttaacgcataataaatattcatggagtaccgaaccccatatctaaggagtttctacaagaaaaagcttgacacattcccaatgctaaactatggtacaatcttcagctagatcccaactgagagcagtctgggatcaaaccaatgttaacaaagcatcaacacattttttttgcctattctttcttcacgcagtataatccaacatcaggctgacttgaaatcaccaaaaccaaacattgtgaatttagctccatacagatagctatacaagaagcttggagaccacgatataaattatgggactccatttgctacatgttgaaggcaacccgcaatcttacatcctgtcagcttaagatcaagaaaccaaagtggtgtgtacatcactctacaacccctgcctgcatctccaacactctgttcganaccaccacttaccaacaagataagcgattagactcactttagccatgaattttttgaacagcaaagtgcg

SEQ ID NO: 72265 - DNA, 1211 bp, Glycine max
  Clone ID: PAT_MRT3847_36267C.1
aataattctctatttccaaatttgaaaattccgttccctttacactttttatttttattattatagatatataaatattttgcctttcttgtattttatttaatatttatttattattcttcctttaccttgtgtttgtgtttcaccacaacagtttcctcgattggttgatctgctttctgggccatgttggtgtcgatgaggaggatcatgttcagaggcatccacagtgagttgtagaatagaagcaaaaagagaagttcttggtggcgatttcttagatgggtcttcttctgtgggtgtgagtgggtgtgagttttgactgtgttggaaaaagaaggcttttttttttttctttttaatgttatgagaggcattattcttggtgggttttgtgaggggtggctttgatttgcctggattttgatatgggtgggtgttttccttgttttggatcatccaacaaggagggcagtggtggggtgaggggcgaggaggtgcccaacagagattcttcttttaaggaagctgctgcttctgttgttcctcagtctcaccaccccagcagggttaattcagataaatcaaaatcacgaagtggcgcagatactaagaaggaaacaccagttccaaaggatggcccaacggcccatattgctgcacaaacatttacgttccgagaacttgcagctgctacaaagaattttaggccagaatgtttattaggcgaaggaggtttcgggcgtgtttacaaaggtcgccttgagaccacaggacaagtggttgctgtaaaacagcttgaccgaaatggtcttcaaggaaatcgagagtttttggtggaagttcttatgctcagtctcttgcatcatccaaatcttgtgaacttaattggctattgtgctgatggtgatcagcggctgcttgtttatgaatttatgccattgggatctttggaggatcatttacacgatcttcctcctgacaaggagcctctggactggaacactaggatgaaaatagcagctggagctgcaaagggattggaatatttgcatgacaaggcaaatccgccagtgatatatagagacttaaaatcatccaacatcctccttgatgagggttatcatcccaagttatcagattttgggctggcaaaacttggtccagtcggcgacaagactcatgtatccacacgagtaatgggaacatat

SEQ ID NO: 72266 - DNA, 214 bp, Glycine max
  Clone ID: PAT_MRT3847_36268C.1
ggcacgagtgttgcagcaagtgccaaaggcaattggtctcttgggttaaatgcctgcaactcattgaatatgaggcaggagaagaggttactgccaagtccatgcctccttaatatcaaagcactatctggtacatctgacacatagggttgtttgttgggactccatggttgcaatccattttcacagtatgtctccatttgttccttcaagg

SEQ ID NO: 72267 - DNA, 382 bp, Glycine max
  unsure (1)..(382): unsure at all n locations
  Clone ID: PAT_MRT3847_36269C.1
taaatttttttttaaccctgaaaaatctatatcaccttcaataaaagggtggaaggttttccgaggnnngaaatgatttaaagaaaccctttccctgtcactatttcaaggtaatcaaggaaatttataagaaatgagagccaaatttaaagagttaaccaaaggaaccattattggaacgaatacatacctaataaattaacctcctaaggggaacatttgctaacagggtacataaaaaatgaaaggggtttatccactattatataaggaaaaaaaaaattatgtttttttcacactaacatcctataggtatttgggtaaaaaggtttatttgtccaaatgcgtaaacttgcaaaaattcaaataagtattttatttt

SEQ ID NO: 72268 - DNA, 281 bp, Glycine max
  Clone ID: PAT_MRT3847_3626C.1
ctcggaatcgaggctcgagggactactgatgcagcacgacaaggagcaaatttgatattgtatttatatctttctcctctttcaaaataagacataaatacaatatcaaattagctactgccaaggcctcattaccacaagaaggcagggtaggactactgatgcagcacgacaaggagcaaatttgatattgtatttatgtcttattttgaaagaggagaaagatatgctatttgaattttgattattatattattcactatagatgttacttatgatca

SEQ ID NO: 72269 - DNA, 566 bp, Glycine max
  Clone ID: PAT_MRT3847_36270C.1
gccccgaaatcccgggtcgacccacgcgtccgcaccacttcgcttctttccctttagcgctactccgactgaccgttccttacgccttatccgtctatgcataccaggacaccacctcaacactccttgcaggaattaaacttcacttcaattgaactagcctagctgggagttatatgcatgtcgattcaatcaactggcttgaagagtgccaaggcgagatgacaagctcactctgcagaaccctatccgtagacggatcaggctaccctggctaaggattccacggccagaatatcccacgagtgaggctctgctgccaccactactgctaaagttcccagctttaggagcttagcagcacccaagcgtagcgactctgcttcgaggccaagctcgcagtccaaggctcattcagcacaaaaaagaggcgtactaggctctatacgctgatctcaaatgccgtacgacagtgtcattaacattgtccattggacccacgacatgaccggacgatggccattgaacccgcatgatctcatcgacaggaacatgagctgtcaccc

SEQ ID NO: 72270 - DNA, 220 bp, Glycine max
  Clone ID: PAT_MRT3847_36271C.1
agcgaggtcaccagattttcctttgacactgaggtatgagttgttggtttgggtcgtgagcctgtttgggtttgtgcatttgtggactgtgaagcaagcgtttcacactttcctgtatatattactattattcccagagtttgtgtgtgaggcagcaacacacacagagaacaaaaggcaaagacagagagagaaccatgtcttcccaagcaaacgtcga

SEQ ID NO: 72271 - DNA, 292 bp, Glycine max
  Clone ID: PAT_MRT3847_36272C.1
gtgttttttttgtttgttttttcgaaagaaacaattgatcaccacagaggtgtgccaggtgtatctggttagccgggacctgctatgctgcgtcggatcctacgtgcctcggttggttagtgagcatacgtttggcaggtagcactaaggggtattaatacaatctgcccgatggggtggcccatgcatggtcctagtggagaattctacactgggctgcattatacctaacaccttgtgacataaactggcggacttgctgtcccgggcatagggaaagcacttggggcca

SEQ ID NO: 72272 - DNA, 301 bp, Glycine max
  Clone ID: PAT_MRT3847_36273C.1
gtccggatattcccgggtcgaccgcacgcgttcgaccacgcgtgctgcacagagccctctattgaggtcacacatctagactgcaatcactactgatgtgccacatcatacatgagcgggtcagaacctatctatacagtcttacctggtgtccagacttatccccaactttaactctatcaattatactacatccagttcatacgtcaatggcagaatgcactcgcctgggttcgctgttgtgtcacccgtatcttcagctactagccatgctccagcagatatccgatgtacatgattt

SEQ ID NO: 72273 - DNA, 259 bp, Glycine max
  Clone ID: PAT_MRT3847_36274C.1
gcgattattgattagtacaaaaaaaaaaaaaaaaaaagagaatgttggggagcactcatcaaccatggtgatgttgtttgcacacacagattcaatagtcacttactaattcttggagaaaaccaagtgtcagttattacttaccagccaaaccgaaaagaattccgattcgattccgagagaaccacccttaagaacgaccaccacaaccaccaccaccaccagcgccgagcatagcaaagacactaccgttggaatc

SEQ ID NO: 72274 - DNA, 313 bp, Glycine max
  unsure (1)..(313): unsure at all n locations
  Clone ID: PAT_MRT3847_36275C.1
gggctgctgnccagngatacaaggcattgccataattaaccngatttctttgttttganannnnannnnngctcttgtttagaatgcccctggggtggatagagtaacttgctgagatttaacacttacttgcttgtgggtccctctaacctacggggggtatttcatttttacctggggggtattcaatgggcaggctatctccttggcttacgctaggcttttaggtgaatattacttcaattctttgaatattactttaagtcttttagggaaaatactcagattcaggttattttttcttctttgaagc

SEQ ID NO: 72275 - DNA, 510 bp, Glycine max
  unsure (1)..(510): unsure at all n locations
  Clone ID: PAT_MRT3847_36276C.1
gtcttctcggcccttgtgcgggcttgctcctgcccctgaacccgtggcgtggtcttggatccggcggcggttccgtgcgtgcggccctggtgcgcgccgtgcccggcttcttctgccttgccggttcctggtcaggcctcggtttcgccatgtgcgcggtggtgcgtctggttgagctgtccctgcccgcgcgccttcggtgcctgggaggcctctccttgtggcctggctcatgcgcgcggcgctggctcctgcgtgggcgtatctctggcgcccctgcctggggctctggccgggtggcgcgttttttggctgcttgtattgtccggggtgcgtgctctatcggtgggcggacggctgtggctgtgcggtgggncgcgcctgggttgggcgggttgctgggtgcggcggctgtcggggctcggccttgccggtgcgctcgctgctgcgtggggggcttgcgcgggggcttgggggtgggctgtggcgctgtccgggggtggggggggg

SEQ ID NO: 72276 - DNA, 995 bp, Glycine max
  Clone ID: PAT_MRT3847_36277C.1
cgagctgcacacacattcagtcataacgtaaaatatgaaattagacactatcttcgcctttatcgtagtttatattctgctggtaacctcatcagagttccctagtgttgctgcagatgatgttagcagcatcatcagtgcttcccaatttgagcaattgctgaaacacagaaacgatcaaatttgtgaggggaagaacggattctacagctacaatgcttttgtcactgctgccagaacctttgatgggtttggcactacgggtgatgttaacactcgtaagagggaggttgcagctttcctagcccaaacctctcacgagaccacaggaggaggaggatggcctaatgccccagatgggccatatgcttggggttattgctttgtcacagaaagagataaatccaataattattgtgaaattagcaaggcaccatgtgcctcaggcaaatcatactatggtcgaggaccccttcagctgacacacaactacaactatgatctagctggaaaagccatacattcagacttgataaacaatccagacttggtagcccaagacccagtggtatcattccagacagctatatggttttggatgacatcacaagccaataagccctcatgccacgacgtgatcaccaataggtggaccccatcttctgtcgacatggcagctaatagagccccaggttatggtgtgatcaccaacatcatcaacggtaggattgaatgtgggaatggtccttctccagcctcaaatgacaggatcgggttttataaaaagtattgtgagatttttgggctctcagatgctaccaacttggattgcagtagccaaaagtcctttgatcaagattaagttggactccttccttgcttataattgccttagttataaatcccggaataagaataagaatgttggtccttgtgttgattttaaataaatttgtctattctgtgttgaatgattaaaacatttttgttcaatc

SEQ ID NO: 72277 - DNA, 127 bp, Glycine max
  Clone ID: PAT_MRT3847_36278C.1
tgaagttggctcttttcttgtcaggggcattatcatgaaccaccctgcccagattggtaatggatacccaccggtgcttggaaggcacacttctcacataggtgggaagatattagatatcgtgacc

SEQ ID NO: 72278 - DNA, 573 bp, Glycine max
  unsure (1)..(573): unsure at all n locations
  Clone ID: PAT_MRT3847_36279C.1
cgagagaactccaaactcctttggtaaatatataaatcgtacttccttaaacacaggaagccagaactacatctcaacaagaacatctttgcaaattaggagacatatatatatatatatatatatgacattagagttgccaaaaataaacataaaacgggcacaataaactagtaaagaaaaaagagagtcgcagaattgaaggaaataaaaaaagatataccataacatatgcatggcatggcattaattaaatggggacttaagtggcagtggcggttgcattaggggaagtggtaacagatgttgctgctgcattagcaatgttttgttgttttggcctctttctcttcttctcgtagctaactcctctggccttggcctgaaaatcacgaacatcatgcaagtagaacctgacggcgcgggcgccgaaggggtntggtttcggctctgccgccattttcttcgtaggcggcgcggaggcggccgatgagggcgtcgaggctgccccaggcctggcggagcgggcaggggcagggncgccggagggtggggcagtccgaaaaggggcat

SEQ ID NO: 72279 - DNA, 227 bp, Glycine max
  Clone ID: PAT_MRT3847_3627C.1
agaagatcgatcatggcttatatctcctctctatcatctttctgcctctggaatttctctgcaccggggccggtttccatctgttccttatctcttgccttcctaacttgccaaataccatgcttacccaccactcgtagcagaccacactgccatcctgttctcaaagcgtcacgcatcatgtctctttataccctatctccacatccaacatctgagatcccatc

SEQ ID NO: 72280 - DNA, 543 bp, Glycine max
  Clone ID: PAT_MRT3847_36280C.1
agaaaaaacttatatagtctactatagaaatatatagctacagaagataaaaaaactccacgaaaatacaatgtgaaacggttcattttattattattgttcttcaaaatgggaggctcttggaagtggaagtggaagtgagtgaagcaaaattcccagatggaagaaaatcctgacgcaagttagccctcttgacaatcttcatcatattgctctgcaaactctgttgcactaactgcttcaccgttttcttttcctcactcatcatcccatcatccacaaccaaacaccctttccctccattcgatgaagaagatccacaaataggagcagacacacccaagttaaagtttccaccgtagcttccagaaacttgtttccctttgtctaccctcaaacactctaatattctggaggctctcttctgagccagtgtggttcccacaagtgttaattcaagcagcgacgaaactacccctgcctctatcatcacccccctgtcaccgtacgctttgtgcgccatgatcatcaaaacgtacgacg

SEQ ID NO: 72281 - DNA, 259 bp, Glycine max
  Clone ID: PAT_MRT3847_36281C.1
cttggggggggggggggggggggggggggatgggtggagagaggaagggaaggaaggcaggacaataaacccaaaccctgaatcaactaacacgcattaggattaaggcgagcaccccaaccaacatgacacatgccctgtaagaagctaggaggctaaaagcggcgccacttcgggttagtgcgctcagtttgatacatcggcccagtagccattgcaaacaatcattaatgagtgggggcattatcacacagagtgg

SEQ ID NO: 72282 - DNA, 275 bp, Glycine max
  Clone ID: PAT_MRT3847_36282C.1
ctcgagccgaataacaaacaaaaaagaaaaaaaaaaaaaaagcaaaaggaaaaaaaaaaccaaaaaggaaatggaaacgccaaaaaaagtaaaacaaatagaatggacaagacaacgacaaatgcccctcgcggcgtgacatctccgtcgctgccgaattcgacctgaccgcatgcgcggctggcagcggatggtccactccgacgccggtgagctacccccccccccgccccccccccccccccccccccccccccccgcgccccccggccccc

SEQ ID NO: 72283 - DNA, 345 bp, Glycine max
  unsure (1)..(345): unsure at all n locations
  Clone ID: PAT_MRT3847_36283C.1
gctcgagagctactaggcggcggccgctctcnagggcgggtgaggcagttgctactgcacttcgagacccaagtagaattgtttttagttggaaaagggcatgaagcctggaccaaaaaagaggggttttttccacgcgctggagcaacagacgaggacgtctcgagacacaaaatttttggcatttttttttgggggggggaaaaaaagagcattatatcctaagggtcataaaaatgcacaccagggatgctataggcgacatgtattaaaccccagacgcttctgcacggaaaaggcgggctgaataaaaacccgaggcagcctactaggggggacttttct

SEQ ID NO: 72284 - DNA, 545 bp, Glycine max
  Clone ID: PAT_MRT3847_36284C.1
agtttataaagcggagatgtcaggaggtcaagtatttgctgtaaaaaagttgaagtgtgattcaaacaacttaaacattgagagtataaaatcctttgagaatgagatagaagccatgacaaaaacacgccatcgaaacattatcaagctttacggattttgctgtgaagggatgcacacatttttaatttatgagtatatgaatagagggaatttagctgacatgctgagagacgacaaagatgcattagagctggattggcacaagagaattcatattatcaaaggtgtaacgagcgctttgtcctatatgcatcatgattgtgctccacctttaattcacagagacgtatcaagcaagaacattttgctgtcctccaatcttcaagcccatgtctcggattttggaactgcaagatttctaaagcctgattcggctatttggacatcatttgccggcacatatggctatgctgctccagaacttgcttacacaatggaagtgactgagaaatgtgacgtgttcagctttggcgttttggcct

SEQ ID NO: 72285 - DNA, 334 bp, Glycine max
  Clone ID: PAT_MRT3847_36285C.1
cagctgcacaaagcaggtgaccggatggtcaagctaccatgtgtctctgtctctcttagcgcctacgagcccgaagagtatatggcccacgagaccaatgtattaacatctgactcaaaccacgaggggcaccacgacaagctctgcgaccagatctacgatgctatgctcgacgcatgctagctacagaaccatgacagcaaggttgtctgtaacacctgcactatgaccaacatggtgacagcttacgagtagatcacgaccgatgccaacgtgaaatatgagaagaatgtgctaacacatgcatgaacattgggctgtatctgatgatggt

SEQ ID NO: 72286 - DNA, 396 bp, Glycine max
  Clone ID: PAT_MRT3847_36286C.1
ggctcgagaccctcctctggagcagtctgttttaccccatgagggaattcggctccggcgtcggaccatgcagcggctggccgcatcaggacaggaactttcctcccctaaccctaatctccgcggaggtgtaatttgcgggcagtactgtctgtaacacacacgcgatgcgctcttgctctcgtacatggtataaccagacactctcactatcactcgcaccagatataatgatgaacgggaatccttgaagagtgacgctccaatcgacaacaaggctcgagatacttgcacagatgagagggaatccttgaagaatgacactacaattgacaacaatgctatgtgtagttctacagaagaaagggaatccttgaaggacgacactgctattga

SEQ ID NO: 72287 - DNA, 427 bp, Glycine max
  Clone ID: PAT_MRT3847_36287C.1
attcggcaccaggtgaaatcctagtcatttaatggtaaactgaaagaaggaatttgtactagtatggtgcaactgcaagcagtagtgagtgatgaagatgaaaagtggtttccatttaattgaagtggtagtatgctagccaggtagcatttacatatttgctttggtgtgtggcactgcaaattaagagcaaacaaagtcttggtctttgtggctgtgaagaagggaagggatgctttgcttgatgcttggaaaaacaaaaacaaaaaggcatgaggatgtgatgcccccatttttctagttttagttttatccacaagctttgttttgtgagttgtaactttgtatttgtaacctataaacccacacaaccccaacctccaccacccctcatcctcatctttcactctttttcattttgttttgt

SEQ ID NO: 72288 - DNA, 727 bp, Glycine max
  Clone ID: PAT_MRT3847_36288C.1
tgtttgatgagtatttgttaggttgtggttgcaaatataggagatgccaaggcagtattagctcggtcaactaatggatcccaaaatcacccagatggtgtccagacacagctgaaggccattgttttgactagagaacacaaacctatcttccaactggagcgtgcacgcattgagaagttggtatcagagcctccgatccaaggggatctgcttctgcattcttccaggcagccttcattgctgcagttgatactgtttcagtgcccggtcactgcgtataccactggtcgcagttcgatgccgtcaaccaccttccgccgtcgtcattggaacgtctacgagcctttatggaccctttcagtaagacatctagctcttgttctctaaccatggctggatcttgccatggggaggatgattggaattgctaaagagtagggtgggttatactacttgcagcatgaggacaataaggagtgtaccagataaaaggctctcacttccaatcatcagacaagttcagaaccttggtcatcctcccaaatatggcttcagcacaagtgtttgggtcatcctccgtttagtgtccttaagtctttatttcttttttttacaaaaaggtcagtcgagtcttttcattgtgatgtttgtgagtttgcaaaacaccatcgaacaacttttcttcccagtactaataaaagttctaaaccttttgatcttgttc

SEQ ID NO: 72289 - DNA, 453 bp, Glycine max
  unsure (1)..(453): unsure at all n locations
  Clone ID: PAT_MRT3847_36289C.1
ggctattcagtcaatgcaccgatgttgcgatggaagagatatacactgctcgtaggactgatcatttttttcaggcggggaattatgtttacaattacattttttcttcacatgcagacgtttgtgttcaagaggccagttatttttacaagatcgttgattgctactattgttttctcgagtttatacgctataggtgttgcattgttcaaggatatacctgatatcgaaggagataaaaaatatggcatccattttttttcaccacgtttaggtcaaaaacaggtattttggatttgcgtttctatttttgaaatggcttttggagttgccttactagcaggagtcacatcttctgcttgcctatggattaaaatagatacgggtataggaaatggtattactgcttcaattctatcgtaccgnaccaaatatgtatatataacaagccca

SEQ ID NO: 72290 - DNA, 527 bp, Glycine max
  unsure (1)..(527): unsure at all n locations
  Clone ID: PAT_MRT3847_3628C.1
cagagtactattggacatttaaacataatgagatcatcagaagaaatagcatgcaaaatttcttgatccctccccaccctcatgattgccagagttgcttcttacactacacaccatagcaacctccatttggcagaactgaataaaacggttaacattatgatcagcaccaccgccttcctcttactaatatctcactgaaagaaatcattaattataccactacctatacctgatttcattcttccctctccattgagatcattacttctaaaaatctaaacttcctagctgttatatactcaatacctgtaaccataacccatggaactcattctagaccgaatattttgttcatacattgattccccataatccacaggcttgataaccacagattcctgcttcctatcctgctcctgcactgccccaaatactatttcattgggtgtctcatggctctgctcatantaagtgtgagggattgacnagcggtactgatggcgatgatggggtttctgttgctg

SEQ ID NO: 72291 - DNA, 1054 bp, Glycine max
  Clone ID: PAT_MRT3847_36290C.1
cacgcgtccgggaatattcagattattatctttcaagttggtatcagagctcccgatccagggggctttgcttctgcattcttctaggcagccttcattgctgcagttgatactgtttcagtgcccagttactgcatataccactggttgccgtccgtcgctgtcctccgccgtcagcttccttccgccgtcgtcagccaccgtctgccaccgcgaaactgatccgagaacccaccaggagaagcgccttctccagattggcctatccctgaagtttcactgccaaccgctgccggacgtgccgccactcgccgttttgtctccggcgtgtgtaagccacgcgccaccggacaggccgactttttcgacggtgcctgcacagaacagggtcgccggcccaccccggttctgtggctggagtattcttgaaccaaaacaggcctgaaaaccctatctattatagattacggttacactgatcatatgacacctcactcttcttatttttcatcttacacctttttaattggtaaccaacacatcattgttgctaatggttctcatatccctattattggttgtggtaacattcaacttcaatcttcccttcatttgaacaatgtgctctatgttcccaaactatctaataacctcttgtctattcataaaatcacctaggacttaaactgtgttgtgacatttttccactcccattgtgttttctaggatcttgccatggggaggatgattggaattgctaaagagtagggtgggttatactacttgcagcatgaggacaataaggagtgtaccagataaaaggctctcacttccaatcatcagacaagttcagaaccttggtcatcctcccaaatatggcttcagcacaagaaaaagggtcatcctccgtttagtgtccttaagtctttatttcttttttttacaaaaaggtcagtcgagtcttttcattgtgatgtttgtgagtttgcaaaacaccatcgaacaacttttcttcccagtactaataaaagttctaaaccttttgatcttgttc

SEQ ID NO: 72292 - DNA, 1863 bp, Glycine max
  Clone ID: PAT_MRT3847_36291C.1
ccacgcgtccggaaaattaatgcccctttcattttctctgcatctgtagtatctatcaccaatcaattccactcttcttcccatcaaacaacaaaaaatcaatctgggaaacaaaaacaaaatgccgtcattagaggaggaactcttcccatcaaccccaggaaagttcaagatcgagcggtcccaccacatgaaccgccaactctatcgctgtttcgcctccaccagcaccatgttcctgtgggccctcttcttaatcgccctcaccgcttcctatctcagcttccaaggcttcgtcgattccggcagccgctacctcaccgcctcctggggcgggatccagtgggagaagcaggtccgcacctccgcccagatccaccgtcaaggcggcatgtccgtcctcgtcaccggcgcagccggcttcgtcggctcccacgtctccctcgccttaaaacgacgcggagacggcgtcgtcggactcgacaacttcaacgactactacgatccgtccctcaaaaaagcccgcaagtccctcctcgccacgcacgacgtcttcatcgtcgaaggcgatgtcaacgacgcgaaactcttggcgaagctcttcgatgtggttgctttcactcacgtgatgcacctcgcggcgcaggctggggttcgctacgccatggagaatccccactcgtacgtccacagcaacatcgcgggcctcgtcacgcttctcgaggcctgcaaaaccgcgaaccctcagcccgctatcgtctgggcctcgtccagctccgtctacgggctcaacgagaaggttcccttttccgaatcggaccagaccgaccagcccgctagtctctacgccgcaacgaaaaaggccggtgaggaaatcactcacacctacaatcacatctacggtttatccatcaccggtttgagattcttcaccgtgtacggaccctgggggagacccgacatggcttatttctctttcaccaggaacatcttacaagggaaacctattaccgtttaccgcggtaaaaaccatgtcgacctggctagggatttcacctacattgatgatattgtgaagggttgcgtcgggtcgttggatacttcggctaagagtaccgggtcgggtgggaagaagcgtggacccgctccgtatagaatatttaacctggggaatacttcgccggttactgttcctactcttgtgagtatattggagcggcatttgaaggtgaaggcgaagaggaatattgtggacatgcctggaaacggtgacgttccgtttactcacgcgaatattagttcggcccggagagagctcgggtacaagcccacgaccgatttgcaaaccgggttgaagaagttcgtcaagtggtatctttcctattacggctacaatcacggcaaacctgtaaattaataaattttgttttgtttcctttttattcgggaagggtttttttttttctttttcttttttagtgtggtaggttttaagtcacagatagaaaaaaagaagaagaaagaacctggtcaagaagaagaagggaaactggattaaaaggaagaaagaaaagaggggaaaaaaaagagaaaagaaaagaaaagaagagaaggagaagatttacattctttacttgggaggccagctaaaacagctgttgttccttcgttgatttcttttcttttttggtattaattggtgttttttgtattttattttttacattttcttattctgtaaagaaagaaagttcgagttcaacctcgatttatttagttgttgtttatatttaaatttaaatgtttactttgtcctaaagttgattagagcgagaaatgcgttgcaccgtaattttcgtttgg

SEQ ID NO: 72293 - DNA, 471 bp, Glycine max
  Clone ID: PAT_MRT3847_36292C.1
ggctcgagtcatgcccctgtcattttttttgggtctgtagtatctattaccaatcaatcacactattcttcccagcaaacaacaaaaaatcaatctgggaaacaaaaacaaaatgccgtcattagaggaggaactcttgccatcaaccccaggaaagatcaagatcgagcggtgccaccacatgaaccgacaactctatcgttgtttcgcctccaccagcaccatgttcctgtgggcccttttattaatcgccctaaccgattcctatctcagcttccaaggcttcgtcgattccggcagccgatacctcaccggctactggggcgggatccagtgggagaagcaggtccgaacctacggccagatccaccgtgaaggcggcatgtccgtcctcgtcaccggcgcagccggcttcgtgggctcccacgtatgcttcgccttaaaacgacacggagacggcgtcgtcggact

SEQ ID NO: 72294 - DNA, 467 bp, Glycine max
  Clone ID: PAT_MRT3847_36293C.1
cccacacgtgccgttggtaaccgcgataactcgggtgcggactcaggcctacaactcggtgcacgacacttctaagaggatgacttccaacctgggtgccgcggagggggttgcgctcttcgacacgtgctaccacctgacgtttctgcagagcgcgcgggtgccgaccgtgaccgttcactgcaccggcgacagggcgtggacgcagccctcgaagaattacttgattccggtggacgacgcctggacttactgcttcacgaccgcgccgacgacgatgattatgtacattattgagaacgtgcaacatcagaggacagatgtaacatactatctagcaaacttcttggtgagattctggtccatcaagtgctagattagaatagaatagtaatctacatatttaaccttgatgatgttatgaataatttatggtgatatatagtggaatgaaagtattattaaaa

SEQ ID NO: 72295 - DNA, 608 bp, Glycine max
  Clone ID: PAT_MRT3847_36294C.1
tcgaggtcgagttcaagcagaactaccaccagtgcccggactgcgcgaagagttatacacacaacacatggagggcctgcgtgcaggtgcgccagaaggtcccgcataagaggactttcctgtacctcgagcagctgatcctcaagcacggcgcccacaaggacaccatcaacatcaaggaagtccacgacggtatcgacttcttctttgccgcgcgcaaccacgccacagccttctgcgatttcctcaaggcggttgtgcctgtcaacatcaaagactcgcaggagctgatctcccacgatatccacacatcgaccaagaactacaagttctcctactcggtcgagctggtacccatctgcaaggacgaccttgtcgccctgcccgtccagctggcgaagaagatcggtaacatcgcgcctctgggcctgtgttcgcgaatcggtacctccatccagatcctcgacccgcagaccctgcagacggccgatgtggacacaaaactgtactggcgcacgcccttccgcccgctcgccgatgtccaagaactcaccgagttcatcgtgctcgacatcgagcccgctgggtaagcaaagtggggcgcaact

SEQ ID NO: 72296 - DNA, 1774 bp, Glycine max
  Clone ID: PAT_MRT3847_36295C.1
cccacgcgtccgacggctgcgagaagacgacagaaggggaggtgcaggaaaattaatctccctttcattttctctgcatctgtactctccaaaatgccgtccttagaggaggagctcttcccttcaaccccaggcaagttcaagatcgagcgggcccaccacatgaaccgccagctctaccgctgcttcgcctccaccagcaccatgttcctgtgggccctctttttaatcgccctcaccgcttcatatctcagcttccaaggcttcgttgattccggcagccgctacctctccgcctcctggggcgggatccagtgggagaagcaggtccgcacctccgcccagatccaccgtcaaggcggcatgtccgtcctcgtcaccggcgctgccggcttcgtcggctcccacgtctccctctcgttaaaacgacgcggagacggcgtcgtcggactcgacaacttcaacgactactacgatccgtctctgaaaaaagcccgcaagtccctcctcgccaagcatgacgtcttcatcgtcgatggcgacctcaacgacgccaagctcttggcaaagctcttcgatgtggtcgctttcacccacgtgatgcacctcgcggcgcaggccggggttcgctacgccatggagaatccccactcctacgtccacagcaacatcgcgggcctcgtcacgcttctcgaggcctgcaaatcggcgaaccctcagcccgcggtcgtttgggcctcgtccagctccgtctacgggctcaacgagaaggttccattttccgaatcggaccagaccgaccggcccgctagcctctacgccgcaaccaaaaaagccggtgaggaaatcacacacacctacaatcacatctacggcttatccatcaccggtttgaggtttttcaccgtgtacggaccctgggggaggcccgacatggcttatttctctttcaccagaaacatcttacaagggaaacctatcaccgtttaccgcggtaaaaaccatgtcgacctggccagggatttcacctacattgatgatattgtcaagggttgcgtcgggtcgttggatacttcggccaagagtaccgggtcgggtgggaagaaacggggacccgctccgtatagaatatttaacctggggaacacgtcgccggttactgttcccactcttgtcagtatattggagcgccatttgaaggtgaaggccaagaggaatattgtggacatgcctggaaacggcgacgttccgtttactcacgcgaatattagttcggcccggagagaactcgggtacaagcccaccaccgatttgcaaaccgggttgaagaagttcgtcaagtggtacctttcctattacggctacaatcacggcaaacctgtaaattaattttattttattttgtttccccccccttttttttttcttctttttcggaaagggttttttctttttttagtgtggtaggttttaagtcacagattaaaacagacagggaaaaaaaagaagaaagaacctggtcaagaagattagaagaagaagggaaattggggctaaaaggaaggaagaaaagaaaaagaaaaaaagaaaagagaaaagaaaagaagagaaggagaagaatacaattctttacttaggaggccagctaaaacagctgttgttccttcgttgatttcttttcttttttggtattaattggtgtttttttgtattttttttaacattttctttttctgtaaagaaagaaagttccgagttcaatctcgatttattt

SEQ ID NO: 72297 - DNA, 328 bp, Glycine max
  Clone ID: PAT_MRT3847_36296C.1
tagaggagttttttcaacaatctatttgtgttgttattaaagaagggttctgacacagaggggagtcagcacatcatatcatgtacactctctcactcccatgcctctcttattctcttcacactcacacttaccaatatggtcgcttctctacccctatatcttttatcttcacacataatagacgctctcacaatcacttactaactacaagctcctaccttatacagagagaacgagagagcctaaagcatctacgcactatcatcacttccccttctcgttctggcttgtatcgcttgtttatacccaataacaacaagacctt

SEQ ID NO: 72298 - DNA, 274 bp, Glycine max
  unsure (1)..(274): unsure at all n locations
  Clone ID: PAT_MRT3847_36297C.1
taaccatttccttttaacatcttcttcttcttcttcttctatctctcttcaccacttctccaaatcctctctaaataccgtgtcgtctaatactaacaacaaacaagatataagatacagagcaatatccaaaccacaaacacaagaatattcagacatatttcaagatagtctagcaacattaaagtttcataagattaatataaaagatgacatagaaaagaancaagacattggaacttgtataacaaataagatcaagaatagagtgaca

SEQ ID NO: 72299 - DNA, 654 bp, Glycine max
  unsure (1)..(654): unsure at all n locations
  Clone ID: PAT_MRT3847_36298C.1
acagaaaattgataatcttcaaaaatcaccttattattagacatacactcttgtttagaccttagagtatcccaaaaaaacaagtcacatatagaaaatttgagtgatattgaaaacacttaaatccataacaaaaccccatatcaaaaagggtgcacaaaaaataataccaaatgctatttgctgcttactagctaaccttttgatctatgtatctatcttaactgatcaataatagtgaaaaaacgatattgaccatcaaaccaatcaagtcccaaaattaaccatcaaaccaaagtagcaaccccctcaaccatatatatctcactacttcttggccccataaagagattccaccttcccatcattcccacccagaaacatatacttatccttcctggtcaacccggtgcactcaaaccctaacacatcccccaccaccttctgcacgtggttggccacctcaatggaaagtcttcccaccagccttgcacgacatctcctcgggcaaagggtcaaggaaggtaacctcgtacacaggcctagggttcatgaagaagaagtangggtcccagaaactgacacccgaacggtggtttcgaagaacatgtctgtttgcagtaacagcacgggcacgatcctatcgctgagctc

SEQ ID NO: 72300 - DNA, 1281 bp, Glycine max
  Clone ID: PAT_MRT3847_36299C.1
cccacgcgtccgcccacgcgtccgcgtacgcgtgggcggctcagacacagtcttgcgagtgaacacaagttacaacaatggctttctttggtagaattgggaatttgttacgacagacagcgagcaggcaggttagttcaaaattgcgttcgcccccttcattttttcaggctatacgctgtatgtcatctgccccaagcacaaaactgtttattggaggtgtttcatattctactgacgagcaaagcttgagggaagctttttcaaaatatggtgaagttgttgatgctcggataattatggatcgtgaaactggtagatccagaggatttggctttattacatacacttcggttgaggaggcatcaagtgccattcaggccttggatggtcaggatcttcatggtcgcccaattagggtgaattatgctaatgaaagacctcgtggatatggtggtggtggcggcggctttggttcatatggtgctgtaggtggcggtggttatgaaggtggtggtggcagcggttatcgtggaaatgtttctgatggttatggtggtggcaactatagtcgaaatgatgggggtggttatggatatggtgcaggcagttatggatcaggcggcaattatggggacagtggccctggcaataactactcgggaggctatagtggtagtaacagtggacattttggtgatgccggtagtgtaggcaatcatgaaagctctactggttttgccggtaatggatatgatggaagtgtcgtggatggcggtgttggtgcagggtcggaatttggcagcagtggccaattagatagcaaaacaagcagcaatggagatgagggttttggggattacagggatgacaacgatgcagataattttgccaagagggcttgatggaattttatagttttttgttttctgctgctcgtgttctgtatcctacctaaatctctttggacttcaacctgataagcatttcatgcatgttatcttgatcagctagacatggatgggaacaacattatctaggtccatcttaagcgtctttcttcccttattttcctaagagtcaaatatttcatttttgttgcttacttttgagttgatttagtatcaaaccaaattgagatattcatacagcatgtaaatctgtgagttgttgcaagttgggacaacagtttgagacttatttgggaaatttatgatcagttagttattcatatcaagtggtttagttctgcacgaaataacatttttagagtgtcatttg

SEQ ID NO: 72301 - DNA, 650 bp, Glycine max
  Clone ID: PAT_MRT3847_3629C.1
ctcccctccaaattgggggtaacgcagacgaaaaaattcatttttatattattagttgttgaattacatacatacattcactcaacttggacaataagattgccaaggaaaaaaataagtccctccatttcctttatccactcgttcccctctcccaaacaacagcgtgttcccaattacatcaaagatgtccatctactttgcacctccccctccaaacagcctgattcaagcattgtgttgatcaagatattcagtaaacttgatcccactatgcaggctaaaagataactccctggcacacatgccgcctaagaagcaccttcatgttactagttacaactacctcgcactcgccagtcaccggcacttaagaaccaaaaaaaaagaaaaacatgggatgcaaaatttgtgaaagtgctggtgcacccaaagcaagcgaatatgtttgcactgcttcttgtctaagtaaaaagcatcttcaattcctcaatccttgcagttcgaacttcttgatcagtcaaggcaccagaaatcattcgttgtttacgtgcttgcactgcctccattctctcctcaactgtccccttcacaataaaccgtcctatggcaaccttctttgtttgtccaatacgatgaatacgcataac

SEQ ID NO: 72302 - DNA, 270 bp, Glycine max
  Clone ID: PAT_MRT3847_362C.1
ggggtttcttcaataacttatctgaaagcaacaaaacaaagggaaagtagatgtgaacaagtatatgcttgagttatttttattatttataataatcattatcaatgcatattttcttcaaatcaataaccgaaaaaaaatgtttatttccaaatcaatactgatgcaatgtttataaacatgccttaattctgaaatcaagaacacataattaagttaaaataccaatacagagaatgaagtgtcattaccttatattgacagaatgag

SEQ ID NO: 72303 - DNA, 272 bp, Glycine max
  Clone ID: PAT_MRT3847_36300C.1
gtgaaacccggtcatggacccttgttgtacatttacgcggccctcaggaggacattcaaggatttagctggtcaaccttttactctaatgcaagagcacttttaagccatgatggaattattcttagaacatatgctttaactccagaatggaaagctgccacaacgcctcttataaaatttactgaaggcactcattatatattttaaaatattaattggctggacaagaattcttactttctgtagaaaaacctatttttgactgcatta

SEQ ID NO: 72304 - DNA, 557 bp, Glycine max
  Clone ID: PAT_MRT3847_36301C.1
gttctggtgcttgcttttcgtaccttccaatgaaagtgtgaaatgtgttttttaatactgtaataaaaaatttacatgacctatgaaaatatcttgtgttcaatactactgttcctatcgaacagaagatataatatctttatgctagcttgtcttaaatatgacggcttaaattcttttaactttttctttgtccaaaaattccaatgcttacatgcattctaagttgagtaaaccttgaagtcctttgtgcctcttatataatacacaggttttgttccgttttgttggaatagctagagaagaatcacacatcacaaattaattataaacaaatgaacttgtaattagctttggaggcttggacacaaatcacaggttacttgccacttaaaatagggtataggcgtttcaagcttggtacatgttgttaagaaaactggaaataaatccatgcattgtactgtgagttatttaattatagtaataaaaaatgagttttgctaatttatagcattgattaagaaattaaaaaaagaaaatacttaataagaaaa

SEQ ID NO: 72305 - DNA, 2135 bp, Glycine max
  Clone ID: PAT_MRT3847_36302C.1
ttagctgaagacagtgtctcggggacagatatcttgctagggttttaggaaaagacactgtctcgcgagtgaacacaggttacagcaatggctttctttggtagaattgggaatttattaagacagacagcaagcaggcaggttagttcagaattgcgatcatccccttcgttttttcaggctatacgcagtgtttcatctgctccaagcacaaagctgtttatcggaggtgtttcatattctactgacgagcaaagtttgagggaagctttttcaaaatatggtgaagttgttgagtataggatctgccccaagcacaaaactgtttattggaggtgtttcatattctactgacgagcaaagcttgagggaagctttttcaaaatatggtgaagttgttgatgctaggataattatggatcgtgaaactggtaattctggtggatttagcacttattgcattacacgacggttgctgcgggtgcaaggcttctaatcgctctctttaacttcatccactgtgtgcccagctccatagttgaacgcgagactatcacccactgaaaagatcttgtcgccagtccaagtgctataatcagtaccaattgcccaacctgaagtatctcccacggtgtagacggttgcgagggttggcagggccatgttgattgctagcaacgaccacagaatcaaaggcactagagaaggacatgatgtaggcgggagtgggatcaatcgtcgagtatggggacagtggccctggcaataactactcgggaggctatggtggtagtaacagtggacattttggtgatgccggtagtgtaggcaatcatgaaagctctactggttttgccggtaatggatatgatggaagtgtcgtggatggcggtgttggtgcagggtcggaatttggcagcagtggccaattagatagcaaagcaagcagcaatggagatgagggttttggggattacagggatgacaacgatgcagataattttgccaagagggcttgatggaattttatagttttttgttttctgctgctcgtgttctgtatcctacctaaatctctttggacttcaacctgataagcatttcatgcatgttatcttgatcagctggacatggatgggaacaacattatctaggtccatcttaagcgtctttcttcccttattttcctaagagtcaaatatttcgtttttgttgcttacttttgagttgatttagtattaaaccaaattgagatattcatacagcatgtaaatctgtgaattgttgcaagtcgggacaacagtttgagacttatgtgggaattcatatcaagtggtttagttctggacgaaataacatttttaaactgtcatttaaaaaaaaaaaataagaaagacaaacatgggagatttcctagataattaatacacgacaacaagtgacctggattagtactcagagataaatcaaaccagaaaacagagtgataataatataagaaagaaagaaagcactgcctctgtcctgactgagtggggaaacttatagcatacgcaaaacatagtaagagatcgaggaaacaatgaacatagcaacaattggtgagacactactcgctgaagacgagtttgatttagtggcggtagtagtggaagtagtgggtgtggcatcagaggcttttcctgatttgacagtgacggcaagtttcataccgccagaacaatgtccaggaacagaacatatgaagtaatgagtgcctgcacttttaagggcaattgtggtcgcaccactactgtctgtgctaatagaattccctgcggtgcacgacttgtaatcgctctctttaacttcatccactgtgtgcccagctccatagttgaacgcgagactatcacccactgaaaagatcttgtcgccagtccaagtgctataatcagtaccaattgcccaacctgaagtatctcccacggtgtagacggttgcgagggttggcagggccatgttgattgctagcaacgaccacagaatcaaagcactagagaatgccatgattttgtgagagcgagataataataggggaaacaaggaaaacacacaacagctcgagcctatttgggttgagctcgagccgaatt

SEQ ID NO: 72306 - DNA, 219 bp, Glycine max
  Clone ID: PAT_MRT3847_36303C.1
tcctgtactcaacgaaacggttctttaatatattggggatgccaaccctcacaacgatcatcccacaactctccatggtcaacccgaacacaatccacacctcatttaccctgacaatattgttccccttcatgctacatatccaccttatcctcatatccccattgatcctcctttcaaacatctaaaccattcttaaactgatccttcttgtccttt

SEQ ID NO: 72307 - DNA, 1877 bp, Glycine max
  Clone ID: PAT_MRT3847_36304C.1
cgtaagcaggcaatcgggccgaagcggctcgagccccaaaccaaaacttttgtgacttacacacaaacacgcactcccttataactatctctgtctccgagccatgtgccagttatcatctccctccactctgtgtgaaagcaatgagggccatccaaacatgcccccaaccaaaattcatgaggagcctgacatgttcgcccttttgatccccaaacccccaacaacaacaacattcttcgaacaaggccaaaataaccaaaagccccataaaacccatttttccctcgccctcgacgaagtcaaatgcgtagccaacatagcattacccatggtgctaaccgggttactactctattctcgctccgtaatctccatgctcttcctcggtcgcgtcggtgagctcgccttagctggtggctctctcgccattggattcgccaacatcacgggctattctattctctcgggcctcgccatgggcatggagcccatttgcggccaggctttcggggccaaaaggttcaaacttttgggcctcgcgatgcagaggacaatggtcttgcttcttctaacttcagttttgatatcattcttgtggttcaacatgaagaaaatattggtcctatgtggccaacaagaagacatcgccaccgaagctcaatctttcatactattttctattcccgatcttgtagcacaatcattgctacaccctttgagaatctacttaagaagtcaatctataaccctacctctcacatacaccgcatctctgtctattctccttcacgtacccatcaactactttcttgtctctgtgcttaagcttggaatcaaaggcattgccttaggcgctgtttggacgaattttaacctcgttgtttcgttgattctctacatatgggtctccggcgtatacaaaaaaacatggccaggtgtttcgttgaagggcatcttgagcggttggaaatcgcttttgaatttggcaattccaagttgcatttccgtatgcctcgagtggtggtggtacgaaatcatgattttactatgcgggttattgattaatccccaagcaacggttgcatcaatgggggttctgattcaaaccactgctctgatatacattttcccatcttccctaagctttgccgtttccacacgtgtaggaaatgaactgggtgcggagaatcccaaaaaggcaaaacttgcagccctcgtggggttatgttttagttacggtttgggtttctcggctttgtttttcgcagtttcggtgaggcacgtgtgggcttcgatgttcacaagtgacgcggagatcattgctttgacatcgatggtgttgcccatcattggactatgtgaacttggaaattgtccgcaaacaacggtttgcggcgttttgaggggaaccgcaaggcccaagttgggagcgaatataaatttgggttgcttctatctagtgggaatgcccgttgcggtgaggttgagtttctttgccggctttgatttcaaaggcttgtggcttggtttattggcagctcaagcctcttgtatgttcaccatgttaattgtgttggctcgaaccaattgggagggtcaagttcaaagagccaaagaacccacatcatcgtctgattctagtgaggaggaggaggaacaagatcagaaatgcttgttcagttcgggcgccacaaaggaatgctctcattctgattcattagtttgatcgatcatcattgcagtgacgtcacgttgattcttttatatttttgcattcaagctagattttataacatgaaattgattctttctagattgtcctaattttaattgtacattccggagaagaggcagagcataaatgcatgcatccc

SEQ ID NO: 72308 - DNA, 266 bp, Glycine max
  unsure (1)..(266): unsure at all n locations
  Clone ID: PAT_MRT3847_36305C.1
cacaattatccaccccatcagacacaccccatccgctgccaccgccacgtcatcaccaccaccaccatcaccactttctgactcctctcctcgccgccaccgtctcaacatgctccctttctcctcctccttgctcctcttgctgccaccgcaccctgcacccnctaaacgcgctgaccacctgaccctgcctgtctccggaccaccagcctccccggccgctaccgcgctctccttgctcgcgtcctgccgccggtgccagccaa

SEQ ID NO: 72309 - DNA, 173 bp, Glycine max
  Clone ID: PAT_MRT3847_36306C.1
tcattgtcttaatgttatcaatgtcttcctctttctccatccatttcttgctccttctctgaatatcccttttctcagtttgatacttatcatcatcttaagcttccaccaccatatcacacccctatatcctttccattaataatgactcttcatcaaatttatactacact

SEQ ID NO: 72310 - DNA, 305 bp, Glycine max
  Clone ID: PAT_MRT3847_36307C.1
tcgctgggtgctctgagcggccggccgtttttttttttttttttttttttttttggcaaacaacacagtattggtttacaggtttcgagcaaggaccagacaatttcttggaaaatacctccgcaaccttagccttaactaggaaggcagaccttgtaaaaatgcttggctaactgagtgtactgccagggtctgcgactggacatcccctctccagctttaagaactgaagctagcgtctatggaaaacccgtacgcggactaaaagagaccgaaagtgataacacggctgtcgcaaagtttga

SEQ ID NO: 72311 - DNA, 437 bp, Glycine max
  Clone ID: PAT_MRT3847_36308C.1
cccacgcgtccgaaaagtttcttatcaggagctaatcaaatagaagttttatgtgaggaagttgagagtgctatcactgtgaccttcgtcggttgtaggttcttgaagcgtctgtgtgatgttcagaccaggaaggataatgtttggctttattgagagaaattatgctatgacagcaccatgggccacaatggcgtggatatatggcagaattttggctttccactctttccaccgtccaccattgataacactatggtttagagacattataggaatcataaacatcttgtctgagattttggtgcatgaagaacaacatcggattagttggcatgagttattcatgataaatagttgtgtttaaccctgagttcattctagctacatcttgcttgctttactgttattgcgataaaataggttgcagatgtgca

SEQ ID NO: 72312 - DNA, 873 bp, Glycine max
  Clone ID: PAT_MRT3847_36309C.1
gctgccaagttgctaagcatcatattaaaatttggtaaaagatattccaacaatttgataaccacattggttttcattactagtagaacaaaattccattttattaatctacctcaccgatcatttattgttattttccggcaatttccattgaccatcgtgcatcataaacgcaaggccacagaaaatcttacatatattttgatcatcaaaatttcgagcaaaccaaattgatcgttaattgcacacaaattattaatcctctggcaatcaatcaagcttacaataacattttttctttctttcttttcattacacttaaatcatcctcgaaaatttgtatatattcaaaggcagtgaatgaaaaacgctgtccaatttcattcataatgctgaaattacactacattataaaacatcactcaccaagaaaagagagatcgttgactttcactatatattagcgttggtcaactaccaagaacaattaacttttctttcctttcactttcttcctttggcgggtggtggtgtccacggtgcggtggcggagatttccgtcgttgaggatcaagggcacgtcgtcgttgccatcttcgacgtcttcttcggtggcaattcggatgcagcaacgttccaaggaggcaaagaaagcggttgtgacaccattgatgaaccacatggccacaccatcagattttccgcaaccacggaccctggattcgccactatttgttgatcggagactaaagaagccattgctgcagcttgaagaggtagaagtggcttccatggtactttcaattgaaatggccacggcacacacaaccaaaataagagctcgagccgaattccgccgcctgagcgccgcac

SEQ ID NO: 72313 - DNA, 439 bp, Glycine max
  Clone ID: PAT_MRT3847_3630C.1
tcggacacactattcctcttatgcttgctactgaatatccacactgcatacctgaggacttcgctaattcgaatttactgtgcaagatgtctaaagaagatgctcaaagcatcattgtggagtgaggacatgcgtaacccggggaggcgaccaccattacccatctgaaaaagcctgtagtggagacataatctccaaccaatgtcatatgagggcatgcacgtacgacctcgaagaggaaccaaaaaatcatgctacccaaatagtctgtaaccctaatgaatcagtgacatcatcagcgtgtatgacatactatatttgctatgtttactttctttgagatgatattgttgatgaacaataccatactgatgaatcgctttccctgacagtcaacgcctgcttctatatcttctgtacttaacaacaaaaaaactac

SEQ ID NO: 72314 - DNA, 409 bp, Glycine max
  Clone ID: PAT_MRT3847_36310C.1
atcactaaattaaccttattattctactttattaataatttttttcttttatctttttctctctctatatgccccgaggagatgaaatagtaaaatgaacaaaaataaaaataacaaacaaaaatgagtgaaaataaattataaataaataaataagagataaaaaagagacattaagagatatgtgaaataagtaagaaataatagaggagcctcattttttttttaacccaacttaattttattctttcccatctaatttctctcaaaccaaacaggttgtatgtgtatattagcatatgagcaaggggaggccaacactaaatttaggtttgactttaaaaaaaaagatttgtaagacgtgaaattgactatctaaataattaaattaacttatttttataatttt

SEQ ID NO: 72315 - DNA, 472 bp, Glycine max
  Clone ID: PAT_MRT3847_36311C.1
gtaagatctttgctattcatgaagacaattcaggtatattaggaacgcattctgtgactagggtgatggaaaaactacttttaattacttcaatgaaacttagttcaaaattcaaaattatgtttttaacacacatccaaacattttggtcaatgcaaaaatcatgtttgaccctcaagttcggagcttcaaaagcacatccatacacactcttagtagtagaatttgatgcctttggtcatttctcagaatgcacaggtagagttcttcgctcttgtcctgtcttttaaatcaaaactaagctacaatgcttgatgtttaatcacttggtatgaagcttcaaaccttctaagccattcaatgggttctgccccgattggttgttgaatccaatggaagaatgggaattttattagttgtttttggaacaaagtagaaaaaggaatctgctttatttggaggtttggttaac

SEQ ID NO: 72316 - DNA, 238 bp, Glycine max
  Clone ID: PAT_MRT3847_36312C.1
tggagccagttatgtgaattctggatacaccaagggtgatggacttggagactggattgttggcacttgtgttctagtctacacagtatgatctgccactgatgccgagagaaacgctggagactcacacgttcgtgtgatggctccactagccgatagattagctaagttttaggggcaattgggtagaattgccaacataggggcggggtttaacccaactagagagctgggtagc

SEQ ID NO: 72317 - DNA, 664 bp, Glycine max
  Clone ID: PAT_MRT3847_36313C.1
ccacgcgtccgcaaaaatcaaacttacacattagtacaccgctcttgcggccacaagtgtcacggcggcgacgaggagattctcctcaaacgcgaaggcgagcacaacactaagttttgatatctaaaagttttcataccgcattatgataaatctcatctgcaacatagaactcgttttgcgtcacaaattcttccaatacaaacaagatcttgtttatcttttccaccactgatccagcaacggaaccacaccgataaaaaatttctgtcgaatctcagaccctcttttcttgtcttccaactctactaccaaaattggacaaggaacagtcagtgatgaatcgtctcaattcaaaattctcagcgacgacaagggttttcataccccctatttcctctcaatttttccccttttgttttgcttggtactaagttcatctattgtgcgtcggcaaggggttttgcaattctttcaatgaagctttggtgtaggctggttttgatgtgtgatttgttttctattgtggtgttttgattttattgtaacagccattgctgtgccggatagaggtagagaaagaaacaaggccaaggaagaaggaggtggaggggggagtgcagtcgtggcccgaagatacagagggatgaatttgggaatttag

SEQ ID NO: 72318 - DNA, 511 bp, Glycine max
  unsure (1)..(511): unsure at all n locations
  Clone ID: PAT_MRT3847_36314C.1
cccgtccgcccacgtccgtccgtaccggggctgcgaggaagactgtacagaagggggtggannaccatgcccagtaccaggagcgagcgagtatatanntcttctcaaaggaacccagggcgtcttttnnntcgaatanagcnnctaattcaatttggggacgcctcgcnnggatccagctcattttgtcctatatcaaagggatcagcctatctgtactctgtgtttgtcacaactcgacaattcgtttaccagatgaagtagatgtcaaggggaaccttcttcacttcccaaacccagatcttcctacatgctatanntataaacactggtttatcgaagaataccgcaagaaaaagcattttgaattgtntgattcattgccaagagatgggcttagaatcaatagttcattatctaatggatttttccgttctaatactctatctgagagttatcaatatttatcaaatctgttcctatctaacgaagcgctatgggatcaaatgac

SEQ ID NO: 72319 - DNA, 291 bp, Glycine max
  Clone ID: PAT_MRT3847_36315C.1
ggtcgagtagagccgcacacagaggatttctgggaaattttggagcttaacgcggtccaagtcgaagtttatatccttatccagggcatgattgatcatgaagggatgagagttcctacgtggttgcatggacatactgtcgtgacatacactgcggctgctgatgattcgatgaacgtggtggtacaactgatgctacgaactggagtcgttgatagttgaatactacgcaccaacaggactgactcagaaagagattcacatgtcgacgtcctctgtatatagcatact

SEQ ID NO: 72320 - DNA, 229 bp, Glycine max
  unsure (1)..(229): unsure at all n locations
  Clone ID: PAT_MRT3847_36316C.1
aaaaaaccggnccgacccacgcgaccgaaacacccttattaccacaccaatttttatatcataaaaaancataaaaccaccggctggctttataataataaaataccacatctctcattctatattttcacacttaatctatatcttactatcctttttacttattctcttatttctaataccaatcctttaccataaatacaacttccttactatccacacttaaatt

SEQ ID NO: 72321 - DNA, 502 bp, Glycine max
  Clone ID: PAT_MRT3847_36317C.1
aagaggcttaaacataataaatacaaattacaagaagcccacagaggcgcatagcacagttattactctttcaaaaccctgaaaatctaaaatcagccatgggttcaataggttcggtgtgttcaagcttcattacagcacctccgtcgtcatcttccctctccagaacaactccttcgttctgctgcgcatttccttctcgtagaatcatcatcaagccaagaatgggtccatatccggcccaggcccagcccaaggaggccaagctctggggtggcaggttcgaggagggcgtaaccgacgttgtagagaggttcaccgagtcgatctccttcgacaagcagctctacaaacaagacatcatgggaagcagagcacacgctacaatgctcgctcaccagggtttgataaccgtgagtgacagagactccattctccaaggtttggacgaaatagagaggcgcattgagaatggagagttcaattggagagctgacaggga

SEQ ID NO: 72322 - DNA, 138 bp, Glycine max
  unsure (1)..(138): unsure at all n locations
  Clone ID: PAT_MRT3847_36318C.1
gattcactganacanagcgcagaagaaaatacatntantantcgcgaaaatgannancggcgctggaaaggttngtgtgtgtcacnggcgcgtccggttacattgcctcctggatnntcaaanncctccnccttcggg

SEQ ID NO: 72323 - DNA, 666 bp, Glycine max
  Clone ID: PAT_MRT3847_36319C.1
aaccataaaaaacaaaaaacagttacatgccattatactaaagtaatctggtattatccaacaagaaccgaaagcaattcacaatgcattgtaagttgaaacaatacagcttcctaaacaaaaacgaatcatttctccagttaatttgctcaaaatctaacatcaaccaaaaagctcaaccctcggtttgttccctcaacctccggatggtgctgcgcacagtgacagcacttgcagtattcaaagtgtaggcaccgccagcttttactttaccgcaatccttgcatccccatattcccacagccttcctcttcacagcatactttccacagaattcacaaaagaatttgctatgctgactaacttccatcttcttaatctgcttccgcagactagcaccatatcgggtaccatattttccgacaatgcctgctttcttcgttctcttagtctgcaccgaatgaagggtagcggaggtgaataaaaacagagaaaagtaaaaggtacgtttatctacgtgatagcataaaaaaaaaataaaaactgatacagaatggaggtttatcttagtaggatcagatgaaaatataatttacacgaacgaattacttgtgaagtggaagcttgagaaggtggtagcagcggacgcgtgggcggacgcgtggg

SEQ ID NO: 72324 - DNA, 432 bp, Glycine max
  Clone ID: PAT_MRT3847_3631C.1
ggaattcggcacgagggttccactttttctttttgcttaacaaaatcatctcaaaacaacttttaattttgtcatgttcttgtgtgattcttttgcttcctacgatcccattccccaccagcacctccaaacacgcactacagtctcttctctactgttacacgacatgaaaccaccatatttcttcgatacacataacacccataacctccaatatttggcatttttcttttatcaatttctttgcttcggatcctcacaatcagaggtgggggtaagaaactagcttgattttgtctgggcgaattgtccttttataagctttaggctatgtttggatatttttaattaaaaaaattgaaatgaaatgaaattgtatagcaaaatatttataaaaaaaaaaatcaaattgtcttctagtaacacgggtag

SEQ ID NO: 72325 - DNA, 253 bp, Glycine max
  Clone ID: PAT_MRT3847_36320C.1
gtggtcgccctttttttttttacagaaaagaatgggggtattgacaaaggcagacttatcattattggaaaacttcttacagaatacgtcgcagaacacactgccattttccaacctaaaatcttcacattccatcaagattgtgctgcaaggggaacacaaaccgcaccacccacagctttcactagacccaaaaatctgtggttgtttagaccaaaaccgagaggcataaaacccgaaatcctggtggttt

SEQ ID NO: 72326 - DNA, 221 bp, Glycine max
  Clone ID: PAT_MRT3847_36321C.1
cggggttggtccctacattgccttctttgcttttctcgggctagcagtcgacgacgccgttttgacccggcgaccggcaaatggtggagccggtggagcttcgctgcgacgaccagctctcgcatctgtcagattcaagcaatggtgatccgtcgtggcggttgaacttccacgggtttcagccatcctccaaacaagcggaaaagcagttgaacccccct

SEQ ID NO: 72327 - DNA, 490 bp, Glycine max
  Clone ID: PAT_MRT3847_36322C.1
ctttcatttaggtagccgcaccttaaaaccgggagcagaagcaatcggtacttgattccaagaatctctcaatttcttactactttaatgtgtacgatctcttaagggaaagacaattactctctgtgctgaccacagactttgcgaatcatatacttctccattcatagtttatttgccgaacactctactatttgatataggacttcgtgtaagaattaaacttcttctgattctttctcagttctctgtttaattacaagttcaagctgtagaaatctcggattagtgctaccactcttctatgtggcatatgacttcttgggtagactattctatggctctgctttctttcactctcttcttcttactgatccgcattgccgctcaaagcggtcttatttgaaaaacacttgtgcgttgaagacaaatgtttgctccgttaatattctctgtagacaacatgtttactgagacaacaattttttat

SEQ ID NO: 72328 - DNA, 641 bp, Glycine max
  unsure (1)..(641): unsure at all n locations
  Clone ID: PAT_MRT3847_36323C.1
ccacgcgtccggtgtgtgtggcattagtagaagttctacactttttctctgtacttttttccgtgcagagatcataggaaaaaaaactattagctttgatcatacgagatcttgtccatcaccagatttaatttgttatcgtaattctcctgtttttaattttatcttgaggccatcccattgcaacacactcataaaaaacccctttttcagtctcagattattgttacaacaagtgttatccacttttcacagtcacagagtgagaaaaaagcaaagccagtgaaattgtgtgttgtgtcgtgtgtgatatatagagagagaggatgggtacacggaactttgagaaaatggcttctattgatgctcagttgaggttgctagcaccaagtaaggtttctgatgatgacaagcttgttgaatatgatgctttgttgctggaccgtttccttgacattcttcaggatttgcatggcgatgatattagagaaacggttcaagactgttatgagctgtctgctgagtatgaagggcagaataatcctcagaagttggaggaacttgggaacatgcntactgntcttgatgctggggattctattgtgatttccaagtcgtttgctcatatgcttaaatttggc

SEQ ID NO: 72329 - DNA, 200 bp, Glycine max
  Clone ID: PAT_MRT3847_36324C.1
ctgagaaggaattacacatgagaacatatgggtggatcttgagctttgaaatgctgcccatagatagtgcgacagaacaccatagtttatatagtttacatgtcggtcctaacgggggcacaccatagggggccacttgagattatgcggttcacaggaagtaatggagggggaggggggggtgactgcaaatgtgaata

SEQ ID NO: 72330 - DNA, 1771 bp, Glycine max
  Clone ID: PAT_MRT3847_36325C.1
caaatatatagctacgagggaacttcttcagtcattgctagctagctcactaatcactatatatacgacatgctacaagtgaagtgaccatatcttaatttcaaatcataaaattcttccaccaagttatgggtttccttgtgttgcttcttttctccctcttaggtctctcttctagttccagcatatcaactcatcgttccatattggaccttgacctaaccaagtttaccacacagaaacaggtgtcttcactgttccaactatggaagagtgagcatggacgtgtctaccataaccacgaagaagaggcaaagagacttgagattttcaagaataacttgaactatatcagggacatgaatgcaaacagaaaatcaccccattctcatcgtttaggattgaacaagtttgctgacatcactcctcaagagttcagcaaaaagtacttgcaagctcccaaggatgtgtcgcagcaaatcaaaatggccaacaagaaaatgaagaaggaacaatattcttgtgaccatccacctgcatcatgggattggaggaaaaaaggtgtcatcacccaagtaaagtaccaagggggctgtggaagcggttgggcgttttctgccacgggagccatagaagcagcacatgcaatagcaacaggagaccttgttagcctttctgaacaagaactcgtagactgtgtggaagaaagcgaaggttgttacaatggatggcactatcaatcgttcgaatgggttttagaacatggtgggattgccactgatgatgattatccttacagagctaaagagggtagatgcaaagccaataagatacaagacaaggttacaattgacggatatgaaactctaataatgtcagatgagagtacagaatcagagacagagcaagcgttcttaagcgccatccttgagcaaccaattagtgtctccattgatgcaaaagattttcatttatacaccgggggaatttatgatggagaaaactgtacaagtccgtatgggattaatcactttgttttacttgtgggttatggttcagcggatggtgtagattactggatagcgaaaaattcatggggagaagattggggagaagatggttacatttggatccaaagaaacacgggtaatttattaggagtgtacagaatcagagacagagcaagcgttcttaagcgccatccttgagcaaccaattagtgtctccattgatgcaaaagattttcatttatacaccgggggaatttatgatggagaaaactgtacaagtccgtatgggattaatcactttgttttacttgtgggttatggttcagcggatggtgtagattactggatagcgaaaaattcatggggagaagattggggaaaaaatggttccatttggatccaaaaaaacacgggtaatttattaggagggggggggatgaattatttcgcttcatacccccccaaagaggaatcagaaaccctggggtttgctcgcgttaaaggtcctcgaaaagttgatccctctcctttttgagccggaaaggttcaatacaacgaggggttgtttttttagggccaagcattggacttatgtatgattttggggaaccatgagttttccccgttgtgctaatgtgaagggcaaaaataaaacccagaacaagtttgtttttttcaaataatgtgaaggtagaaaatggaaccacgcctcctttttggcaggtgatttaaaaaattagcagagggttttttttttgttt

SEQ ID NO: 72331 - DNA, 294 bp, Glycine max
  Clone ID: PAT_MRT3847_36326C.1
aaacaaaagaactgagaagaatgactccaagattttgaatctctacttacaggaaatcttggcactcataaaaatggaagccctcaactactactaatatttataaaaggctagaggagaagttaaaacgacaaaaaaccccaaaatcaactttttttaaaaaaaaaagagggtaaaaccacccaaaaccgcaaatgcccccaaaattgggtggatggagcacctaatcctaaccctgttatggattcagccggtttttttgaaacaaaggggggattgtttatttgatatggg

SEQ ID NO: 72332 - DNA, 666 bp, Glycine max
  Clone ID: PAT_MRT3847_36327C.1
ccacgcgtccgcgaaacatatgatataattaaattcatatttcacaatcaatacttgtatattcgtgcagtaaaaaaaaatacttgtacattcgaatatatttacatttttttatgattaacaagcctaaaaaaatatttggatacattattttataattaaaacacttggtctctttaaaagaaaatctaaaacaagaaaaattatatcttttatgaaaagtagatttatcttcttaaaccaatttgcaaaatttattaatgaccctcataacaaaaactaagacattttttaatattttatattattttaaattgacttttttaaaaggtataaaatgaatagttttctattctttttaacgtggccatcgacttaaaagtaccaaatgtttgaacaatgtagagacgtgaactcaagtgttcaaattgacaaaaaataaccttttatttagacaggttatgagaagtatttagcacccatcgagtagttgttggagaggtgtgaatccctgcttcaaacaaaaatttagaactctaatctgaaggtgtttacaataatttaaccattttcatactaatatatagaggaattaagaatcgcgagaacccacctttagagaatgtgtaggtgacataagttccatatagcatttccatttaatta

SEQ ID NO: 72333 - DNA, 281 bp, Glycine max
  Clone ID: PAT_MRT3847_36328C.1
gacaggagggcgggtttttataagcgatcggaacttacctgctcgtgcccatgatgggagaacgatgacataatgtcacctaggtcgacccctctggctgggcaggtgatacctatacgaccgggataagcctgaggttaccaacagaaatcaccaattaatatatttgcatttgttccaccagattgatagaaagaaaaaccgagccgttcgcccgttaaaacaaaagtcaggacagacaggattctggcacggtctctggagcgtagaactaatcacgc

SEQ ID NO: 72334 - DNA, 804 bp, Glycine max
  Clone ID: PAT_MRT3847_36329C.1
cccacgcgtccgcccacgcgtccgtacggctgcgagaagacgacagaagggggggttccattttcgcacggagcaaaaccaaaaacacggtgtggcgctgcggatctctctctcgggcgttgctctcggccgcgagaactactccaaatgcgtgcctccatttctctccttcactgtccttcttcgccttccctacgctctcatcttcttccaccctcgccgtcccctcattacactccttaggactgtgggaattctcgggtgcacgtagtcgctgattcctctacacagcgctgacgcctccgctcgtctcacttctcacatttccatcgaatcgcgcgcttgctgcaaattctcgcagggtacttgttccttctaaatttctatctctcttgccctaattaggcatgctttctgtcattatgatgtattttcattattatatttattttaaatgtttttgtgtgtttaactggtacttgaatagactttacaatcagcatcagttgtgattttacgtttggctcgatgtgaaaattgtggctaatgctttgtagcaggaggcctgtggaggaggttttgttgtgtatttgataatgataaatgttatatgcagttgtgattataagtgttttatcatttttataaaagagaaataagtatatgtattcttctgttagaaacttttcaggctaattgaacggcatcgacgttgttttactttgtatcagatagtaataacaataacagtgttcaagacttaaatttatgcggaaaaaaaaaaaaaaaaaaaaaaaccccaaa

SEQ ID NO: 72335 - DNA, 382 bp, Glycine max
  unsure (1)..(382): unsure at all n locations
  Clone ID: PAT_MRT3847_3632C.1
gcggaaaggacagcgagaccacggaggcgcggcgaagacaaggaccaaaggagagagagaccggaaaccaaggacaagaccagaacccgaagngaaaanggcgcgccgagaaaaaaacgaacaggggggcacnccagcaagggacggancaggggacgcaacgacaaaagaagaagaaggcgatgttttttttaaacaaanccttctttggcacaagaaggatggtgttaaccgcacaacaggacgaagagaaggagcggatccggcagctcagtcagctggagagtagtcaactaaggttgccatccacaggggaagccaagataacctctctgggatagggatagacgtaaagggtcaaagaaaaattaagagaaagcca

SEQ ID NO: 72336 - DNA, 703 bp, Glycine max
  Clone ID: PAT_MRT3847_36330C.1
attcgagctcggtacccggggatcctctagagtcgacctgcagggctggactggtaggggaagctgtggagttaataaagacaatgcctatgccccctgatgtgcagatcctaggagctcttttgagttcccgcaatacgtatgggaatgttggattcacccaagaaatgttgaaatcacttccgaatgttgaattccaagatagtggaatatatgtgcttctttctaatctgtatgcaactaacaagaaatgggctgaagtgagaagtgttaggagactgatgaagcaaaaaggaataagcaaggctccaggttctagcatcataagggtggatggtatgagtcatgaatttttagttggagacaatagccatcctcaaagtgaggaaatttacgtactactaaacatccttgccaatcaaatctaccttgaggggcatattaataccctttcttgatcaaactgacaagcctaaatgattttagacttgtttatctatgttctctcagtggtcagatttggactcgttttggaagttcataatagttacatgaaaccaccgtatgttacccttatgccaaattaaactaattagcttttgcattgagaagcaattcaagagcaaggtggatacgtagttgccttttataggggcccgagtttcatgtttatgattgtgagggattggtccatggtcagctg

SEQ ID NO: 72337 - DNA, 344 bp, Glycine max
  Clone ID: PAT_MRT3847_36331C.1
ctgttatttacatcaatggaaaaccatttgttcttcgtgaagttgaaagaccatacaaaaacatgctggagtacacgggaattggtcgtgaaagggtggagaaaatggaggctcgattgaaagaagatatcctacgagaagctgaacagtatggcaatgcaataatggttattcatgaaacagatgatgggcatatatacgatgcatgggagcacgtcacttctgaaatgattcaaaccccacttgaagtttttaaaagcctggaggctgatggatttccgattaagtatgcacgtgttcccatcaccgatggaaaagctcctaaaagctctgactttgacact

SEQ ID NO: 72338 - DNA, 214 bp, Glycine max
  Clone ID: PAT_MRT3847_36332C.1
aagcatcagatagatggacactattgtggatactcctacagagagaacttatacagcatatgatccatactcaggagaagggagcgctcaatgtgatgcaggtgatccagaatataataatcgagcagaatcggaagttcgcaaggccatagatgaatgacctcagacaaaatagactgctgatgaaagaggcaagatgatactgcagctttgc

SEQ ID NO: 72339 - DNA, 384 bp, Glycine max
  Clone ID: PAT_MRT3847_36333C.1
ccctcgagccgaatcggctcgagcaaagtatttgttttccgagcaacgagcattcccacttattttctattccttacttagttctaatcaaattaatttgagtttgtaaccccgtggccttatccaattgatatttttgagttttgtattacttccacttgatttgagatgttgagtctgctacatcttcaatctcagccttcgctcgtcgcaatgggaaccgcagcagcaaaaggggaagatgtggtggtgaaggtgccccctggaacggttggtcaaattactagcaagaatcatgtgatcatggtgtctgctggacataaaagggtgctgctgtcaaacagtggaattttaaaagggaatgcttcgttcaaatcaaggact

SEQ ID NO: 72340 - DNA, 152 bp, Glycine max
  Clone ID: PAT_MRT3847_36334C.1
cattatataccaattatatttaaacccaataccggccagggaggctaatgtgtgcatatttaaataaccagaatgatatcatttccaaaatttccaaagtgtaatactacagcaattactttatatgtaacaaaacttgaaataaaaatgat

SEQ ID NO: 72341 - DNA, 244 bp, Glycine max
  Clone ID: PAT_MRT3847_36335C.1
ccacgcgtccgctcactcgtccgataattcgtccctttcgatctaaagaagaattgtttataaatcggcagggacaatacctgcgttatagtgtaaactaactatctttgccgatccctcaacctattactatctaagtatattcttttcatcaatgcttgttacagacacggctccttgatagacacaaactacgtaccattcatgagtgttgcttctccatctacaaacccattctaacaac

SEQ ID NO: 72342 - DNA, 305 bp, Glycine max
  Clone ID: PAT_MRT3847_36336C.1
aggtaggcttagcgcatggatcagaccacttagcgagatctacagattagaaaacctgcaactctcgctaagccaggctctgggcccgcttagctaaatcatgcattttgagtgcaaaggagtgggtgttgagcggacaataaaatcgctcagcgctatgactgccgcaagcatttgagcttagctgccatgaatggcgcttagctcaatcaaattgagtttaggcaacaagaaggtcagcttagccaccatgattggggctcagctccatgaatcccagttctggccgcaaagaactgagcttg

SEQ ID NO: 72343 - DNA, 221 bp, Glycine max
  unsure (1)..(221): unsure at all n locations
  Clone ID: PAT_MRT3847_36337C.1
cccacgccttcggcaggctttatgtatttgatccttatggtttcaactcgttgtcattagggtgggctcctctctttacatgtggccattcctgactgggtacctgagagatgttttgtttatttaggaattaatataaaatgatatcttgtctgtcnnaaaaaaaaaaaaaaaaaaaaaaaaaaaaaaaaaaaaaaaaaaaataaaaaannaaaagggcg

SEQ ID NO: 72344 - DNA, 254 bp, Glycine max
  unsure (1)..(254): unsure at all n locations
  Clone ID: PAT_MRT3847_36338C.1
ctgtgggggggggttttttttgtggatttcgtggcggctcccgggggggacggggagggactgtttttcattcgtctcttcggtctttgntggggcttgttctctttacaagacttgctanggcgctgtccttctaccactcgccccaggcccgaaagagagccncaccggccaaaagtggttgctcccacatctctcctcctctcgcatactccctcttgcccctctcngaaatccttctgttctctttcccc

SEQ ID NO: 72345 - DNA, 536 bp, Glycine max
  Clone ID: PAT_MRT3847_36339C.1
ccggaatgaactcgctgcgtagactcgctaactggttggaggtcgacccgctcgagccgttcaattttccatctttatctgacacatcaagaacccaattttaagaaccttatactgcggagaaatgccaaaacccacccttggttaagcgtgccccataattcagctaactgggcaaaacagacgacaatagtctttatgacaaacaacagagttatatgctcctctgacactaaactcaccgactggtaccaacccacacttccaacccgtttgcgtgactttggccttttcagcttcaggacaagaactttttaattcactttatgccacctggggggaagaagaaccctatcatttgaatcactaagacggtgagatcctatttcggagcttggtgtaacgcttaatggcacttgtggtactggctgctcaactatagaaggtggggtaagcagtttatatggtaaaacgagcaccccacaagtgtgaataagaagtggacccccatacttgttcatgacgaccaggggaat

SEQ ID NO: 72346 - DNA, 584 bp, Glycine max
  Clone ID: PAT_MRT3847_3633C.1
gagagaactagtctcgagttttttttggtgtttcgtgataaataaataaaaaaagcttcccctttacaaatattattaatctcaaaaggaacatacaatttctacaacactcttctggtcttcccgttctgtaactgctggtcatgcactttctctagctttacaaacaacaagaagatacatatcctttcccatgatatttaacaacttgaaaataaatcatgctatgatgaacgatgggaagttgctcgaatcacgcacgattccaggcatcagaaatacgaaattcaattgccaatgactgcaccaaaatcctccaaacgagtaacaaataccaaaaataagaaaataaattaaagggttgaagaagaagaagaagaagaagacacaagagaaaagaagagggggtagtggaaagaattcaatgaatccggacgcgtggaattccttaaaaaaagaaattgtcacgctgaggatgtctccacaaaaacctcgttcagcacatcatcctcaccatttgccaagctaaacaactccgcattcttctcttcatcagtggaaaaatcctttctttcgaatttgga

SEQ ID NO: 72347 - DNA, 451 bp, Glycine max
  unsure (1)..(451): unsure at all n locations
  Clone ID: PAT_MRT3847_36340C.1
catatactgtgtcacagcttttttaaccatagtcgattgaaaactataaaattacataacagacttgctagataagataattgacattcattttaataaataataatgaagagtacaatgatatatgcataacataaaatgtgtaacttattaaaggataaaattaaacgctaatatactagaaaagagtaggcattgcatgaaagaagagggaagagaaatggatttgaccttgtggaggatcattgggtgctggcgatacgagtgaggaaaactctgcacgtgttgctaggaataaaaatgcaaactacaggtaccaaggttaatgggttattattttcatgtgcaaaccaaaggtctattacccgccacagaagttaaattaacccattgtgaagcagcgtaacgttgatgcgcagagcancacaattttttacgtgagatgagcgga

SEQ ID NO: 72348 - DNA, 478 bp, Glycine max
  Clone ID: PAT_MRT3847_36341C.1
gtcctatcctggcactataaatccacaccccgttgaaggtcctatgcatattattggggttaaaccaaataaaagccagggccacctccaacttttttatggttttttccgcttccttagcctttttttgggggctactaacaaaggaacactcgaccgatcccgtttttttaaccttaaacaggttaaacccagtcaaaccaaacattttgttcaaaaaggaggctggtttttaatccttgggggggtaccaactaaccaaagtgggcagaaccggcgggcccacttggggatttttgggtggggccttttacgctgcccaaatccaaatttgggccagcaaaaccggcagggtagccagttgggttacatcctttaaattaaacattttcgaacccaacaaataaaactaagttgacgggctggcctttttttgggaacccgtcgggtttaagcccaaatccgacgatggattttt

SEQ ID NO: 72349 - DNA, 825 bp, Glycine max
  Clone ID: PAT_MRT3847_36342C.1
caggctgcttctttccccattgctaaagagggaaagtctggtgtttctctcaggtacaccacaatgttcggtgtttcattgtcggatactctcaaatctgacttcagcttttcctcattgacatgcaaagaaacaccaacaccttggctggaaatgtgccacccaaggctaaccttggtgacttgaggggactagctggaggcttgaatgggctaaacacttcagccatgatagatggaggatcctttgatggcaccaaggcttacaaggacagcaaagtctgcaacatgtttacaatgcaagaattccacagaagataccatgaagaaactggaatcacatttgcttccctttacccaggttgcatcgccacaacaggcttgttcagagagcacattgtcatgatagataataagcacggtgtgtgagtgatccaagcctgacaaaatcaggtgtttactggagctggaatgcggcctatgcatcgtatgaaaaccaaatgtcccaagaagccagcgatgcagataaggctcgcaaggtttgggagattagtgagaaacttactggtttggcttaagtggtactttggcagcttccaatatccatcttgatttagggacatttgtcatggagttcaataacatctcagaagagtttagaccctcttctgatgagtttgttagattctttttctagctgctaactcctcttggtctgatgactactgtcgatgaatccttcacctgaggccaagtgcacatgaactatagagaaataataattgtgcacattgactatgatcaatgccattgactatcttatgtt

SEQ ID NO: 72350 - DNA, 639 bp, Glycine max
  unsure (1)..(639): unsure at all n locations
  Clone ID: PAT_MRT3847_36343C.1
gggaactattccgggccttcggagactctccgaaaccccgaaatttcggggcttcgaaaggccgccagaaccctatggggaaacctttaccaaagaggaaggaaacaccgaaattggatgattgggagggtccacccaagacagaagcctgcaaaccgcccaggaaccaggaaggtgcctcaaacctcccaaacccaaatttcctaaacgggtaacccctaaacccaatcccaaaccctaaccgaaaaaggccctacacccccagaggaacccagagaaatacgtgtaaaggaagaactacaaaaaacgcttcaaaaggcccaagtcaaaaaccccacaagcgtttggttttcttccaaaagccattccaagcaaagtaacccccctttttgttggttgggagaaaaactgaagtttggaaaagctttcaaaaaagagaggccccgcaagccctttggccaaaattttcaaagtaatgccaatgtaattgggaaaacctcttgtncttaactttaaaaccaaaccaaaaaaataatcttttcttggcttgngcttcttcaaggattnaaaaccagcaaaaattgccccttttgtggttggtctttgaaggtggtctttaatggaaaaaaagctttcaaa

SEQ ID NO: 72351 - DNA, 1577 bp, Glycine max
  Clone ID: PAT_MRT3847_36344C.1
cccacgcgtccggaaacattctaaaacaaaggacccagttttacatttttttttgttcctgagttccaatggctcttcaggctgcttccttggtttctgcttctttttctattgctaaagagggaaagtctggtgtatctctcagggacaccacaatgtttggtgtttcattgtcggatactctcaaatctgacttcagctctccctcatcgacttgcaaaagggaattccaacaaaaatttggccctttgagggttcagtcagtggcaacaacaactccaggagtcaccaaggcttcaccagaaggcaagaaaactttgaggaaaggcagtgttattatcactggggcttcctctggattaggcctggccactgctaaggctttggctgagacaggaaagtggcatgtgataatggcctgccgggatttcctcaaagccgaaagggctgcgaaatctgccggcattgctaaggaaaactacactattatgcatttggaccttgcatctcttgatagtgtgaggcaatttgttgataactttaggcaatcaggccggccactggatgtgcttgtttgcaatgctgcggtttacttgccaactgccagggaacctacatatactgctgatggctttgaactcagtgttggaaccaaccatctcgggcatttcctcctttcgcgccttttgcttgacgacttgaacaaatctgactacccttcgaagcggttgatcattgtaggctcaatcacaggaaacaccaacacattggctggaaatgtgccacccaaggctaaccttggtgacatgaggggactagctggaggcttgaatgggctaaacacttcagccatgatagatggaggatcctttgacggcgctaaggcatacaaggacagcaaagtctgcaacatgcttacaatgcaagaattccacagaagataccatgatgaaactgggatcacatttgcttccctttacccaggttgcatcgccacaacaggcttgttcagagagcacattcccttgttcagacttctcttccctccattccaaaagtacataaccaagggctttgtctcagaagatgaatcaggaaagagacttgcacaggttgtgagtgatccaagcctaacaaaatcaggtgtttactggagctggaacgcggcctctgcttcgtttgaaaaccaattgtcccaagaagccagcgatgcagataaggctcgcaaggtttgggagattagtgagaaacttactggtttggcttaagtggtactttggcagcttccaatatccatcttgatttagggacatttgtcatggagttcaataacatctcagaagagtttagaccctcttctgatgagtttgttagattctttttctagctgctaactcctcttggtctgataactactgtcgatgaatccttcacctgaggccaagtgcacatgaactatagagaaataataattgtgcacatgaactatagagaaataataattgtgcacattgactatgatcaatgccattgcctatcttatgttaatagtcatttatgtgaactccagagtgaat

SEQ ID NO: 72352 - DNA, 303 bp, Glycine max
  unsure (1)..(303): unsure at all n locations
  Clone ID: PAT_MRT3847_36345C.1
gctaaaaacgggnttaaatttccgacaacngaccaaacaaaccgggacggggcgcatttcagaccgcttgatcaacaccccttccaacaaacaaatctcagttggctcatcactatccatattaatcctcaattcaaaacgaacgctcatacaccaaaacccccattcctacagtcaacgccccaaaccttgaaacaaactaaaatctgtaaacttctcagaaacattgcttgtacttaaaacacatgtgtgggctgcccaataacgcagagcatgggtcagccaaatcaaaaacatatacta

SEQ ID NO: 72353 - DNA, 1341 bp, Glycine max
  Clone ID: PAT_MRT3847_36346C.1
tccacttctgcagagtctgaacaagttggttatagtgaaacaaacaacatgactagtggtgttgatgctgacttaagtgaattgacgccagtatcctcttctttagagtctgaactagtagctaatgatgaagaaacagctcacctcattgtggacaattctgactttcccattttacttgcattgatgaagtcagaattgtcacttgacgaggttccatcctcaaatttggaaaacaacatagatgttgacaacaccgaaagaagtgattatgaaagcacatcacagcttactgtgccacagatactttcagctgaggtggctagtcatggggaaaaaacttcaaaaacggagcttttcctaatttctggtgctgcatgcttgcctcatccctctaaggcattgacaggtcgagaggatgcttatttcatttctcaccaaaactggctagctgtggctgatggagttggtcagtggtcacttgaagggagcaacgctggactgtatatcagggaactcattgaaaaatgtgaaaatattgtgtcaaattatgaaaacaattcaacgatagaacctgcagaagttatcaccagaggtgctgctgaaacacaatctccaggatcatgttctattttggttactaattttgatggacaggtccttcatgcagccaatgtggggaacactggatttatcattataagagatggttccatctttaaaaaatcaactccaatgtttcatgaattcaactttccattacagatagttaaaggagatgatccctcagaactcattgagggatacacaatggatctacatgatggtgatgtgatagtaactgccacaaatggcctcttcgacaatctctatgagcaagaaatagcatcaattatatcaaaatcattagaagctagcttgacacctcaggaaatagcagaattcctggcgacaagggcacaagaggttggaagatcaacatccatgagaagtccttttgctgatgcagcccaagctgttggctatgtgggattcattggtggcaagcttgatgatgtaactgttatagtgtcattagttcaacctagataactatttctcattttttgttgtgttatctacgtttcatgtgtacataggaacccaagttttgtaaacttgtttggggatcaatttggtcctcaactgcatgacaataacattttatgattcctatctattctgtaagttttcagtcgtctttattcttatggacagtactcgtgtagtggcaaaatgaacagcaaaaatggaaagggaagaataaagaacgaaaatttcaatacacattttcttgtaggc

SEQ ID NO: 72354 - DNA, 277 bp, Glycine max
  Clone ID: PAT_MRT3847_36347C.1
aagcgatcctagagcggcgcctttttttgaattacaaatattattaaattttatgtttgtagaaataacgatcctaatcagtatgatgtttttattaaaataaaggtttcaccagaatattaatacaaataatgtaaagtgaagatttttgctctactccggataacccttcaccactccataatccagtttgaaatgaaatatttatcgcagaactaacctagcatgacttggtgattaattgattgttaactgctaatgaagtaattttatacca

SEQ ID NO: 72355 - DNA, 543 bp, Glycine max
  Clone ID: PAT_MRT3847_36348C.1
aaaaaaccccccccaacccctcaaaaagggggaaaaaaaaaactattttttaatgggggcaaaaacaaacaaacccggaccaacaaaaatcaaaaccaagcaaataaaagccccccccaaaaacaaaaactaaaaaaaaaggagcaaaaaatccctcttcacccataccccttaaaaaaaaccaggaaagggggcccgggaaaccccggggattaaagccccccaccccgccccatgggggatggacattgatctttgaccccccccatgggggggggaaaaattcttggggccccccggattaaaaactttaaaaaccccgggccccccagggggaggtttaaaaccccccaaaaaattcacccaccaaaataacggggggggggcttggaaaaactgaccccccccatagccaacaccaaaaccaactggccccccattccctgggggggccccaaaattcccaaaagcaggagttggttcaaaaccccaagcggcgttcccaaaaccggaattccccttggcccccccaaagcccccccc

SEQ ID NO: 72356 - DNA, 569 bp, Glycine max
  unsure (1)..(569): unsure at all n locations
  Clone ID: PAT_MRT3847_36349C.1
cgctgtgatgacgcccctctatatatagagaggcgcttannactagaagatgtggnnnnnggggatccacaangagcgcacacattaaaatataaaatctcgtgaaaggggatgtgaagaaaaaaaaaaaaaacccctgccccccgggagacccactatctatagagcgcgccgnnccgcgggggatccacattttgtgccctctatagagagggaaaagcgcgctcggggcaaacacgtgcacatatgtgttctctgtgagaaagtgatacccgctcacattcccacacaatacacgacccgaacacatagagtgtaacccgtggggcgcctagagagagatctatctcactttatgtgcggtgcgctctgtgccctttttacaggcgaaaaacgtggcgccccatgtgctatagagaatcgcacaacgcgcggagagaggcgttgcgcatagtgggctcttttccgctctctctctcagtgactctgtgctctggcgctctcgtgtgcggagagcgatatcatctctctcaggggnnnnnncacggatannnacannctcgggatat

SEQ ID NO: 72357 - DNA, 337 bp, Glycine max
  Clone ID: PAT_MRT3847_3634C.1
gaacaagaggtatattgctgcccgtattttcagtcaccctgctgtcactgctgaagaaccatcgacaggtattgagcaagagtagagcttatggcacaaaaatgttccatggacacctgcgtggccccttggatgatttccagtaccacatatgcacattacagcacttgtatctatgctggcattaacattactggcatcactggataggttatgcctggtcagtgggaaattcaagttggtccatctgttggtatctctgcaggcgatgaggtgtaggctgctcactacattttggagacgattacagagatatctggcacaattgtatcaattg

SEQ ID NO: 72358 - DNA, 112 bp, Glycine max
  Clone ID: PAT_MRT3847_36350C.1
ccacgccgtccggaacacgaaaagacagacacggactttgcgcgtagcacagtgaatagagtgcaactatcaaccttatgggtccccaatgtcttacaccaatacctcaaca

SEQ ID NO: 72359 - DNA, 471 bp, Glycine max
  Clone ID: PAT_MRT3847_36351C.1
ggctcgagggcatcatggcgaccagggcgcaatacctgatccaatgggcgctcttatggagtgcaccacagtgcattcaacctcatgacaaccaaggcgcacgccacagcgcactcgaacccgattccattcccatcatagaacattcatccttctacaaacaccgaacgcgcctccaaccgcgactgcatagctcgcgcctgccgcgaatggggcgccttccatgtaacgaaccaaaggggcctccattcgctactcgattgcttgcgcctggccggactgtggttcttctcagagacacgaatacctgacaagctccgttactcctgcttcgcctccgcctgcgagggctacggcagtatactgctcgctgcatctagatgcgatcaaaaccacctgcgtctatgccgtcatggatggctacgcccctaacatgacccgtttcatgtctgatgaggctatcgaagccgg

SEQ ID NO: 72360 - DNA, 913 bp, Glycine max
  Clone ID: PAT_MRT3847_36352C.1
ggctcgagatcaccattgtgtcttcttcactccaccttcttcattcccacccaattgtctccccattaaacaataacatgaataatattaggaatggatacagagaagaaaaatcattctgctatttccaccccaaacaggtacttgttggggtgtgtcccctgtgcttgaatgagaggctcctcatactgtttgcaaaacaaggtcgccaccacaaccgttcttcttcttcatccatatcttcacacaggcttcaaagtaattccagacacagaaaaccaccctcttcttctattcacaagatctttgcttttggctctctcttcactcgcccagaatcccaccacaactatgactatgatgatgtctctcccactccagaagagtcattcatctcaatcaagtttgaagagaatggggtggcatcgtgggaaaagagcacagtgtcaaagaaggtgtcgtcgtggaaccatcaaaacaaggagaacaagagagtgatagagcatgggaagtcacgtgacacgtttaggtggcgaaagaggatagggcacatgctccagctcattcggtggaagaagagcagagatagtgtgccacgtgggcacagatctcagtaaggttaatccaaaagctgctgaatcattggctgatcctgaggaatatcctaatttgtttgatgattggcaagttgcactagctgttgaatctaaagctacggaagcaagaggtgtttaccctcctgcatcggagtatgtgaaccaggctgataaatcacatatcacccttgtggaagctttcagaaacatgcagatagaagaaggggatcagcctcttgagaacggggactctaaccatgagttgactgaacaaaatggagaagagcactatacagaggaacatgaggagcaccagg

SEQ ID NO: 72361 - DNA, 1704 bp, Glycine max
  Clone ID: PAT_MRT3847_36353C.1
cgctcgctcgcactgtaagatgttttcatttccctctccaagcagttatgttgtgttgtgctgagatttgattttctataagcaggtccagatcttaatcaagaggagtgagttttgtttttccagccatgacgccgctggtgagtctaagcctttctctcagatttacgcttaacagagttacagtcactcagtaatctactccttttctagatcctgcatgctgggaaaaccaacaaaaattcttacaagacactcattgcagccgagtatgctggcgtccaagttgattttgcccctaattttgagatgggtgtctccaataaaactcctgaatttctcaagatcaatcctattggcaaggttcctgtgctggaaacccccgatggtccaatattcgagagcaatgccattgctcgctatgttacccggctgaaaggtgataacactttgtatggatcttccttgattgaatatgcccacattgaacagtggattgatttttcatcattggagattgatgctaatattatcaagtggtatgccccaagagttggacgaggaccatatcttcctccagctgaggaggctgcaatttctgcactaaagagagctttggctgctttgaacactcaccttgcttccaatacttacctggttgggcattctgtgaccctggctgacatcataatgacatgcaatttatatttgggttttgcaaacatcctggttaagtgctttacctctgagtttcctcatgttgagagatacttttggaccttggtcaatcagccaaacttccgaaaaataattgggcaggtcaagcaggctgaaactattcctcctgttcaatctgcaaagaagccttcccagccaaaagaatccaagcccaaggtaaaaaatgaaccaaagaaagaggcaaacaaggagccagaaaagcccaaagaagaagcagaagaggaggctcccaagcctaaagccaagaatccccttgatcttctccctccaagtccgatgatactggatgagtggaaaagactctactcaaacactaaaaccaacttcagggaggttgctatcaaaggattttgggacatgtatgatcccgagggatactctctctggttttgtgattacaaatacaatcaggagaatactgtttcttttgtgacattgaacaaggttggtggatttcttcagcggatggatttggctcgcaagtatgcatttggaaagatgcttgtgattggatcagatccaccatttaaggtgaaggggctgtggcttttccgtgggcaagaaatccctcaatttgtgattgatgaatgctatgacatggagctctacgaatggactaaggttgacatctctgacgaacctcaaaaggagcgtgtcaatcagatgattgaagattgtgaaccttttgagggcgaggctcttttggatgccaagtgcttcaagtgaaaatttattccttgaaagggtctacttttataatgtgtcttcgtttttggtagggtacggtttcttcacattgaaactttatgtttaatttatttttaattttaattttaatgatagctagactaatatacaagtgctatatttttatgttggatgtaagcatttattaattacattgataggttttctttttccctgccatgggctttgaggtaatcgatcaatttttgttaggtggtt

SEQ ID NO: 72362 - DNA, 463 bp, Glycine max
  Clone ID: PAT_MRT3847_36354C.1
aattcggctcgaggaacaggagaaactcttaacaaagaaagatcaggctttgcccgtgtggagtccaaagtccttccctaacgaagtggagcctgagggtacagggaaggagaaagactgggatctcagagaccagctgcaaaagaagactttgcagctccaggccaaggaaaaggagtgcagagaactgcattcagaattagacaacctcagtgacgagtatctctcctgcctgcgtaagctgcagcactgtcgagaagagctgaaccagagccagcagctgcctcccagaaggcaatgtgggcgatggctcccagtgctgatggtggtgattgctgcagcactggcagtgttcctggccaataaagacaacctgatgatctgaataatttgtgacaactgccttgggtgaaaatcagaagcaagcaactcagcgaaaaactcagaggtttgggtacattac

SEQ ID NO: 72363 - DNA, 264 bp, Glycine max
  Clone ID: PAT_MRT3847_36355C.1
tttcacaaaaaggcacctatcacttatctcttcttgccactctttcttctctgtgccttaacccactccagaaccacaccacactctccccaaacgacactcctggacgtcgtttcctgcctccaaaacgcacacaatgtcgtcggctttacccaccaccaccctaacaaacaccaacgacaacaagaatcctcgcttctaacgtcgtcgcttggtattcagttacactcccgaggctcaattcagaaatcctcccacagcggc

SEQ ID NO: 72364 - DNA, 1711 bp, Glycine max
  Clone ID: PAT_MRT3847_36356C.1
ccacgcgtccggaagaacgctcgctcgcactgtccagatcttaatcaagaggagtgagttttgtttttccagccatgacgccgctgatcctgcatgctgggaaaaccaacaaaaattcttacaagacactcctcgcttgtacccggctgaaaggtcattgcagccgagtatgctggcgtccaagttgattttgcccctaattttgagatgggtgtctccaataaaactcctgaatttctcaagatcaatcctattggcaaggttcctgtgctggaaacccccgatggtccaatattcgagagcaatgccattgctcgctatgttacccggctgaaaggtgataacactttgtatggatcttccttgattgaatatgcccacattgaacagtggattgatttttcatcattggagattgatgctaatattatcaagtggtatgccccaagagttggacgaggaccatatcttcctccagctgaggaggctgcaatttctgcactaaagagagctttgggtgctttgaacacacaccttgcttccaatacttacctggttgggcattctgtgaccctggccgacatcataatgacatgcaatttgtatttgggttttgcaaacatcctggttaagagctttacctctgagtttcctcatgttgagagatacttttggaccttggtcaatcagccaaacttccgaaaaataattgggcaggtcaagcaggctgaagctattcctcctgttcaatctgcaaagaagccttcccagccaaaagaatccaaggccaaggcaaaagatgaaccaaagaaagaggcatacaaggtgccagaaaagcccaaagaagaagcagaagaggaggcacccaagcccaaacccaagaatccccttgatcttctccctccaagtccgatgatactggatgagtggaaaagactctactcaaacactaaaaccaacttcagggaggttgctatcaaaggattttgggacatgtatgatcccgagggatactctctctggttttgtgattacaaatacaacgacgagaatactgtttcttttgtgacattgaacaaggttggtggatttcttcagcggatggatttggctcgcaagtatgcatttggaaagatgcttgtgattggatcagttccaccatttaaggtgaaggggctgtggcttttccgtgggcaagaaatcccaaaatttgtgattgatgaatgctatgacatggagctctacgaatggactaaggttgacatctctgatgaagctcaaaaggagcgtgtcaatcagatgattgaagattatgaaccttttgagggcgaggctcttttggatgccaagtgcttcaagtgaaaatttattccttgaaagggtctatttttataacgtgtcttcgtttttggtagggtacggtttctttcacatttcagttatagtaaagtgttagccgaacttgatttgagccacattgaaactttatgcttaatttatttttagttttaatggtagcaagactaatatacaagttctatatttttatgttggatgtaagcttgtagcaaattacatggatagttttttttccctgccatgggtttgaggtaatcgatcaagtgtttttgtaattgaaattcaatgaatgaggctctacccgtgtaaccattaatcaaaatttataatggcaaatgttaatggataatgc

SEQ ID NO: 72365 - DNA, 448 bp, Glycine max
  unsure (1)..(448): unsure at all n locations
  Clone ID: PAT_MRT3847_36357C.1
cccactcgtcgccccacgcgtccgggtgttcccgccgccgtcnatctcnacgggagccaaacctgagacgaacaactccatttctcagttatttgcttatattttgagaggggcacaaggagccgttttntactaaagagaaagtgagagggggagatnaaataagttcttacanaagatggggtgnaggggaatgggaaagattcngaagaaattggctgagctaaattacccgagagcgagtgcgcctgcgcagtccctcctatttgctgggatggggcgctatgcccttctagagtgggttttctttcggcttttaggtgagtaaggacccttttctcaacaaaacctacaaggggagtggcatnagcgtgacnaggagagctggcnaattcantatttagcagagagtgcgaaggttttngggattacaacaaccgganataca

SEQ ID NO: 72366 - DNA, 436 bp, Glycine max
  unsure (1)..(436): unsure at all n locations
  Clone ID: PAT_MRT3847_36358C.1
acttcacggggctccagactcgatggtggaggacacatgaacagcgctaggcaataaattcatggggctccgaaaaaagtttgtttgcaggaccaaatggtccaccggttttttccacctaaaaggcaaacatgctttttggaaagaaaaataaatcattcgcgagagcaccatatcttagagaaacaatatacttgtgccaagggtaatcttccttgtgaccgagaatgaagggcaggatgtcaacatttagcttttaaatgaacatgcaagggaaacatcgggctaagctgaaaataaatcactcatagtgtataaaactcacacaggcaagtgtttcaccctattcccaaaccataactgcaccatgactttnttgcacacgatttcctatcgaatcagagatcacacgtacgatcatggatcaataggattt

SEQ ID NO: 72367 - DNA, 300 bp, Glycine max
  unsure (1)..(300): unsure at all n locations
  Clone ID: PAT_MRT3847_36359C.1
gttgtgnnttttttttgttttctttttttttttatttttttttttttttttttttttttaaaaacaacccggagtttttaactatatacaaacaattttacaattattgcgcgggattttttacataggcgaagggncaaaggacgttcaaggataacatgaccctgctttaaatcccccctcttgatttgatagagaggggaaacacacttttttataaacataagtgactcttaacacgtctgcaaaaaaaccttttgttaattaatataactaattaactggcgttattcttaacta

SEQ ID NO: 72368 - DNA, 341 bp, Glycine max
  Clone ID: PAT_MRT3847_3635C.1
cacttagcgatcaaagttttacttcagacttatacacttaagggtaccgggttcttcccctacctctgacggttttaaacttttacttcgggattcagtctccaccttctggtggatctaaccttgacctactatgagtactgctctatgtacacggtagaacaaacaaactattactcacttaaaatttcaaactcgtgtagattcgggtgaactcgttgctgagtcaaaggagtatatgcatattcgcgtccagcatattaatggtgagaaaagcctgtcaaccgtttaggggtggaagatagaatttacctataacaagcttcttaacgacgttaaga

SEQ ID NO: 72369 - DNA, 1668 bp, Glycine max
  Clone ID: PAT_MRT3847_36360C.1
ctccgaataaaagtggagaatggagaattggcgaacaacactatgcaataacttcgcgcgactccagactcgttggtggtggacacatgaacagcgctaggcaataaattcatgggtctctgaataaagtggagaatggagaattggcgaacaacactacgcaataacttcgcgcgactccacactcgttggtggaggacacatgaacagcgctaggaaataaattaatggggctccgaaaaaagtggagaatggagaattggtgaacagcgctacgcaataacttcgcggggctccagactcgaaggtggaggacacatgaacagtgctaggcaataaattcatggggctccgaaaaaagtggagaatggagaattggcgaacagcgctacgcaataacttcgcggggctccagactcgaaggtggaggacacatgaacagcgctaggcaataaattcatggggctccgaaaaaagtggagaatggagaattggtgaacagcgctacgcaataacttcgcggggctccagactcgatggtggaggacacatgaacagcgctagaataaattcatggggctccgaataaagtggagaatggggaataggcgaacagtgttacgcaataacttcgcggggctccagactcgaaggtggaggacacatgaacagcgctaggcaataaattcattggtctccgaataaagtggagaatggggaataggcgaacagcgctacgcaataacttcgcggggctccagactcgtagatggaggatgcatgaacagcgctaggcaatgacattcatggggctctgaaaaaaagtggagaatggagaattggcgaacaacgctactcaataacttcgcggggctccaagtcgtaggtggaggatgcatgaacagcgttgggcaatgacattcatggggctccgaaaaaagtggagaatggagaattggcgaacagcgctacgcaataacttcgcgggctccagactcgttggtggaggatgcatgaacaacgcttggcaataacattcatggggctccgaaaaaaaagtggggaatggagaattggcgaacaacgctacgcaataacttcctggggctccattctggaaggtggaggatgcatgaacagcattaggcaataacattcatagggctccgaaaaaagtggagaatgaatggaatagggctaaataacttcgcggggcagacttgaagtggaggacacatgaacagcgctataacattgatggggcaaaaaaaagtgatggggtggcacacagccttcgcggggctagactcggacacatgaatagcgctataacatttatatagctacgcaataaccatactgtttgcaggaccaaatggtccaccggttttttccacctaaaaggcaaacatgctttttggaaagaaaaataaatcattcgcgagagcaccatatcttagagaaacaatatacttgtgccaagggtaatcttccttgtgaccgagaatgaagggcaggatgtcaacatttagcttttaaatgaacatgcaagggaaacatctggcctaacctgaaaattaatcactcatagtgtataaaacccacacaggcaagtgtttcatcctattcccaaaccataactgcaccatgactattttgcacacgatt

SEQ ID NO: 72370 - DNA, 641 bp, Glycine max
  unsure (1)..(641): unsure at all n locations
  Clone ID: PAT_MRT3847_36361C.1
gcaccaggttgttgttgttgttgttgtagtgctttgtgagtgttaatttatcagcctatagcacagatgaagatttgttgtgtattaaaaaaaaaaaaaaaaaaaaaaaaaaaaaaaaaaaaaaaaaaaaaaaaaaaaaaaaaaaaaaaaagaaaaaaaaaaaaaaaaaaaaaaaaaanttggggggggggcccggccccaatttccccttttagggattttttttacccccccttctgggccgggttttaaaaacgtgggaatgggaaaacccttgggtttcccaattttattgcctttgaagcaattccccttttccccagtgggtttaataaaaaaaaggccccccccgatcccctttccaaacgttgccccaccttaatgggaaatgggaacccccctttaaccggcccttaaaccccgggggttgggggggtaacccccanngaaaccgttacttttccaagccccctagcccccgttcttttggtttttttcctttcttttttcccacggtggccgggtttcccccgtaagcctttaattcggggcgctcctttaggggtcccaatttaatgtttttacggcccctcaccccccaaaaactgattagggggaatgtttcactgatggggccctcc

SEQ ID NO: 72371 - DNA, 1571 bp, Glycine max
  Clone ID: PAT_MRT3847_36362C.1
agcagaaaagtgtcattgcagcgatatcttgaaaagcgtaaggacagggggagattgaaaggcaagaacttggcacgacaaccacactctctacaaaattgatggtcccaccgaccgagcgggtgccggactcggacaaacgctgccaacaacaacacactctctacaaaattgatggtcccaccgacgagcgggtgtcggaatcggaggccatgaacggcggcgccaccaccgccaccttccgatccatcctcaacaagcccctcaaccagcttaccgaggatgacatttctcagctcactcgcgaagactgtcgcagattcctcaaagaaaaagggatgcgtaggccttcctggaacaaatcgcaggcgatccaacaggtcatttccctgaaagcgctgctggaaccttccgacgatgatactcctcctcctcctcctccccccatgcaccaccgtagccatgctcaacctcaacctcaagtgaatttgaatgaacctcctcctcctccgcctaaggctccaccacctgaagaaccctcttttcatgctgatgaagacattcagaaatctgcgtcgtctggggaaaagcctacggaaactaatgacaccaacaccaacgttgctagccccaaagggtgtgcaactagtggatcatttgggcaaatgacaattttctattgtggtaaggtgaatgtctatgacagagtctcgcctgataaggcacgagcaatcatgcagcttgcaacgagtccagtccagcttactcaggatgatcctttaaatggaaatgcagctgtttggacttctccttgccacttaccgatggataaggatgtcctcgttcctgttgatactacaatccttcaggttgctcaagcagataagatggtggagtatcctctgcaatatagggagaaagggagcatagctcgtgatgctgatgtagagggtcaggaacaccgaaaagtgtcattgcaacgatatcttgaaaagctgaaggtccattcctcaaatgggaattcaagccgtagcagtactagctctccaccacaacctagactgcctctagtttccagtggttcagatcagctaaaggttgcccttcccattgatctcaatgacaaagatgttcaagaatgctaaaattcaaactagatagattatgcagagttgggactcgtagatgattgaagagagatgacgaaagtattataactgaagagaccatagcgtctagcagcctactgcaagaattggattgctcttagactggtcaattttagtatattttactgtttgggcaaatttcttttgtttaggatagtggagtgtcctgcttacctgatcaattttgtaatctaatttcatccttcgggaatttcctgttactgaagttttaaggttttatgagttgaaatgtagagccaggagcagccattttccgaggaatatatgatatgtaaattcatggcgctgcctcttgttaaatgttaatagcttttgtgcaaagccaaacaaatctcttactcttaaagcggctagagagtcttatgtttgttcactctagcc

SEQ ID NO: 72372 - DNA, 677 bp, Glycine max
  Clone ID: PAT_MRT3847_36363C.1
tgtttcttcatgtgtctttcacaatatttggaaagaaatgtattaggttcttaatcattcaaatttaatttctcttatccaatcacaaggaattgctgcaagtgactcaagaaagtatttaatggaataattcaaataacttgatagcctattgaaaaaaaatgcctagcaatgaacaacttcctgcactgaatcttgtgattggatcaaggaaaatttgcattggatctaaatacaattcttttcatataatgagggtattagttatttgaattgatagcttagaatttgatctttttgcattatattacttttaaaatttaattccaaatatgactgcatttattattttagaggaaataaatatgatattgttatatgacatcacatcatacaatgaatgtttaaaattataaatataaatatttttttatattagaatttgagtttataacttccttatttttttttctttcatcattaccttcggtacattaatgtttttatgttatctgtttttaaattttagtcaaattttgtttcttacaagaattctaggaattgtataaatatgttttatacatcattttataatttattaataaatttatcaaatatttataattcttaaaattaacttaacccagaaaatatcaactcttacgtttggaattctt

SEQ ID NO: 72373 - DNA, 290 bp, Glycine max
  Clone ID: PAT_MRT3847_36364C.1
aactgattcgagattagatggcaactgaatgttggccaatagggtttgtaaagtggctacaaccgggctcaagtaaaagcaaagacagaaacgtccaaacacatacatatgtccagagaccctctggaaaccccatgttacacaggatgaatcaccagtcaggggccacgcggcatcactggatctaggcaactcaacgcgagcattgagctaactctaacgtgtgaacgcgagggtcgcagcgagtccgcggatcaccaatgactggaataccgccgagcctgaccaat

SEQ ID NO: 72374 - DNA, 795 bp, Glycine max
  unsure (1)..(795): unsure at all n locations
  Clone ID: PAT_MRT3847_36365C.1
ccacgcgtccgaacgctgccaacaacaacactgctctctacaaaattgatggtcccaccgacgagcgggtgtcggaatcggaggccatgaacggcggcgccaccaccgccaccttccgatccatcctcgacaagcccctcaaccagcttaccgaggatgacatttctcagctcactcgcgaagactgtcgcagattcctcaaagaaaaagggatgcgtaggccttcctggaacaaatcgcaggcgatccaacaggtcatttccctgaaagcgctgctggaaccttccgacgatgatactcctcctcctcctcctcccgccatgcaccaccgtagccatgctcaacctcaacctcaagtgaatttgagtgaacctcctcctcctccgcccaaggctccgccacctgaagaacccgcttttcatgctgctgaagacattcagaaatctgcgtcgtctggggaaaagcctacggaaactaatgacaccaacaccaacgttgctagccccaagtttgtttttctctctctctctctctctcttgatggtttttaatgcctttttgtgtgaccggtatagttattttttaataatttttttaaggttttagggtgtggaatctcgtccaagctagttggatctttgatgttgctttcggtactttgtgggaagaaaatagtgtggttggtaaagtgtgctttggagttcaatgaaaagtgtangttggttaaaacttgaaacgttaaggtttgcttttttaagtggattttcttttggcattagcttggaaaatggctca

SEQ ID NO: 72375 - DNA, 1608 bp, Glycine max
  Clone ID: PAT_MRT3847_36366C.1
aaagcttatagttatagtgagaagagaaggaagattagttgctaataattaagacagaaacatacgtggcagctgagggttcaccccaagtcctaagaacgccccctccctacccttcccccatttcccccccaacccaaacgctgaacaacaaccacactctctacaaaattgatggtcccaccgacgagcgggtgccggaatcggaggccatgaacggcggtgccaccaccgccaccttccgatccatcctcgacaagcccctcaaccagctcaccgaggatgacatttctcagctcactcgcgaagactgtcgcagattcctcaaagaaaaagggatgcgcaggccttcctggaacaaatcgcaggcgatccaacaggtcatttccctgaaagcgctgctggaaccttccgacgatgatactcctcctcctaccgccatgcaccaccgtagtcatgctcctccccctccacctcaacctcaatctcaagtgaatttgactgaacctcctcctccgcccaaggctccgccacctgaagaatcctcttttcatgctgctgaagacattcagaaacctgcgtcgtctggggaaaaaccttcggaaactaatgacaccaacaccaacgttgctagccccaaagggtgtgcaactagtggatcatttgggcaaatgacaattttctattgtggtaaggtgaatgtctatgacagagtctcgcctgataaggcacgagcaatcatgcagcttgcaacgagtccagtccagcttactcaggatgatcctttaaatggaaatgcagctgtttggacttctccttgccacttaccgatggataaggatgtcctcgttcctgttgatactacaatccttcaggttgctcaagcagataagatggtggagtatcctctgcaatatagggagaaagggagcatagctcgtgatgctgatgtagagggtcaggaacaccgaaaagtgtcattgcaacgatatcttgaaaagcgtaaggacaggggaagattgaaaggcaagaaattgactgggataacttcatctaacttcgagatgtatttgaaccttccagtgaaggtccattcctcaaatgggaattcaagccgtagcagtactagctttccaccacaacctagactgcctctagtttccagtggttcagatcagctaaaggttgcccttcccattgatctcaatgacaaagatgttcaagaatgctaaaattcaaactagatagattatgcagagttgggactcgtagatgattgaagagagatgccgaaagtattataactgaagagtccatagcgtctagcagcctactgcaagaattggattgatatatagactggtcggattttagtatagttaactgtttgggcaaagttcgtttgtttaggatagtggagtgtcccgcctacctgatcaattttgtaatcataagttcatccctggggaatatcttgttactgaagttttataggttttatgagtttagatgtagaggccagcagcccctattttcccaggaagtatagtgatatgtgaattcgtcgtgctgcctcctgttaagagtgtataatagcttagtgggcgc

SEQ ID NO: 72376 - DNA, 655 bp, Glycine max
  Clone ID: PAT_MRT3847_36367C.1
ctagagattgtaacgcgcttctcaattctgtaggcggctactattaaaggagacatggtgactgctcaatgcacttgcgaggatcacagcaacaacagaatcagcagcagtggcaacaacaacaacaacaacattggtaaccttaacttggattcgaggttggtgtatctcaaccttggtgccaccgcttcaatgagttcaaggttggataatgctgaggacgagagagaagccatgaaccaaaccatgtaccatcattaccactctcatgactactagtagctgctgctactgaatctaaactttccacatacatcactgatatatatatatatatatatatatatatatatatatatatatatatatatgatttaaggttatttcaattgccacgaacgatggagactatggaaaatttgaagagggagaaggaggagaattgatgaatatggagggaccctattggatttggatgatggatggagcgtaaaagactcttcttttgtcacttggaagaatagactggtattcactgcccttctaatttttctgtcttgactctatggtattttgttgggttttttttctttcttttttagttttttggggtttaggctcttcaaatggtcaccatttgaagtgcggtttcatg

SEQ ID NO: 72377 - DNA, 146 bp, Glycine max
  Clone ID: PAT_MRT3847_36368C.1
gaggtagttctatagtacgactagtaatgtggctgctacgactgactcctctgcagcggctacactagggatccgtccagctgaggtagtggttgtgccacctaatgggatgacatccactggtgatgtcctagggtagcgtatgg

SEQ ID NO: 72378 - DNA, 154 bp, Glycine max
  Clone ID: PAT_MRT3847_36369C.1
atatatgatcgtttttatttttgtgtttcacacaattaaagccataaaaaacttatgtgatttacgaacacctttttgaacaggggaacaacatgccaacccaactaggggccattttactcatacaaaaacagttatcttaaaccaagaaaaa

SEQ ID NO: 72379 - DNA, 472 bp, Glycine max
  Clone ID: PAT_MRT3847_3636C.1
cggctgcgagaaacgacagaagggatacactatactgacatttaatgtattcataataaatttcaattttctataccaacaaatttgtctatttatatgatatactatatacagtagtaatatagtattttgttctacaaatactttaactttaataaaatattacactaacaaatgactaatccaataccaaagtattgataaatgatactttttagggatttttttaatttaaccttattttaatatcttctccactggcttttgccttacaacacaattttatacagaatcagtgtaaaatataaacaccagattatattattactacctataagaacaaaaaagaaaaattattctcatacattgcaatacttttaatacttttaatttgaaattataagggtaattttgtagtgaaaaaaacttagaccagaagaaaatggtgatggattcaatttctctcactaat

SEQ ID NO: 72380 - DNA, 424 bp, Glycine max
  Clone ID: PAT_MRT3847_36370C.1
cagaggctttctcactacctttccagagattttcattaatataggaattcttcttggtgatgtgtgcaaactattcattttcaggcttttcaccacacataaactggaggataatgcttgctgtggggattttgccctcagtcttcattggatttgctcttttcatcattcctgagtcaccaaggtggttggtaatgcagaaccgaatcgaagaagcaagatcagtgcttttgaaaacaaatgaaagtgatagggaagtggaggagaggctagctgaaatacaacaggctgctggtgtggccaattgtgaaaattatgaggagaaacctgtgtggtatgaacttttgtttcctttcgcctcgcttcgtcgaatgatgatcacaggaatagggattcagtggtttcaacagaattctggaattga

SEQ ID NO: 72381 - DNA, 689 bp, Glycine max
  Clone ID: PAT_MRT3847_36371C.1
aattcggctcgaggccataaattgcttttctggcctaggaaaaaatgccaaaaaacaagtggacactttggttatcacaaaatatggagcaagtggagataatcctgcgtgtactgaccttgcatataatcaagctaaatcagatggggcagatgtacttgactgtcctgttcaaatgtccaaggatggaatacccttttgcttaagctctatagatctatcagagagcacaacagttgctgatacacaattgaaaaaccgtgcaatgactattcccgagattaaatatcgcagtggcatatatacattcagcttgacatgggatgagataaaaacattgactccctcaatattgaacccttatgagaaatacatattgtcccggaatccaaaatccaaaaatctaggaaaacttatagccttgtctgactttttgtccctgactgaaggctctcgcatcttgattagcatagagaatgcagcctatcttgctgagaagcagaatttacgtgtgactgatgcagtccttgatgctttacagaaagcaaaaccaagatcacataaagttatgattcagtcaactcatagctctgtgcttaagatattcaaagataaatccaaatttgaaagggtttacaaggttgatgagaacattcgcgacgcggctgactcagccattgaggacatca

SEQ ID NO: 72382 - DNA, 235 bp, Glycine max
  Clone ID: PAT_MRT3847_36372C.1
gctcttcagcgagagcaatacatttcttatgggactaatgaacgcacaatgctctaagtatctcatccacaaacatgattcaatgattatcaaatgcaggcccaactgtgtacaaacccagataaagctcaaagtttaaaactaacaaccgactctcgattcctccacaagcttcgcgagctggggggtttcaagttaggaaatacggacaaggtacaaggcagctgagaaacaa

SEQ ID NO: 72383 - DNA, 1061 bp, Glycine max
  Clone ID: PAT_MRT3847_36373C.1
caaaggttccggtttatataatttcttcagtggctgaagagttactagcgttgcttaacatcatacctgagtggctttgcaaacagcggcaagagaaactatttgatggggaaccattgtttgcacacctcaagctcctaaaagagagaaaaattcatgtggttcctgctattcattctcatgaactcttaattaattggcaggaaccatgcattgtattttgtcctcaccggaatttgcgtatgggtcctgttgttcatttgcttcgacgatggtgtggtgatccaaaatctttacttattcttgaggatgttttgaatccactatcacttttaccttaccagcctgttgcaatgaaggttcttcaatgtgtatttcctgttggaatagggttgcatgaagttcaacctttactaaagacattgcagccgaagactgttctgtgtccggaggagttgagactgcatatcaacttttcaagtgaaaagaagtctttctccgttttgtattatactgaagctgaaactttaaaagtaccataccgaaaggacagttcagagttaaaaattgcaactgatttggcttcccacttttattggaaaacattcaaaaaggaagaaatcaatatagcaaaattgaagggagagctattaatggaaaatggtaggcatcacttgctatttgataatgataacaaaaactccttgagtaataataggtctttggtacattggggtttgcctgattcagaaaaacttatggctgcattatcaaagatgggcatcagtggaaatatacaacatggtgtgagtgatgctaaatcacaaactgtgtgtatagttcacatacaggacccttacaaagcctcgatagagattggaaccactagtacaattattactactgctgatgagaatgtggctgccttcatttataaaattgtggacaacattttggatggagtttgatgtaaatgtaatggattttctcgtattgtttgtaaaaatgcttgtattgtatgagcatattatttatagtttcagttgtaaaattaatgtttg

SEQ ID NO: 72384 - DNA, 1481 bp, Glycine max
  Clone ID: PAT_MRT3847_36374C.1
cccacgcgtccgcccacgcgtccgcccacgcgtccggaaaattttaaataggacttgttattacaaaatacaattgcattgctccttcggcgaattggcactggtctctttgccgaacttcagcgttttggtttgggagggaaaattctaaaacctaaaaaatttcaatctcaatcaactcaacgtctgtgatcccaatcgatcacatttaataccacccttcaggattaggtagtaattccgttcccttgaataaataacatgagcaccacagtgcaaagaactccaagatccagcaggcattctttatttttccaggatttggcttcacctgtttctgcccgtagaggaaaattttcgagtccaggtcaagcagctgcagtatcttcactatggcgtgagaactttggtagttcagaccttcctccgcctcctgttttcaccttggaagacagatccgatttttctcctgaatcaggcatactagattatcaaatatcccctgaggctaagtcagacactagaactcccatccaaacttcaaataaggagttttcaactccactgaaaagcaaatctgaggccagcacatcttatgctttgagaggggtacaacaaaaccaacagggctcgccgggtttgagttggtggtcacctacaactgcaaagagtgttggggaacaagatgagaggggaagaagttcgccagttgagggtgtggttcagcctggtgctctgataactcttcctccaccgctggaagtggcaaggcctgaggttcaaagaaattctttgccagcagggaatctcaatgaggaagaatgggtaactgtgtatggattttcccccggtgatactaacatggttttaagggagtttgaaaaatgcggtgaaattttgaaacatgttcctggtcctagagatgctaactgggtgcacattttgtatcagaatcgatctgatgcccataaagctctcaacaagaatggaatgcaaattaatggagtactaattgttggtgtgaaactgttggatcccatgcaacgccaagctttaaatgaaaggcttaagaatcagggatttatgccgttacctctagcctctgccagaaactcagaagtgagcacattgaaagctccttctcgaccttactatctgcagaatggcaactcaactgcacggcagactggaggaaccattgcttccccaacaaaatcattggtgtccaagatcatggacttgatgtttggagtctaaattagctgttctgctgaatcaaactaatatctttctgtttgttgtaagcaatgattttattctctcgattattcatactttttgaagtgttcggcatgtcttgttcattgaattgagttggaatgtttactctatggatctcaattgtcagaatatatggcattttaatatatcaatcttatggatggttatagtatagaacagtacttgttattttgagaaat

SEQ ID NO: 72385 - DNA, 277 bp, Glycine max
  Clone ID: PAT_MRT3847_36375C.1
acgcatatgctgaatatgtgtatagaacaagggattacttttcgtggctattgaccataatagggctatgtcacatcaaggcccttatgatatcagactcgcataagttataaggcctagagtggcgccaggttcttgaggattataggctatcacatccagatattacctgacttgatccttcagatgccatacaacatttactcagccggcagaacatgcttcacgctagacctgatatgaacctatctgagtcccatggcatcattggtgcacc

SEQ ID NO: 72386 - DNA, 243 bp, Glycine max
  Clone ID: PAT_MRT3847_36376C.1
caaaagtgcatgtatattctcgttacttttttacgatggaccatcttaagtaaggcaagagagagtggagattacataacacccaatctagttacgtctagttcgtatagtttcttacttaagttggtcctttgtacaaaagtgcctgtatattctcgtcacttttgtttgctcttgacaccgtgtttatttttcattatttcgggatgtatatatcaggtgatttcctgtaattgagtttat

SEQ ID NO: 72387 - DNA, 1070 bp, Glycine max
  unsure (1)..(1070): unsure at all n locations
  Clone ID: PAT_MRT3847_36377C.1
ctaagnccattcctcttaaatatttttatttgtctctataaattggtcactaataatggaactggagcagggagatacaaaactaaaactaaaatagagagatgttttgaaaaccgaaagagggctttatttttgtaatggaatatggggaacaaaacaatgcatgtttaatggacttccaccaacaatgaataatcctataattggtatctggtggagagaaattgtgtgagagaatgcaccttgggtggagtacagaacagaaccctctccaagcaagaaatgatattcaattgaataggtctctaaagagatattttgttgataaggttgagtagaatggtttccaagtcctctccagtgctccaatcatgaagctgtgcagcaactagttttgggtcagagtgaatcttgttccagagaggataattcttccttggcatgacaaaatcaccgcccttgagcttcaaagtcgggcaataatcacctgcaccatctccaatgtagatgaatcttctttcttcttcatttccagttccagacaataaagaacttcgaatttggtctatcactaaacccttgcacatattgggagggcagaggggacaagagtgaggagagtgggtagaatgatgaaatggagtgacacgaaggcgtccttggttgtcaagaaaagcagggtttgtatggatctgggaaaagcagtgaaacaaggcgtggtgttggagaatggttcgaatggaaaaggtgttggcgtcgctgataatcctcaaatcgcagccaagagcgtgggcggatttgatggctgaaacgatgggaggagggaaggggagccttttgaggcagtcagcaatgtggtcgacggtgacgccgttggagtggagttgggccatgatcctgtccatgagagagatccaaggcatgctgtgacgaagctccttgaatagctcagtcagacccagttcagccacaatccatctgtcactgtcatcgtcgattattgttcgatcgaagtccaaaactaccaccacacctcctccccccccttctgtcgtcttctcgcagccgta

SEQ ID NO: 72388 - DNA, 466 bp, Glycine max
  Clone ID: PAT_MRT3847_36378C.1
tacggagaagacgacagaagggtacctctaacttagcctaaagtttgtacatcagtggagaatagaaattactcttttctctctcactacatatatatgaacttattttgatctaagaagtgtccgtctcgaaaccaatggccattagttgatactcacatatcatgctaataagtcactcgaaaaattagctttatatatgagttgcttaaaaagatgtaagagcatcttcaaacacatattttatgagttattttaagtaagattatttaataattaagtttttattatttgaataaatgatttgacaatgtgttacttaattgagttatttatataaagtagcgctgcttaatttatttttaccaattacttttaattataaaatttaatatgacttaagttaaaaatttattggaacaattttaatactggactaaatttttatataaaggttttaaatcat

SEQ ID NO: 72389 - DNA, 315 bp, Glycine max
  Clone ID: PAT_MRT3847_36379C.1
tagggactaaattaaaagatagttgtaatagtcagggattaaatttgctttttttttttttatataatatggagagttttattgacttttacttgtaattttgggggttttttttctctaattacaccttctctctcttatcttttctcaaaatacactactttttcaaaaaattcccaaattggccccactttaatacaaatctaatgaaccgtacattatttttttaaaattattaaaataatataaatattatattatataaatattcttttaattgattttaaaaatacttttttattaaaataattttta

SEQ ID NO: 72390 - DNA, 705 bp, Glycine max
  unsure (1)..(705): unsure at all n locations
  Clone ID: PAT_MRT3847_3637C.1
tttaaaaacactttttttaaatgcctaaacaaacaacactagtaaatttttaaaaagtgttttttttttcaaaataaaagtgtttttcatggggtaaaatagatgtaacaaatgggctcttaatcttttctatgaaatcacattgaaaatgggtaaaactattactaataaaaaaaactgttcttattacttgttagcaatattattatttattggtctcaatgagtggtagtctatgcctaccagaagcatagttcattattctttcctcattttatggaataaaattatcaacatagtttcggtggcctttttatgtttaataactcttcatttttgctttgtttctggcttgagtgcagtgctcctgtggctagtaacagctgcttgtatcaaaacggggagaccacagattgcaagacgtgcaattgaacttgccgagagtcgtttactgaaggatgggtggccagagtattatgatggtaaacttgggagatatattggcaaacaggcaagaaaataccaaacatggtctattgcaggttatctggtggcaaagatgatgctggaggacccctcaacttggggaatgatttcccttgaagaagacanacagatgaaaccggttattaaaagatcatcttcttggacttgctaaattcaggtgatagataaatagtataaaaaacgaatagagaaaaactt

SEQ ID NO: 72391 - DNA, 184 bp, Glycine max
  Clone ID: PAT_MRT3847_36380C.1
aattcaatgcatgaaactggcacgggctgggggcgggtttccttaaatttcacaaaccagctactgataagtttcctatacaaaaatcaagcgcaaacactgctatttttacgaccttctttaaatctcacttaataactagctttaaggggcttataagtctggagggccaaaacaccccctg

SEQ ID NO: 72392 - DNA, 1400 bp, Glycine max
  Clone ID: PAT_MRT3847_36381C.1
ctctctctctctttcctcccttccttccctctcaacttcattttcctttcaaatagtaacactagagaacaaaagctctggctagaacttgtaatgtatatgcaagccatcatcattcagaacaattagtgcatcatcctccttcaactgaagaactttatttaatttgctcctaaaatattttgtcagaggatgtggtgcagcataaaacctgcaatgagatggctttcttcccagcaaatttcatgctccaaacccctcaccatgatgatcaccatcatcatcaacctccaccttctctcacctcaattctaccaacgtgtgcacctcaagaatatcatgggggagtgaccattctaggaaagagatccatgtcattttcatcagggattgagcatggagaagaggccaataatgctgaggaagatttgtctgatgatggatcacaagcaggggagaagaagagaaggctcaacatggagcaagtgaagacacttgagaagagctttgagttggggaacaagcttgagccagagagaaaaatgcagcttgcaagagcacttggcttgcaaccaagacaaattgctatatggttccagaatagaagggccaggtggaagaccaagcagttggagaaagactatgatgttctcaaaagacagtatgaagctgtcaagtcagataatgatgcacttcaagctcagaaccaaaaacttcaggctgagatattggcactgaaaagtagagagccaactgaatccataaaccttaacaaagaaacagaaggatcctgcagcaatagaagtgagaacagctcagacatcaagttggatatctcaaggacaccagctattgacagtcctcattctacacatcagcaaagcagacccttctttcctccttcttctgctaggcctgcaggagttgctcagcttttccaaacttcttcaagaccagaccttccatcatgccaaaagattgaccaaatggtcaaagaagaaagcctaagcaacatgttttgtggcatggatgatcaatcggggttttggccatggttggagcagcaacatttcaattgaatattccaaaggaagagagagttattaattaatttaaaaaattggatgtagtaggttttctttttccctgtgaaatcaagagggtgtccatcaatttatcacaccatactttattatgatgagttcttaaattaaaaacccatgttttggaaacttggtgtataaaataggatatatatcaagtagaaattttctggcggcgcttgaaaattttcttgaaacttttgagtaatgctactatttggttcatgagttaattaatggggaatgagaagctgtcaagtcagattatgatgcacttcaagctcaggaccaaaaact

SEQ ID NO: 72393 - DNA, 830 bp, Glycine max
  Clone ID: PAT_MRT3847_36382C.1
cggccgctcgagccggcggccgggcgcctgctcgatctctctctctctctctctttcctcccttccttccctctcaacttcattttcctttcaaatagtaacactagagaacaaaagctctggctagaacttgtaatgtatatgcaagccatcatcattcagaacaattagtgcatcatcctccttcaactgaagaactttatttaatttgctcctaaaatattttgtcagaggatgtggtgcagtaatcctttgccattccttctttatttttaagcttacagcatctgcaatcatctcttattattacttcaaagtggcgatcacactatcattcattcagctgatcttgaagattttgtggcaggcataaaacctgcaatgagatggctttcttcccagcaaatttcatgctccaaacccctcaccatgatgatcaccatcatcatcaacctccaccttctctcacctcaattctaccaacgtgtgcacctcaagaatatcatgggggagtgaccattctaggaaagagatccatgtcattttcatcagggattgagcatggagaagaggccaataatgctgaggaagatttgtctgatgatggatcacaagcaggggagaagaagagaaggctcaacatggagcaagtgaagacacttgagaagagctttgagttggggaacaagcttgagccagagagaaaaatgcagcttgcaagagcacttggcttgcaaccaagacaaattgctatatggttccagaatagaagggccaggtggaagaccaagcagttggagaaagactatgatgttcccaaaagacagcat

SEQ ID NO: 72394 - DNA, 1273 bp, Glycine max
  Clone ID: PAT_MRT3847_36383C.1
ccaagatgtccattgccgagaggtattcccatgctaagtggaagatggaagaagcaaagaaaatttctgcaccttctacaccttctacaactcacacctctcagcccttgcaaacaaacattgttggaccagttgacaatcgtgtgccatcacatgttcgaatttttccttctgataaatcaagccacccatcaatcccttctatgggtgccatagtgtctattcctgcccatgtttctgtgggatcttctgcagcattgcagtatcaagtgatcagcaatgaagtaagaccagcgtccggacccagtggtttctggtgtgatgcctagcagtcacttggggagaaatgcatcttccttagcattgcctaaagttgaacgcccacagtttaaagttgatggaggatcaaatgggtctccttacatgctgcaagtccaagcaaattcatctgcaaaccaacctttggtgaatgctccaacatggtctatacagactcaagctgcttcattagccagaagtgcatcagaaaacaaggtgcctgttcataactctgtcaaggttgagggaacacctgatgcaactgtatcaagggcagggacacaaataacaacagactcgagctttagaccatttatcactcaaacagcccctggaaatttacctagtgtgcaccagccattgccgcgtacaaacattgttcaggctcctttgattcctagtcacactgatattgctaagattgtccagaaagtgttacaaccaaagcttcctgtccatcccacgtggactcctccatcaagggattatatgaataaggctttcacatgtcagatgtgtgaactcagtgtcaatgaggttgatactgtacttctctgtgatgcttgtgaaaagggatttcacttgaagtgcctgcagccatcagtcttgagaggaattcataatagagttgattggcattgtatgaggtgcttgagtttaagtggtggaaagcctttgcctccaaaatatggtcgtgtcatgagatcctcaaacacaccgccaaaattgccctctaatacaggtggcgttcaaccatgttctgagaagaaagtagagaatatcgatccaaaggtcatcccacagacgttagcaacaaatgggagctctgttccaactgtttccggtggccatcacaatgttgagttgccatccgaatcaaagataccagataccaaagatatgcaagggactggcatttcatccaccattgaagctattgataagaagcctgatc

SEQ ID NO: 72395 - DNA, 758 bp, Glycine max
  Clone ID: PAT_MRT3847_36384C.1
cccacgcgttcgcttcaagctcagaaccaaaaacttcaggctgagatattggcactgaaaagtagagagccaacagaatccataaaccttaacaaagaaacagaaggatcctgcagcaatagaagtgagaacagctcagacatcaagttggatatctcaaggacaccagctattgacagtcctcattctacacatcagcaacagccaagcagacccttctttcctccttcttctgttaggcctgcaggagttgctcagcttttccaaacttcttcaagaccagaacttgcatcatgccaaaagattgaccaaatggtcaaagaagaaagcctaagcaacatgttttgtggcatggatgatcaatctgggttttggccttggttggagcagcagcatttcaattgaatcaaatcaaagggagagagagagagagagagttaattaattttaaaaatttggatgtagtagtttttccctgtgaaatcaagagggtgtccatcaatttatcacacaatactttattatgatgatgagttcttaaattaaaaacccatgttttgataacttggtgtataaaataggatatatgtatatatatatatatatatatatatatatatcaagtagaaattttctggcggggcttgaaaatttttatatgaatgaattaagggctagtcactttttttttcccactaagttggttaatgtaccaagttttcttgaaacttgagtaatgcaactgctatttggcgtgt

SEQ ID NO: 72396 - DNA, 736 bp, Glycine max
  Clone ID: PAT_MRT3847_36385C.1
agatgaagcttctgccttgttatatacaatatgcgactattagcagtttcaagaatttttacacaatataaggctgtaccatgccagccagccagctcagacctgatcatagatcaaaacttaacagtcataaagacttaatcatcatattcacacgtatttttcaaaactaagaacatattcttcaactggatggaccaatttatcaaggggaaaaaaaggcttaaagcttacatgtgttttactgatttaacatcagcataaacgccattgtgcacaagcataagtgtagtatactatatgttatgtactactatatctggtgcttactacctcgcgtaagcagcaagtttttcatttctttgtaaccatggaactcttccaatgcatcagctgttgttttcctagtggctatgatcccagaagacattatgctcacaggccttgatggctcaaggatctgattgggccctcgagtgttatggttccgggtttcagggtgtgaaccttgtgacaggtgttgtgaggtggagaaatcttgacgtagaggtggtgcttttttcagcatatgtacaagcacaccaacagcagcatcttgagactttctaatgggaaagaatccaccggcttcaagcgtctcagtcatatgaccatgatcaagagattcagctctgctttctggatctgtcatatcatcatcatccacatcaaatggaccagtaaaatcagtatcatc

SEQ ID NO: 72397 - DNA, 137 bp, Glycine max
  Clone ID: PAT_MRT3847_36386C.1
cctgaaggaggccgacgcacaggcgcgaaggccttaacgcctgctgcccgccaccccaaacactgttttttctaccggagacccggcgcgtgagtatcgcgatgactcatatagcaccggcggtgctgctggctgac

SEQ ID NO: 72398 - DNA, 206 bp, Glycine max
  unsure (1)..(206): unsure at all n locations
  Clone ID: PAT_MRT3847_36387C.1
gaaagagaaaatcccagactcttatttttagaggccagtgagtgaatgctgctttctcttaaacaaaacaatcatcactctctcttggtctgaggttcttacacccaaaagggggattctctaaattcacgtttaaagattcccacttttacaccctttacttttggtattttcatcgccctctggaatttntttgggctctctct

SEQ ID NO: 72399 - DNA, 233 bp, Glycine max
  Clone ID: PAT_MRT3847_36388C.1
cagttcccggccgcaaaaaaccggtccccacgctcactcccccacgaagagcggagaagacatccccaaagaaaccgccaaggactggaagggcctccgtgccaccgccaagctcaccgttcataagggtcaggccgaaggccacggtggcccccatcgccgccgccctcgatatcaaggccctcacggagccccagcccgaccgcaccgaccaccaacaccatcacagcaca

SEQ ID NO: 72400 - DNA, 498 bp, Glycine max
  Clone ID: PAT_MRT3847_36389C.1
gggtgttttttttttttttttttttttttttttttttttttttttttttttttttttttttaaaacaaagggcccttgaacccaaaaaaattctcccttaaaaaagaaattttttcaaataaggcattttcaagctaatccctttaaaacaaaaaaaacacctttttttaaaagaaacccgtcaaggcccaaaaaccccaaggtcttttttttttccctttaatccaaaaccgcggaggaaaattcccaaccgggaaaaattttgatataaacttgtttacaaagccaccttgggctttatattgggggccggtaccccctttgctggggttaattgggaataccccccacctttttttaaaaaaggggaattccttttaagttttttaccggggaacccgctcttcttggaaaaaagggttttaagggataatccccccccttaatgggcttaaaaaccaacctccgggaaaatccttttggagccctttgacccgt

SEQ ID NO: 72401 - DNA, 615 bp, Glycine max
  Clone ID: PAT_MRT3847_3638C.1
agttcggctcgaggttccgcagtctccctctcttcttcctcttctctgtaactgcaacgcttcttcttccaagtataagtgatgtcaactttaacacttcgtctgtgcttgagggtaaaaatcactcaaacaggggctcagcaacggcaacacttaaaattgtcaacaagcgcagtaaggggcgccactttaaagtcgattatgttttcatggcatgcgatgataggaaaaattgcagcagtagcgtgatcacacgctcactgggaagtgatggtgattctggtaacgtggcacgtgtgaaactatatgcagtaaacaatagttacactcgtactaataagaccgtgaatgcaacaacacagacacaacaagtaaaaatactaccaagattgggacgatcaacaacactgccaccattatcgccaccaccaacttttttatcgccaactgggtcaccagcacaagtaacaacattttcgtcaccatcaatactaatacgagtgtcaggggttgtaagtgctgtgataagtgaaatgagattatataggtaatatttgtcgttcccctttcaatgtcaagcaattgctacgattaagattttttctaccgatcttt

SEQ ID NO: 72402 - DNA, 425 bp, Glycine max
  Clone ID: PAT_MRT3847_36390C.1
attaattcaaggcaggctaggtacttggaagttgtgttaattgtgcttatagttccaaataattgtatctgtctaatggaatcttggtaatcatggtcaagcaatagtgggtttaatactgatgtaacattagaaaaagactttgaattgagagctcaaaatcatatatatttgggaaaacagcgttcttggggcatgtgttctgactgagtaatgtataataaacatttagtccgagccttgtcaattttctatctcaatcattaagtgctatgtatagccttgtagaatatgtcttatattagtagcatagttctgattctgaaaaccggacaagctggtctgaagggttgaaccggaaaagtggatcaatggccagataggtcatgcttccagattaactaagaaccacaatactgaaaaat

SEQ ID NO: 72403 - DNA, 243 bp, Glycine max
  Clone ID: PAT_MRT3847_36391C.1
tttaattctcatcttattctcatctccaatccaaatatggaggccatcactgcttccttatagagctctatcaaaaactgttccttaaacaataccaacaactaccatcatcatatcacccccccataagaagatgatagatcatctacataattagacataggaatctcattctgctaaaactatatccctgaccccaataaaaaacatatctccgacaccacattagagctcaactcccac

SEQ ID NO: 72404 - DNA, 1353 bp, Glycine max
  Clone ID: PAT_MRT3847_36392C.1
gtttaccaaaacaattagcatactaaaacgcattcatgtgacgataattgttcctgatgatgcgagtttcagtcaaatcaaaatcatttttttcaagagtgtctgtctttggccactgaactacctcagtgtttcgcatgtggttttgtgttctcagcaaaaaccaaagtcgcttcctctatgccaaaagggacaccgagagagagagagagagagagataaagagagggtttttcaatcccaaaagacaaaacgggtgattacttgagaaaaaagagagccgtcgaggcttggaagagagcctttcagttccgacccattagaacttgtatcatggcgaggaagatgcattgtgcccctcaagagataggcaatgatagtccaaaagtttcagaagcaagaaaggattccatatcaaccgtatatcaacagcaaaataaactcacatctttagaggattgtcaagaatcttctcttttaaagattaacactgatagtaggtgtgcaatccttccaatctttagcttcgagcctgatggaacctggagaattgttgccctaccagtgcagtgtcaaaatcacattaacttagcttctggtgtaaatatggatggtctgcaactccttttccctccacctctcaataggttgaagattgatcaatgtaagggtccaagagtacctcttcctccctatgcttattcagctaaatcatgtactaaaaaaggctttactggttcaaatgtgcgtcgtcgatgtcaaaacaagattgctaacagagcttctaaactgaatgaactccctgacaattcttcttctcaaagttcattagtctgtggccctggcttattccctgatagttctactgcacttaattcatctgataaggacacaagtcattccaaggaagatgacaagtcttcgaagaaaaaatcaagaaaaagggcaagaaagaaagttaaacggagtaagaagaagtcaagtgacagtggttctcctgaatgtgaagttcttactgaggaatatgtctgtgtaagtttgacttctgaaacctgcagcagcaatgatgtggataaggagggtgtgggagaattttcaacttctgatgatcggttagtaaaatctgattgtgaaaggaatggcacatcaatgtgatgcaagcacctaatagttgcacctcttatcttgatcgggaggccaattcaaaagctactgcgcctattgctcaaagttctgctggagaatgcaccacatttgaacctaagaatcagctccaagataggggccctgattttgaagtctttgtttgaggaataaaggacatccaacacgttgagccatgctgttttaatg

SEQ ID NO: 72405 - DNA, 366 bp, Glycine max
  Clone ID: PAT_MRT3847_36393C.1
tatgcgctcaatcaactaatgggtcgtctcggtggccatcacacattctacttcgtttgatgtatatgtgtcgggggaaggccctcatcatcatttggaacattgaccatgtctactcttatacacccactaccactggttacacccttttacaatctctttggcatacccttaccttttaactataaataagctatccatgttcataaatgttacatgctgcatgtgcagtatccctggttccaagtctaactctacgatgaactttactgattaaccaccatctatattgaacgcttctatatgacatcttctcccattcatgattcagcaaatgcagcatgcctacattgaattttaatttac

SEQ ID NO: 72406 - DNA, 1100 bp, Glycine max
  Clone ID: PAT_MRT3847_36394C.1
ttctacggctgcgagaagacgacagaaggggagcattgcatagggagggattattttattccctccattggccgtagcagcagcgttgtgtggcggtgacaaccatggccgactcatctcaagaccttgaccaacttctcgatagtgctttggatgattttcagtccttcaacctcaatcctccccctccaagtggggaagcaactgcgaatagcaagaaggagagtccttctttgccgtcgggggttcaaggattgggcatgggtttacccgatttgagaacgaagaaaaaggggaaacagaaggcttccaaagacagccacgtgtcggaggcgctcaacaagctcagggagcagaccaaagaggctgtgaaggggctggagtctatatccccacccactgccgatgatttaggtaaggatgccttgatggaagattgggtcaaacaatttgagcagcttgctggctctcaggacatggaatctattgtggagaccatgatgcatcaacttctgtccaaggagattcttcatgaaccaatgaaggaaatagcagaaaagtatcctaagtggttggaagagcacaaatccagcttaagcaaagaagaacatgaacgctattcactccaatatgaactgatacgaaatcttaatgaagtttacgaaaatgatcccggaaacttcaacaagattgttgagctcatgcagaaaatgcaagaatgtgggcagccaccaaatgatatcgtccaggagcttgctcccgatttcgatttagccagtcttggccagctatctccagagatgcttgaaactcagccaaattgttccataatgtgaagctatttcttcccttttactatgttgcagctgttggtttacaggtttttaggaatatttaattttcacttgtcagaataaaatagttttatgcgctacaatgttttttcctactttttataaggttatgaggaacccccaagtaaagcctctttttaaggttgtatatgatgagggcttgtctatcaatattttctttggaagctaatagattacgagttgcaaccgaaaaaaaaacaaaattggctttctgattttttgaca

SEQ ID NO: 72407 - DNA, 362 bp, Glycine max
  Clone ID: PAT_MRT3847_36395C.1
ggctcgagagaaacattctcagcaaacgtgttgaaggctatggacgtgctaagaaatgttgctcaacatcaggcttattgaactgcgaagcaatatggctgccatatctataaatgactaccgagcttcttaaggattatatatcggctaaatctagcgtcgataggctggtagtatcgaaactggctctgattcagagacaggacgagtatgaatggttagcaaagacacttatggagagtcatggacaaagagctacttttggatgaagggcacttcaacgcctgatctaacatatgccttggattaaccacatggaataaccagcctgaatatcttgcgattacattaaaacctgcata

SEQ ID NO: 72408 - DNA, 283 bp, Glycine max
  Clone ID: PAT_MRT3847_36396C.1
tttcgttttgttacgagcaagatggcagacatgataaacagcctttgtgggggtgatgaaaaattgacgcgcgaaaggacacacctgctgcggtcttgctgacaaggaaggccaatttggaaaaagatgtctggagagttgaatgtggcatcccttctggatttgcgctcacagatatttgcaatggcatttttcatgagatgctcatcagatatagctgtgcaaacttactgcgccaggctaaagctccaagaatgtaagtacaatccctccaaaaatgttg

SEQ ID NO: 72409 - DNA, 217 bp, Glycine max
  Clone ID: PAT_MRT3847_36397C.1
tttgtgttgttgggttgttggttttttgtgtagcagaaagcgaattgtaacgcagttatagggatgcagacgtagccagatttcaacaggaaaacgctaaagcaaagtgaaaaggctacaggagagagacaccccttaacgaaagagttgtatgtagaaggacgagtagagaactccgttcgttgaactattcactgtttggaaagacaaccagttt

SEQ ID NO: 72410 - DNA, 283 bp, Glycine max
  Clone ID: PAT_MRT3847_36398C.1
tacgcccgcgccccgccgggagaacgctaggccacctttgacagcgaagaagccactccacaacacggccaaggagcgcgaaaccgcgcacacccaaagcaccgggcccacaccgcaaagccaaagtgaaaagcaaacgcccaatgacccggccatccaacgccgcccaacggacacggcggagcgaagagcgagcgacaccaaacggaccgcgccagccgcaagaggcccaacccacccgcacgaccacacgcgcacgcaacacaacccaccgaaaaaggca

SEQ ID NO: 72411 - DNA, 653 bp, Glycine max
  Clone ID: PAT_MRT3847_36399C.1
ggaattatgaaatatggtttacaaggaccagaacactacaagatcgctagtgccacgcccaaatccccaacaccaccccttctcctccaccccccccccaaaaaccctacaaatacccatctcctccacctccaatttacaagtacaaatcaccacccccaccatacaagtacccatctcctccaccaccaccttacaagtacccatctccaccacccccagtgtacaagtacaagtctcctcctccaccagattacaagtacaagtcacctccacctccatacaagtacccttcacctccaccaacacctaagaaaccatacaagtattcatctccacctcccccataccactactaaatagtgatttagtatatcatcccatggatctgatgaagaacgtgtgcaaataaaggagattgatatggacggaagaaacactgaagcaccatatatatacatatatatcagttaatttggtgtcacttttttatatattttataaagttttaaggcactgttcagatctgatccatatgtactctttgtcctctgcatgcattatggttttcgtactgctgggcatgcatgggtttgttatgccaagttatatatattatataatacataatgaataaataccctgaatttatc

SEQ ID NO: 72412 - DNA, 374 bp, Glycine max
  Clone ID: PAT_MRT3847_3639C.1
ttttccactcatttcaactcatttatatttaatccattttttctatcttatctattactcaatatcctacccactttcctttctttatcataattaaactatccaatcaaaaccaatccaataaataaacaaatccattcaataatcaaaaaattaaacatatttattctaaccctctatattaaactataccatttttcaaaaccatatctatcaaccactcatccatctctcctaaagacaatattatttaattcctccaaatataacataaccatattattatatacctccactatcatatatctcttattctattttaaatctatctatccccatatattaatatatatattatccaaacatcccttatt

SEQ ID NO: 72413 - DNA, 278 bp, Glycine max
  Clone ID: PAT_MRT3847_363C.1
gcaaagtgcaaggcgaaagcaataacagtagcaccccggtagatgagtcacagtttagcttgctaaatgttctaataaatgaagtaggaaagggaaaagcagatgacaactttctgagagacacagcaataaatctccttgcagctgggagagacaccattagttcaggtctcagttggtttttctggctggtggcaacacacccatctgtagaatctaagattcttgaagagatccgaaaaaatttaccagcaagagaaggtaattggaagaattta

SEQ ID NO: 72414 - DNA, 742 bp, Glycine max
  unsure (1)..(742): unsure at all n locations
  Clone ID: PAT_MRT3847_36400C.1
tgcataaacagagcaantcagacctcttttttcaccactactttcgtaccaggttctgaatancaagaattgctcagtaataccattaacaagtcaaaagccttgaccacttcnnccaaatctccaaaagaaacacttcccatccaaaaccaggggccagcaacatcttttacctatgaaaactccaagcnttttcaatcaaaatcctggggtataaccactacagnngatgaatcaaccccaattcacaaccncctaatttgtccctaatgttttctagataggaattcaaactactaataaactcacccttatccaaattattagtgttcttaagcttagccttcagttgtgtaaagaactttttgctaacgtcaataatctcagcatcagtttgtgaaatttgccacccaataaggggttttatgagggatgaagaagattcatcttcaacttcaggctttaaattaggtaagataccacctgggttcagaacaattgggtagtccaaaggtgaatcaagtggttttgaattgactgaagcatccttaattacttctagcaaagtcatgattggaattgcaagaaagattcctcttcttcgacggtcacacttgcaatttgaagggtgaagagagatcaaacaaacgtgcagttgatgcggactgatgcggcaactgcgtgcgtctctgccactgcgatgctagttaggcacaaagctgtgtcactgcttctatctctc

SEQ ID NO: 72415 - DNA, 340 bp, Glycine max
  unsure (1)..(340): unsure at all n locations
  Clone ID: PAT_MRT3847_36401C.1
aaatatataatactnnctcatacaagtacatttttaaacatctgtacaccaaaataaataaaaactactcatatacattattccctaaaataaacttaatatcataaatatttacttattacaaaccttttataaaataaccacaattctttatctcatcaaccaaacttttttaagaaacatgacaaactccctaacttaatagtttcataaatttccccctcatcatcacacatttcatttcccaaaatctttattcattaaattacatttcaattacataattacctgttgattagccattatttcatcaccactttgaacacttctttcttttttt

SEQ ID NO: 72416 - DNA, 273 bp, Glycine max
  unsure (1)..(273): unsure at all n locations
  Clone ID: PAT_MRT3847_36402C.1
cgggaaacagggcngacataggggagatgtttatagacaatgccggtgtgcccacaacagngaagaaaaagatggaaaaggaggaccagaacgaggaagcggcatacccaaaggatcacaaggaaacggaggcgccagagagatacagaaaggctgcaaaaacagagggagagaccacagatacgaagacagtggaaccctgtggcccgagctcaattgagaggaaagccaatggactaccaagggagggcaaaaaaaaagggggaccagagg

SEQ ID NO: 72417 - DNA, 605 bp, Glycine max
  Clone ID: PAT_MRT3847_36403C.1
attaacttggtctctttggattttccacactactagtgactatcttttggataattcagtctcgttttttcttcaagggcagaggccaaatgtgttctctgaggaggtataaacagaaatagccaaataaataaataaattatttagctggtaattaattatctgttattgttaacaaatcaatatttgcaagatgggctgcttcactctgcatgtggtgtgcttgattatagagccccagaggtatatatattactagcttttatttatttcttaaacttcaatacaaattcagtttctctgtaataagatatatatgttttgggtattgaaaattaacttgttcattctccaggctgtctttgtttataattgaatccgtttgatcgaaggaggccagtaatgttgatgatttcgatcaattttttcattttgatttcttttgatccaaccttagaattgtcgttgactccttcacttgatgctttgttgactgacaattttttgcatgtttgagattcatttctagatttctttgagttatcttgtttaccttctaattcttattgcataccacaatatccgagaagagaaaaattaatttg

SEQ ID NO: 72418 - DNA, 471 bp, Glycine max
  Clone ID: PAT_MRT3847_36404C.1
ataaaaaaaatacccgcccggtcctctcccagtacccggtaaacccgcacgatgaacgacggcggaagccgccaaagcgacaacgcaaagccactcgatttggaaaacctgagagttgtctccgccgtggggcgcggcgccaagggcgtcgtattcctcgcgaggaccggtgactggtcttcggaagagtgcgtggcgctgaaagtgatctcgaaggcgctgatcattcaaaagaaggcgaagttaaacgacacggaggagtacacgagggtgtcgtttgaagagcaagtgctgcgtcgtttcgaccatccgcttctgcctaagttaagaggggttttcgaaaccgatagggtcgctgggttcgccattgattactgtcacggtggcacgctccgttcgttaaggaagaaacagactgagaaaatgttctctgatgacaccatcaggttttacgctgcggaattggttctc

SEQ ID NO: 72419 - DNA, 269 bp, Glycine max
  unsure (1)..(269): unsure at all n locations
  Clone ID: PAT_MRT3847_36405C.1
cctttttgtctcttgtgcgcatttgcctcggcaccagccacacaccgccacctnccccccaacacccaatactctctagcccatcatggccaacgacgccctcctcatcaaccccgaccggtactcgcagctcggcatcactgtccgtgcctcggactggctgtgggcggttttcgctctgatgacttttgccgatctggtccgttatcgcatggcatttaccattccccgcggccaggncctgttccaccaantcggcnnnnnnatct

SEQ ID NO: 72420 - DNA, 325 bp, Glycine max
  unsure (1)..(325): unsure at all n locations
  Clone ID: PAT_MRT3847_36406C.1
ggganccacaaaaaaacaacttatatttctgttcacgtagataaaaaaaaaaaaaaagggaagagaatttttttttctggcagggtttctataacaaaaggattccccaaatcctaaaagggactaccccaaagcatgggagggtttccatatttacaaactcagctagcaaagttttctcgcagggaatccaacattggaattccaaaaaaaaatctttgttggtttgtcaccgattgacccctaaaaatcacgaggcagcagcttggggtaaaaatatttgatgacggggggctgcaaaatcaaatctaaagccaatttgggg

SEQ ID NO: 72421 - DNA, 469 bp, Glycine max
  Clone ID: PAT_MRT3847_36407C.1
ggattacaacacaccagatctgattctgccaaacaatgctgcctaacacacactgttggttcattaaccaaggaagactctcgttccccatggcgagttcccatattaacagagacataactcatctcatctgcttagaaacgccttggtgagctcgaagagaaggaccacatactgcggtcataaccatatgtcatgccatatgaaaaagaggagctgctgaatgctgttgattatcgtgtggatgctttgtacgcagaactgagcgctgctaagacgtcttaatttgaagcttggtctatacaagatgaactcttggcatacatcgctagtcgcgaaggaagatattcctataaccataaatttgagctgtagaagagatatctgtacacatctgatctgctcgacagaacgatggaaagatatatattacttctctgctggctgtatattgtaactgcacaggact

SEQ ID NO: 72422 - DNA, 275 bp, Glycine max
  Clone ID: PAT_MRT3847_36408C.1
caagaatatactacagaatgaattctgcaatacccagagctagtgctcctacaaaggttcacatctttgtccacaactaacagataaccaaaagctaactcttttctctcccctctcccgctatacaaggcattatgccatatttgctctctcataaaccaattcctctctctaattccaattcggccccttcttatttctcctgttatatgttttccaaacccaaggcccatgattgagttggactggaccgactgaacaatggggcctgatag

SEQ ID NO: 72423 - DNA, 319 bp, Glycine max
  unsure (1)..(319): unsure at all n locations
  Clone ID: PAT_MRT3847_36409C.1
nntcncangtatgtnnatgnannattgnnctcgagntcgagcgctcnnannngctnnagncgatncggctcgaagtncnntantctcnttctgtntancctctgcaacagnagnttnccttaactctnctccttcttttctctgtncanttgtgagattcntccacttncntttttntcntccattggattgtacagattcctagntanaanacnnngatatcaatctctgtaattctatttgatttgtggggtgtntctgtgaatttnttntaaggactgtaaaantcaaaaccttntttttttggggctatnggctn

SEQ ID NO: 72424 - DNA, 382 bp, Glycine max
  Clone ID: PAT_MRT3847_3640C.1
atcaatgactcaacttgcaatgctgaggcggcacaagcttctttgtttaagcatataaacagcatatctgctagtacgcacatgatcatcgagaatgtgttcaagttaacacagcatcattactgttctatgaaggcgagctgcactaagatgctcattacagatagaggatactgagaacccctatctaacgcgttggacggaggctcaaaagagagtcctttcaatgatgaagatcctatatattctccacctgcctcattgatgagggactttgaagcacctgaagctaatgacattcgacagcttttgaaagaccatgattgtctattcctaaaagtcatatatcgtactgaagacatgattatgagttcggtttggg

SEQ ID NO: 72425 - DNA, 471 bp, Glycine max
  Clone ID: PAT_MRT3847_36410C.1
gttcgaatatgttccggaatcgcgcactaaaacgacttattctttgttggccgcgggtgtgcgtgaggtccgatctaaggagcgttatgcacaccaccaatacatagtgaagacaatggccagttacaaagaactgcttgacctgcgcaaccatctcgcctcactgaacttctcgcaaactaacaaaatggaagaccaactgcagcaaaaggactttttttttatgaatgctttccgagcatcttaccaacttttgttttgcgaagctgccgactttccatccgttcatgtcaccgatagtgaacttcgacgctatttgaactgcaacaatttatatttcctctcaacatcggacagacaaaaagcggaaacttcattgtggaaaaataattttggagacaaaagcaaaattgcacagtttatcgtatacaacacaattatgttagtgatccttggttccgttagcttcag

SEQ ID NO: 72426 - DNA, 462 bp, Glycine max
  Clone ID: PAT_MRT3847_36411C.1
ctattggaaccgaacttttttagttcatccacagttaacccgaactcatcgtaacgttgaccaaaattttcaccactgggcggctcacattattgggttcggctgaatgttacccagccctattattgccttaccgggtccaaaaagacacctactatgtactactctatgctcatgaccaagcgatatatcacatatttgtgccaataactacaacgtgcacttggttatatacaggctgctgattattttcatagccaaagaagtgactttggaacgatgatcatactgatattgattacaagcaggaccacctgcctcattttctgcattgatcatatggtaatacagatatctgggattgatagatgatgaaaagggcctcctccacgttctcttagaaagtactacggggtatgggctatcatcgattctataccttggctccaaagtatgctccct

SEQ ID NO: 72427 - DNA, 660 bp, Glycine max
  Clone ID: PAT_MRT3847_36412C.1
aagaagattaacaaatcaaacatttaatttaaaatcgactttacatgacactaaagccagattgtttgcaaacatctcaattgaacccgttaattttctgaatggaaaacactggtggctcatcttgaatgactcatgatgggttcacggaagtcacatttattgggccgggggatttctatagtaagctggaacagttgcagggaagaacatctgacggactccttctgccttaattattggcaagatgattccagatgcactagaaattaatcggactccaatccacatccgtttaggtgaaggaaatggtagcagtaaacggccaacaccatatattgcaacagcaaagaaatggagaaccaggctcaagggccgagggtttaatcctgaaagcaaagagactggcccttccgagaatagacctccaagactaagataatcgaagcaagcttggcgcatttccttccttgctggatcaggtgatgcgcaaaaaaccttgtatagtgctcctgccaacgtatttatagtggatgccacaggcttgcgtaaggtataaaaggattctaggtatttgcaaaagccaagtgcatcattcaggtcacgcaaaggtctcagaagatttcgcagcactactatgtcagataatgccacagtcat

SEQ ID NO: 72428 - DNA, 1617 bp, Glycine max
  Clone ID: PAT_MRT3847_36413C.1
gtccgttctctttatgaagaaccagactctctcaagggaactcgcaagcgttcgtgtggggttttgaggacatttctctctccgaaccctcccatgcatggcctcttccgcattcctttccgtttatctcattatctccgtcatcgtccttttgtcgaacaggtgctgcgcgtttcaatgcggggtttcctacgacacgatcaccgtcctcaacgcgttccctcacgacccacaagccttcactgagggtcttctttatcatggaaatgacaccttatttgagtcaactggcctttatggggagtcatccgtccgtaaagttgctcttcgtactgggaaggttgagaatattcagaagatggatgattctttatttggtgaaggcttagctctcctcaataataggctgttccagctaaattggttgcagaaagatggtttcatatatgagccaaaaaatttaagccaaatagggacatttaaatatgatatgaaagatggttggggtctggcaactgatggaaaagtcttgtttggaagtgatggcagttcaacattgtatcaatttgagcctcaaccatttaaagttgtatcaaaacaagttgtttactacaagggtcatcaagtgcacaatctcaatgaattggaatacataaatggtgaagtttgggccaatgttttgccgactgactgcattgtaagaatctctccccatgatggaagggttcttggatggattctcctccaaaatttgaggaaagaacttgtggaagctggggagattagtgatcgtgatattttgaatgggatagcatgggatggtgagcagaatcgtatttttgtgactggaaaacaatggccaaagctgtatgaaatcaaggtttcacctataaagaaaccaattgaagaagggatcatcgagcaactttgcttgtatgagcctttgaatgggggatttgtgttggctgacccagcccaaagagaatgaggtgaagctgaacataaaatgatggccttaagaggacccaaaaggatgttcgagacaactcacaggttgaaaaaactttatcttatattgggtttaggataaatatcattagattatgtattttggcaaatgatattaataaagtatactccattttccctttttttgccctacccattatagtatcattcttccgtagcaggtcaagatttttaattaaagtaagggagaggtcaataatctttcagtatgatagggttgattttgtaagtaactggaaagtgcaatggaaaaggcaatttgagatgttatgtgttgcaaaagaatggaaatacaagcaaaacaaaaagaaagtatggatggctttagtggttcaatttgaggtgtcatcacaagttaagaattggttcaccagacagagatttgtagatactatattgagtacactgtattatgtatttaagatggtggcgtagttaggaaaggatataaacattcaaagtttaatagattgattaagtgttttctagagatgttcttcacctttttcggctgtttaatgtgtattgaatataaatattttcccgcttaagattcttttcagaagacggacatttatttttattctc

SEQ ID NO: 72429 - DNA, 215 bp, Glycine max
  Clone ID: PAT_MRT3847_36414C.1
tttttttttttgcatacactttcacttttttcaaccacacttaaaatttatttacagggttgcatttcatatatacaccactaaaaaaaacattttacaaaacaatttcatatccttctaaacatggacactcttcctaaaaattgtatttcctttccctataaaaacaaacacccatctcttcaataattctttaccaacacctcttttttctt

SEQ ID NO: 72430 - DNA, 462 bp, Glycine max
  unsure (1)..(462): unsure at all n locations
  Clone ID: PAT_MRT3847_36415C.1
ttttnnnggntgggttagagtttgcgcagtgcaaatattgctgcctccttgtgggatctactaccggacagttttgagctagtgctctggtatctcttgatgtgaaattcgaacgaacgtgatggtaatgaacctctattggttcaaagtccaacaagaacaactccggggaaatgcccattgaccccactcctaatatacgtggcagacatcgtggattgccaccccaatttcaaactccgtgccatcaaggcgattgcccaagttaaacgtagtagccagatagttctaaaagtccagagccggagtatcgtccggactggggtagttttataacgcccaaagaaaacaaaccgcaccaacaccgaacgagaaatcaatcgctgttcgtgtcatcgggactttttcgaaaattgtataaacacatcgtgaagaacctttcgtaataaaaaggatccaaag

SEQ ID NO: 72431 - DNA, 302 bp, Glycine max
  unsure (1)..(302): unsure at all n locations
  Clone ID: PAT_MRT3847_36416C.1
ggaacctttgcattcgattcattcaggattgagcaggtgcgttgtggaagcagagaccgaaatagttcgagatggggcgtagagaagcgaggctgctcgtgagtcaactggtangaaagggtcggaggaagcagcttgcaaccaaggctgcggccgaagtctgcgggaggaggtggtggtgtgaagagggcctcatcgttatcgcccggaaactgttgctcttcgtgaaattggggagcaccgggggagccggcatctcctagtcaggaagcttcctttccagaggttggttcgggaaattg

SEQ ID NO: 72432 - DNA, 297 bp, Glycine max
  Clone ID: PAT_MRT3847_36417C.1
aaaagaaaaacgttggctttagcattcccttcactaatttgtatcttctagaccaaaataaaatgtatgtgcatgcaatatcatgtcataataccatacatagaaattatgattttccaagccgcacataacttcgttacaaatatacacaatgctaactttggtcatctgtgatccacagttttgatttcagtggtaaacttttaagtgcatctttggagattaccttgaacttgaacttaaggaatcgtatgcagttaagcacatttcacaataacgttagaacctcctttttaa

SEQ ID NO: 72433 - DNA, 411 bp, Glycine max
  Clone ID: PAT_MRT3847_36418C.1
gtggaggcttgtcttggctgtttcttcgtctccatggtgttcggaggtgggcggctttgacggagaagcaactgcagctcaggcgtggacgggatgtttcgtcttaactcactttctgcgttggcagagctggcagtgggctctcgatggtaccatggaggatcacagcccacccagatcaggcgacggctaatgatggtggcttttcttggagcatctgcagtaactgcaagtactggtctgttgtggaaaagggcccttgcagaatctccaccatctgcaaacaacatcaagagtgaacttggagataaagggaagagtaaagaggaaggggaagattgtaatgctgaaaaaaaggctgcaggtgtttgacttgagccgtatccagaagagaaaaagaagaaacgttct

SEQ ID NO: 72434 - DNA, 973 bp, Glycine max
  Clone ID: PAT_MRT3847_36419C.1
agccaccttcacgggcttcgcaatcctgagtcacaagcttcgccgcacttatcggactgcctccccacttcaccgccgcgccggcttcaggttcctcggaggaattcccaggtcgactcgcgcttccggggccgggccagccgccccttccgcatccactttcactggaatcacaatcctgaaacaaaaacatcttagcatttaacatactactagacaacatgaccaccacattggaaagaggtttctcggaagagcaagaagctctggtggtgaagtcatggaatgtcatgaagaagaattctggagagttgggtctcaagtttttcttgaaaatatttgagattgctccatcagctcagaaattgttctcattcttgagagattcaacggttcctttggagcaaaatcccaagctcaagccccatgccgtgtctgtctttgtaatgacctgtgattcagcagttcagctgcggaaggccgggaaagtcactgtcagagaatcaaacttgaaaaaattaggtgctacccattttagaaccggcgtagcaaacgagcatttcgaggtgacaaagtttgcacttttggagaccataaaagaagctgtaccagaaatgtggtcaccggctatgaagaatgcatggggagaagcttatgatcagctggtcgatgccattaaatctgaaatgaaaccaccctcctcttagactccagtttaagcagttcctttccttccctctcaattctcaaattgttatattaataaaagtgagaaagtttaggcttgtgcttttattttgtgtgaatgtaatatactttgtgtacgtagacttggctattgggagttgctaggttgggaagtgtttcgcattcaacaattctgtagttgaaggtgattaaatgaattatagctatttgtttctttatactaaaaaaaaaaaaaaaaaaaaaagctcgagactagttctcctcg

SEQ ID NO: 72435 - DNA, 264 bp, Glycine max
  Clone ID: PAT_MRT3847_3641C.1
acgagaagacgacagaaggggatgatagagataaacttctttttttaagaggaaaccaataaacttattccatcttactttgtctatatgaaaaaggttctctcctcttagttttccactcccccacatacaaataaacacaatctgagtgaccaaaactgatctaaaaaatagttgaggcagtatctctaaacctcccaacttcttcgccttgtatcttctcatttgcttcggcttaattaacctatgcctctcgtcctagcg

SEQ ID NO: 72436 - DNA, 400 bp, Glycine max
  Clone ID: PAT_MRT3847_36420C.1
gggaaaccaaaaaggaaatatttccccggatattccacggcctggatggggggaggcttgcaaccccgaaaaaaatcaaaccccccggggggaaaaaaacaaaaaatcccaaaaaaaaggggggcccaaaaatcaaacgggttttacaattttgggggggaaacgggggaggcaccccagcccgggtttttttggaaatttttaaagaaaaaaaaaacattggccacagggggggggatccccgggggctaaccctttatacaaggccttttttgggatatcatagcccccagggcccagggaaaaaagccccccccccccattttttaaacccattaaagcttggggccccaaaagccagggggcccacttgcaacgctcatccccaaggagggaaaag

SEQ ID NO: 72437 - DNA, 1127 bp, Glycine max
  Clone ID: PAT_MRT3847_36421C.1
tccactttcactggaatcacaatcctgaaacaaaaacatcttagcatttaacatactactagacaacatgaccaccacattggaaagaggtttctcggaagagcaagaagctctggtggtgaagtcatggaatgtcatgaagaagaattctggagagttgggtctcaagtttttcttgaaaatatttgagattgctccatcagctcagaaattgttctcattcttgagagattcaacggttcctttggagcaaaatcccaagctcaagccccatgccgtgtctgtctttgtaatggtaagctaaaattaaatactaaaccaaattccagttaaaccattataaccataaattatagaagccatgtctcttaattggtaatatcaatttattttgtttttgtcattgcagacctgtgattcagcagttcagctgcggaaggccgggaaagtcactgtcagagaatcaaacttgaaaaaattaggtgctacccattttagaaccggcgtagcaaacgagcatttcgaggtatataaacatcttagtatgagtataattgccaaattaaacattgtttattagcaagggtcaatttatagattgaaaatgacatttgctcataactatttatatcaattgttacattcaaaaatataattggcataaataagtgatggcaagacttgtatttatttgtgttttttaactacactttggagggtaattctctagaagcatgatgtatatagtttattgtttggttttaaggtgacaaagtttgcactgttggagaccataaaagaagctgtaccagaaatgtggtcaccggctatgaagaatgcatggggagaagcttatgatcagctggtcgatgccattaaatctgaaatgaaaccaccctcctcttagactccagtttaagcagttcctttccttccctctcaattctcaaattgttatattaataaaagtgagaaagtttaggcttgtgcttttattttgtgtgaatgtaatatactttgtgtacgtagacttggctattgggagttgctaggttgggaagtgtttcgcattcaacaattctgtagttgaaggtgattaaatgaattatagctatttgtttctttat

SEQ ID NO: 72438 - DNA, 574 bp, Glycine max
  Clone ID: PAT_MRT3847_36422C.1
agcccacgcgtccggtgagtgaaaagttacaccaacaaacccgtgaaagcaaagcacccattagaccctttgcctaaccgactcactcccatggaatccgatctaaacgacgccgttttccccgaagaagatctcgacgacgacgacgacgacgacgatgaaactccagaggacgaagaggactacgacgacgaaaccgaaccccctcccttcgtcctcgccgtcgtagcagtcgcgccgcccgcttccaccgcctccgaaacactcgacaccacgttgatcccgatctccgccgtcgccgattcctcactgaaaccactgcacccggagctaatcgaggagaaaaaagcgctggacgattcgcggcgactgttccagcgtctgtggacggacgaggacgagatcgggctcttgcaggggtttctggactacacggcgcagcgaggatcctctcaccacagcgataccgccttgttctacgaccaaatcaagtcgaagctccaactcggcttcaacaagaaccagctcgtcgagaagctccgaaggctgaagagaagtaccgcaacgtcgtcac

SEQ ID NO: 72439 - DNA, 492 bp, Glycine max
  Clone ID: PAT_MRT3847_36423C.1
gtcaaaagagacactaacaaaacaaaccccgtgaaagcaaagcaccccaccgcgctctttgcctaaccgactcactcccatggaatccgatctaaacgacgccgtttttcccgaagaagatctcgacgacgacgacgaaactccagaggatgaagaggaggaggaggacgacgacgtcttagatgacgatgaaaccgaaccccctccctccgtcatcgccgtcgcgccgcccgcttcccaaacgctcgacaccgcgttaattccgatctcctccgtcgcggattcctcgccgaaaccgctgcgcacggagctaatcgaggagaaaaaagcgctggacgattcgcggcgactgttccagcgtctgtggacagacgaggacgagatcgggctcttgcagggttttctggagtacacggcgcagcgaggatcctctcaccacaacgacaccgccctgttctacgaccaaatcaagtcgaagctccaactcggctt

SEQ ID NO: 72440 - DNA, 1602 bp, Glycine max
  Clone ID: PAT_MRT3847_36424C.1
ggctcgaggtggtctcatggattctcctcctctatatcctacttagtcaacagctgaggagcagggcatatccatggcagaaccaccaaagggggatgaggaggacggcggagctgctttcgttctccaatccaaaggtgaatggtggcatgcggggtttcacttaacgaccgcaattgttggacccacgatactaaccctgccatacgcgttcaggggattggggtggggacttggatttatgtgcttgacggtgatggggatcgtcaccttctactcttacttcctcatgtccaaagtgctcgatcactgcgaaaaatccggtcgccggcatattcgtttccgggaactagccgctgacgtcttagggtccggttggatgttctattttgtaatctttattcaaacggcaatcaacactggcgttggcgtaggggcaatcttgcttgcgggggaatgccttcagatcatgtactccaatatctcacctcatggacccctcaaattgtaccactttatagcaatggtgacagtgataatgatagttttatctcagcttccttcttttcattccctgcgacacatcaacttgtgttcactacttttcgccctgggctacaccatcctggtggttggtgcctgtattcatgcaggtacatcagaaaatgcccctccaagggactattccttagaacctaagaagtctgcaagggccttcagtgccttcacttccatgtccatacttgcagcaatatttgggaatggcatattgcccgagatacaagcaactctagcaccccctgccactgggaagatggtaaaaggcctttttatgtgctattccgttatttttgtaacattctactctgctgcagtttctgggtattgggtatttggaaacaaatccaactcaaacattttgaagagtctgctgccagatagtggacctcctttggctccaacttgggttcttggacttgcaatcatctttgttcttcttcaactctttgccattggtctggtttattctcaagttgcttatgagataatggagaagaaatcagctgatgtgaggcaggggatgttttccaaaagaaatctcattcctcgcataattctccgaacaatttacatgatattctgtggggttttggcagccatgctaccattttttggagacattaacggtgtggttggtgctattggtttcatccctctagatttcattttgcctatgcttctatacaacatggaatacaagcctccaaaatcatccttcacttactggatcaacgtctcaattatggtgatattcacgggtgctggaatgatgggtgcattctcttccataaggaaattggttcttgatgccaaccaatttaagttgtttagtagtgatgttgtggattaacctaatgcatacataaatcatcaatgcagatagataaaagcactgttcccagcattggtgatgtactggagttcatggtgggtttgtgtatacgctctagattggtttttcaaaacctggaaaaaaaatttataaaaaaaagcagttcttcattgcaaaaagaatagaaaaagctcaaaatgcaattatct

SEQ ID NO: 72441 - DNA, 1259 bp, Glycine max
  Clone ID: PAT_MRT3847_36425C.1
ataaagacatctcaaattttatttctatcacctttttatctttaactcctttcctttccaatttccatttcttgaacccaaacaatcgcataaattaagttgtatgtacaatgcagtatctgcatgcccataaaatcaaatatttccccgtgggcatcacaaacgacccagagctgatatttcaaatagcaaatcaaacatgtttgttgtcctgtgcacacacgcatgcagctatatatctagtatctctttgaccccattttccttaaggacgaaactctggggaactgatcaagactgggcctgggtggctggtggttgttatgcgcactcgcagcattctctgacaccttccacaccttcaccgacttatccaaactcccactatacagaatccacctcctctcattacacatcgcttcaggatccctctccgccgcgagacacttaacaggcccagtgtgccccgacagaatattcacgcacgtgtggtcgtcgttcagcgacctcttccacacgcatatcgccatgtcagcagacccgctgaacaccaaactccccgccgtagctaagcacagcaccgccagcttgtggcccctcaaaacccctttatgctccaaattcgtttcccgaacccaataattcaccaacccgtcagaggaacccgcgtatagcacattcccctcttcgtttatcgctaacgccgtcaccgcacactcctgcttcaacagcgtctgcgaaaacaaatgcttcgtccctttcccttgaacctcgcgccgccaaatcttaacggtgccgtcagcggagcccgtgaagaccatcccatccaaccccacaacaagcgcgttaacggcgtcgtcatgcgccgtgacggactccaaacacttgaaattcgacgttcgccacaccttaaaggtcttatcccacgaggcggagtatatgagagaatgatcctccgttaaactcagacacgaaatagcgtcgtagtgtttgatccatattaaattacggcgtcgtctcacttccacgtagttgctcggtttcatggaacatttgatgtagtttctcaacgttggaagcgtggcgacgcgcttgtgttgttggtcgtttttccccgacactttccaaaccctgatccttccgtcttggtgtcccgtgaggattttctctccggcgatcacaatggctttgaccaaaccgctattggatttgaagcccgcgaactcctcctggttcttccacacgcgcggacgcgtggg

SEQ ID NO: 72442 - DNA, 382 bp, Glycine max
  Clone ID: PAT_MRT3847_36426C.1
cggccgtccgcagcagacgacacaaccaacatgaagaccgccgtgtttgtcgcgctctgcgccctcgccgccgccggccaaggcgccgagctcaacactctgctgaccaagtacagcctgatcccggatccgttcggcctcacggccttcttccacatgccccgcaccctggaggccgccgccaaggacaagtgggccgaggtcagcagcaacctgagcgccaagggcgtgtcggtcttgtgcatggacggcgactaccgcgtctgcctgctgttcgactccctgggcagcgtggccggcatccaagtttcgcactccgtctccgacctgaaaaagaccaaggttccccaggacttcagcaccatccctgactggacgcgcc

SEQ ID NO: 72443 - DNA, 181 bp, Glycine max
  Clone ID: PAT_MRT3847_36427C.1
tgctcactagtcgtgagccgccctttttttttttttatggagggtttttgacatatgaagagcatgctccacaagacttattgaaccagaatcctaaacaatgctgcaccctgtgtaacagtaaagttatataaaacctaagaccctaaggggaactcgccaaaaaaaagactcaaaacac

SEQ ID NO: 72444 - DNA, 517 bp, Glycine max
  Clone ID: PAT_MRT3847_36428C.1
tgttttttttggttctgttttctaagttctttgatccggaactttccctgtgtgcggtagaggaccaagtcagatcctttgagatacatcttcgcggatgagatacggttgaccactgggggtgctatagctgctctggcccaccacaggagaccacctttagcggtgccatgtactcaccagttccacaagggaaaagatgcttctagtgtctccaaccgccaacatggaacagccgtggcaatcccaattcctgaacattgggacgatgcacaaaagcggttggagtggctgtcataggggggtggagagaaaagcccctcgaactgcattctcggatatgcatactcatatgatgcgtactcgcagcccctgtgccacttatggcgaatgattactcaattttcttgaaggaacatgaggattttgatacatgccgtgttgccctggtgactgataatatctattagtgctattgctcctgctgcttttttgaatctgtagccaaaaggctgga

SEQ ID NO: 72445 - DNA, 233 bp, Glycine max
  Clone ID: PAT_MRT3847_36429C.1
acaatctattgttgcttccatcttcaatgtccttcgcatcattttttcttatcttcctttgttaccatgcacttcctgctcttgctgatccaagagccacagaggtagcagtgttgtgcaccaacacaacatctccaatgcctcagagacaagctttcttaacaaacttctatgatgccttggaagccttaaccgctttggttacaaggcaaaagtatgcttttgttgttaaa

SEQ ID NO: 72446 - DNA, 657 bp, Glycine max
  unsure (1)..(657): unsure at all n locations
  Clone ID: PAT_MRT3847_3642C.1
tacgcgagaagacgacagaaggggccccacaaaacaaaccatccatcacgtccgaacggcgcccgatcaaatctcccattattcttcaaattctctccaacgttataaaccaccttcaatcaacgttatatatatatcggttattattaattttattttcacgtaatgggcaactacgtttcatgcactttggcgcctcctttgatgaagaactccaaggccacgagggtcatcattcccaccggtgaagtgaagcaattcagagagatcgtgaaggctgcggagctcatgctcgaacaccccagctatttcctcgttaattctcgttctttgcatataggaagaagattctctgctctcggtgctgatgaagagttggagtctggcaacgtgtatattttcttcccaatgaggagagtgaactccgttgtcacccccaccgacatggcggtactctttttggccgccaactccgccgccaagagattgtctggtggaaaggcacgtgttctcccggacaactgcgacggcggagcatggcaacataaagaagagagttcaaaagatggaagtttaagtgagattccaaggttgagtttggaaggagtcgagtcagggtttcagtgtaggntaaattattgaaagaccaggcacact

SEQ ID NO: 72447 - DNA, 314 bp, Glycine max
  Clone ID: PAT_MRT3847_36430C.1
tgagattctgggggctttggtatggatgcgtcctctttctgaagaggcgaccgccgtgttggggtcaacgagttctatctcttgcatggtttggttcatgaacggtaaacaattgtccacaaggcaaaacgctgctttggttcttaaggaaatgcatgttgaggcgttggtgaagtgtgtagatgttgttgaggctttggttaacatgatgtctgagccttcgtgggaatggttccaccaagtctggtttgtcaacgagtttcaacctgtggaggcgattctacatgtgagggcgatcctttgaaaggtttgtt

SEQ ID NO: 72448 - DNA, 1494 bp, Glycine max
  Clone ID: PAT_MRT3847_36431C.1
cccacgcgtccgatttagttccccaaataaacaataccaatgttgacaagagtgtagcagccattcatgcaacggtgttcagctgtcttcgaaggcgtgaggttggggaacaactatatgatcctgttagaaatactgtgactgttgtttatgaggaatatagaaatcaatgtgcagccaattctttgagctcgaaaggaatgtttcaactgatccaaagaaaaggttcttcaaggaatctgatggctcttgttaatgatgatggatctgtggcaaaggcttggcctgttaatttagttgactgtaatgggaagcctgtatggtgccatggacctgagaatggagttggacatccaatgtatggtcccttaagaattggaaaggcagaacctgtcaatcttcagtttggtttttatgggatcagtgcatggccaagtgatggtggcactagtcgtgctggaagtgttgatgagtctagagctgatgggactgatactggtagtagatatgtatcctcttgctgtagctcgccaaggatgtcggatgttgctgcaaaggagctcaaggaagatttctcagtgcatggtagtgatgaagagattgacgatcaaccagaggtgggcagtgatgaggattttagtgatgatggcggcaaacatgcccttgaagaggtaggatcagttgatgaggaatcaacaaaatccgacgaagagtatgatgatcttgcgatgcaagacgtgctggaaactggatattggtcagatgatgaagagtataggatcagggtagatggtgtttccggtgaacttggaactaaaatgcatggggggtacaagtatcgtcggaacctggatattttccttagaagtagaagcgagttggcagagccactatgttcttattcttctttgctcgtggaaaagaatgagaggaaatccaaattaagaacacgttctcttagtattcctgcattaggaaagcatcgttcagcagtgaatgatcccatcctttctggtgctcctcagaggtagcactacctactttccctcttcaacaatactcgtaatgatcaaatctttttagtgttttttttggttgactatatcttacgatgtcccatgtgtatatagtagagcgttcaaaaccttactggtcttgtagttatttcgttgatttgatatggatgaatcaatgttttgacatttttctacagatgtatagaaagaaatgcaacatcgcccttatctcttgaatcaataaaaaaaaaaacaaaaaaaaaaaaaaaaaaaaaaaaaaaaaaaaaaaaagtaaaggaaaatatacaaaaaaaaaaaaaatgaatagaattaaaaaagggacacaaaactattgaaaaaaaaaaagggggggcccttttaagggaccaaggtttacttccccgggcttccaacttaatactttttttttggggcccccaaaattaatttccggggccgggttttaacaccttggggt

SEQ ID NO: 72449 - DNA, 377 bp, Glycine max
  Clone ID: PAT_MRT3847_36432C.1
ttcacacgtgcggtgaaaatcgctgcatacgacgctgcatacaatggatcaaaagcccaaatgctaatgccaatgctgctgagtttttcggcaaggcttacggacggactgggctaatgaacctggctaaccatggccccgcacatatttttccatcgatgtttcgctaggtgtggtacgaggtatgcggcccgatatagaaccctgtttacgggtctggctgcttgagatggtccgtttgctgagccctctgtcaagacgtcgtggaaggcgcattgaaaggcgcactgactacgccagtcacgtgtagagccccgggtaccccgctgaaggcatccgtcatggcttacgtgatacacgacgtgtactaagacgag

SEQ ID NO: 72450 - DNA, 963 bp, Glycine max
  Clone ID: PAT_MRT3847_36433C.1
cccgcgtccgcaaagtcgaaaagagattcgaatccaaggaagggaaaggaaagtaagagaagagaagaatggccgaagagggacaagtgattggtgtccacagcgtggaggagtgggaggaacatctcaagaagggacaagagtccaagaaattggtcattacccccttaacttgctcttgcatttcgttttgccttttaccgtcttgatttgcattagtataggcgcactagggtttccacatttggaaattcttttatcgtttgttgcctcaatgagcgattttgttctatcaatgtcaactctagattcttttgtggcatatatatttgttaattttgtatctggacggtgtggttgtgtgcgatgctaatgctatgctatgatgcggaaaatttcaaaataatcgacacagaatcatatgcttttacccattgatggatgaacttaaagttagacgtggtacagaaaatacgttattgctttttaaaaaatagtggacaagtgttgaattgcatcttattattctccgttggaattctgggtggtgctgcatcgctttcagattttctagatgagagagtagggctttgtctataatggtatggtgactatgtttcttcatggaaaagatatccctggattatcttttcatgtaaaaacactgttggttggttagttatctttgtgtagttgtatgcatcccttgtgccccgtcccttctctgcaaattaccctctctgctagtcccattacccatacgcattttattcttgccctgttgcctcctttgtttggattattaacgtgtgttggaatatgataacattttgctgcttattagctattgtaactaattgtaacctttttatagccagtgttttttatagtgatctaacctgaagttacctgaattttcaattcttagtgatactgggatgatatcttcaatgaattgaactg

SEQ ID NO: 72451 - DNA, 239 bp, Glycine max
  unsure (1)..(239): unsure at all n locations
  Clone ID: PAT_MRT3847_36434C.1
agaaccccagctccagntacctccaacccaacacacccatttattactctaaacattactagtaaaattaatngaaagaagatattcttcttcctaataacataccaatnccatttcanagattgattctccacaccagcgncaaaanaattaagttccaaaganagacatcttcacttactatgctctctgctgcaatagtagggcaaaacgatcatgtgttctagatttcgaaatcc

SEQ ID NO: 72452 - DNA, 425 bp, Glycine max
  Clone ID: PAT_MRT3847_36435C.1
accactttaaccactaatgtcactggctttagcttcttctgtatccctcccatttgggcaataactggctctggtcagtttttaactggttccaacactcgcggaacttgaatgtctctacttccaattttcacgtggctaaatggatagactctgattctgagccgcttttagaaccttccattgtccaagaagtttcattccacgacgacatcgaataataagaattccttgacgaatttgaatactatgaagacgacggtgacggtgacgaatactatgaggaagaagaggaatacgatgagggggctggtgagccgtatgtaagtgtctggcggaaaattagactcttaaatttgtgatcgttgcacgtatcgaaagcaggtgatgggcgcgccagtggcggtatctcccctaccggaacg

SEQ ID NO: 72453 - DNA, 133 bp, Glycine max
  Clone ID: PAT_MRT3847_36436C.1
tgggcctgcccaagatattgagaacctaataacgagccaaagagagtcctactttgtggatgctcaccctcagcagaaagaggaggtgaaccagggaagaaagggcccttcgccttcactcttgagggccttg

SEQ ID NO: 72454 - DNA, 1123 bp, Glycine max
  unsure (1)..(1123): unsure at all n locations
  Clone ID: PAT_MRT3847_36437C.1
gattanattcttatggggcgtatttagggggaggaggatcaatcattcagattctgcggaaaagattagtattcccagtttgaatgtaatgccagatgaggagaaatcctcaactgctgttttgactatgcctgaaacacattgatcgccacagtgcaaggatgaagaatcaagtgattgtgataaagcatgcaatgcacttctcccatccacttccatagaccaacatcagactactggaagtaggaatgttgatgtcaatgaccagacacatttgggttcacaagtaagcttagagaagctagatagtaggattgactcaaaatctacatcaagggttccaacaagcagtactctgttatgtcaagaaatgaactccactggttcatccctgaaagttagtgtacttgaacaagaacagtgcagagagtctaaacctcctgaagcaatgggaaggagtgcaactagtaggattgtggaaacaaaaactgattctgatatttctgtcaagcaagagaacactgtgtctttgtttccttctgaaaaaggtgctgcaagcaatattgataaagataaaatttcagagaaaatgaacagtgatgaagaccagcagaggcctaagaagaaacaagaagaggattgtccgtatattgatttggaggcaaatattgaaaatcaagaaacagttgctgctagcaattttagtagggatcaaaattcagtaacaattgttgttgatgaagatcagcaaaggcccaagaggaaacagaaagatgatcattatattgacttggaggcaacacttgaagatcaagaaacaggtgctgtaaccaatatatgtgaggataaaacttcagaaaaaatggacgttgaggaagattggcaatggcttaagaggaaacagaaagctgatcactatattgacttggaggcaacttttcatgaagacccaagtgaagaagggatcaactgcgcgctaccttatgataaagttcagcatgtagatctttctgacacaattatgcagggttctggtatcagttgtcagaaaataccttggaatgagggaaatgctcagttagaagacagagaaagttctggcaagaagctaaagacaattttc

SEQ ID NO: 72455 - DNA, 336 bp, Glycine max
  unsure (1)..(336): unsure at all n locations
  Clone ID: PAT_MRT3847_36438C.1
aatataaaacttttctcaccaacttttacttatatattcaacattccttncccgcaatatcgggcgtttcttatatttacccattcaccacnaaacatttttccataatttttaacatctaataacctccaatccccactaatttttactcctacactccccctgactaatcaaccacctcctcacacttataaccctttttctgactccgattttcatgcaacttggtctttacaatcacactcatatctgatacaaattaatatattacgcttctaaataaaactcctaaacaatctttttttttaaacatatataaaatacaactttttactt

SEQ ID NO: 72456 - DNA, 450 bp, Glycine max
  Clone ID: PAT_MRT3847_36439C.1
cccacgcgtccgcttaatgtcaagtggtggattccctacatttgatgaacacatgactgttttccaaagggatagacttaaagaccactatggtgtcacttcattagtcttcaactacacattatctgcaatgccctaactgatattgaacacctatctctctgaaaccatttgatgctaaatggttcacctacaccctgactaatgacactacctattctttgtgtcgaacctttataccaatgacacagtggatgaaagcttaatgatggcaattgctatcattgaccccaacttcctcatgaccatcattattgaagcaggaattgaggacatattcatgttgaactcacgctattttaggctcacacatgatatcccaaagcctagtctggcgctacaccatgacatacatcattttccacttctgctcactacatggtcagtacc

SEQ ID NO: 72457 - DNA, 1349 bp, Glycine max
  Clone ID: PAT_MRT3847_3643C.1
ggtaggtccatttatagcttctatacacgccttcaattctgaggtggtataagagagtgttacatttttcatgctggcaaatgtaagaaagcactttgatggtttgtttctaaacagttttattgaattattttcttttgacatctatgaacaatacatatactaggcacatgattcaggttcaattcatgggaatactaaaacacatcctgctaagattgctttatgagaatcattgcgatgatgtaatttctgcagtctttccatggatactactttccttatcaattttattgtattaattctagatgttccaaatagtctatcttcactttaaatagttgaattagcaaatatcaagaaagatataatagctccctacaggcatctagtaggcaccataccaagagccgaatcagcttcatttgaaaaacgtaccacatgtatatggtatacaggaaagatggaggagccattcgccaagaactgtactacctcctcaaagatgagaatgatgttcatttcacatttgggagcgaaatgggattaaaacatggcctcaggcaagccagggcatgcgcctttccccacctcaaatcgccgttttggcctggagccgaatcggctcgagtgtgatcatcagtgatgaaattgagctaccctttaagatgacttggactactctgacttttccataattgtccatgcctctgacgccatgaagaaaggctacttgctgaatctcctttgttcaatcaagcgtgatgagtggaacaagatgtgggaaagattgaagcagattacacaccactttgagtatcagtatccatcccaacctggggatgcagtgaatatgatatggctgcaagttgaacgtaagatatcttcgataaggttcaatttgcacaggaagaacagataccagagatcttagcttcgtgttaagactaactgaaatgctgagattctgttacattagaatctgctgaccttggtcagtcaagttcaacatgccagtggaagacacaaacctactctcatgttttgccactagaaagcttctttttcttccttttaattttttctttttgctgaataacatattgttgatgaaaaatagattttatattttaaaaaggaagcattcctcattattaggcaagccagggcatggccatgtcaaaattctgcctcaacattgcaggggataccccatcgtcgaatcgcctctttgatgccatagtaagccactgtgttcctgtgatcataagtgatgaaattgagctaccctttgaagatgtcttagactactcagacttttccatatttgtccgtgcctctgactctat

SEQ ID NO: 72458 - DNA, 762 bp, Glycine max
  Clone ID: PAT_MRT3847_36440C.1
cccacgcgtccggaatattctgtggaagagacaggtggtgggcataaggcatcaaaactttcagtgtcagacagacaggttatgcattctggagggaataggagcagttcttcagaaatttctgcttcctcaatgaaaggctgtcacactgagagagatgccattgatcaaggtactgctcctaatcgaagtaaagttgatgaaatttcaaaaaggaaacagcagcgtgaagctgttgatgctattctttactcatctttgatatctgcaaagaaggatgagacattaccaaaagtttctgctaaaaggcctttttcctcatttgttgctagtgggagtactaagccgcccaagacaaaaagtgcaagacaagatcaatgagcatgggatcaaggaaggaacaatattgttctgaggactaaggctgaagtttttcatggttcttgtgatcaccatcttggcttaccttggatgaagatttttttgcttctcatcagatgatttcccatcaatgatataatggtgagtggaatttcaattcaagcggagaccagtgaaactttaaagtgatttcatgcaataagtatttgtatatatagcggaagatttgtgtaaatgaaagaaattgtttataatggtttttcttttttgggggtgaaaaaaggaacaaatggctgcattatacaacttattttctctttctttcccgatggattaatttgctgagtttctcaaatccaactgcaagtaacccatttgttg

SEQ ID NO: 72459 - DNA, 110 bp, Glycine max
  Clone ID: PAT_MRT3847_36441C.1
atgaaaagaaaggcttgttagtagtgctacgagttaggtgccatagaatgccaggctcagactaccataatttcctttcctaattaaatctgggataggtgtacaataca

SEQ ID NO: 72460 - DNA, 272 bp, Glycine max
  unsure (1)..(272): unsure at all n locations
  Clone ID: PAT_MRT3847_36442C.1
cnactgcttcagctaatgacatggagaagtccgcaccatcactggccagcaaaagcaacaagatatanaccttaatttggatcttcctgaagagtgaaatcaatcattttttccccaaaagnaataatgcnagtgtaaagatgagttttagttcagtgaattgtaggcctntagcactnaanaagtgaggaaagcacggttaagaaacntttagttgttttcattttctgtttccactttngttacaagaatattggtgtgtgtttacttna

SEQ ID NO: 72461 - DNA, 477 bp, Glycine max
  Clone ID: PAT_MRT3847_36443C.1
cctactcgtccgcacgcatccaagcccagttatgggtcgctccaacaactttggttcggtaattatgtctggatctgctggaaactacatgtcccaatattatcagcagcagcatcaacaagtccacatcgatgcattgtcctctttgggtttcctctcttcttcgtcttcaaggaatgccacttttcctcaagagactgccttgttaagtgactatgggcttcttcaagatgttgtttcttcacatatgttgaaagaagattagatgattacttcattactgtttttatgtgatttcttgttattagtttctgtaggagaatatagatgaggactttgttgctgcactgggatatttaagttttagttttcattctcatcatgatcacacttgtaaaacccacgttatctttttgcacatatactatataataggccttggcatgaaaattattgtaacatgatggattttgatcc

SEQ ID NO: 72462 - DNA, 389 bp, Glycine max
  Clone ID: PAT_MRT3847_36444C.1
gctgcgtgaagacaaccgaaaggggaaggtagagagattcttgatggagccagagtgagaggatacagattaagaagaaggattaagatttaaaatcggaagaggaacaataggaagggaagggagaaaactctatttattagattatataaagagattgcatgatcgatggataaaccctagactattcatcggagcaagcaggctatggggctcacttgacgacgccttagatgcttgttgcagttgaagcgtcgtggaatctgaattggttcctgctactgttgctctacgttatcgtagtggacattgaggttcactatgtcgtaaaaggcaccgcttgcaagtacttgttagtcgacgccaatttcgaaggggaccatcacacc

SEQ ID NO: 72463 - DNA, 461 bp, Glycine max
  unsure (1)..(461): unsure at all n locations
  Clone ID: PAT_MRT3847_36445C.1
atcacaggttgccgcacctnataatcggaaacaacacgctatctttacccgangncacgagtctntcagaatctttctacttctttgtgcacgattgcgtacgggaaagaaaagcactctctgtgctggccacagacttcgagaatcattgtcttttacactcttggtcaatttgctgaacactgttctatacgatataggacttcgtgtgagacttagacttctcctgactctttctcagttctctgcataattccaagtacaagctggtgaaatcttggattagtgctcccactctcctatacggtataggacttcgtgggacgacttggctatacctctcctttctttcactctcttcttctcactgatccgcattgacgctcaaagtggtcttatgtgaaaaacacttgagcagacgtgcaacatgttgcttaggtaatcttctctggagacaacag

SEQ ID NO: 72464 - DNA, 190 bp, Glycine max
  unsure (1)..(190): unsure at all n locations
  Clone ID: PAT_MRT3847_36446C.1
gcgtacgcccacgcgtncgcccacgcgttcgcccacgcgttcgcccacgcgtccgcccacgcgtccgacgggttgctgtatctagttgagaaaagaaacaagtataagtagttgaagagatgtgatcactaacaacactgccaatgggcattgccgcgatcacttgttcagaaacaatacatggcgcatt

SEQ ID NO: 72465 - DNA, 419 bp, Glycine max
  Clone ID: PAT_MRT3847_36447C.1
ttattttttatagttgtcatcatgagcaacttaacatgtccctcccaaacgggatttgcaacagaacactgatggactctgggctgctatgctaacatacaggtttgtcaccaagggcttccaacaacttactccccattttacaccttttttaagtgcatcgaggaaggccatgacattttttttgagaagaacattcattggcaacttaacttgcgtgctcagatacatggtcaacgaaattggaacatcttaaagtgtggttcaaaatgttcctcactacctagaatgaacggggcccgctcacctgtgtgtaaggttatcttgccaacgaactttcttaggcgccggatacaatcaactgaggatttaacccgaaaattcctttgtttttttggctaaagccaccaatgcctttt

SEQ ID NO: 72466 - DNA, 549 bp, Glycine max
  Clone ID: PAT_MRT3847_36448C.1
caaagggttacaaatctccaaactttattataaataaaatagtgttttcttttcaaacataaaaaaatgccacatggttgctctttattgccctccctgaggggggaaggctgcatagattaaggcaaacacttaaagaaaaggcacattgaaaagggcctcagtgggaatcaaaggaaaattcatgggcgggggctccggagggattaaacaatctgttatgtgcggtaccccgctttttacatcaatcattctttccatttcattaaataaaatacagattattggaactatacaataaaacaatggctgggtcaaacgagcgtaatatggtttcattttgtaaataacttttattttaaaaaaaaaaattctgtttaaaattctcccacaaaacctggaaaaaacaaaccaaaacaccccacccaccatggcctagcgcctgctggattggatgtgacccaaaggatgctcgaggtggtctgtttcaaccattttcttgcatctgtgaccaaaatgttaagggggtgagctcggattagaggaact

SEQ ID NO: 72467 - DNA, 151 bp, Glycine max
  Clone ID: PAT_MRT3847_36449C.1
tatccatatggaggcctctacaccaaagtactccaaggccagttttgatgaaattgcgaaggaattttctaccttttggaagaaagtaggatacacccctgaccagattcctttggtaactatatctggtttttaaggagacaacatgata

SEQ ID NO: 72468 - DNA, 596 bp, Glycine max
  unsure (1)..(596): unsure at all n locations
  Clone ID: PAT_MRT3847_3644C.1
aaattataaaagcagtaactgacttcctaaacaataactactaacataacaactattgtaaccgaaaggaatcataaaaaataataactgaaaataaaataaacagtcctaaatactcatgataggcaactgctgatatacatgttcaacacatttgatgaaagttggtagtgggaactgatacttaagagggataatcataacgttttaaaaattcctcgtgggcaaccaaatgactgagtaattcttcaaaggagaagggacggtctcttgtgtgtattgatgcaacgatgtctctgtattctgcacctaaccattaagcacataaagagttacatcatcatctgatattacatgatcaataacagataattcatcaactattctcttgacaaagaacaaatattttgtgacagattgagatcctttgtggctgcgttggagttgatttttaagagacataacatgagaatgcgatggattcgcatatttggcttcaagagcaggctgaaagagctatgttgtctctttcattcatagcagnttggagcaagctcactatgagatgatcttggcaaaaccatgtttcatatgct

SEQ ID NO: 72469 - DNA, 2511 bp, Glycine max
  Clone ID: PAT_MRT3847_36450C.1
aaacacaaccctttatccaaatttatacagtaccaattttattcgacgttacatttgaatgacaccaaacttgtaatagtcaagatgcccaattccagggcagtacttattcatgggcatagataaatacaaaataacaacagctaatcatgaaagagaaatatactaacataaccgcgttaataacatgaacccgagtgaaccaagattcgaaatccccttgagagagatgtttccatccagtgagatatgtgaaaaactaaaaataataataacaacacaagggactaatatgagccatcctatgatatctgatcatcacaatctcaagcgatgtggtttgagagcgttgtaagtcacaggctcagaaggtggagcagggggcttgttgctctgtgtcccccagtgggatttacacgggacgtagtaaaatgaattctggttagggcatgtcttctttgttttgtaaaactggtagcattctttgggtgatttttggtctggaagccccggaatgcagtttcttgacacatccaaaaccttggacttgatcaaactccaacacgaaggtccaatttccttgaaataattatccgccaaagagagattcccattgttccggatagaaggaatttgacaaaggttgtccggaacacaaccgtagagcttgttttgcgccaaattaagaaactgaattcgcgccaagcacttataacatgaaaggggggaaactttttttttttttttttttttttaagcttgaattactttgcattgggattcagagttgatttttcagaagacagtgaaccaactgatgaacttggagataaaccaagagcagaagatgctggaatgcttccaaccaaatctgacccagattgtgttccccgtgaatttacagatttcgtttccccattagctttgcccgatgctgaaccatcgaccaaatctccatgtgatcccatcttctcatgagtttttgatgaagtatgagatgaaggggcataagagctggcattaggagataatacccctttatcagagccatccttattcatgtagagtggtccttgtgaatcctcagatcttgacagttgaacatcctcctcagcttgaattggattttcttccttggtaatagcattgtctccatgttgattactattcaagttctcctgaatcctgctttccccatctgatgtggagtagcttttggcagggagttccgatgctaactgcttcgcatgatcataagaaccagagcggcttaaatccacacaggtatttgattgacatgattgtgtgtgatccatggaggaagaatttgccaatgttcgagctccatcatttccttttccaccacttatttcaccaggcctcttaacgaccgaaccaaacacaccaccaaaagtttcatcaccaaaagtttcagaattgtgtgaatcaaacagtatgtcctcatcaaatccactgtcatcaacacgtttacccctatagactgaagagaatctagtttcttcatcaatatcaaagtcttcatgtaagtgaaggcctctttcctctgcaagatgaagatcttgggtttcctcaccctcaatttctcttgctattcttaaagcttgcttttccaattctcttgtctgaggccctttttcaagctttgttgtataaaggtcctcattgaatgtgctttttacaccaaacaatgcctcatttgtttcaaactgatcccatcccctattccaatggccgtcaaatatgttttccagttcagggcattgtggatcatcttcatcaggtacccagggttttaattctctccctgtctcaacatgacgagattgagatatcaatgaatcaaccatgatttcgtgatgcatatcatagtgagattcactaggtaggccatctctggaaacagcaacatcctgtgctataacttgtgcaaggtcgttggcaggtataattaaagtcttagaaggagcttcgctgacaaattctggaccagattcctgtcctcgtaaagaaccagcctttgtcaagcgagccattttcaaaatgattccaaaatctttgtcagaatttgttgcatgaaatattccagagtatatagatccatttttcacctggacttccaacatgctgcccaataaggcatgttgttaaatatactaatcgatcatgtgaaggactcccataaccaccacctttattgccagtcactactcctgctaatctgctgctagaatttgactttacagatgggagcttattatcagacttagttgccccttctttttcagatttctgatgaccatatccattagatgatttaggctgcccaatttgttgcaaattcatcctcacccacagcccttgcccactaatctgcgatcatatcataatagggcgtcgaaggtgtggggttagggatgaaaacgacggaggcaccagttgcaacgacggagagagaatcagaatcacagtgcttcttcttcttcggttttc

SEQ ID NO: 72470 - DNA, 965 bp, Glycine max
  Clone ID: PAT_MRT3847_36451C.1
ctcgagccgaagcctctcactctcactttccgtgacccaaagctatgctgcagatgcatctctgcctctgaatatataaattttcttttcactgctatgccgcaaaacttctgatcccaccggccaccactctctctctctctctctctctatatatatatatatatcccatggctactgttatttcttctttctctttctccactctcactcaatcttcttcgcagaggaacctcaccacactctcttccaattcaccaacctttcgcttccgcgttggtttctcctgcctcaatgttggagttcgagcttccaattccgcttccaaaatggtcgttcgttgctcctcttccgtcgcagaacctccaactgtttctgagacaaagttaaattttctcaaggcatataagcgaccaattcctagtatctacaacaccgtgctgcaggagctcattgtccagcaacatttaatgagatacaagagatcgtatcgctatgacgctgtatttgcccttggcttcgtcactgtatatgagcaactcatggaagggtatccaagtgatgaggaccgagatgccatcttccaagcatacattcaggcattgaaagaagatcctgaacaatacagagtagatgcaaagaaattagaagaagtgggctcggtctcaaaacccaaattcgctattagaattttcatctagagaaggagaagttgagggtatattaaaggatattgcagaaagagcaggaggaaagggggacttcagttatagccgtttctttgcaataggcctctttcgtcttcttgagttagcaaatgcaatggaaccaacaattttggaaaaggttacccaattcatttaaggcatcatgatatatattgatttgatttaatatattatatatttagtttatacattttgaagtttaaacttccaagtctagttctcatttacaccagttca

SEQ ID NO: 72471 - DNA, 1341 bp, Glycine max
  Clone ID: PAT_MRT3847_36452C.1
cacgcgtccgctttccgtgacccaaagcaaaatgctgcagatgcatctctgcctctgaatatatataaatatattttcactgctatgccgaaaaacctttgatcccaccagccaccactctctctctccgatggccactgttacttcttctttctctttctccactctcactcaatcttcttcgccgaggaacctctccacactctcttccaattcaccaacttttcgcatccgcgttggtttctcctgtcactatgttggagttcgagcttccaattccgcttccaaaatagtcgttcgatgctcctctgccgtcgcaggtttgtttggttccccactgagtgtgggggacaaaagggtacaactttataagtgtttttagctcttttcaactttctgagaaatgggtagttttcaatttttgttttttttttaaggtttggagttaaaaaaattgatattttgattgtggatgtatggctgctctatttttatatctgtgtttgtcatggaagggtatccaagtgatgaggaccgagatgccatcttccaagcatacattcaggcattgaaagaagatcctgaacaatacagagtagatgcaaagaaattggaagagtgggctcgggcccaaaaccccacttcactagtagatttttcatctagagaaggagaagttgagggtatattaaaggatatcgcagaaagagcaggaggaaagggggatttcagttatagtcgtttctttgcaataggcctctttcgtcttcttgagttagcaaatgcaatggaaccaacaattttggaaaagctctgtgcagttttgaatgtcgacaaaagaagtgtggatcgggacttggatgtctatcgtaacttgctttctaaattggtccaagctaaagagcttctaaaggaatatgttgacagggagaagaagaaaagagaagaaagggctgaaccacaaaagtctaatgaggccattacacaacaacaacagttttctagcctttagttatggggttcctttgaaatgatcaccttgtgaagatttggtcttgacttgcttttttttttttttctgttggtcttgggcatgcgtaatcagagtggggcacttctatcatcatggttttacctactgtatttggtgtatcttctttcatggtgatccatccatcaaagtcctgctttatgctcaacctcaatttacctgtcttacacagtcgtgtaatcttttcaaacatgtatttttttttccaccacacagtcgcagatgtattttgtagttctcaagtacatgcctgcacatgttctggtaattgaaattcttcatatttcaac

SEQ ID NO: 72472 - DNA, 273 bp, Glycine max
  Clone ID: PAT_MRT3847_36453C.1
aaagacctcttgctcagccactcccactcccagggacgcatcgcctctccaccaatcgtgcaaattctggaactagtgtaacatcaaaaccagaaagcaccaggggctcaaaatcatctctatatttccccttaccgaaacctggttgtgtttttaacgggggagaacctacagatgctgaggaagatattggcactgcatcaatttctagcggcactctattgatagtgatgaccaatgtgactcacattttcttagtcctctggcatctga

SEQ ID NO: 72473 - DNA, 404 bp, Glycine max
  Clone ID: PAT_MRT3847_36454C.1
gggcaatgcccttttgttcctctcacttcggatgaacatgataatcgtctcactcaatggactaatccatcccctcaataccctccacacttctggggtataattaaagagtatgttgaagagatggaaaagctgtcctttaagttgatggagcttatagctttgagtttaggccttgaggcaaagaggtttgaggaatttttcatcaaagatcagactagctttcttagactcaactactatccttcatgcccttaccctcaccttgcccttgggtgttggtcgacataaggactctggtcccttaaccattcttgcacaagatgaagttggaggacttgaagtgagacctaaagcacatcaagactggataagagtgaaacctattccaaatgcttatatta

SEQ ID NO: 72474 - DNA, 470 bp, Glycine max
  Clone ID: PAT_MRT3847_36455C.1
ctgcgagaagacgacagaagggcaccaacaagtgacaagaacgttaaagaaaaataatgtagaactgttggaagcatgtaggaattgtttgttgctcagatgactcggatttagatcttgattctccgtttaccttagacattgaagagcaatattcctgaagaaaccatcacattttttttctgcagatccgtatttaacacgagacagtcctcacatgcttaaccatctttttcctctttactaacacaataagaacatgacagaacgaaagattgcttgcgtttcagcaccattattaattaattaatacaatgaattgtcgaaagcacgtgctatctatttggcgcatctagtctaagctaagcacctataattataattagatggtttttttgagtgatgggggatctaattccacttgtgaatccgactaatcaaatccaaattaaaaatttgaagtattttat

SEQ ID NO: 72475 - DNA, 646 bp, Glycine max
  Clone ID: PAT_MRT3847_36456C.1
aggatatcttgcattgatcactataaatacctactcagaaaagaagtgtaaaattaaacatggctgctttcactgagaaacaagaggctttggcgagtagctcattctaagcattcaaggtagaacattcctctatacagggatgtgttctacacttcgatactgcagaaagcacccgcattaaaggacttgttctcggttctatctaatggaggacatcctagtaatcctaagctctaggagcatgctgaatagctttttggattgccgagtgactcgtgctgggcaacttaaagtcaatggaacagtagtgactgatgccgaacttggttctatccatgcccaaaaagaaatcactgatcctcagatcgacggcggttaacagaagtactgttgatgaacaataaacgaggcaggtggcgacaaatgtagtgatgaattgagcacgtgcttggaaagaagcctactgatgaattggcagcagcgtattaaaaaggcattttaagatctactattgccgtaaagcgttataaataaattttgcttctctaaaacttgctattagacaagtgcccgatatatatagggtggactctataagtaaattatacggcattgataagcatctcagaatctagagaagtgt

SEQ ID NO: 72476 - DNA, 471 bp, Glycine max
  Clone ID: PAT_MRT3847_36457C.1
acggctgcgagaaacgacagaaggggatgacaaacattgcagcaaaacttaagaccttgggaatggttgtgaatgagaacttccatgttgagtgtatgctgaaatcattactgtccgagtaaggctcgttccaaatgagttataacaccataaaagataaatggaatgtgcatgaattacacagtatgttagtgcaggaagaaatgaggcttaagaatcaaggaagtcacttagtccattatgtaagccaccaagggaatcaaggagctagaaaaaaatttgtgaagaagcatgataaaggcaaagggccattaaagattaataacaactctaagcaaatccagaagaagacatcaaagagaaataattgccatttttgtgggaaatctggacacttccaaaaggattgcccaaagcgtaagtcttggttcgaaaagaaagggattcctaacaatccaaaccataagccca

SEQ ID NO: 72477 - DNA, 274 bp, Glycine max
  unsure (1)..(274): unsure at all n locations
  Clone ID: PAT_MRT3847_36458C.1
tctaatntnngactacaangnnctgcgggccncagtntntnnnncgnnttgtnnnncngtgngtgangttncnccngtcgnnngatnagtcnntgncacgngtnnnngcncnnnnntgagtacnaggagnnggngnncnntaccancntcngangngtaccgcccaacntnngnntanngcancnntggttannncntggncatntnngtgnnnngccatgnttnnnataagcnatcatncacnaatcaaccnnnnnnngngcnagtcnnacnn

SEQ ID NO: 72478 - DNA, 358 bp, Glycine max
  Clone ID: PAT_MRT3847_36459C.1
ggaaggaatgaggtaataaaatttgaaagaaagaaagccgtaaactatttcggaggatattccggagcggactgaaaattctgtattcattaacctctgacaaaaaagtacattttaccctcaaagaaatgtccattttctaaaatacaacctactaccgttcaatgaattcaaaccaaagcttgtccttggatttagaaaaatctccatgactgggcacaagcttaactccattagcaggcggcactacctaattattatgatatgggctcttcaccacatttgtaaaaggggggatggcccaactagcttaagggggatgagaatcaacaaccgtttcttcaatttccaaattttt

SEQ ID NO: 72479 - DNA, 288 bp, Glycine max
  Clone ID: PAT_MRT3847_3645C.1
cggcggccgcccttttttttttttttttggtttttaaaaaaagaaccagaatttgcactaaaaaacaacaaacaaaatttacacattgtctgaatatatatgacgacaaccctagtccataaaccatatgaaccatagactaggatattcagctccgatgagcaaataaaaacaaattttatatctcgaaaactcaagtcatgaagtttactgcaaaacctccctctttcatcaattgcggctatttcccgtcaaaggaataaagatctatatctaagtattatattt

SEQ ID NO: 72480 - DNA, 505 bp, Glycine max
  Clone ID: PAT_MRT3847_36460C.1
tcctcctgcttgggggggggggggggggggggggggggggattaaattatagagaggtgagaaggtagttggggcaccaactggcgagaaaattaaacagacgcgagctacggttgagatgttgcctgcaaaacacagaatggagaacctaaaaatgaaaaagaaagaaagaaagaagaattagactaagccagataaaaggaacttataacttatagcaacgaccggcgttaaaaacgcatgctaatgcaccttaaaatagagccttagactagcagaatacaataggtattggtattactgttaaataatgctctcagccgcttgagacttaggctaccgccaacgctagaggcaaccacaactatagatgcagataacccagtgccggctattaagtttaaggcccggctgttgggaagaatgacaagatttaaaaggcctaccaaaagagagtcaatgatgagaaggttgagaatgcgttaaagccaacgagggctgtttg

SEQ ID NO: 72481 - DNA, 477 bp, Glycine max
  Clone ID: PAT_MRT3847_36461C.1
cccacgcgttcgtttttatgatttcaaacaggaagatggccgaattgaatccttgaggaagatgcaatgtacgaaattccaccgcaacaaatccctgcatactatgaaagggcaaagaacaccaactccatttgttgacccaaagggccagtcatctcactgtttgatatacttcatcatgggttacaagaaaatgctgccgctgcatctgaggggggaatgttttggaccctcatccagaaagcgtatcgaacatgggatcaccattctcaagatgtgggtttggagaaaactggcctgggttctgatcagtgagaagattatggagaggcctctatcctggctgatgtggaggctctggaaacactgtccccgacatgcgagttcaaaccttattgagcaaggatctatgcagaacacttttgggccttccgtttctcgacacctctggcttgtggcccacatgccccatgtgcg

SEQ ID NO: 72482 - DNA, 260 bp, Glycine max
  Clone ID: PAT_MRT3847_36462C.1
tacggctgcgagaagacgacagaagggccttattatgatcaaaaagaataaaacaaaccgaggaacaaaaaagacagtgattacgtattgtatttgaaatgaaattaggtatatatgttggttttcttgcttttgtttgctaatatcagggcatcataaagaccaaacaaattaaggtgttggttggttagcaagccagcaaggatcgcatcagtgaaatgcactcaaactgggaaaattcatccacacttcacaaacta

SEQ ID NO: 72483 - DNA, 471 bp, Glycine max
  unsure (1)..(471): unsure at all n locations
  Clone ID: PAT_MRT3847_36463C.1
tggctctgtcaaagaaatgctcaatacaaaatcttaaagctgggttggatttactctcaaagcttcaccatccaaatttggttagcctttttggtcattgtattgatggtgatggacaagatgattccagtggcctcaaacttcatcttgtatatgagtatgtgccaaatgggaaatatggtacccatttgtcagaattttcatcagacaaggcactgaagtggtctgatagattagcaattttaatcggagttgccaaagctgtgcactttttacataccggagttataccgggttgttttagaaaccaattaaagacaaacaatattttacttgatgagcatcacattcccaaactaagtgactatggtatgtccatcattgctgaggagatcgaataccttgaggcaaagggagaaaatctaaaatcatgccaaagagcanaattagaagatgatgtctataatttcg

SEQ ID NO: 72484 - DNA, 299 bp, Glycine max
  Clone ID: PAT_MRT3847_36464C.1
gaggcacacactgcgacaccacactccctgcgatcccgagatcacactctcttgcgcgagactctaactctcactatctcgctcgacactggttccgcttgtcggtcttgatctctgtggttcacaccaatgtctctcacacacatatgtggtcagtcattgtctagctgcactttaatttattaccagtggggcaattcatacactacccatgaatctcattttgagttgcttggtggaagctgatatttgagaaaacagtgaaattactgtcactattgcatctgtacatagaccac

SEQ ID NO: 72485 - DNA, 360 bp, Glycine max
  Clone ID: PAT_MRT3847_36465C.1
gcgggattgaaaaacctgaccgggccatgtttaggttggaattcattaattttttaaaaattctacaggacccaaaacgatggctttgatttaggacccacccccttaattaagaaaaagaaaagcctttaaagagtaaaaaagaaaattttttattgctttttaaaaaatgcccccccccctcaacctcataatataatcgtaaagcccacccagaaaatagcggctttccacaaaagggcccttaagccctgttagcttttttgggggagagcccgtccccccctttatatagtccttccccaaagggggcccatgggctctggatataccacgggcgtgggcggaaaaaatgaaaac

SEQ ID NO: 72486 - DNA, 201 bp, Glycine max
  Clone ID: PAT_MRT3847_36466C.1
catataacaaaataacattttacattgcctttaacaaacaccaaaacaagccgccgatcttacagatctatacttacgcccacgatcataccacactatacctcatctatcattgcacctaacatcaattcaatgaccgtcttaacacaactacaaaacttggaacaccctttcattacacaacttaatcacctctctata

SEQ ID NO: 72487 - DNA, 498 bp, Glycine max
  Clone ID: PAT_MRT3847_36467C.1
gttatacgacttctgctgttttagtaatccaacggggacccgacaagtttaataggaccaaacaaaacaaggaaatgaacatcttacctgtacctacttgttcttggtactagatctcagactatgcaagatataatggagattagagagattgttagactcttgtaccaaaaaaaaaaataatcaagttatggtcccgtttagatgatataatctgggtgagttatagggtgcaattgtgtatgatacacaactcaatatgacctgctactgtaacctgtaaaacttaaaaattggtcgatagttcttgtatcaatttacataaactgtataacataaatgtaaaatttcaaataagtcccctaatgttgtgtttgagaaggggcaagctttatattttccacaaagttatttatgatacaaacctaattttggacttattttataaaacacattatttctttctatatttttttttttttcagattttatttatta

SEQ ID NO: 72488 - DNA, 188 bp, Glycine max
  Clone ID: PAT_MRT3847_36468C.1
cactttcaccaccataaaaacatgggcagaatattcttcgtcagtggcagctagtcatagcatgggcacagtcgtcgaggtatagtagcttattactacttcgcctggtactcatgcccctggagaacatgtcgtatacgttaatgttatccctgcgttttctgtgctcacctggtgtaaaaagtttg

SEQ ID NO: 72489 - DNA, 252 bp, Glycine max
  Clone ID: PAT_MRT3847_36469C.1
ctctatccgtttctctctctctctctgtctctttctttcaatctgcgtgtgtatggaaaagactatggcatgtttggttcgtgccattgtgatcctgtggtgctgcataagccatgtcacatctgattcatcgtatcaccgttacatgaaaggagattccgttcccttttatgccaacaaggtgggaccctttcacaatcccagtgagagataccgatatttcgatcttcccttttgctcgccatctaatgt

SEQ ID NO: 72490 - DNA, 482 bp, Glycine max
  unsure (1)..(482): unsure at all n locations
  Clone ID: PAT_MRT3847_3646C.1
atnaatcactcnaccaatgagtgatggttgtgcaactgtgggaaaccctgaaggnagccatcgtgggnnacacnggnttctctccttcaacgtttcttcacggtgctggcacttctatatgtntgctttctacgtcctcacaggtctttatggtnccncctangaataccnccaccgtcaccgccacgcccagnaggatganatnccgcctctgcgccccccggttcatctcggtcganaatcacgggngggaaganactcaaggggctacttacnggcaccgatccccaaataancctttgctcaattgtccatnttangcccttaatctangatgttctcccnncatgcnagatgttttntgnacctggtggaccttntgccctntttnctngcaagggtncaaccttatccttaacgaagatgtctttntaaaaaaaagatntgactggggatattnctggtcttggcccattccaaat

SEQ ID NO: 72491 - DNA, 241 bp, Glycine max
  Clone ID: PAT_MRT3847_36470C.1
cgcaaatgaaggataataagctttgattatattatttagtgagaaaataatttattaattacaaccaaagcattgatttagtcatgcactaattggctctcactcactggcaggaagcacaagattattgttggccagcgggtcaaattggtgaaactgaaccaccaatggtttgttcttagttaccaccaatcgcctgttttcgttatgatgcgggtgattggggattttcgccacatga

SEQ ID NO: 72492 - DNA, 353 bp, Glycine max
  Clone ID: PAT_MRT3847_36471C.1
gtttcagcgccacatagtcggcattttctcatcggcgctcttcgacctgactatgcatcacatttcgacttcttctccattgtcattaagtaggatgtttgggaaggcaccgaatgatatcaatcgtttcacgtagtaagatctcttctgcgtctccaagaacgcatcgcacgatgttctggataacgcttagactatagccgctattgaaactcagcgctatatggcggtgatgccgataagtttatagatctggtgcaagcttatcacgttctgagtgactctgagaagcatgagatatatgatcactatggttaagatgcacttagtgaatgaatgcgtgatgtcagtgg

SEQ ID NO: 72493 - DNA, 307 bp, Glycine max
  Clone ID: PAT_MRT3847_36472C.1
cccactcatccgtccactcgtccgattaattaaacttcttactcacatggatcatgcaaatattatgaccattaaagatatctagtacgtactacacataaggaaagacttcaatgatgctgtaccatgactctgagtgaatggacacagatctgcatcaaataatcagcttcaatcagcaatagactgatgaacattgtccggattatacgcatcaatagggacgagggctcaagtatgcacattcagctaatgtggtgtaccgagatctacaacctactgatctactattgaatggcaagtgtga

SEQ ID NO: 72494 - DNA, 346 bp, Glycine max
  Clone ID: PAT_MRT3847_36473C.1
accaaccaagctgaaattcccaacccaagcctgatccctcacacacctttctctctccaccaccactcctgctgcttccaaaacctccttcaaatccaccatctccaccaaccccctccacgcccctgtctccctcagtccccaccagccccgcgacccttgcaacaccaccgccctccaccacgccgccatcgtctacttccgcgacaacctcctcctgcgtgacaataagtgcctcaccagcagcaacaacaactccctctgcatcctccgcatgtactacttcgacccctgcaactacgacgaagcagcatggaacttctacgagacgcacccctaccacagc

SEQ ID NO: 72495 - DNA, 579 bp, Glycine max
  Clone ID: PAT_MRT3847_36474C.1
attggggataaggtacactgttgggaaggaggcttcgattttgcgggagcttaagcagggtgattttgatccgaaggagaagttctggactaggtttccgacggaggggtcgaagcttacaccgccgcatcagtccgcggagtttcgatggaaggattactgccttgtggtttttaggcatttgaggaagctgtttcaggtggatcctgctgattacatgttggctatatgtggaaatgatgctcttcgggagctttcgtctcccgggaaaagtggaagcatcttctacttgacccatgatgatagattcatgataaagacagtgaagaaatctgaagtcaaagtgcttattcagatgcttcggagttattatcaacatgtgtctcgatatgaaaattcacttgtgacgaaattctatggggtgcactgtgtcaagccaattggaagccagaagatccagttcattgtgatgggaaatcttttctgctctgaatatccaattcatagacaatttgatttgaaaagatcttctcatggtcgcaccacagataaacctgaagaagacattgatgaaacaac

SEQ ID NO: 72496 - DNA, 2212 bp, Glycine max
  Clone ID: PAT_MRT3847_36475C.1
cacgcgtccgccacgcgtccgaattcgagcggcttcttgttcgcgtggtgcatcacggacccagtttgacttgtgtcaggggtttttcattctcacagtcaccaacccttgttcttcctctccactctcaccgtcccgccaaaaccctcctacaaatcgccacgacgccgtcgtttcggagttgtggctgcgcaccaatgtccacgttccaggttcgcgacaaaatcgacctctccgacgtcgagagaagaatcttcgacaggcttctcgccactcttcgccacttcgacctccaaactcagctccgagtcgccggtggctgggtccgcgacaagcttctgggaaaagagtgctatgacattgatatcgcgcttgacaatatgatgggaaccgagtttgtggataaggtgagggagtacttgttgtccattggcgaagatgcacagggagtttgcgttatcgagagcaatcctgatcagtccaaacatttggaaacagccaggatgcgtttgtttgatatatggattgattttgttaacctaaggagtgaagaatacgctgagaatagccgcattccttctaagcaaagatttggcacagcagaagaggatgcatataggagggatttgacaattaacagcttgttctaccatatcaacactgactcagttgaagatttcaccaagagaggcatctcggatcttaagtctggaaagatagtgactcctttacctccaaaggccacatttcttgatgatccattacgagttcttcgagcaattagatttggtgctagatttgaatttactctagatgaagatctgaaagtagctgctgcatgtgatgatgtgaaagatgctctagctgctaaaattagcagagagcgcattggaactgagattgatctgatgatatccggaaatcaacctgtcaaagctatgacttatatttgtgatcttacactattttggattgtattcagtcttcctcctgaatttgaaccttacatttcagatgggtgtgaaaggctttgcatttcttacttggatactgcatggaaccttatccatttacttggagagtcaacttttactgctgaacaaaaaaggttaacactttgtgctgctttgtttctccctcttagaaataccacttacagagaaaagaaagctaagaagattcctgttgttaatcatattatccgggaatctctcaagcggaaagctaaggatgcggaaatggtgcttaacttacaccaagcgtcacataaatttttgtcattgatcccttgtcttgcatctagtgaggatgtccaagttgttgatcatgattggctgggagacttagtggatgtccctgtctcttctagagtccgggtactaacagggtttctcttaagagagcttaaagattattggcatgttgctctgttgatatccactatactacatcccattgacattaaggatgaaccatcacagttgggcaaacgaagagatctgtttaatactgtggagaattctataatcaaactaggccttgagaaagtatgggacataaaacaattgatcaatggcaaagatgttatgaatgccctacagctaaaaggaggacctcttgttaaggagtcgctggataaagcaatggcttggcaacttgcctatccatctggaactgcagaggaatgcatcgaatggttgagagaagccaattctaagcgtattaagttgcagtgactctagtgaggttgattgccttgattgattgtctattccttcctcaccttgttatggattgagaccacgtgccctggatggaggaagcttagccagttggctgcatgaggtagatgatattgggagtacatcagcattctttgcttgaggttgccctgccactcgcaacctaataaagcctcatgcagttccttctcacttttgggatgtaaatttgaaccctggaaagtgttttttttgtgtgtgtgtaattgtgaaagaagaaaggatgataataggtatcatagcctacctagtttttgtttaatgatatttatatctgtgtggttgtgcaagaagaaaaaatgagaatagattgagctttctatcaggaaaaagtaaccgtttgtattgagacaaatattggaatggcatcaattccgtagcctgaaagactgcattttatcttccccggaacataatacatttggagacat

SEQ ID NO: 72497 - DNA, 331 bp, Glycine max
  Clone ID: PAT_MRT3847_36476C.1
actcgaacctcaattcccacctagacccacgcttccagcgtatacgctactgtcttattccaaccctctaccaaatactacattgctaccacgtgtacgtgatacacatccaccctaatttcagctcaactcttgctaaccagttacagcatgacttttaacatacacaatcatatattacatccctattctcaaacaatacgcccattcccggtccgtatcttcaatcggcatgccacaaccactatcactatcatctacacatatcgacaaagacacgccttataattagtctaaaaggcaagatccatttgtgcccataacctattcc

SEQ ID NO: 72498 - DNA, 398 bp, Glycine max
  Clone ID: PAT_MRT3847_36477C.1
cgggtcgaggcacgcgtccacccacgcgtccgaattcgagcggccgctttatccagcgactcctttacctccaaaggccacatttcttgatgatccattacgagttcttcgagcaattagatttggtgctagatttgaatttactctagatgaagatctgaaagtagctgctgcatgtgatgatgtgaaagatgctctagctgctaaaattagcagagagcgcattggaactgagagtgatctgatgatatccggaaatcaacctgtcaaagctatgacgtataattgtgatcttacactattttggattgtattcagtcttcctcctgaatttgaaccttacatttcagatgggtgttaaaggctttgcatttcttacttggatactgcatggaacc

SEQ ID NO: 72499 - DNA, 511 bp, Glycine max
  unsure (1)..(511): unsure at all n locations
  Clone ID: PAT_MRT3847_36478C.1
aattcggctcgagggctgaacaaaaaaggttaacactttgtgctgctttgtttctccctcttagaaataccacttacagagaaaagaaagctgagaagattcctgtggttgatcatattatccgggaatctctaagcggaaagctaaggatgcggaaatggttagtcttctttccttgtagcctaagtaaagttctaaggatgtattataacttgcataatgtaaattattttcagtattacttactctggttgatactttgtgttggttaacgtgtttgcaattgttcaccaaaatctaggtgcttaacttacaccaagcgtcacataaatttttgtcattgatcccttgtcttgcatctagtgaggatgtccaagttgttgatcatgattggctgngagacttagtggatgtccctgtctcttctagagtccgggtactaacagggtttctcttaagagagcttaaagattattggcatgttgctctgttgatatccactatactacat

SEQ ID NO: 72500 - DNA, 517 bp, Glycine max
  Clone ID: PAT_MRT3847_36479C.1
aaacaaagctcctttataatcttggggtaacaacaatttttttttttagcttaaaccaaaaaaatttaacaagggtcccttatcatccaaacccccccccccctggggggcaaaaaacaaaattcttcaattatcaaaaaacagcttaaaaataaaaaaaatggggccccaaggggtccaaaaatgggcacaaaaaaattatcttaccctggcatcaaaattcgggagggaggggggctttaaaaaagacccttttggggaaggggcatttcccctttttttcctctctttccaaccctaaacccttttaaaaaaaaaaaatctttaatttttccctcacgggaagaattaattaacttcccatatttagggggcctttttctccccgggtacaaaactttttctttcatctaaacatccccaacttggccaggttttgaaaagccatgcatggtgggtggggctaaaaggacgggttaattccatggcacttttgccccccatattaattaattaa

SEQ ID NO: 72501 - DNA, 256 bp, Glycine max
  Clone ID: PAT_MRT3847_3647C.1
gcagaagctagaggatattagtgtcagcccaatctctcgccggttagctctaaccgtgctcattggtgctgctgctgttggctcctaagtccaacctgctgattgcattcatggggaagctgccagtgtgtttggaaagccaaagacagaacacacatccctgccatacaatggagatggattcaaactatcgattccattaaagtggaacccaagcaaagaggttgagtacccagggcaggttgttagatatgaa

SEQ ID NO: 72502 - DNA, 373 bp, Glycine max
  Clone ID: PAT_MRT3847_36481C.1
cttcttgtatacattgaactccccatcatcttctttgccatcatcctgttctttatcttgtgattcaccatgctttgaggtggccttctatatcaataatcccttacggaaactagcaacctgggtgtgctctttctcaccctaatgttttacatcctccttctttgcttaaaatgtgatccttgtctctctccttcttatccttgaacatatgcgtcttaatagcttcatcatcctcgcctatggaatgggggccctaggcctataaagtgtctgtgggcttcaccctttggccttcttaaacgttttcttggcctagtaattgtttttcttcaaatgttaaccattaccagattttccctttacctttaat

SEQ ID NO: 72503 - DNA, 547 bp, Glycine max
  Clone ID: PAT_MRT3847_36482C.1
ccattctttcgtaacaaattccattcctgttgggaatgacaatgcaattacttgatgtggatgaagcacagcctgccacttatatggctgacatacacgagcattcggatattgagagaccgagaaagttattgtcggggaactcggttcatacttaaagcctcatggtcttctatccgacgaaggagaactgcgagacctgctggaaagacccacagagactggggtgtctttgacgcgagagcacgcaagatcaacaacggttgcataagatgagcaatgaaggcttaccgggagaaccacttccgccaaaagaagcaactctgcacgaacaatctgcattgtagcgtcagttagctttctatgagcggggatcagtgcgttctatctactacaagatactgcagtgacattcccatcaagaggggattctgattcagacgcgtgggccgaccctgtaaatgatgcacggtacctgcacgcgcactgcgatgtccctattgtgagttggagtaaagctaggcgaaatcactggcctaggtgttac

SEQ ID NO: 72504 - DNA, 328 bp, Glycine max
  unsure (1)..(328): unsure at all n locations
  Clone ID: PAT_MRT3847_36483C.1
tgagatctttggagggtatctgtacttccacaaagcacccaacaaagaagagtttcacatagaaacataccacaagatcaaancactccaccaatataattacttacgagccaataaatcaacatttacttagaatctagaagcccatataccatttttagacaaagcatttatcaatactacaataagtattaaccctaagtcaaaaataataaaaagaaataaaagacgaattaaaaantaaattctaaagagagcctttaataataaagagcatccttatctaccaaagcacattttatacagacagaaaaagcaattcagtaat

SEQ ID NO: 72505 - DNA, 437 bp, Glycine max
  unsure (1)..(437): unsure at all n locations
  Clone ID: PAT_MRT3847_36484C.1
cctcagcacgangacagnanngaaggggagggatgaacaagaacaaacggccccgccccaccggcngaggacaaggaaggaaaccacaaacaaaccgccggccaccacgaggccggaagcaaaggaagacagggacacgcaccacagaaaccacacgaagagccagacgggcaagcacaaagcgcagaagggaacaccgacaccacccccgcggaggccgaaagacaagagggagcggcacacaccggngaaccgaaaaccggcggcgacgacccacggcccacaaaaaccaaacagggggaaacccccaaggaacggcaacaggacccaccccgagacaaaaagcccagggcccagacgacaaccgaagagagaccggaaggcacagaacaagacggaaaagaacccccccccgggggaaacaaaaacaagccacc

SEQ ID NO: 72506 - DNA, 109 bp, Glycine max
  unsure (1)..(109): unsure at all n locations
  Clone ID: PAT_MRT3847_36485C.1
catttctacatcccttngctctgttccgtgcgatgacgatggcgtttagggtgcgaaaccctgnatnctccngctttcttcattcttnctnctctctcttgtgccatac

SEQ ID NO: 72507 - DNA, 379 bp, Glycine max
  Clone ID: PAT_MRT3847_36486C.1
ggctcgagatcgcagccaccagcagatgcatacatttccatcacttctcaaactgctatcaccaggggctctatagtctaccttgactgagcctccttcattttaattctctgtctaataacacccacacacaccgtgctatatacttgcttaagctatatactagcacacgagaagccgaacaagccagggacaacaaaccaataacaacgggccggctcctttaagcggtctttggatgggaagaatattccctccacaggacccatgactggacaagaatttctttaagaacacgcactgcccgcgaaggtttgtaacaacactgcacacgctcgagaaggagcaagacaaaaacgaagccctacccttttcaaac

SEQ ID NO: 72508 - DNA, 2752 bp, Glycine max
  Clone ID: PAT_MRT3847_36487C.1
aattcggctcgagcatggccttcactctcagattgggggtcccctttttctttttctttttcgttttccttttcggtttccgagagattgaaatggtggtggcttagcaattgctttgtatttatgttagtcttaggaatggagtttgtttgaggtgtatttatgctttacatacatacatatagtgtggtggtcagaaaggagggtagaggaagaaggaatattctgtgaggatgacagattttcagccgttacagcagaagcctgagcctgctgatgcccatgccgaagttgagagggagagagttagacagattgttcagggatggatggaaagcggtattagtgatcattcgtctaatgtgagtcagataaacaatagccggagagcagaatggcttggtgttctatttcactttaccatattcttctcaattttcctcaatcgcatgtgtttgatgtcttccggttcacggttccaagatatcagcagtagttggccaccctgggaatatgttgaaatgaaactctcaatactgggtgaccatcgaagagcacaaaagtacaaagaaaaattcgagaaggagcaaaaataccacaaaagaaaataagtgtgctgaattacgaaacacgggggagaaaccatcagaattttttacatatcagcagaatggcttggagaaacagagcgcgagagggtaagaaatatcagggaatgggtgcaaatgattagccagcagagaggttcacgtgggagccggagggatgctcaagtaagtgagggtgcccaagctgatcgagctcgttactgaatatgggaaaatgatgaaagtaaagaagagcatgtttggggggacatgtaaacgtttggtggaatcctgtctgtactttatctccggaggcacctaggtaagcttttatctctggtacttctgggtttcttaaacctccttgctctttcaaataatgcttttctcccacccattcagtcactgcacagatgtagatacgcccgaaatgaaagaacttttgaagatcagatgcaaatgtctatggctgctagtgaattagttcagctatgacaacgacacactgtctgtggttagagggaaggtttaagttcaagattagcatatattgtttgtggttgtgcaggaaccagtccctgacaccacatgtaatagcaaggcaagtgacacaatagaagatgagaaccaagcaaacatgctcctaaatccagtgagtccaaatttgaaacaacagcaccacacatgcctcgacgttcttgtgcggcacatggctgttcgaagacgatgcctccatccggtcatacgtgattgtcatcgtttgcatctgccataaattagccacctgctgttcgtggccgcaaaactccgcctcatcctcaacatgatggggagccaccacactctggaccaaaagaactgatttgcccggaaagaggtgttgaaattaagcatccagagaatgaaccagggggcccattgcgcgaggatataaaaagtgcattgcataatcttgggtccagccggagtgcaaagagatggaaggaaaaatgttaaggaatcaccaggaacttccagaaagttaggaagagaagcaaagaaaggcgtgaagatagcaaggcatgtgccaatttccatctgcttcaatgcctatacgaaggcaagggaaaagttttgaacatgtttggaagatttcagtgtaaaaggtggaacaagacaatatggatggaggggttggtggtggagctggagcaacagtggaggaagcagggtaaaacatcgaagcatgggatggggaaggttcgtagagagggatgtggatgagaaggttatggatacagatgattatgctacagggctatatgcaggagatgatgcagatggtgaaaaattagccagaaaggttgggcctgagattatgaatcagttgactgaaggatttgaggagatgactagtagagttttaccatcgccattagaggacgagtttttggatgcactagacatcaattatgcaattgaatttgagccagaatatttggtggagtttgataatccagacattgatgagaaggaaccaatttcactacgggatgcacttgagaaggcaaaaccattcttgatgtcgtatgaggggattcaaagtcaggaagagtgggaggaaataatggaagagacaatggcgcgtgttccattgttgaaaaagattattgatcactacagtggaccagatagggtaactgcaaagaagcaacaagaagaattagaaagagttgctaaaactcttcctggaagtgtaccatcttcagtgaaacaatttactaatcgtgctgttatttctcttcagagcaacccaggctggggatttgacaagaaatgtcatttcatggataagctggtttgggaagtgtctcagcattacaagtgacctactggcctgcttgcattttatttttattttactttgagttttgatgaaacaaactgctactactcttgtaataatgagttgttgtagcgttattgctagcaattgttacaactctcgtatactttgtaataaatgaattatcattttaattagactttcaaaggtgataaactgtgggatgataattgatgattaggaaattaatggttaaaattttgataatttcataatatgtatgtattttttcagagtgttaattgttttgtgaattaatgattattgttgagtgtaaaaa

SEQ ID NO: 72509 - DNA, 1898 bp, Glycine max
  Clone ID: PAT_MRT3847_36488C.1
tcgcctcgcgtgggcgcgaacaaatgtgctcccatatattcccttgcaattagaggggagtggaaagaaactgaagccatgatagacgcagatagaaggttggctacttctgccatctcacagggacgggcaacactgcttcacgtagcagcagaagcaaatcagttgcacttcgtaaaggagcttgtgaaactactgagcgatgaagacttggaattacaagaccgcaaaggcaacactgctttctgtttagccgcagcatcgggaaatgtgagaattgttaaagtaatggcccgaagaaatagcaggttgccaactatcaggcgtggggatggactcaccccacttcacatggctgctttgcagggaaaaaataaaatggcatggcatctctaccatgataccgttcaaacattcaatgatgcagattgggatgcattgttcttcttttgtctcaagactgatatttacgatttagctttgaaggtgttacgagagaaaccaagggtagctttggcaaggaatgagaaccaggagacgggcttgcatgttttggcccgaaagccgtcatcttttagttgtcgatgaggtctaggacaaaggtttctatatatgctcaccaactcaggtaagagtccaactttggccctccaacttgtcaagtgtctctgggagacacttctttctctagatggcacagagatgcagactattataaaagtcataagtgaaccatctcaggtaatatttattgccacagaagttggaaattttgaggttttggcagagctggttagatcttgcccagaactcatgtgggaagttgataccaaaaatcgaagcatcattcacattgctgctttgcaccgccacatagacatatataatctaatacatgaaacaagctctatcaggaattttgtagtaacattagaggatgaggataaaaacaatttactgcactatgctgcaaaattatcaccaccgagcaaacttaacttgttgcctggacctgttcttcagatgaagttcgagttgatgtggtatgaggaggtgaagaagatcatgcaaccttgtttcatagagatgagaaattccaatggtaaaactcctcgagaattattcactgaagagcatttagagttagtgacaaaagcagagtcttggatgaaaagcatgataaattcctgtataactatttcaacggtcactgctacactagtgttggctacagcattcagcattaagcgtgaggataaccataaacccaccattactcgtgacttcatgttatatattggaattgcaatgatatcttcatccatctccagtctgattttcttgtctatccttatcacatcaccttgtgtagaggaagactttttgaagtcactgctgcggaagatatggtggggactggtgacactatatacctccatagcatacttgtcgacgacatttaccattgccttcttcacaacgtaccaagtacgggtgccaaaatcatttttttgggggcctttaataagcctattaataatggaatatcttctgtttccatatgggtcactcgtcaacataaacccacgctattggttacccagtaaatacattttttatactgggaaagctaaaggccgtgtaaattaaccatgactctactaggttaaataagtgctacatacctgctttactacaaatagaaattcgcatttgaagttttgaagaactgtactagtttgtcaagtttattatgcctatcaaatagcttgcaacgtgtaatgtagtgttggctggaaaatacaacttatattaattttcagctaacctgagagaaataaacaccaacgaaatttatgtcaatggatgataaataatcaattagtcaatttgatatc

SEQ ID NO: 72510 - DNA, 436 bp, Glycine max
  Clone ID: PAT_MRT3847_36489C.1
gtgtttttttttttttttttttttttttttttttttttttttttttttccccaaaaaaaggggccattgctcacactaatatgcacaacagttgtttttatttggcccctttggaaggatttgggttgatgacaaacttcaaaagttgaataatgaccaaaaacagtttttattatttggacactttggaaggatatgtgggggccaaacttcgggggttgaacaatgaccaaaaactccccccaggggaaaatttccaaacagtttggaaaagcataatgctccatattttttttacaaaaacctttaaagggctatctttactacttttttttattgggggttattcgggccatttattccggggtacttattttttctggaaattaaagactttgatcccatttgcaaaaacaaaaagaaacaacgcaccaaa

SEQ ID NO: 72511 - DNA, 340 bp, Glycine max
  unsure (1)..(340): unsure at all n locations
  Clone ID: PAT_MRT3847_3648C.1
tgccgtacaaccactcagatttgcggtctcaaaacgaccacataangggggacagagttaaaatggaactggatccagagaccatccangtcaaaatgcactggattatacacatccgacaaacctactactactatccatatacacgatctctttcactataaccacagcaccaagcgtttatcgagaagaagctaaagaactttgacaataagcttacgacatagcttatcacgcctttaatggatacatggaccacgctttcctcctacattaattgacacctccctcctgcacaagacataatacgcttgcaagctatgcaataaccttgattgac

SEQ ID NO: 72512 - DNA, 286 bp, Glycine max
  Clone ID: PAT_MRT3847_36490C.1
ggacgcaaggaaaagggccccaagttaatttaaggggaccctttaacccaaaatttataaggggagacctcccaaactcaaaaattttatagacgcatctcaaactggggcttttttcttttacccctaaacattgagaaacccaaaaagggtacccccccatcccagcaccactttttacgcttggatcaactcaacctccgagaaccgaaattttttcctggcacattcgacttgacccctattcaatagtgggaaaaagatccccttgaaatgaccccccttg

SEQ ID NO: 72513 - DNA, 453 bp, Glycine max
  Clone ID: PAT_MRT3847_36491C.1
cgtttatttcgtggacattttttttgtctcgggaatttatttattttttcctcataatatagcatgacaatgttatttttgggttccatatatatgctctaaaaaaattgtttggttaattattaaaattgactgtaaatgttttttatattctcataaataaaacacgtgtgcttgattgagttattttttttgttgagagtttgattgagttattaatttctaactttgcataaatgttaagtaagttttctatctaataacatacacataacacctttcagtatgtaactgagtatctttcacgaatatatatatatatatatatatatatatatatagagagagagagagagagagagagagagagagagaagagagagagagagagagagagagagagaacaattccaatatgcctattttgcgtgaatgaaattggcacatagggat

SEQ ID NO: 72514 - DNA, 462 bp, Glycine max
  Clone ID: PAT_MRT3847_36492C.1
tggccctggggagcataagatgtttcccttgcctgagactaactatatactagttgctagttacttacttacatattagagaagagtcaatggcaatagtgctgcacctcatgatcctccctgagccttagctcatagccagagcctagaggatgcctccaccgcgtacaccaccaacaagcccgcctacttctatgtataatgatgatcatgagcacgacatggtcatgccctgctttcgattgcatccaattgaagaagagctcgagtaattctacctctcaccctaagagtgcagggatagcgtttgaacgatgagcttattattttcctcaatctatatcgatatgacccttgggagcattccgccttggcagcatattagtgagaaggagtggcacttatatgtgcccatagataggaagtatctcaactgtgatcgtcccattcgggtaactactc

SEQ ID NO: 72515 - DNA, 300 bp, Glycine max
  Clone ID: PAT_MRT3847_36493C.1
gacactgttgaagtggatgctataacacaccgaatgacatgtaaaacaggggtagtgaatataccatatggtggtaccaaaggagggataggctgttacccagcagaattaacaatatctgaattagacagacttactagagattttacactgactaatcacgatcagattggttctcacacagatgttccagcacctgatatgtgaacaggaccacagaccatgtcatgggatactatatcaattttccaaatttctacgttacttttctgcagtagtttactggaaaacctttatata

SEQ ID NO: 72516 - DNA, 639 bp, Glycine max
  Clone ID: PAT_MRT3847_36494C.1
gcagtccctctctgaggctcttgaaaagattagaacagaattgatgcttctgggtttcacatctctgctgctaacggtgagcgaaaaatcaattgcaaatatttgcattccaaagggtgcaggcgaaactcttattccctgtgcaagcataacttttgatgatgccaagaaacaaaatgtgcagagcaggtatgtaaatatctaaagcatatatgtgtgtcaagtgtgtgtgtgcatgtgtatcatcaaattggaggttggctttctagttttctacttgatatgatggaacttcagttggaaacttaattcagagaaaggcactcaagttagaacatgcatatatgcatcacataaggcatggtcattggaagagaaaacaggggagccaggtttgagtacttttgtaaatataaattttttgctttatatatataaactcctgaaaattttacaaattccaatcagccttacatagttacatttagatatgtatattttaggaggagtgctaattattaacaataatcttgagtgaaacctataaccaatagtaaaatgtgtttaaaaaaaaaaaagtctatgataaaatatgttggtgacatatttcatatttgaatgcttgcacgggggcaaagt

SEQ ID NO: 72517 - DNA, 352 bp, Glycine max
  Clone ID: PAT_MRT3847_36495C.1
ccacgcgtccggcactgctttggttgtcaacctagaatgaccatacactaacttgtattctcccttgaagtatcttgatgataaaatttctactttttgtttgtttaaatcatttaattaagttgaatgagatggtggaataatattggagaataccaatgtaacttcgtttctgtatcattttaagctttaacatgctacatttcatttatgacaccatcactctgatgttggttgcccttcacactctgtaaaaaaaaaaaaaaaaaaaaaaaaaaaaaaaaaaaaaagaaaaaaaaatataaaaaaaaaaagattacaaaacaaaagaatgcaaacgtataaaatatta

SEQ ID NO: 72518 - DNA, 321 bp, Glycine max
  Clone ID: PAT_MRT3847_36496C.1
cgctttcgttgtctgacccgtgggcggacgcgtgggagatccccctaatggcacaaggggaaatcgtgtgttttcatgcacgtgttccatggagtgcattggtccgtacatgtagtcagggttaaagttctggaatgcatgtgccagctatggtaatgatcatggatagtatctcacgctgcttctggatcatgtttcatgcgctgctgttggctggtccttatgatacacttcctgtacattgagggaatctgatttgctgagcgactttcagtggatggaggcatattttggagggatcatttacggagcccatcacgc

SEQ ID NO: 72519 - DNA, 250 bp, Glycine max
  Clone ID: PAT_MRT3847_36497C.1
gactttcatttgcattgagctcgagcgttacatcaggtacatcatgagactcaacagctccaaactcctcaacgccttgtcctaacattattatcgagccacaattttatatgtactctttccagccttactctataccttgaacttcccttcccctgccccagactttaaattgcaccgcgccttcaatcgaatttccgatagccgatcccatactcgctgttaatctgatgggagaacagaagtccgc

SEQ ID NO: 72520 - DNA, 296 bp, Glycine max
  Clone ID: PAT_MRT3847_36498C.1
atattaaatggagggactaaaactgattaaaatttaaatagagactaaaagcaagtcatattatattctggcaactcctctgtgcaggagactctcccaaattactttcagtttgttcagaaccaatctgaggttgatgagcaactgtagatgattgatctggtgctattgccatgtctctcccattttcatgtatattgggtcttcttgcaagcctgaccgctcccacaatggtgaggagaaatcatgtttggatttatgcccctgttcccctttgtctggcggcttttcctggt

SEQ ID NO: 72521 - DNA, 403 bp, Glycine max
  Clone ID: PAT_MRT3847_36499C.1
aaaaacaatcggggtttttttactatatgggccaaaacttaaaagggccccctaaataaccccccctggaaagaatccctaacttttttaaccacaaaaaaaaaagggttacgtttttccaaaccattttgccctggagggggggaattaaagacctttcaaacctccaaaagttttaagaagggcaattcctaacccaaagaaccccttttcctatacatttttccaccgcttttaacaaggctatggttcgcccctgggttcccctggcttggaagcagggggccccaatttatgaagcggatttaatccgctgggtttattttggggaatcttcctttccatttttaaaaacccaaccctcccccgttcttcctatagggggggactcgaaaaaggggga

SEQ ID NO: 72522 - DNA, 496 bp, Glycine max
  unsure (1)..(496): unsure at all n locations
  Clone ID: PAT_MRT3847_3649C.1
tttccctactcctgataacatttacatcataagtatttaattacatgattacaaaattcatgataccaaaaaataaaacaataagtgccctcaatttcttccttcaaaaactaatcacgcaacaccaaacgttgcatcggtcgtttccctcgccggtctacttcagctgtagtattggagcttgttgttggtgttgttgcagaagtggtagtgttagtgccacaatttcttgaagaatcaaaagtgtgcaaattagagtcatcatcaacttccccagaagacattgcatagggtctgcgtgatactcttctgtatctggaaccgggtattcctggtcttgttggttcttccatgtggcctggcggtttctttgacaacaccacaatcacacgccccatcgtaggacgtaggtttagatcaccttgtgtgcagagtagacccagttgaatgcacatttctgcttgttctgttaccgctgnggaggccaatgttgggt

SEQ ID NO: 72523 - DNA, 890 bp, Glycine max
  Clone ID: PAT_MRT3847_364C.1
aaaagaaaaaaaaagcttgttattgttgaattaatcacactttattacaaatatagaagttaagatctctcccttaagaaactggaattatgttctctgacattcatgtgctacaaagttttaaagtataaaactttttccgtattcttcttccagtttgtcaccttttccttggcgtgattcatacatccaaaagagtaggtacactacttcatcttgcatgctgtttatgctatactatcttccatgtgcaaagttgagcatgtataatcagagttgtacaggagaagaagccgattatatctcaagaacaatatctgttaagaaaaaaaaatacgtatatattgtaaaaaatagctgaaattgactttgttcctagattgaaaagtaggaaaacattctcaataattgaataactcagacatgattacatgaacttaagcactatgtcaaactaatgtatgtgattaatagaccatataatataaataaattaatcaatgtgtagaacttacattcagaatcagtcttgacccatttacttccattttctgcagcagcagcagcgagttcctcttcttcatcatcatcctcctcatcatcaaactgagaaattggtgtggcttcaaggtacttctttacaaacggtgttgttgaacatgaaccttggggatatatctttttctgaagtattgccctcaaaatcttctccattcttgactcagtggaaagtggatctttgaacaaaggggtaggttgaaatccacttttgcaagcaagcatcttcttaagaagaaaagaaagtgatttcttcccaacacctttcttactgctatgatccaaactacaatcttttcccctgctgaatattatactattgcttgggtaga

SEQ ID NO: 72524 - DNA, 591 bp, Glycine max
  Clone ID: PAT_MRT3847_36500C.1
agagagagagagagagagagagagagagagagagagagagagagagagtgaaaactattccgtatcctgtcttagaaattaaaatcttctttgtatcaaagcatacccttagaattatatataataataataataataataataattattattattattattattattattattattattattattatgcaaacaacgtagacttgtgataaaaaaaaagttattttttatagtaataatgtataaaccttttagtgtatcaaatactctatcatcatcaatgaataggtcattagttcaaatgatattatgtttgattctcttaaatcaaattttgaattcaaattatgaataataaaaaaatataattaagaaaaaaatcttcactgaaaatgacaaatcgaattttctaacacattatatcacattttttattctttatatttctctgtttaattgtcgaatagaatttagtatatccatccaacttttcccttatttccccttctttcttcttgtctcactttgtttacttgcatagttccatgcatgcgcacttcctaatactatatagatattgattcttctgat

SEQ ID NO: 72525 - DNA, 1125 bp, Glycine max
  Clone ID: PAT_MRT3847_36501C.1
tcggtcacgcgttcggtgaacttgtatagattctcactgatggcattattggacttttattagattcttgtgatttcaattcttggttcattgaatgatgacatggtaatgactggacttgcattaaccaaatcctgtcatatttgcacaagtctttttccttaaggtgtagtcccttgttttttctgcatgagccattcggctcgagaatttttcttgcgtacacccgcattgttttttccccacaagcaagtttgcaaaggcaataatctctattaccctcattatccaaaatcagaaaaaatggccactagaggcctcaaaatttgcttggccgtgtcctctcttttcttgatcattcttgccatcgttattgtgaccttaattttgaccatctttaaacccaagaacccagatatatttctccacccagttgacctagaaaactttcaattgctttcacctaatacaactagtgcacccttaggcatagtgatcacaattgtgaaccctaattatggaaacttcaagtacgtgaattccagtggctatcttaaatatcgtgacaccattatagccgaagttccattggggataagatcattccctgctcgtagcactaccaatgtgagcactactgtgggtattatgaccgataaattgatacaagatccaaagtttttgtcagatattgaaggtggggtgttcaatttgacagcagaggccacacttcctgggaaagtgaccatgatcaagattttaaggcttaaggccaagatttatatctcttgtggcgtctctttcaacataattgctgtggatgctagttccagctgcatgtccaaaatcaaattgtgactgcatgttaattgcaaaagagaggaatttctacacatgttgaaactaatatgctcttggtgggggttgggggaggatatatgatctcctttgcctttaaattattactctctccttttctttttatctttgtctcactggtttcattttatcttatttcaagatttttacgtaaaaattaaaaaaatgttataatttttattgactctaatgaagatttgtaggttaaacgtaccctgcgctataccgtagggatgttatagaatt

SEQ ID NO: 72526 - DNA, 267 bp, Glycine max
  Clone ID: PAT_MRT3847_36502C.1
ttgggggggggggggggggggggggggggggggggggagtgagaagggaggacggagaaagataatgaacgaaaccggaataaacccacagacgcactcaccaactgaacccataatacgatttaaacccttggtgaatcaaaaagtaaaggctcttcgcggagaaagctcgagatgctgcccaaagataaagctagcgcctaagatcaccattctagaatcaatacagtatcgtgatcaagaacacccaaattaagcagcgtagtg

SEQ ID NO: 72527 - DNA, 294 bp, Glycine max
  Clone ID: PAT_MRT3847_36503C.1
gtcctttttttttttttttttttagccactgactaatatgggactggccttctattttatatttttaaattctaaattatgtacacacaaagaacgatgcatatccataatcttcgatcggctataggatctagaagaaacgaaaaaagcttatccgctcaaaataataaacccttgattccgtggctacgagttgagaacaagaaaaacatgggggaaaaaaccaaactggagagccgcatactggaccagccgtgggcatactcccttgatgtggggggggccaacaaaagc

SEQ ID NO: 72528 - DNA, 214 bp, Glycine max
  unsure (1)..(214): unsure at all n locations
  Clone ID: PAT_MRT3847_36504C.1
atccgtgaattggatggnatgtttagaagaatatgttgttggaatgnaatagaattaanatcaaaattaaaatgtgcatatatangtatatttgcnacttctcntatcgnnaatgtntatgttttnccccnangttttccgtgtagtgagggttcncactngcatagctctttggctngggannagngtncctctcatcnctgctgaatgttcc

SEQ ID NO: 72529 - DNA, 1002 bp, Glycine max
  Clone ID: PAT_MRT3847_36505C.1
atgagtatctccaccactaccaccacccctctcttctgcttcaaccactacttcacaagagaaagagaactttccattcaccgttccaggccaaagccattctctctcacttccgcttccactctcaccctcttcaactccaacaacaacaataactgtaactatagctttgcctcttgcaaaccacacaagtttcacactccaaagtttgaagcttttgccacaaacacggataccctcgagtcaattcagtcctctgatgtctcgttcgatcagactttccccatcaaccgaactgaactggtggagggaaagatctttgtaagattggatcaggggaaggatttgggaaattgggagcttacagtgggttgcaatctaccagggaaatggattgttcactggggagtttcccgtgtggatgatgttggaagtgaatgggatcaacctcctcgcgatatgataccccctggatctattcctattaaggactatgcaatagagacacctatgaagaaatcattgtcatctgctgaaggagatattttacatgaagtcaagattgatcttaaacccaacaatgatatttcagctattaattttgttctcaaggatgaggaaaccggtgcttggtaccaacacaaaggaagagatttcaaggttcctctggtcaactaccttaaagaggatgctaatataattggacctaaaaagggttttagtttgtggccaggttttttgaaatcatatattgtgatcttttttgcttcagttttttctatttcatctcttttttgaaatttatactatttcatggcttttagagtgtgtcaaacaaatcataattctattattcattgaatccataagttccctttggttcatgtttccccccgcccttttagtactcattccttctttcacttttgagtagccatcttaatccatagcaagatgaggaaacccatgcttggtacctaaaaaaattgagagatttcaagg

SEQ ID NO: 72530 - DNA, 185 bp, Glycine max
  Clone ID: PAT_MRT3847_36506C.1
gatactttggctgaagcgcagttccacattgccatgaaataatgaggctactctgttcatatgtgaattggaattgtctgatttcttctttggcctgtcctgaatccaaaggaaatgagatcgggatatctccggggcgccgagctgcgattcgatatagtgaggtcgttcaaggacggaagagt

SEQ ID NO: 72531 - DNA, 249 bp, Glycine max
  Clone ID: PAT_MRT3847_36507C.1
cggcttcgaagtaggaagtgattgttggaagaaaagtatagtcttaacaggcagaggagtggaatatggaattgcttgagaggtggagcctttgaagaagaagaagtttgggctggttttcaaggaaaacatcgatacaaacattctggagttcacaagaccagggaaaaagggtctttttctccccaagccgtccccaagaactctccaagtgccgcaagggtgattcccaaggcctgtagtggcaat

SEQ ID NO: 72532 - DNA, 217 bp, Glycine max
  Clone ID: PAT_MRT3847_36508C.1
cccacgcgtccgcccacgcgtccgcttgatcagggtgatttcttagtacattttatgggtgttgcaccaaattgaccggcttaaaaggcctgttaaagcttaagttgaaaacctgcagcttcttttaaaccttgctttgcgtcctacagcagttgcagcaaatccttttattgaaggcttaccctgggtgggggaagaacctcttttgttaaaaagg

SEQ ID NO: 72533 - DNA, 566 bp, Glycine max
  unsure (1)..(566): unsure at all n locations
  Clone ID: PAT_MRT3847_36509C.1
ggtccggaattcccgcgtcgacccacgcgtccggcaagtgaggaacaagcaagtgcttctaaaggactatgttaccggttttcccaaagaatccgacatgaatattgtcgaaagtaccataacattgaagcttccacaaggttccaatgatgtcttgctcaaaaatttgtacttgtcttgtgatccgtatatgaggaatctcatgaacaagcccgaaggccctcccaatagtcgtgcttacactcctggctctgtatgccaggagtgactgcatatgcaggtctatttgaagtaggatctcttcagaaaggagaaaatgtttttgtttcggctgcctctggcgcagttggtcaacttgttgggcaatttgctaaactgaatggttgttatgtagttggaagtgctggatctaaagagaaggtattgttataaatgtcgaagttatatacctgcaatcttgcatgagtcagcatcacctattccttatttgntctgntgnttcaaatacttattttttgttacaataaatactgctttttttattangtatttagcttataaaaata

SEQ ID NO: 72534 - DNA, 425 bp, Glycine max
  Clone ID: PAT_MRT3847_3650C.1
cctgtattacacctgtggggcgttgtccaaaattttcataattcttagcccggggataacttcactttagggaaaacaaaatgcattgaggatggaaacaagaacttatggctagttacatttaagccacattcatctgtactgagtttgtgactttaacactgaagacctttgatgatgttaactcctcaactgctttctcgccataaaaggaagctactggtcgcattaacccgtgaccaaaagcgcttacatgtgttagatttgtgttagccttttgacgcgaaaaaattggttcttcaactcctaataatgaactgcacggtgatgtcattcatctttggaaccttacagggtcagattttgagtttccagcccctggtggagcgccctccatggataatcccggatatccagacgattgc

SEQ ID NO: 72535 - DNA, 282 bp, Glycine max
  Clone ID: PAT_MRT3847_36510C.1
gcaaataccaacactgccaccaccaccactctcaccaccgccaatgtgaatccaagtcctgcccctccaaaatttatgaaagtgaaaagtcgatctctactggatcagatgctagctgatgatactaaagcaaaggttcccaaagcaagcgacggcaacgccaaccccatcaccattcctggcgtaatagagcccctggaaaagattctagttttgaaccgtgtaaacgatcatgaagacagaaccactgataaatctttggccattgtacctgctaagaaa

SEQ ID NO: 72536 - DNA, 465 bp, Glycine max
  Clone ID: PAT_MRT3847_36511C.1
acttcttcgttgcataaaaaaaacgtcattgacgactaagcacaccaaactggaatcagagctatgtcgtcgacaaagtttgacgttgagaaatttactggcaaaaataactttaacctatggcgggtaaagatgctcgctctcctcacgcaacaagaatgtgagttggcgttggaaggagaagaaatgctgccagccgaaatgacagctgcacagaaaagggtgataatgaaaaaggcatatagtgcaatattattatcactaggtgatgaagttttgggataagtctctggagaaaagactgctgacaagctttgggcaaagcttgaaagtagatacatgacaaagtcttctccataatcgtctctgtttgaagaaacagttatatactatgcatatgcatgaaggtgagtctattcacaaacatattgataatttcaacccagtttggacttagtttaaaaa

SEQ ID NO: 72537 - DNA, 1498 bp, Glycine max
  Clone ID: PAT_MRT3847_36512C.1
cggaattcccggctcgacacgcctgcgcgtatacccaaggatgcttttgtctataaactgaactgaattgagtcacaaaaacccagttgagtaactaagatggcgcaagtgaggaacaagcaagtgcttctaaaggactatgttaccggttttcccaaagaatccgacatgaatattgtcgaaagtaccataacattgaagcttccacaaggttccaatgatgtcttgctcaaaaatttgtacttgtcttgtgatccgtatatgaggaatctcatgaacaagcccgaaggccctcccaatagtcgtgcttacactcctggctctccattaataggatatggtgtgtctaaagtcctggaatctgggcacccagattataaggaaggtgatttagtgtggggctttaccaaatgggaagagtatagcttgttaccctcagctcaaatactcttcaaaattgagcacactgatgttccacttacctactacactggaattcttggtatgccaggagtgactgcatatgcaggtctatttgaagtaggatctcttcagaaaggagaaaatgtttttgtttcggctgcctctggcgcagttggtcaacttgttgggcaatttgctaaactgaatggttgttatgtagttggaagtgctggatctaaagagaaggtggatctgctgacaaataaatttggatttgatggaggttttaactacaaggaagagcctgaccttgatgcagctttgaaaaggcactttccagaaggcattgatgtttactttgagaatgttgggggcaagacacttgacgccgtactcctgaacatgagagtccgtggtcgcatacccgtctgtggaatgatctcacagtataatcttactcaacatgaaggtgtaacaaatttggcacagatcatatataagcggattcgtttgcaaggctttaacttcatggatttcgttcacctatatcccaagttcttggagtttctcctgccaaatatcagagaggggaaggttgtgtatgtggaagacatagctgaggggcttgagaatggaccttcagcattggttggcctttttagcggtcgcaatgttggaaaacaagtgctcgttgtttctcatgagtaaaaagcatttgtttcttgtgttcaatgggaagttatcagttttatttctggtttttttgctgaaaaattggctgtcttgacatcacctttgcagtcaccttcgtcaactgtatgatgatgctctttgttcttgatagtcctgagagcagtatcaaatgtaatgcacagttgtttctcttgaataaaagcatttgctttttctataaaaaaaaaaaaaaaaaaaaaaaaaaaaaaaaaaggcagctcgaattcggacgcgtggtcatttgatccttgaaaatgtcatgatttatggctaagatcggataaaaatgtttactcaactggctgtcctcaggacagtatcaatctaatatacagttaaaaaa

SEQ ID NO: 72538 - DNA, 139 bp, Glycine max
  Clone ID: PAT_MRT3847_36513C.1
tcgtcgcgtaagatatcgaactatagctaatctgatatctatacaaatgaaagactgattcatagcctgttgagaagagtaagaatcgaaacacacgactactatccggatgaaagagtgtaaagtaataacgagaaat

SEQ ID NO: 72539 - DNA, 258 bp, Glycine max
  Clone ID: PAT_MRT3847_36514C.1
gcaatgcatacgaacacccttactcatcattttcatttttcctccatatacgacatctccgttaacggccatgctatattggcacatcggaacataacatgtatgttacacctgttcctcctatcatgactactctctttgaccgaacacctcttattcatccacacaattcatccctttttccgactctctacataacgcaacgcctataactcattgtacacctacaaacaccgtatcaacttctctatcaatcaa

SEQ ID NO: 72540 - DNA, 592 bp, Glycine max
  Clone ID: PAT_MRT3847_36515C.1
agcccccatggctcccaggctttatgaagccattcttgaagagaatccccaagttgggattttcaaatatggagggccccctcattggggtaagaatagaaacttggcgtttaaaggagtcatcaagaagtacaaagatgcaaagaaatttttgaaggttaaagagaagtatgattcgcatgggcttttctcaaatacgtggacagaccaagtgttggggctaaaagatggagtgacaatactgaaggatgggtgtgcattagaaggtttgtgtatttgctcccaggatagtcattgcaatccaagcaaaggttactattgcaggccaggcaaagtttacaagaaagcaagggtttgtactcatttgaaatgagaccaaatttatcagaaaagacatcgatgctatatgctaagtgatactatttatatatgtaacttatatcttacaaatgatgaaaagtaaaatgtactgcatgattacaaagtttaagtgtggcattagttgccattgaatagtaattatgtttgatattctaaaaagccccttactctagaattttgtagatagtaaagtaataaattaagattctgc

SEQ ID NO: 72541 - DNA, 243 bp, Glycine max
  Clone ID: PAT_MRT3847_36516C.1
tttacttttagagatctttcccatcgggaactagtgatacataatggattgttattttaacaaaggtacatattattacataatttacataccataaaactgggaatcctcttaaaggaaattcacacatatgacacttttggaaacaaaacaatttgattttttaacaaaaatcttacttaaacttggattaggttgggagacatattaaaattttgtggttgatttttaatcctattattt

SEQ ID NO: 72542 - DNA, 377 bp, Glycine max
  Clone ID: PAT_MRT3847_36517C.1
cctccactataacaccttaacatcaactccgagatactttcattgtcatatttcttcaagttacattctaacctcttttccttctaataatggctgcaacaaccaacccccccgccatccctctaccatgtttttttttagcggcggaggggaacacacaccctatggcttccaccaccaatctctaccaggcctctttctgacaagggaattcccaccttctttcaccaacaaaaccttcccagcggacaggaaataacccctgcccttttcaaggcaattaaagattccaaaattgccaccactgccctctctcaacaccctccccccccctcattttgcctagatgaacttacatccattgctcactgcccccc

SEQ ID NO: 72543 - DNA, 327 bp, Glycine max
  Clone ID: PAT_MRT3847_36518C.1
cgagaagacgacagaagggagtgtgttaagtactactactacgcattgttataaattaatctatatcttcttgatatgtattatgtaattatatatgagaatttgtgaatttgttatctgtcagagactgcattattgagatgagcagtccgttgaagaatcatttgcaaagagtgatgaagatggctacgtttgcaatgaaaacctcaatttttcttagcactaataataaatggaaagctatgatatatggccaacaaaagaaagagactatgatgctagggaaattttggtggcttgtgtggaaggctgggtgctcactaacct

SEQ ID NO: 72544 - DNA, 1170 bp, Glycine max
  Clone ID: PAT_MRT3847_36519C.1
tgatagttggtgcaaatttatagataaaatcataggacttctatgtgaagcataatcaatcaatcatttacgtgctgtgtcaggtattcttagcttagcagcgagcttatccagtagactgatgggaagtgttccattggcctccgctgctgctcttgccagaaggctagaagggaaggtggcactgataactggtggagcaagtggtataggtgagtgcacagcaagacttttctccaagcatggagccaaagtggtgattgctgatatccaagacgagttaggccactcaatttgcaaagacttggattcatcttcagctacttacattcattgtgatgtcacaaaagaagaaaacatcgaacacgccgtgaacacgaccgtttccaagtacggtaaactagacatcatgcacagcagcgcaggtatagttggcgcatggaaccccagcatattgcacaacaagaagtctcactttgagcaagttatcagtgtcaacctggtgggcacattcctgggaatcaagcacgccgcgagggtgatgatcccttctgggcgtggcagcatagttgcaatggctagcatttgtggaagaattggtggcgtggcttcgcatgcctatacgagctcgaagcacggcatcgtgggactggtgcgaaacactgccgtggagcttggaaccttagggatcagagtgaatagtgtgtctccttatgcggtccctacgcccatgagtaaaactttcctcaacactgatgatgaggggattgctgcactgtattccaatcttaaagggactgttcttaagccccaggatgtggctgaagctgttctttacttgggaagtgacgagtccaagtatgttagtggccatgaccttgttgtagatgggggtttcactgtcgtaaaccctggtttgtgtgtgtttgggcaatccgtgtaggtttttaatttgtactttaagtcgtttcaagtgttttgaattacatcagccaaataatgaccaaataataaaacttttgatatattgtttggacctgttatgctggaaaaaaaaaaaaattctaatctccttttttttttaaaattaaattccaatccaactcggttctccttaaataagggggaaaaggaaaataaatcttaaaaaaaattgaaattgggtccaat

SEQ ID NO: 72545 - DNA, 174 bp, Glycine max
  Clone ID: PAT_MRT3847_3651C.1
ggaccagcaaccccgcagttattaattgtgtacaatttgaagagtagcttccactttactagggggaaaaaacttctttgttctaattggacgaaataacataatattacgctatgggactactatcaacgaatagcagtgctaccttacactggcttaagagtaaaaaatatt

SEQ ID NO: 72546 - DNA, 354 bp, Glycine max
  Clone ID: PAT_MRT3847_36520C.1
acagggggggggttattccaaagatcaccgacaaattaggcccttggatatgttggttattacagaaaatgaatccatattggtacatgaacttgaaagggcggcttttagctcctaataccacctaaatttagggaatctcgccaagcaaagggtcctaaaattggcaaaaactaaaagcttggggcttacaagaaataaagagaacaatgggttgaagcattattttattttgaaacccgcctgggttttttgtactgaaggctcaagggaactgctcgcttgggggctttaaggcctttaactttagccatgggtgctacatatggcccaagccttcttagacctttcttt

SEQ ID NO: 72547 - DNA, 395 bp, Glycine max
  unsure (1)..(395): unsure at all n locations
  Clone ID: PAT_MRT3847_36521C.1
cttcctttcttcacttcccaattcaatgaacacccaaaacccaatactcacgtgcttgccacgtgtcccttgaaattaccctttttccttcatctgattcctctactcacccacaaatccacttccccccccccccaaangnnnnnaannnnnaanccacngngaaaaacgaanaaaaancaaaaccaanactaaaaagacacganaaccaaacaaagncaaacgaaaaggnccaaaaccaagaccgagaagcgaagcaaccgaaagccaacaccaaagaggaaaccgcacccaaaacccgaaaaaaacccgacccccaaacccaagcccagccgaaaaccaaacccacacncaaaaaacaccgaaaacccaancccccacgagaagaaaaaacc

SEQ ID NO: 72548 - DNA, 321 bp, Glycine max
  Clone ID: PAT_MRT3847_36522C.1
agggccaacttacccatttatagaatggcagcaaaaaaaatatgttttttgaagtttggattcaaaaggggacaaactttacaccttgggggattatttttttttaaagggtacacaaaaaagagtatgggattcaatggaggggtcggggagccaaaaagggggcaataaataggccaatggttgtttcagcaaaaatgcccaaaatataacattcggggcaacaaatcctttgaaagggggaggaaatattttttaaacccccagaaatgaaaggggattcctcaaaaaaatacataaagggcatccttttttcatttt

SEQ ID NO: 72549 - DNA, 455 bp, Glycine max
  Clone ID: PAT_MRT3847_36523C.1
aaagcatcgttctttttatccttttctgtttgctacattttgttaaacaggaaccgatttcataattgttttttttccttttaatttaatttattatatttttttcttacattttttataaaatttgaactttttttttaattttactaattttcatatattaatttataaaaaaatataatttatctagaataggatttaaaaaataattaatgcttaaatgaaattcaatttttttaaaacatatcgcatgaattatcatatgatttatattgtatttaaatttagttaaatattgttcttgttatgatttataagttatcatatggttttttttctttaatggtaagaaaaaattaattattatctaaatactcaaaatacgaagtatattcaaattattacttgtaatgaagatatactattcatgttcaatcaattaattattcaattaa

SEQ ID NO: 72550 - DNA, 311 bp, Glycine max
  Clone ID: PAT_MRT3847_36524C.1
tcctctagagttgccgccctttgttttgtcttttaaaaccttggaagggcataaaacataacagaatgctgtagctgagtacacatggaacctaaataccacgagaatacaaccataaggtgtgaaaaattttacaataagatcttacaagctaaaaggtgagtcatcttttttttagaggggtgggggtcaccaaggggtggaaggacaacatatacgcaaacatgagtgatacaatgcgcgggataaaaatggggggcgtttctgcggaaaaaaacactcgagagaaaccctctaactgaaccaacctc

SEQ ID NO: 72551 - DNA, 325 bp, Glycine max
  Clone ID: PAT_MRT3847_36526C.1
tccgtctcccgtgggcttaaaccccttccttacaatttccaaccccgggggcccctgcccacttttgggggggaatttcctccttgcccagttgaaagtttttcgggtagccaacggttgttttggaaaaagtcgtcttgcctgaaaggggttttcatttaccaagctctttaaaacttttttggaaaaaaaagtgaaaattttcaggatcaataaaaactaattaaaatttcttggcctttgggtttgaattggcaaatcaggagaaagccatttaaatttaattctttgggagtaatttaaataatttccttttctcctaatt

SEQ ID NO: 72552 - DNA, 155 bp, Glycine max
  Clone ID: PAT_MRT3847_36527C.1
acagctttcttctattgagagacagatggaagttccctatgtttgcagtgtgatatgattgatcatgttggaggaaaagaaagcatggaagatctcttctgatcaggcaaagagttgagtttccaggagatcaatctcgtcatgatgaaaatccg

SEQ ID NO: 72553 - DNA, 537 bp, Glycine max
  Clone ID: PAT_MRT3847_36528C.1
gttgaaacttgaaagtaacaccaaaaaccaaagggaatggagaaaaacaactccctccctaaatactcatgctcctactcagaatttgggttcgctgaacgatcaaactcttacaatttcaacgggccaatccaaaagggaagtgggttttgtgcagcaaatgatccagagcttaagaggaagaagagaatcaaggcttataacgtgttcactgtggaggagaagcttaaaacaagtgttagaaacgggttcaagtggatcaaggacaagtttggtgacattcacagtggggtgtgaactatgcaacgattgattagaataaaaagtgggctagctagtactttgaaggtatgaaattaaagggaaagaaaatagaatgaatatttttcttgttgtatttatatatcttgagaggtacttttatcaactaagatgttttacaaagaaaaaaaaattgagtgtaagatgctattaacgatttcaaggaagagttcatgcaattagtatgtatcaaaaaaatgagtgtagttttgaact

SEQ ID NO: 72554 - DNA, 426 bp, Glycine max
  Clone ID: PAT_MRT3847_36529C.1
gattcgcgtgggcggacgcatggattgcatctgttgcgccacttgggcaagatattagctttccgattaaaatggagaatcgatctagggagggtggacatcatgacaacatttactacaagggtttagacaaaacccataatcataagaaattcgccaccaaaaaccaaaggcaaaatacctatactaacccaactccaacactatcaacctgactgagacaaacacaaccagacagagggcagaaagggaatgtcgtgtaatacttgccgcaagacgaagctgtggcagcgggtcttggaaccgtatatggagcataggatccccttgaatgtcaaaaagttgtatatcttttgaacacacaggtatctggcttgctcaagaatgaaccgaagcaagtgatggacacaagaggatactgacacc

SEQ ID NO: 72555 - DNA, 1538 bp, Glycine max
  Clone ID: PAT_MRT3847_3652C.1
ggctcgaggtgcttgaaattcttgaaatacgtgactgccccaaactagagggaagtttgccgaatcaccttcctgctctgaaaacacttacaattagaaattgtgagctgcttggctcttctctcccaacggctcccgccattcaaagtttggagatatgtaaaagcaataaagtagcactgcatgcgttacctctcttagtagagactatagaagtagaaggaagcccaatggtggagtctatgatagaggccatcactaacatccaaccaacttgtctccggtctttaacattaagggattgctcgtcagccgtgtcatttccgggtggtcgtttacctgaatcactgaagagtctgtatatcgaggatcttaaaaaactggaattcccgacgcaacacaaacatgagttactggaaacactgtcaatagaaagcagttgtgattcactcacatctcttcattggtcggctcgagctcgagccgaatcggctcgagcaataactgtgaaaatatggaatctcttttggtttcaggggcagagtcatttaagagtctatgctctttgataatttcccaatgccccaactttgtatcattctgtagagaaggattgcctgcgcccaacttgattactttcatggttattggctctgacaagttgaagtcgttgcctgatgagatgagtactcttctcccaaagttagaattgctccacatatcctactgcccagaaattgagtcgtttccagaagggggtatgccacctaacctgagaacagttgtgattgagaattgtgagaaactactgagcggcctagcatggccatctatgggcatgcttactgatctcactgttgggggtcgatgtgatggcatcaagtccttccctaaggagggtttgctgcctccctcccttacgtatctgtatctatatgacatgtcaaatctggagatgttggactgcacggggcttctccatctcacatccctgcaagaattagaaattaagagatgtccaaagctggagaatatggctggagaaagtcttcctgtctctctaataaaattaaccataaatagttgtcctttgctggaaaaacgatgccgcatgaagcaccctcaaatttggcctaaaatttgccacatccctggcattaaggttgacgatagatggatttagccaccaaggatgatcaacagagaatcaacaaattatcaaaggcaacgtggaaattgaccttgtatatatgtttcgaagaagtaacgatagaggtactaagtaacaacattgataaatacttaaatataatgattctccggaaaaatgttacacatcagtgttgttatattctaacttaatttttccttaagattattgaggccagagtgaaaatgaccgcgggaaacttatttttgtttttcagatatggttgattggcccggagaaactgtacctacccatgaatctaagttcaaatttgaactagtgctaaatgtaacttttgatttaattgacgtcaaattgacactttctc

SEQ ID NO: 72556 - DNA, 453 bp, Glycine max
  Clone ID: PAT_MRT3847_36530C.1
gttaattataaactagctctgatcaattcaacaaacacataacctacctcagcaccaacaccccaatgacaatccatggccaacgtctccgcagtccttttcccttcatcgtaacaactcctctcacctgtaatcaccaaaccaaaccaacaacgaaaacacaagttatttatgttaaaacataaaagcatggtccattcattcactcactcaccaattggattcacatttccccagtaagtctctttctgaggatgctccaacgaatcaccataaacctcactagtactagtaagtagaaatctagccccaattctcttcgcaaggccaagcatgttaagcatgcccatcacattcgtcttgatggtcttcacgggcgaatgagctcgaatagaatcggctcaacgacgtcgtggcgaatgagctcgaacctagggttcccgaacagatgca

SEQ ID NO: 72557 - DNA, 677 bp, Glycine max
  Clone ID: PAT_MRT3847_36531C.1
gtaagctcgcgcgtcccattaatggctgattttggtgactattttgggttgcttttcatttggctagcctccatcttcattttacgtgtaatattattcacaaagtctcgcatcaagtcacgtctacccccaagtcctagagccctccctgtgttaggacacctctacctcctcaccaagctcccccaccaagcattccacaacatctcaatacgttatggtcctttggtctacctcttgttcggttccaagccttgtgttcttgtttcatcacccgaaatggcaagacaatgcctcaaaacccacgaaacatgtttcctaaaccgacccaaaagaaccaatttggactacatcacatacggttcttcagattttgtgttggcaccctatggaccctattggagcttcatgaagaggctttgcatgactgaactcctcggtggccgcatgcttcaccagcaccttcccattagagaagaagaaacaaagctgttttttaagagtatgatgaaaaaggcttgttttggagaggaggtgaacatagggaaggagctagccatgttggcaaataacataatcacaaggatggctttgggaagaaagtgttgtgatgatgttgaaggggagggggaccaattgattgagttggtgaaagagatgactgagctaggtgggga

SEQ ID NO: 72558 - DNA, 206 bp, Glycine max
  Clone ID: PAT_MRT3847_36532C.1
atctgcaattaatactggaataaaaaggtttatgaaaattgaaaacactaccactcaaacaaaaaatgtatagtctggttggtggaataagttaaatttgatgaaaaagactgtaaaaatgagtggaatattgataaatctatggacaaaatattctaactcttttacatgtgtagtacaaatgttcgaataccaggaacaagtat

SEQ ID NO: 72559 - DNA, 510 bp, Glycine max
  Clone ID: PAT_MRT3847_36533C.1
aattcggctcgagcggctcgaggtggatcattcatgaatttataaaggaacataatcatgaacttttaccagctttggcatatcattttcggattcatagaaatatgaaattagctgaaaagaataatattgatatcctgcatgctgttagtgaacgcaccagaaagatgtatgttgaaatgtctaggcaatctagtggctgtcaaaacattgggtctttcatgggtgatataaactatcagtttgacagaggccagtatttggctttggatgagggagatgcccaagttatgctcgagtattttaagcatgtacaaaaggagagtcccaacttcttctattctatagatttaaatgaagagcagcgcttaagaaatctattttggattgatgcaaaaagtatcaatgattatctcagctttaacgatgtagtttcatttgataccacttacataaaaagcattgacaagctgccatttgcaccttttgttggagtaaaccaccactctc

SEQ ID NO: 72560 - DNA, 499 bp, Glycine max
  unsure (1)..(499): unsure at all n locations
  Clone ID: PAT_MRT3847_36534C.1
gtctgnctgtcaaccgcgatcacaggttgccgcaccttaaaaccggaaacaaaagcaatcgttacttgatttcaagaatttctcaattccttcctacttccttgtgttcgattcctcacgggaaagaaaatcactctctgtgctggtcacagacttcgggaatcaatttcttttccactcctggtttatttgctgaacactctcctatttgatataggactcagtgtcagatctaaactccctctgttcatttctcagctctctgcttaattttaagttcaagctggtgaaatcttggattagtgctcccactctcctatctggtataggacttcctgggaagactactctatttatctcctttctttcactctcttgttctcactgatccacattgccgatcaaagaggacttatttgaaaaacacttgggcgttcgtgcaaatgtttgctccgctaattcactctggagacaacaggctcactgagaaacaatttta

SEQ ID NO: 72561 - DNA, 1024 bp, Glycine max
  Clone ID: PAT_MRT3847_36535C.1
gaagacgacagaaggggattgaaataaatgaaagagtgtgaaaagttggtgggtcagcagtagttgaagataaggagttaaaggtgccacggagaaacaaatactactcatttagtgtgtgtgtgtgtgtgaactgaagagtactctttggaaaccaaagtataaagcaacagcagcagcagggaagcaatggaaggtggtatatcgaatagtacagctacaggaacgacagagtcagagttggaagccttgcagagagagcatgaagagaaaaatatgaaaattaaagagctcaagagacagattgaattgacaaagaaccgcttggaaaagaaaaagaaagaagtcacggaggagcaaatgggaggtttcaatataagcaagaaatataacagcctgacagaggaataaaatgaaatgctagctgaaaaattaagggaatcaaagtaataaatctcaaattattaagcctagctataaacattactagtttcggatatatttaatcaacgtgtgccgtgtatctaattaaagttttaatttcttttgaaattttatatttataagattattttttatatatatgttgactcacacacacgcactcaaactaacaaataatctagtacagtacaatatttttactctatggtttcttgtggtggcattttgtatggctttgtcattgacctataggctatagcatttgtttaagatatattttcttccatgaaataaaaaatataaagcaagatttgtgattggccaaataccatttattcatatgatattttttaataattttttttctataaccacattaataatcttattttgtagtattttcttttctcttcttattttatcgcacaaaaattagacaaattttattgtgcattttcaatgtaatattaaatggagatcgtcttgtaataagggtatcattttagcatgacatgttgtgtgtatgtatgtccacgtgtgccgtgaaataaataaaaaaaatggtctgtgtctctgttga

SEQ ID NO: 72562 - DNA, 1357 bp, Glycine max
  unsure (1)..(1357): unsure at all n locations
  Clone ID: PAT_MRT3847_36536C.1
ccctcccccccttcccttcccctgagataaaatatatatacttgttaaatattccattaaagtatgaaaactcagattgcgtttgatttagagtttgcttgatcataacatctcttctgggtgcttgagaaagcatgaaaatgttcctcatcatcttccttaaaaaaataaaactctggttactttttctccacaaacatacaattatccttaaccgccctcttcaaatcctcaagccccacatggccaccagaaaacaccattctccccatgcgactcacatcattcaccgtcacattcctcacgctcccccactcgcaccttccattcacaacctcacacactaccatctcctccggttccatccggttctgaaaatacacataatccccaatccaattcacctcaatggaccccgccacaccccaacaacagcaacaatccccttcacccattactaacttcaccaccatctccttcggaaccgctcctatttcctcaaaccctaaccctaaccctaaccctaaccctcctttcacttcccacaacttaacctccttcacgttctccgcgtcccccactaaacccgccaccattaaacgaccgcgtatcgttcccgttacgcagtggaaaacgctctgatcaggacgtaagttgaacggtccctgccacgtcatcgtgccgcagtcgaacgagcacgtcacgccggagtttttctccgtcacgtgcatcttgtctccggcgacggcgacggtgagccacgtggaggcggttgagcctttgagaatcccnnggcatgggctcgcaccggagccaggcgtgtgactccgcgtcgtacgcctccaccgcaaggggatcgtcctcgaagtcacacgcgccgccggcgaggatgattttggttcccacgcgcgcgacggtggggtcggtgcgccacacgcgcggtgggcgggcgtggtgccaggcgagcttgagagggtcgagagagaaggtgaattctctgggggagagcgtgtagaggagcgtggagtgcgacgagcggagggcggtggtgtggttgggactcggcgcgtggatttggaaccattctcgcgagcgcgggtcgtaggcgaaggtggtggtcacgtgcggggcacgggggctctgggtgtgcacggtgagccagggcttggcgggcttgacgtggcggagggaggtggagaccgcacgcttccaggaattcgacacgtgagaggctggcacgaggtggatgagtggcacgtgtgagaatatggcctctaagatgtctacgtgcatgggagcttcttcttcttctttttcgtctttgaatgttgccatctcaattttgccggacgcgtgg

SEQ ID NO: 72563 - DNA, 556 bp, Glycine max
  Clone ID: PAT_MRT3847_36537C.1
aatattaggaattctcaaactcagaagctcctcactctatcagattgtcaggaatataagttcaattcactatcaattcatcactccatctaattcattctacaaaatgattccaaaaccaaccatacaataagtcaactgatctgttcaataggtcaataaattgttcttagttggtcaaagagtgaagtggggaagtgcctcacaaatttttgtttcgtatttctaactgatctgcataaagataatgattttttctttctataaggagtacaattaaaagaatcactaggctaataagtaaaacaaagggcagtgataaaagctttgcagtggttaaacgtatataaaagagcaagctcctatcaagtgaattcatctgtaaaatgagccagtaagagtgtattcaattcacccttggtgcattgtgatcttaacctactaaaattcaagaactaatccactctttgcttgctcattttagagaacactacacacaaaagaagatgagcaattggttttggggcataacaaggtaaaaaatgatgccctccaa

SEQ ID NO: 72564 - DNA, 1939 bp, Glycine max
  Clone ID: PAT_MRT3847_36538C.1
catctcttaataacatttagctgtaatatggtgggcattctaatggaaacctaaacaaatggggctgaaggaattactgcaggcattcttagacttcagatgctctgttgttgagaggcgtgcaaggtttaagttatcacaagcacaagagagaagacatattgttgagggtattcttattgggtttgataatctggatggagtgattcgcataatacgtgaagcttcaagtaactcggctgcagcagctggtttacgtaatgcattcagtctctctgagaaacaagctgaagctcttctggacattagcctaagaagactgtcccttcgtgagagtggaaactttgtggctgaaagtaaatctttgatggaacaaatttccaagttagaggaactgttgtccagcaggaaaaatatactggagcttatagaacaagaagcaattgaactgaagagtaagttttccaatccaagacgttcaatgttggaggacacagataatggtcaacttgaggacattgatgttattccaaatgaagagatgatattggcacttagtgaaaaaggttatatgaaacggatgaagccaagcacttttaacctacaaaatcgtggaacaattggaaaatctgtaggaaaattaaaagtgaacgattcaatgtctgattttctcgtttgtcatgcacacgatcatgtcctatatttcagtgataagggaacagtttactcagctcgtgcctacaaaattcctgaatgtagccgcactgctgctggcacaccacttgttcagatcttatctttatctgatggtgaaagaataacatctattattcctgtgagtgagtttgctgaggatcagtttttgctgatgcttacaatgcaaggctatatcaagagagtatccttgaatttgttttcatcaatcaggtcgatcggaatcattgctattcaattggttcctggtgatgagctgaaatgggtccgtctttgctcaaatgatgactttgtggccatggcttctcacaatggaatggtcatgctaagccaatgcagcaagattcgcacactaagtagaaatacgcggggggcacctgcaatgagactcaaaaaaggggataagatggcgagtgtggacattataccagcagcgatgtggaacaacttggaaaccacatcaaaatttcctgggatcaatgcaaagagccaaaatgggccatggttattgttcgtatctgagaatggttatggaaagagagttcctttgagcagtttccggatatcatctttgaatcgagttggtttgataggatataagttttctgctgaggatcgcttggctgctgtttttgtggtaggattctcatcagcagaggatggtgaaagtgatgaacaagtggttctcgtaagccaaagtggcactgtcaacagaattaaggttcgggatatttcaatacaatcccgatttgcaaggggagttattttgatgcgacttgatcattccggaaagattcagtctgcttcattgatctcagcaacagattgtgagcctgaggaagttcttgccattgctcaaggatagtaaaagaaaaccttgaagaggttacttggccaaatgccggaatatctgagttgtagtttaccccttgatgaaatgctgctgctgcttgatccttgaatctgtgcttttggacatggtttctattgaaatcgtcctatttttgtcctgctccctttatattttgtattttgggaaaagggggtacctttgaaaaggtggtcgggatgcctgtaattttttttgtcttgtaaattgtgactgaagagtgaaaaacacacgcgagacgatagttactggtgaaaaattttaatcaactctacttttcaatgcttgagaatcttctcttcatattataaaaaaaaaaaaaaaactcgagactag

SEQ ID NO: 72565 - DNA, 1256 bp, Glycine max
  Clone ID: PAT_MRT3847_36539C.1
aaatgctaatatatcatgcactcaataaccgtaaaatagtgatggcagagagacatttctattttatgatttctgtatgaaatcatataaatttaaaatcaataacaattctatcgtacaacaaagtttgcaaaacttgtaagctagttttgacagtcatgacagcattcatgaccatagctacttattgccaactattactgtctacaagcttaagaccccagctcatatcctcacagtgccttacatgtggaacaagtgcaccagtatcagttcctctcttagctttgcaatcatagaagggaggagcatggaagcacggctccatcgacatggcacgttgacaaggaggatcaggagctgttccattctcgggcttgtacagtatccacggtttcaaccctccaagcccctgagctacgtagccgaaagtagaccatgagctcgtgaccaacatgtcggtcaagctcaagaggtacatttcggcccaagctttttggttgtgcatcttcttctctgtttgttgatgcccttcatggcttggctggtaaatgccaacaacttctcctgtcacagtaggatgttccaaaaacatgtctctcaccatgtcaaaataaccagagctcaaggaagtcatcagcacagcttttgacttcggctttgccaatgaattgacaatatcccccctttcggttaacatcaggcaaaagattctccttcaaagtgcaagctaagatctgatccaacacatgttgaaatggaccagttccagtgtcaaaaactcttatctggatgcctactctttcatcaaccttagctaaataagcttgataatatctgctaacaagtccccatactttgttggtggggtggaacagatatctacccaagaaatgaaaaactgtttccttgtttgggaagagatcacttagttgcttctcaaaagatggcatcaagaatagagatgggacaaaatagttatctgtccttaccactaaccatggaactttctgaagaaaagcttggtcttcatcacagaagaaaagtttgtcctgatcatcatagtcatgtgctagatgaaggtagacaaaagagggtaccatggagtttgtggttgatttattttttagcatttgcccataacactgatcagatttctgaccaaaattgggaaattgactgttgagagggaaattaggagggagaagccaggaaacatgtggaaacggttcgcaaaaaagatcccccatgtcaac

SEQ ID NO: 72566 - DNA, 292 bp, Glycine max
  Clone ID: PAT_MRT3847_3653C.1
tacggctgcgagaagacgacagaagggacctctcacgttctacgtctattagtgactactgtagtattgctacacgtgggctcatttattattgcgtggacggaaagtcatcttctattaacatcccatcaatttttcagatccatccgttcattttaccaccgacttctctcacccccttagatttcatccacgtgtccattgtgccacccacccacccatagcattcatacaacacacccataatcatcattccacaacaaaatccaccctattatctattaacaaacat

SEQ ID NO: 72567 - DNA, 400 bp, Glycine max
  Clone ID: PAT_MRT3847_36540C.1
atcttaagtttaacttcgcaaaaagaatgaaaaaatgctgcacaaggccttacaagaaaggaatggcttgatgcacatatacttacctataaaatacatggtgtgactgctagcatgccatccaacactagataacctacccatctgaagaaacaacccaagaattgggttacttttttggccgcacaccaaatcttacctatgtccgtcatttgacacatgacatgcattatttgcgacatggcttatgaacaaaacccctattgctgatgaaacttgcggggtttatccgtcttaacgccagaataacacaccaacgctagaagcctaacttggctggaaaacactattcacttttttacaactaaattatttgcagtgctaagtacctgaaccttgg

SEQ ID NO: 72568 - DNA, 201 bp, Glycine max
  Clone ID: PAT_MRT3847_36541C.1
tatttgcacgattcgaggcaagagctaagaagagtggcaatccatgtgatgatgtagagcctgctgctgaaagaggggctgaaaatgaggttggaaatgagaaaacccaggtgcataaaaatgttgctgttccattctctagggcggaagatactgatgttaaaggtttttatttatttacttattttcattaagtgtgct

SEQ ID NO: 72569 - DNA, 354 bp, Glycine max
  Clone ID: PAT_MRT3847_36542C.1
agggtacggaccaaagggctaactttctttatgttaaattaaaggttgaaatattccaataaccttgagggttttcttcacccgcatgtctttttttgcccagtggcattaaaaccccagatacccaaaaaaaagaacagactttcgcccaaagcccaacttaactaacaaaaattggtattttgggccaaatggagggccctgtcggaaagaaccctgtttgttcaaagctttgaagttggcaaacccaggggttttgtcttaacaaggcatggggagaccctcgggggtcgaacattctcaatgaggaagggtttaaccctattggtagtaaaccaaaaaggggaccccttg

SEQ ID NO: 72570 - DNA, 527 bp, Glycine max
  Clone ID: PAT_MRT3847_36543C.1
ggctcgaggtgaaacaagctccaaatattctcacaattgccttgaaaagatttcaggtctgagtaatttgatctggatgatcttgccaagttgttgagagatgttttaagtaatataaatatcagttcttatgatttgttctaattttgccttcttgaaatgtgcctcgagtgtaaattgtatgggtgttagtttaccatgactatgcaccatactgtacgattacattatttctttttcctgctagtacttataaaggattgaatactacttgaatgttttttgaatttgtcaacttttctcatgatttttctggggcattgtgaacatgcagagtgggaggtttggaaagcttaacaagagagtaactttccctgagactttagatcttagtccttacatgagtgaagttggagatggatctgatatttataagctatatgctgtcgtagtacatattgatatgctgaatgcttcattttttggtcattacatctgctacatcaaagatttctgtggaaactggt

SEQ ID NO: 72571 - DNA, 369 bp, Glycine max
  Clone ID: PAT_MRT3847_36544C.1
ggcgagcgagaaggtgggttcagggcggcattgacttggttgtttatattggtgtgcttattggggtgggacgaggtgtgggggaaacatgcactgagggtgaaattggatgctgtcacaccaatgcttcctctccaagggagggtgtgtctctctaagttcggaagaggatacttcgatctatagctctttactgggagacactgagagcgaccccccttgcctcccttcggcggtggcacaagggatgggggcctcaaatgtggcgatatattcaaaccacgcaaataatatcaattttttggatgatgaaaagcctccctggggatggagggatggctccacgggaaacaccaggacatcggtcac

SEQ ID NO: 72572 - DNA, 204 bp, Glycine max
  Clone ID: PAT_MRT3847_36545C.1
ttattttttttttttttttttttttgtcttgggaactttttataattttctgtggcaactgaaaaagaattacaggcgaaattaaaaattttaaccaaccaaatatataggatgtcccccaccaaaaagggctgcattcttgctattaaaagggcatcctgattttagtcttagccagccttggtaccctcaatttatgatgac

SEQ ID NO: 72573 - DNA, 946 bp, Glycine max
  Clone ID: PAT_MRT3847_36546C.1
ggtttagtaacaagggtaacaagacttgtgatgtgtgcaaggaggaggttcggaacctccctgtcactctcttaaggatccgaagtgttcgagctcagaatactagagcaaggtccgaacagggagatgacttcagggcttggcaggaacttccagtgcttgtcattgtcagcatgcttgcctatttctgtttccttgagcagctgttggttggaagaatgagaaccaaggcaattttcatctctcttccgtttgcctgtgtactgggtctactctcctccgtaacatcatcgaccatggtgaagagcaggttcatctggatttatgcttctgtccaatttgttttggtggtcatattcgcccacatattttaccccttggttggtaagcatgcggttttggcaatccttcttgcaacatttgctgggtttggtgtggtgatgagtggaagttcaattcttttggagtcttctagatggagaagaagatggcaggcacaacagcgtggttcttcagcgatgacacaagaaggactatgaaatcagagctgtatcagtgtctctatggcttcttaagtttcttattgtcaaccaagctaagggaatttggcagaactaattgccaattgtcattgtatagacgattgagctttggcaggattttactagtgtgtacatgtgcactagacttcattgtacagcttacattgtcgtaatagagaataacttaggactagagtgtctcttgctgtttaatcattttgtttatttcttcgtaccaagcattttcaccacagtaaaacaagaatgcttccgggcctttttttttttttttttttttggaagtctttggtagagacaaaacctatttgtgaagtaaaatagcccaacttgaaagcttccccaacaaaaaaaaggcaaaaagaatgtgatgcaaaaagcaagag

SEQ ID NO: 72574 - DNA, 443 bp, Glycine max
  Clone ID: PAT_MRT3847_36547C.1
tacacttattgtgcataattgcaatggactggactgtggagaaagaatggaatacgtgtttcccacggatgtaagtgtatctaatcattcataatttaaataaaatacaaaattctcgtgagcaataaaaaataaaagaaaatgttaaaatttacaagtgattgtagaacatcatatgtactaatatttatggttatattcaattcattaatcaaattattattaagtatagtgagtttttttaaaccttcaccaaatatttggtacactaattattatttacttttatttaggctaaattatttttttacttatattgaagtccgaagaaagcatacttgaaaatgtagatgaagttagtgtaccaagatcttgaaaaataaaaacaagataaaagttgtgtgaatctaccgttagagtgttagctacattaagggaaaaga

SEQ ID NO: 72575 - DNA, 321 bp, Glycine max
  Clone ID: PAT_MRT3847_36548C.1
gagcatagatcgagacaacttcaatctctcgtatgcattacgatgttccattttccaattcataaccctaactccgttcgaagcaccagatcgtgatggcaccagaggcagataataagccagcatagaagaagcctgtggacgacaacaggtcgactgtgggagacaaagctccggcggcgaagaagccaaaggcctgaaataagcttccgattgatggaggcgccggcggagaaggtaagaagaataagacatccacgaagagcgtggagacatacaagatctacatcttcaatgatctgaatcaggttcaccctgaca

SEQ ID NO: 72576 - DNA, 327 bp, Glycine max
  Clone ID: PAT_MRT3847_36549C.1
gatccttgaatcgcttgacacttattgaagggatattgtgtgcttgaaggccaatgtgtgctcataacccggccgaacaatcagcaaacacgatactaggcaatgtcattctgaatgaccaatataatcgttgtaccctaaagttccatttcttaaagatctgagtgtaataactccttcctcgtagtagccatctagttccttggattattgattccacagctgaagatcataggatttacttgtagcttgccactctatatcattgggaccaaacttaatagtgatcggcagtgacagctatctattctacctggaaacttggtt

SEQ ID NO: 72577 - DNA, 1909 bp, Glycine max
  Clone ID: PAT_MRT3847_3654C.1
gtactttgaaattgcaggattgaataggctgaagactattgatgcaggtttttacaagaacgaagattgtcgttctgggacgccctttccctcccttgaatctctgttcatttatggaatgtattgttggggggtgtggagttccttcgattcagaagcttttcctgtgcttaaaagacttgaaatacgtggctgccccaaactagagggaagtttgccgaatcaccttcctgctctgacaaaacttgtgattagaaattgcgagctgcttgtctcttctctcccaacggctcctgccattcaaagtttggagatacgtgaaagcaataaagtagcactgcatgcgtttcctctcttgctagagactatagaagtagaaggaagcccaatggtggagtccatgatagaggccatcactaacatccaaccaacttgtctccggtctttaacattaagggattgcttgtcagccgtgtcatttccgggtggtcgtttaccagaatcactgaagagtctgcgtatcaaggatcttaaaaaactggaattcccgacgcaacacaaacatgagttactggaaacactgtcaatagaaagcagttgtgattcactcacatctcttccattggttacctttccaaatctcagatatctcacaatcgaaaagtgtgaaaatatggaatatcttttggtttcaggggcagagtcatttaagagtctgtgttctttgagaatttacgaatgccccaactttgtatcattctggagagaaggattgcctgcgcccaacttgatttatttcagtgtttcgggctctgacaagttgaagtcgttgcctgatgagatgagtactcttctcccaaagttagaacatctttacatatccaactgcccagaaattgagtcgtttccagaagggggtatgctacctaacctgacaacagtttggattatcaattgtgagaaactactgagcggcctagcatggccatccatgggcatgcttacccatctctatgtggggggtcgatgtgatggcatcaagtcattccctaaggagggtttgctgcctccctcccttacgtctttgaagctatgtaacttgtcaaatctggagatgttggactgcacggggcttctccatctcgcatccctgcaagaattaaaaataaggagatgtccaaagctggagaatatggctggagaaagtcttcctgtctctctaataaaattaaccataaatagttgtcctttgctggaaaaacgatgccgcatgaagcaccctcaaatttggcctaaaatttgccacatccctggcattaaggttgacgatagatggatttagccaccaaggatgatcaacagagaatcaacaaattatcaaaggcaacgtgtgatgtctcctaaatctatctcactgaaggttgaagctgacctcctagctatgtagccgtgaagatacagatatggttgattggcccggagaaactgtacctacccatgaatctaagttcaaatttgaactagtgctaaatgtaacttttgatttaattgacgtgaaattgacactttctcaatagctgaatttttatttgtgaggtttttcgttgggtacaatgtgaaggatgaaaaggtgtaccaagtgaacttcagaaggattggatgatttcagcttatctcttatcccctatcctataaattaatagtggtatgattattctaaaaatatgatagatatgtagatacgtaagaattgataaaagcataataaatatacaattgcaattcggtaaattgaagaacatacatacttcttagacattgctaaaaacaaaatcaaaaaattgtagatcattttttcctattgatcacaaataagaatgatactatcaatgatcaatctcatttcttg

SEQ ID NO: 72578 - DNA, 633 bp, Glycine max
  Clone ID: PAT_MRT3847_36550C.1
atgtataaagctgtagtgtttgattttgatggtactgtcattgataccgaaaagcatttgttcgatttaataaatacacatttaaaaatccatcaagtagcgccgatttctttagaattctataaacaatttattggcggtgaagctactgaattacatacatatttagaagaatgctattggtttcaaaaataaagaaaaaatttatgatcaatattatcaaacaagtgttgaattgccggtaaattctacaatcattcaattgatgcaatatttaaaaaaacgtcatatcccaatggcgattactacaagtagttataaaaagaatatatatcctatatttaaacaattaggactagatacatatattgatgttgttgttggtcgtgaaaatgtcgatagtgttcaacctaatccggaaatttatttaaaagccgtacaagagcttaattataatcctacaacctgtttagcaattaagattctgtcaatggtgctactgcagcgatgctagcaggattagatgttgtcgttaatacgaatataataacgaaggatcaagatttttcgacagttcaatgtgttggacaggatatggaatttgaagatataaagatttctttatttaaagaa

SEQ ID NO: 72579 - DNA, 325 bp, Glycine max
  Clone ID: PAT_MRT3847_36551C.1
ataacaatgatgttggtgacaacacggatgcagaaaaagcaagagatgatgatgatgtagtggatgaccatcacgaggaagcagagtacttaccatagggtgatggctcaactgcttcagaagagcgacaccacaaaggttaggtcacaaaagatgcatatgataagaatacgccttatacacgacatttcatcgatggatatcaattgatccaaggacagatgaatcatggaatggaagaccatatttttgctgaacacaggaatatcgaacgttatgactgacggttgtatgcaatatttgatggccactccggacatgaaga

SEQ ID NO: 72580 - DNA, 211 bp, Glycine max
  Clone ID: PAT_MRT3847_36552C.1
gggacacttaaggcgaggttgagacgctagttcttgtttttaaatgggttctgctgtactggacgtgcacacgctctgcttcccactgctactggtggcttttcccacaaatagctggacttgaagatacaaaatcctgccttgcagtttaacatcacccactgaactgagtcttacccatcgcagagcggttaccttattggactgccga

SEQ ID NO: 72581 - DNA, 191 bp, Glycine max
  Clone ID: PAT_MRT3847_36553C.1
ctcatggccagtgccaaactccttcttccctaccccttcaccaccaaactccccggcccgcgctactctcaccggcgcttcacctgctcctccgtcatcgcccaatccggatccgccaaggagcacctcctcgccctcatcgccgaccaggaccgtggcatcaggacccagagcgactccgcgaagccgcc

SEQ ID NO: 72582 - DNA, 238 bp, Glycine max
  Clone ID: PAT_MRT3847_36554C.1
cccatacgttatcacttttgtgtcaaccttgctcaaccaaatttgtacgtttctaaagcacaagggggggagaaatcatattgatggacctactgctgaaggaaaaaacactatccaagctgatccctttgagcaacaaactctgaaccaaatcatctacagtttgtttagctcaaatgactccccatcctgaaagagaaaaaacagccctttcaaaatttcattgtcatccatcatc

SEQ ID NO: 72583 - DNA, 241 bp, Glycine max
  Clone ID: PAT_MRT3847_36555C.1
cctcaacccctcgacgacgctcttggggtgcatgcttctccttgctcgacgtcgtagatgcagcgaccggtactaccacggcgctgagacgagaatctccataaagaacaaagtgagggcaaaacggtcatttaacggtcaagttagggacatttcggtccgatttcgaattttcaagatctcagtgattaaggtagaaacagcaacgaacgagtagagcgagcgaattagattggtttct

SEQ ID NO: 72584 - DNA, 253 bp, Glycine max
  unsure (1)..(253): unsure at all n locations
  Clone ID: PAT_MRT3847_36556C.1
aacttattaacactttccttagttcaatatggggaagcccttcttcactctctctctttcttccctttgcttgctactcttgtcgagtgcatgctttgctattacctccagcaagttcaacgagtgccaacacaacaaccataacgcgattgaacccgaccaccgcgattagacgaaggtggncttatagtaacaagtaacactctacacccagtgcagctaagctccggtgacactgctccatacgcaccac

SEQ ID NO: 72585 - DNA, 245 bp, Glycine max
  Clone ID: PAT_MRT3847_36557C.1
atttatctttggcagttcacttttaacataattttttcttctaattacattattttattgatggtacattgttggtataaatgtcctgtggtatgtctccttcgctgttgtctatttatagcataaatctatctgggagcagggagcttcagtacccattgctggccttcgatgattacccttccttccttgatgtcatcttcatgttattttacctataacaattgaagcattttgcacatctc

SEQ ID NO: 72586 - DNA, 355 bp, Glycine max
  Clone ID: PAT_MRT3847_36558C.1
gtcactgccgccttcgccttttctggtaccgaacttgtgggtttggctgctgccgagacaaagaaccctctgaagtccctgcccggtgctgtccgtcaggtcttctggcgaatcaccctattctatgtgctcggtctccttttcgttggtctgctcattgactctactgatcctcgtctgcttggttctggtgccctcatcgatgtcacggcttctcccttcgtcttggtcggcgagtatgccggtctcaagggcttcgatagtttcatgaacgtcgtgattcttgtctcggtcgtctccatcggcgtttccggtgtctatggtggctctcgtacgcttactgcgctcgctgagc

SEQ ID NO: 72587 - DNA, 626 bp, Glycine max
  Clone ID: PAT_MRT3847_36559C.1
ccgctcgtccgctctttcgcagctggctcgagcaaactcaaatccccatctattctctctccgtacttgaggtcagtgttgtgttcaatcattcgatctacgctttggctggtcaggacagtagcacataatcttcttctataacatcgaccggggtcgtcctctcgaaaaatgctacctctgcgtccacaatcacaggttggagcaccaaaaacatcgctgtctcttgtttcctcagaccccctcctgtctcctgatgaacctaggtcaaactctgacaatctccgtgaatctccggctgaaagtgcaagttcacaagaaacttggcctatagctgatgctgccgcagcaaagaagatggagaatggaaaagcggagattaattgccttgagcagaaagtgattcatcgtgtttctagtgcagacaaagttactcttcaggacgttgctagagaaagtatcgctacgatatgtgaaaaaatgcatcgtctacctgagaatatctagaagaggaagaatggactcgagttatacatagtttcgagctagagaaagtatcgctacgatatgtgaaaaattgcatcgtctcctgagaatattagaaagttgaagatggacttcagtat

SEQ ID NO: 72588 - DNA, 1067 bp, Glycine max
  Clone ID: PAT_MRT3847_3655C.1
aaattccaaacacatgtttcggtgtgccgcctcattggaccagcccagagcctcacctaaccgacacccttctctcttttcctctcttctcttctattcctaaattgtacttctgttttgccagtgattgaagctagttagaacaagatgttgcagctactctacactgcgattttctccgaaatgcttttgattctcacgctcgtcttcaaaaccccactgagaaaactcgtcatcgtttccctcgatagtgtgaagcgcggtcgcggtcccgtggtggtttccaccgtgggcgccacattgatggtggttctcgcttcgagcctctacagcatggccaagatccagcaacgcaccctcgaggccggcatagtcaaccccaccgaccaagtcctcatgtccaagcacatgctcgaagcttctctcatggggtttctgctgttcctctctctgatgattgatagattgcaccattacataagagagcttcggtcactcaggaagaccatggaagctattaagaaacaaagccgaagttttgaagatggtaaaaatggaaattcagaggaacataaagcattgaatgaagaaattaccacattgaagtctaaaattaagaaactagaatctgaatgtgaggcaaaaggaagtcaagctaagactttggaaactgaagtagaggctcttaaaaagcaatccgaggggttccttatggaatatgatcgcctcttggaagacaatcagagtcttaggagtcagttgcaggccattgaccagagccctttgaattttgataataaaaagagtatgtgattgttgaaatatccagaaaacagtttttatcctttgttttaactcttgtttgagtgtcacatactttcttaatgaggttacagttgtaaataccaagtgtttacagacagagattagctgtgtggattgagtgaacttgctgtactttaagcagctcatacatatttgtataggtgatttagtcagcctataaccatgctgtcataatggtaagatgatcataaaggaactgatatttattgcctaaggtgagt

SEQ ID NO: 72589 - DNA, 357 bp, Glycine max
  Clone ID: PAT_MRT3847_36560C.1
ttcattatttactcctataccaaatgtcacaaccggggtttcttacatcttggtcaacacaggtccatcctccaacaactttaatggctgatgggtcatcatatttgtatgcaatgctacatcatagttcattgtctacaataccaggtgattttgacattgatgtcaaggtgacatccataaacaatatgtgtccatatgggctcaatcctgggatttcaggatctcactttttcagcaccattcctcagtccatttcacaacaaactgcatggaatcaaatgccaacattgagaacaccatagaattttgattctagcaagcagagcttttgtcagctttctattgaccttctcg

SEQ ID NO: 72590 - DNA, 1841 bp, Glycine max
  unsure (1)..(1841): unsure at all n locations
  Clone ID: PAT_MRT3847_36561C.1
taccggtccgnattcccgggtcgacccacgcgtcctttgtcgcgtgggngaagaagtaagatagggcaggggggttggtggcacttataaaacggccaacaggaatgcttaatttctcttatgctcttcagagtcggcttcattctgtgattcctccctccttttgtcttcgcttggttcaagttgttacagtgttaaatttgagggacatgaagaagtaagaaagggcagcgggtgttggtggctcatataaaacggccaacaacaatgcgtaatttcttttctgctcttcagagtcggcttcattttgtggttgctccctccttttctcttcgcttggcaagtaaatgatgaatgagcgagcgcatagtgcagtgaatttaagaggaaacaacgtcttagggttttagcattgctgttcttgagttgtgttgagtctggagagagatgaataattgtacggcgaagagacgtgagaatgcgaggagcagcagagaggaagatcaactgatagtgactccattgggcgctggaaatgaagtgggtcgttcatgcgtctacatgtcctacaaaggcaagacggtcttgttcgattgtggaatacacccagcttactctggcatggctgctttgccctatttcgacgagattgacccttccacagtcgatgttcttctcatcactcactttcacttggatcatgctgcttccttgccctattttctcgagaaaaccaccttccgaggccgtgttttcatgacctacgccaccaaggccatttacaagctccttttgtctgattttgtcaaggtcagcaaggtctccgtcgaagacatgctttttgacgaacaggacatcaaccgctccatggataaaattgaggttattgattttcatcagacagtagaagtcaatggtattagattctggtgttatactgcaggccatgtccttggtgctgctatgttcatggttgacatagccggtgttcgagtgctttacaccggagactattcacgtgaggaagaccgccatctccgagctgctgagaccccacagttctcccctgatgtatgcattatagaatccacctatggtgtacagcaccatcagcctcgccacacacgcgaaaaacgcttcactgatgttatccactcaaccatttctcaagggggtcgtgtgttgattccagcatttgcccttggccgtgcacaggagctcctccttatccttgatgaatattgggcaaatcatcctgaactccagaatatacccatctattatgcttctccacttgcaaaaaaatgtttgactgtgtatgaaacatacaccctttccatgaatgacaggatccagaatgcaaagtcaaatccgttttcctttaagcacgtatcggctttaagtagcattgaagttttcaaagatgtaggaccatctgtggtgatggcaagccctggtggacttcagagtggcttgtcacgacaattatttgatatgtggtgctctgataagaaaaattcttgtgttttaccagggtatgtagttgaagggacattggcaaaaaccatcatcaatgagcccaaggaagttactctcatgaatggactcactgcacctcttaacatgcaggtgcactacatttccttttctgctcatgctgactctgctcaaacaagtgcgttcttagaagagctcaatcctcctaacataattcttgttcatggagaagctaatgagatgggcaggctcaagcagaagctcataagtcaatntgctgatcgcaacactaannatcttactccaaaaaactggtcatcctgtgaaatgtatttcaattcgca

SEQ ID NO: 72591 - DNA, 404 bp, Glycine max
  Clone ID: PAT_MRT3847_36562C.1
gggcgggccagaaggaacacaaaaatcacatttttttttccacattacacccattatgggtacttcagcgggcccaaaaaaaaaaccctaaaaggggcggcagataaaaagaaacaaatccaaataaattataaaattagttttcttacatcatatataaaacaccccaatccccacccataggggaggggggggggattactaaccaaaaacaactttgtggcacctgtccttgagccacttgaaacttttcctgaaagagcctttgagttttccttaaacagcataaaccttgaaactagggaccctttttttcctttggaattggggggcactaaagctccaacttttcgatggggacccgttgggggactttccctttttgaacttggccggacccgtgg

SEQ ID NO: 72592 - DNA, 533 bp, Glycine max
  unsure (1)..(533): unsure at all n locations
  Clone ID: PAT_MRT3847_36563C.1
ctcgaatctctctagagtccgtgcccctctcccaacattgatatctccacttccatccccttttctctcactatcctaattcaaaaccacattaaaaacagtgccaaaaaaacaaacaattttttgtctatctctatcccaatgagccgttcatcggatcgttgttgcggtggatggtcaacccatttttttttcttttaggccaaaccagagcgtgatttgggtgtctgtgtggttgttagatttggagaaaacaaacatcagtgagagaagaggactcaaattggttctcangttgggaagaggagctccctcccccagaggaactcatgcctctatcgcanaccctaataagccatatccttgcaatagcctttgacataacaaacccctcacagcttcatcatcctcagcagtgttgacagctgggacatgagcaagaacaacatcaacaatttcctcttcgggggccgggctncgtggtcgagggacccaggcgcaccctgcaacgggcacgcctggttggggcccct

SEQ ID NO: 72593 - DNA, 575 bp, Glycine max
  Clone ID: PAT_MRT3847_36564C.1
tctctgttaatggaacccatgactcatccttctcaatgtgtccatggttttgatggtgagttctgtggctaattctccatccatggtatggcacaagaattgaggaatgcaagatgtgtcccaccaggctattcagcaaagggctatctgaaaagcttccatggccacaatcatgtccaagaacaaagagagcccagaacattgtgccttgaatggggcaatagattagccagagaagccagttgtcgaagtgaattgctgcagccaccaatgcagcaattacaagcacatccctgagaacataactgagggatctccatggattcttgacccagcaatgttttggtattgaagctctgatttctgcaatcttaaacggtggaggagcgctaggatcaaaatcaaaagaagaacccttttgttggtatccattattggcagcataggctaaaggctttgtgtctttaaccattgctgctgctgctgcttttgctttggcttagagagtgtggttcctctcttttctcagggatacgtggtgcgtaaaaacccggacgcggaagagacccgggaat

SEQ ID NO: 72594 - DNA, 155 bp, Glycine max
  unsure (1)..(155): unsure at all n locations
  Clone ID: PAT_MRT3847_36565C.1
gaaaaaccacaacctaganaganatgaaganaatacagcactctgaacaaaaagcaacggnaccaaccanaaaggttcanagggccacaaaccagaggcacagactcngagtccgagcnatacccaaacggaggaaattcacttcacacggcttc

SEQ ID NO: 72595 - DNA, 466 bp, Glycine max
  Clone ID: PAT_MRT3847_36566C.1
aaaatagttaagttttataaatgtgttgattacatatattttttaaactgacaattcaaaatttattattactaccttactaatttcaaataaatattccatgtctctctatgcaagtaatttgcaagttgttcagaaaacgttaaactccaaaaaacataacattaaaaaaaaagtaatttgagtagctagaatccaataaataataacccaaaaagtttgaaactcagtctcgttgcgagtggaggagcagagaatcagtctgataataaacaacatctccagtgtcacttacgaagtggtcttgtctcatcggacgcgtggaatactttattagatgaaatggtaatggcgcagatctttctggctcacggtagtaatctccaagaactggttttgctgcttgtgtcgcttcaacgaggtgataatgaggaatttgggggaaaagatggtggataacatgggt

SEQ ID NO: 72596 - DNA, 1496 bp, Glycine max
  unsure (1)..(1496): unsure at all n locations
  Clone ID: PAT_MRT3847_36567C.1
cgccccccacggcaacccgggcgggcgcccgggccccggccggagaccaagccccgggccgccggggccccaggagggggccgccccccgcccagcgccccccccaccgcccgcaccggccccgcacgcacgcaacggccaggggaccagcccccgtcaagagccccccacaggccccancaaaccaaaagcaacggaggcagccaggcgttaaaactccaaaaacgtcagtaaacattaaaaaaaaagtaatttgagtagctagaatccaataaataacccaaaaattgaaactcagtctcggtgcgagtgaaggtgcagagaatcagtctgataataaaccacatctccagtgtcacttacgaagtggtcttgtctcatactctgaattaaatactttattagatgaaatggtaatggtgcagatctttctggctcacggtaatactctccaagaactgattttgctgcttgtgtcgcttcaacgaggtgataatgaggaatttgagggaaaagatggtgaataacatgggtgccaatgtcatggtgaatgttattgatccaaccatagtcacgatccacagttgtgagaccacctcttaaataactccattccttgccgcgataccaaggcagtttctgatgatgaccatggtgatgcaagtatgtgacaaagtccagccacataacaaatatccaatatggaattccatagagcttgagcactagaagtggactagttatgaatgagagatagataagcagagaaaacatggtagcccaacacagtgttgatattgctattccttttctctcactgggtgggaacagattgctgtagggattgaagtgagagccttcctttccggggcttcttgaaaacaaataaattggatacacaaacaatggaaatggcacagtgaatctaatgagtcttgtcatgttgtctagattcttgtaaatcttctcggttaatggaacccaggattcatccttctcaatgtgtccatgattttgatggtgagttctgtggctaattctccatccatggtatggcacaagaattgaggaatgcaagatgtgtcccaccaggctatttagaaaagggctgtctgaaaagcttccatggccacaatcatgtccaagaacaaacagagcccagaacattgttccttgaatgggccaatagattagccagagaagccagttgttgaagtgacttgcagcagccatcaatgcagcaattacaagcacatccctgagaacataactgagggatctccatggattcttgacccagcaatgttttggtattgcaactctgatttctgcaatcttaaacggtggaggagcactgggatcaaaagcttccttttggtatccattattagcagcataggctaaaggctttgtgtctttaaccattgctgctttggctttggcttagtgtgtttttctctcttttcagggatacgtggtgggtggtgcgtaataac

SEQ ID NO: 72597 - DNA, 325 bp, Glycine max
  Clone ID: PAT_MRT3847_36568C.1
tgcttttacttttcatggttgtttcttctttgttcctgtttgcaaactcttttttgttcctagcttgtgaaactataaaaagggggcccctacactctcaccctttggttccgggccccccccggggcgaattcaataccttagcctgaaatcctactttgtgggactacatgatgaagcttgattggtaaacgaggtgcgcttatgccttcttaagttttgcttatctggcactttacctctgcgtaggctcgctctggtcacttttgtccgcctttcaacctgggcctcccatctgctcctttgatccaaaaaaccatggcct

SEQ ID NO: 72598 - DNA, 262 bp, Glycine max
  Clone ID: PAT_MRT3847_36569C.1
atacgggaaaaattttaggggagattcacgatggttaataaacagggctagctcaatacatcactgtgtgaatgacaacaggcaaaaaacaagacacagaaccaagtacccttgggaactaacgagctatagaacccgacaatttgtaccactagctaagccacacaccctgccagtctataacctctttcctgtgttgaccccacaacatacactccaacatcttcctcagtgcaagaatgacacacatagctttgacctt

SEQ ID NO: 72599 - DNA, 281 bp, Glycine max
  unsure (1)..(281): unsure at all n locations
  Clone ID: PAT_MRT3847_3656C.1
aaatcatgagcatacacccccaaaatggagtgtatgtatganaagaagagagagaganaaaaaaatagatatgataaaattntgtcattgatgtgatgggaaataaaagccaggntnataaaaaaatggggtgaaagtaagntgccataatcataataaccccntactgnnaatttttgncaacnnnaaatttggacccnnntnannncaggnccnccncntttaattatggntcactcctcctnngnggngttaaatccanccttggggcttaatatata

SEQ ID NO: 72600 - DNA, 579 bp, Glycine max
  Clone ID: PAT_MRT3847_36570C.1
ctcacttctggaagcattgccttggatatgggtccaaaaatacaagagaaatctggaagatttatctggtgtgtcatagtttggagtatatggtgtcataggaatgattgcgtgtttaatgactttagctttgttggagataaattgctagaggaaaccaagtactctttctctcattggcaatcaaatactgctgcatgtattgtggatggtcatcttcaactacttgtctcgtgtttaatattggctgcgacagaggtgtggagttttcagctttatggtagaaggggatttgtttcaagttaatgatataatgtggagagattttcgtaagcttttgtggagggatgtggggttatcatttatcaaatttgatttgtgtattcgtagtcttccaagggtactggtgcacggtgtggatgcaggattgcaactcttttcttttctgtagttatatctacatgcatacgctacgccttttgtgtcttgaatcttcttacatgcaacttgtgtgtatatcttaagattcaagatcctatgtaggttgttttgttgggatagggcatctatgaaggggtg

SEQ ID NO: 72601 - DNA, 1282 bp, Glycine max
  Clone ID: PAT_MRT3847_36571C.1
gggcaagagggaagatgataatgagagtatgaggtatttccgaaggccttcgcctctgagggctgagggtgttggtgcctttctagaccaaaaattgaaggaattgacctccttaagagatgaggaataggatatctaggctccaattgctgaatatattttaactattgtttcaaagctgggacgaagcttaccttgtgcaagtaagctgagacgtgatgttcatcacatgtttaatgaaaatgttggtttccattatggggcaaaacaagaaaggttattaagaacctcttgcaatggtaatcatctgagtcctggatctgttttggaagcttctttttcttccagtagtcttgatgaaagctcagggcatggttttcaccctgattccatgaattactcatattatggtcaactggaacatgatactgaactttcagattctgcaacatcctttaaaaaaggaagcacaggtgagatgctgagtgatcttatcaaccaaattcccagggcattagaaagtttgctcactttggggacagaattgacaagaagcaagcttggccatatgaaggatattctcttgcatgctgagttagtgcttggaattgcaactgatcgcagagaggatgacggcccacaacttctaatttatcggtttcttggtgatgatcttgacagtatggcgagtgatgctatgtggactgatgctaatggcgttgttgtgggttgtgaggattctaaacagagaaaggagctaaaggggtttctccttgattgtgttatagaatatctagaatcaaattgctgccaatattttaactctggattcaagaaatggacaaagctgcccttatgcatgaaagctgagatgttggctcaagaggtgaagagggagatcaatgagtggttatctatggttgggatggtacctgatgaaattatagaatgggaaatgagccactccttggggaaatggactgactttgatattgaagcatttgaggctggtgttgatatagatggggatatacttcaaattttggttgatgaagttgttcaagatcttgcaggttgcaagcaaggcaccatttccttctaaaattcctttcagctgtttcatgcaacatctcaccagtcatttctctggcgagatgttgtgatctaacaaggtgtattttttgtacaaataggattatggtatttcttatggaggcttttttgaagctctttgttgaattagtagacaaaaataaagtccagtgaccaagtttttattttt

SEQ ID NO: 72602 - DNA, 467 bp, Glycine max
  Clone ID: PAT_MRT3847_36572C.1
ggggaaaaaattttgaatacataataaacaaacctttcaagttgttagtttacaatgaaactcaaaaagattttgttacaaattttttcactgggctgaacttaaaccaaagaccttgttcaattttttgaaaaaagggggtggggggaattgaaacaattcatgtcaacttccagtcttattcaagagggggttttttttttgtttggccctcatgaaaagctgggggggctggcttttgggagggctcctttagtaggggggggggagaggaaccagtcctcctgtgggcaacaatttggagcccatgggtggagttccctttttccatgaaaaggtgggcaaaggggcccctgcagtaaaaaacccccttaagggccgcattttttgaatgggggaaagggcccccttcttgagcacccctaaaggaaggtttggggaaacattcccctttaaggggcattttt

SEQ ID NO: 72603 - DNA, 247 bp, Glycine max
  Clone ID: PAT_MRT3847_36573C.1
gttgtctctgatgcaatgtttctcgatcttagtgcaaccatggtcatcatattcactatagagtgttgacatgaacacctcttcattataaacaccctgttaacacttatttttcctattacatcataatacctgtcatacatatacttctctttctttatccctctaggtgtccaatagcatatggatgtctattaatcattttcctgcgctatagtattagagcatggggagactcttattttgg

SEQ ID NO: 72604 - DNA, 308 bp, Glycine max
  Clone ID: PAT_MRT3847_36574C.1
tttgtgggtttttttattattttttcctttttttacccctcatttcttttttttttttttttttctttttgggaccaatgaagaattcacccccttttcatattttacccccattcccaagaaaaccgaaacccatcccaaaatttaaacaaaaaagggcaaaagaaaaaaattaatggcctgtttgacaaaaaaaaatgaaagggccgctgccaaaaggaacaactcaacaaggttgcaaccaaagctatcacaagcgacatcaacggtgctccaccaaagctaaccacacttactgccccaaattt

SEQ ID NO: 72605 - DNA, 429 bp, Glycine max
  Clone ID: PAT_MRT3847_36575C.1
tatttttgattctttttaatttttatgggcactatttattattaagaaactttttcactctcccaatacatgcaaattaacaaattttttttggataggccacacaatgtttttggggcccagactatactaccagagtcgtccagttttgtttagcggggaaaaaagggggcgacaaacaaagttcttcaaaaaactctcgaaactaggatgaccggccccttacggaaaatggaacacaaaatttttttttgggctgaaacacactgggtgagatttgaaagccccaaaccaaccctaaataaaggggcggataattttgctgctctgaatacaacagcaacttccgttttcttttccagggattgcttctcaatgggctcccccgatcctagaaaggagagttcaggcgggagcactaacattggg

SEQ ID NO: 72606 - DNA, 708 bp, Glycine max
  Clone ID: PAT_MRT3847_36576C.1
ggctcccacgcgtccgcaaactcttctctctctctccttcctagagagagaaagtcagaatctgttgtaacatagcaaatgccaacttggtttggtagtggcactgccaccactgcagccacaacaacttcaacagtgtctacacacatttcctctgagaaaaggtaccaccaccaccaagtgtgcaccaaaagttgctaacttttgttgtaccaataaagtttccttctctctccccacgtacacactgatttgggttttgtttgttgaggcttcaggacttgtcttgcaccttgccctcaccgtttcttagccaaagtttaaatttttatcagtaatgcttggtgggttggtttgcgtgtcttgtagttgagctgagcaaagttttattttttttggctgtgtggttggggatctgattctctctgggttttcttttcctccaagaaatttggatggttttggcattggataataatggccagtgaattggtgcatgctttgtttgatggaaaaaaatgcttctagaaacaaatcattagggaaaagaagtagtgatggctgcagggtcaaacactggttttcactgtgatgatatgggttctgctttgaactggcatggtgctgttagtagcctacctgagatggttccaatggggaattattttgggttgaatagtaacaccctctgggatgacgatgatgatg

SEQ ID NO: 72607 - DNA, 1909 bp, Glycine max
  Clone ID: PAT_MRT3847_36577C.1
gtctgggttacaagagcatactgccacaacggttcttcgtctctcagctgctactcaggatttaccaaagtctgtaatttgcaatgttcatggtgtgaatcccaaattcttgaaaattggagaaaagattgctgcagagagggagctagggcagaaagcctttacaaaaggggcgtatttcttgggaaagatggatgtgggcaaatgggatacaaaggagtcgccccattttttgtcccgggaacgtttttcgcaagaaatgacggagtatagctacgcgtttgcgatccttcgccttactgagaatgaatttctgaggtcatggccaggagcaatacctgggacaattgactatgatatcaagaactgtaaggaccttcatctaatgcatccactggtagaaaatcctatctatggctgatttatgatacatcaagagggagaaaaatggggaactctaagcatacttgatgaaacacataaacaactgggttacaagagcatactgccacaaggttcttcgtctctcagctgctactcaggatttaccaaagtctgtaatttgcaatgttcatggtgtgaatcccaaattcttgaaaattggagaaaagattgctgcagagagggagctagggcagaaagcctttacaaaaggggcgtatttcttgggaaagatggtgtgggcaaagggatacaaggagttgatagatttattagcaaagcacaaggctgaccttgatggcttcaagttggatgtatttggaaatggagaggatgctaatgaagtacagagtgcagccagaaggttggatttgaatctcaactttcagaaaggaagagatcatgcagacgattctcttcacaggtacaaagtctttataaatcccagcattagcgatgtgctatgcacagctacagctgaggcacttgccatgggcaaatttgtagtttgtgctgatcatccatcaaatgagttcttcaggtcatttcccaactgtttgacttacaggacatccgaagactttgtgacaaaagtaaaagaagctttagaaaatgagccttatcctctaacacctgagcaaagatatcaactttcttgggaggctgctactcaaagatttatggaatattcggagcttgacggaatcctgaacaaggaaaataatggcgaaaagtcaagggtagataaggggaagctcattgctaagtcagcatcaatgcctaatctgacagaactagtagatggaggcttagcatttgctcactattgtctcactgggaatgaatttctgagattatgtacaggagcaatacctgggacacgtgactacgataagcagcactgtaaagaccttcatctcttgcctccacaggtagaaaatcctatctatggctggtgaatggattgactagtttgaatgtttgaaggaaaacttgtcacaccagattatgacaagcagtactgtaaagccatcatctaaatgcctttaggtagaaaaatttatggatagctggtgaatagatttagtggtttgagtttgtagtttgttttacagttgcttgtgttaggtgcctgctaagttttcaatccttaaattttgtagttctttttgtttttgtaagtgatgtagttcaatatttaccaaaacacgtgtagaaagctaatgtctaatgtaaagtaactgaacgttctcccacgtaacttgtgagaataagctgtaatgaatttgcatcggtttaacatgaaataaattgttcggttaaaaaaaatggagaggatgctaatgaagttcagagtgcagccagaaggttggatttgaatctcaactttcagaaaggaagagatcatgcagacgattctcttcatgggtacaaagtctttataaatcctagcattagtgatgtgctc

SEQ ID NO: 72608 - DNA, 409 bp, Glycine max
  Clone ID: PAT_MRT3847_36578C.1
ggctcgaggtgcctgacaagatccaaacctctgcccactgaggaacctctctctctcactcttcaactactacagcttctacgccggcgtcagatctgatccctcagatcaccgctacacagaacgcgaccgcgaacctatctacgccaacacagttggcccgttacacaaccgtaacgaaacctaccgtgactacgaccttaccttttgtgaaccaggagacttgacagagatgaaggaggcgctcggagaggtgctgactggggaccgagcgggtagcgcgccatacaagctggagttccatcgcgacaaggagtcgccctccgtgtgcaacaggaagctctgcaaacaggacgtgtctcggtgcagatccgccgtgaggaaggactactactgccagatgcactac

SEQ ID NO: 72609 - DNA, 740 bp, Glycine max
  Clone ID: PAT_MRT3847_36579C.1
agcaaaagtaaaagaagcattgaaaaatgagccttatcctctaacacttgagcaaagatatcaactttcttgggaggctgctactcaaagatttatggaatattctgagcttgataggatcctgaacaaggaaaataatggtgaaaaggcaagtgtagataagggaaagctcattgctaagtcagcatcaatgcctaatctgacagaactagtagatggaggcttagcatttgctcactattgtcttactgggaatgaatttctgagattatgtacaggagcaatacctgggacacgtgactatgataagcagcactgtaaagaccttcatctcttgcctccactggtagaaaatcctatctatggctggtgaatgggttgactagtttggatgtttgaaggaaaacttgtcacaccagattatgacaagcagtactgtaaaagccatcatttaaatgcatgtaggtagaaaaatttacggatggctggtgaatagatttagtggttgaatttgtagtttgttttacagttgcttgtgttaggtgcctgctaagttttcaatccttaaattttgtagttctttttgtttttgtaagtgaggtagttcaatattaccaaaacacgtgctaatgtaaagtaacaggacgttctcccaagtaaccttgtgagaataagctgtaatgaatttgcatcggtttaacatgaaataaattgttcagtaatgataaccttcaagagta

SEQ ID NO: 72610 - DNA, 294 bp, Glycine max
  Clone ID: PAT_MRT3847_3657C.1
ccatcaaaaacatccccttccaaaaacctaaaaaagccactcacccctacaccttaaaagctgctttagcttaattcatctcaaccttcatcttcatattccccagctcaagctccagcatcgcctacaacaaactcaccaacaactgctcctccaccccttccaacctcatctcctcctccatcacccatacattctccctcttcatccccatctccctcagctccaacatcttcctcagccacctcaacccctccatcaccttcagcaccttcctccgcagcaacatcacct

SEQ ID NO: 72611 - DNA, 239 bp, Glycine max
  Clone ID: PAT_MRT3847_36580C.1
tagctttttcttttcctaatttggctcttagcactttatgcagagtgataacagataatttagagatcgatacatgaagattctgatttagcccttgaggattggtctgataactagtaaaaaatgaagtttgtcagagtaaattgagagctacaccaggagccaaagtctgatgatgattaaaaagataattaagatagtgataactgtagtatatatttacatctactacatcacag

SEQ ID NO: 72612 - DNA, 262 bp, Glycine max
  unsure (1)..(262): unsure at all n locations
  Clone ID: PAT_MRT3847_36581C.1
cgaanctcgcaaattccntcaanactggagtngcctgnaaanttcattcggngncctcaggttacgttnctcccttcctcaatattccntgtgnctnattctangaaggcactgcatagtctcagtcattatntcacaatgcgattcggatcctgaaatcgtngcttggntngaancagacgataagcagtgatatgantatgatgttgtgtatgnntagttagttatntgttatctgtgtccgtcatntctttcaactgtt

SEQ ID NO: 72613 - DNA, 441 bp, Glycine max
  Clone ID: PAT_MRT3847_36582C.1
gttagtttcagataaccattgctccagttgacacttgttgaatctgttttgtttactttttttgatattgaaactttgtttattggaaaaaaaaaaaaaaaaaaaaaaaaaaaaaaaaaaaaaaaaaaaaaaaaaaaaaaaaaaaaaaaaaaaaaaaaaaaaaaaaaaaaaaaaaaaaaaaaaaaaaaaaatagggggggggattttaaaaaagccaagtttacaaagcggggcatttaaagttaaagattttttattggggaactaaaataaaaattatgggcacatgtttaaaaacaatgataatgggaaaaaccttggggaaacccaattaaaaaccctttgaaaaaataccctttttacaaaatggtgaaaaaagaaaaaggcccttaccgaaagacttttaaaaaaatttgcaaatctgaaatggaaaagggaacc

SEQ ID NO: 72614 - DNA, 449 bp, Glycine max
  unsure (1)..(449): unsure at all n locations
  Clone ID: PAT_MRT3847_36583C.1
gaaataatgttctgttttttttctcgggatcgaggagaatttacactgtgaaatgcncacccaagggccacccggcaaaaaaaaccaagagggttttaatttgttaaacaaaagaaaacaccctgttagggcccgaatgtgaagacacgggttatcaattccttgtttcccaaaaggggggacggggggttttgattaatgactacatccaagcggatgaccgtgttaaggttaaaaacttaaccactggggcctttactattatggaccttggacgtgaccaccatggtcctagcccttgtagggcctttgattagatcttataccctaaacaggggcacaacatggggttttgggttagccataatcccaatttccgctctaggagataatagggagaaaatagcttttggggaaaccatggcggtagccggggtttttatttatgt

SEQ ID NO: 72615 - DNA, 609 bp, Glycine max
  Clone ID: PAT_MRT3847_36584C.1
ggctcgagcgggcacattaaaaaaggaatggataagttcctaaaaataaagaaaactataacacattataaggaggggtcaaatattaattaagataaaagatatagaatatctatctgtatatatatatatatagatatatattcttgaacctaaagagcgctgtatgcttcttaaatttgtcaccagttgttctcgtgccccattacttgggttcaaatacttgcagccaccttttaccatccacaaggtatgttcttgatcttttatgattgatgggcattcaaaatcatttatactaactcctctatgttcccattttgctttgttcttaaatgattaaagcttggtttgtattttttgttactcaagcagagtacattaaggacaacaatagagttaggaagcaaagcgtcttgaactcttctgatcagttatctaaaataacttgtttccctagatgggatttatgcacgaatcagtttttcattagatgttagtgctttaattgcttgctatgagttgaaagggttgcattagttacagcctttattttgtaccagcctttgtttctaggatttctgctttctctcctccttgcacatcatg

SEQ ID NO: 72616 - DNA, 713 bp, Glycine max
  Clone ID: PAT_MRT3847_36585C.1
cacaacctgctttcttgatggattaaacatgacagatcaaaatgggaagacagtcagccagtccaatctgcatgataatatatacacgaatattgttttagcctttacatgataaatgacactggaggacctgtgctatatcactacaaagtgtgacatgcataaattcagctgttgatatcacagttatagataaagcagcaatcgcctttttattattcataaaaatgctctcgaacattgattgatgaactgcctcttatttttttgatcgggaacatcaaactttcttgcagcaaggtttcactctacagcacttattttccctcgttgagaagtgaattatctgctcagtaatgtggttttgacttgaaaggggccgtaaagtcgcccacgaaccatagaatgcttccgcagcttgtgcagaaaaaccgttattgctaaggtctagtaattgcaagttctttgccttaccaatagcaattgaaaactgttgcgtgaaatggcactcgggagatgaatttctttgacatgaactggcacagctgtcgtcaaatccagaagcagctgtttctactggaacatcttcactatcagcaacttccagtagatggtcggcactgtttagctcgccaaggacctcttgattatcatcaactttcatagtatcaagtttctgctcctgggttttgtgagcagctttttaccgataa

SEQ ID NO: 72617 - DNA, 591 bp, Glycine max
  Clone ID: PAT_MRT3847_36586C.1
agtttccgtcatcactgtatgacgtcctccttctttggggggggtgggggggggaacttaacaaaaacgggcaagagtgagagaaaagtagaaagccgagtagcagagcctaaatagtattaccacagcgagcggatgagaacatagagggcggccttaagacaaggatcatagcattagcgctggctgtttggtttgaagatgcggccgtctaaatgaggtagaaaaagaggacatgaacgtgaggaaaaacgatgaccatagcgcgggccataatatggttatgggtgaaggttgtagccaggatccgtcggaatttgtgagacccatgagaaaatgctgtggcataacgtgaaaataaagtttaggaaatagatgacgtgggctgtgcgtgctagatcccccatagggcgtgggcgttcataggacaatgtataatgctatggttaggggttataggtagtacaccagtacaggtagtggtgtggcttcccagcaggcacagctagtggttatccgggggctgcaggtgtcacacgctagacgaacaaggacaagtagtttagtagctgagtaaagatttagagcggt

SEQ ID NO: 72618 - DNA, 830 bp, Glycine max
  Clone ID: PAT_MRT3847_36587C.1
aaaccctggcctatcatcattcaccactgtcaacagtcgacaccataaaccctaacaaagggaagcactcggccccctccaccactccctccccagacagaaaaaatggaccccaaaaacgtgaaatcggacctggttctcattctcgactacggttcccaatacacccacctcatcactcgccgcatccgtagcctctccgtcttctccctctgcatctccggcacctcctctctctccaccatcgccgacctcaacccctccgtcgtcattctctccggcgggccccactccgtccacacccccgactccccctccttccccgacggcttcctccagtgggcccagtccaatggcgtcaccgtcctcggcatctgctacggcctccagctcctcgtccagcgcctaggcggcgacgtccgcgtcggagacaagcaggagtatggccgcatggaaatctgtgccgataaaccctccgcgctctttggccctgagaaagtcggtaaacgacaggtcgtttggatgagccatggcgacgaggccgtcgcgctgcccgatggattccacgtcgtcgcccgcagcgaccagggcgctgttgccgctattgaaaacccccccgccaagctctacggcctccagtatcaccctgaggtgacccatacggaggatggaatggagacattgcggcgttttctgtttgatgtttgtggtgtgggagcagggtggaagatggaggatgtgatggaggaggagatatagcagcgtcttgcttctgaaggcctatcatagtacactggccaggacttagactgccttggagatgcccatgg

SEQ ID NO: 72619 - DNA, 646 bp, Glycine max
  unsure (1)..(646): unsure at all n locations
  Clone ID: PAT_MRT3847_36588C.1
cgagcttctcggatttgacttccgcccatggcaagttcaatcgggtgcatactgttgttgacactttgtgttgtcctcgtagctttagttcatgcacagcaacaaataggcttcataagcattgattgcgggagtagtccaccaaataatgagtacacagatgacataactaaaataaggtacaccactgatggagcctatatacaaactggggttaataagaatatctcctctgagtatgcatacccaaagaatccgaatctgccactaccactctcagatctcagaagctttcctcagggagaaaggaactgctataggttagtagccggaagaagaggcagtttacatttgataagggcttccttcttgtatggaaactatgatggagtaaacaagccaccagagtttgatctctatgttgatgtcaagttttggtcaacagtcaaatttagaaatgcctcagaagaagttactatggaaataataagtgtggcagaatcaggtgtcacacatgtttgccttgtgaataagggagcaggaactccttttatctcangattggaacttagaccacttaatagttctatttatagcactgagtttggggaatctgcttcactgtcacttttcaaacgatgggacn

SEQ ID NO: 72620 - DNA, 602 bp, Glycine max
  Clone ID: PAT_MRT3847_36589C.1
ggctcgagacgcttaagatcacccaagagagaacctaagacacacaacacaacacacagagagagttacaggaagaaatcatcatggcatcagcagcatctgggtttgtgttgtctcttaatgttgcagcttccaccacaaactcaagggtggtcttgttcaacacaaagaacaacgcttctaggtttcttgtgagggcttcagatgagcctgcagcggcggcacccgcaaccaccacccctccagctgaagctgaagcaaagccaaaaccaccacctattggccccaagagaggtgctaaggtgagctacccccaaaactcaactttttttgtagtggttgttgctcatgttgtgcagaataattcacttttatcccatgaacatgatccttaatagttgttgcttgtctgtgaatatactcagctccctattagaattggtatgagaaaatgtctagttatcaacatgtcctcttattttcattttctttcttgtcatcaaagatttatataattgatagtaaaaattggatttttttgcaaactaaacactattactttcttaaactataaacgtgtctttggtttctatattgcatat

SEQ ID NO: 72621 - DNA, 287 bp, Glycine max
  Clone ID: PAT_MRT3847_3658C.1
ttttctttctttttaacctttgggcggggaatttggatcttatcagggatgcgtgccctttctaaccttacgggggatctgaatgccacattctgtgtgcatacctggtaaaaaatggggcacatcccggcataaatgctctacatacccacttttcaaccaacaattggggcttgcgccagtttaaacctaaatgcctcaacggtaaaatgccaaactatttctgccttactgaccacatttatataaggaaaaaaatgcgggaggataataataacacagattta

SEQ ID NO: 72622 - DNA, 302 bp, Glycine max
  Clone ID: PAT_MRT3847_36590C.1
gggaaatgttggagtaaaccagaaaaatttaggtagagccggttctaattgttggctaggtaagcgccctgtagtaagaggagttttttttaacccctaatacaatccttatgggggtggtgaagggagggcttattttggcgctaaaacatgtgactgcttgtttttctttttttctcgggcctgaatatatcattttatttcttcctttagtactcatctcctcaatttttataataacatacacacatctttatatatatatatatatttatatatttgtctctttctatatatatttt

SEQ ID NO: 72623 - DNA, 728 bp, Glycine max
  Clone ID: PAT_MRT3847_36591C.1
aacatttgcaaaagccttgctttattgccattggatctcctttccttaggactgtcttaaagatacatattgaacctgagctactgcataaggattctgtccttaaagtggaaagcagacaagatcttattttctataagggtgggaaactagttcttagtaatagtgctctggctaaattcatcagtggttacaagaaatatgggaggattggtgaactttcaaaacttttacttagtattcaaggggaactaaattcagtggcagggtccagtttgtgttctgatgtaattggtgcttgtattcagttaggatggcttgagtgtgctcatgacattttggatgatgttgaggccactggttctccaatgggccgggatacatatatgttacttgtgtcagcatatcagaaggggggaatgcaaagagaaacaaaggcactactgaaacaaatgaaaaaggttggtttggacaaaggattatctgatgatgctattgatgaacacaacctctgtgaagaaacattaaattcacttggtaaagctgatttggcaatcgccttggttcaaatattgaaagatgaagaatcagacagttttcctttggtgtataacttaaattcttcctttttctttttctgcaggcccgaatgatagaggatgcactaagggcatatagaagaatggtcgacatgaaaattcaaaccacaagtcaaacttttgcttttt

SEQ ID NO: 72624 - DNA, 186 bp, Glycine max
  unsure (1)..(186): unsure at all n locations
  Clone ID: PAT_MRT3847_36592C.1
gnaagctttgggtttgctggagtcactaacagctttatctacttaacattaatgtttgctggggntataagacactttaaattaaaagtagtagtagataatntagaggttncccagtgcatccacattgaatncccccncgcggttttgagnggcacaaaagagagntganannttntttngnca

SEQ ID NO: 72625 - DNA, 462 bp, Glycine max
  unsure (1)..(462): unsure at all n locations
  Clone ID: PAT_MRT3847_36593C.1
actgcgcagttccttgatctctcctctcaagggatgtttctggtttaacaccttttgatcgtcataaggtttcataacctcattaggctcagtttattgataacatacgcgttccgatttagttatgttatgttgatatgtgatgtctgatttttgtctccgttgaatccaaattcgttcagttgtctttcagattccatgatctgattgtttatgctatatgttttccgaatttagttacgattcctgatttaatctttctcctcattaaagtaaggctttgtggtttaatttttttaattgaggtattagggcttgtattttaatttcttcttcttcttcttcttccatatttgaggtattggggtttgttttttgattctatagtcgatanancatnanccaccggnttgcgangnncccttnntgtgnataaaaggnatgcagntnganannannctc

SEQ ID NO: 72626 - DNA, 181 bp, Glycine max
  Clone ID: PAT_MRT3847_36594C.1
tgcatatattgatacagaagtattgttgaaacaagagtatgatggtaaggttgtagatgactggtaatgaggagtaacgttatatgtgatgatagagggagaatatacttttgaacatcataatgaaaaaaaggactttcgcgagacaattcagagaaggcttaatgaccagtattacata

SEQ ID NO: 72627 - DNA, 650 bp, Glycine max
  Clone ID: PAT_MRT3847_36595C.1
accggaagaaaggcgatagacaattcaaaatcagcaggagagcagaatcttgttgcatgggctagacccttgtttaaagatcgaagaaagttttcacaaatggctgatccaacactccaaggtcaatatcctccaagagggctataccaggtcattgctgttgcagcaatgtgtgttcaggagcaggctaacatgcgtccagttatagctgatgttgtcacagcattatcttaccttgcttcacaaagatatgaccccaatacacaacacacaggccaaagctctcgtcacgctcctggtacgcctcctagaaacaggagggggcaatgatttggagctcaatgtttggtggatatatacaacataatctggacaaaaattcaagtatattatttaatggtcttctcaacttcaagatataggtttatagatgttaatatcattgtcctttggtggtgttctttcagttcagaacacacacttgaaaaggaaaaaaaaaaacttgtggaattctgttctagttctggtactcaaaactgctcccatttctgtttggagctaagaaagtagttccactttttttttcacgaaatttttatttaagagcaaattgcaggattcataattcatgtgccttcttctatcttggc

SEQ ID NO: 72628 - DNA, 557 bp, Glycine max
  Clone ID: PAT_MRT3847_36596C.1
caaagatcttacatggcatgcaaatgggagaaactgtgatagaatgcttcgtcatctagctgattctttgcagtggaagaagatagatcgtttgtatccggattttggcaaagagacaaaaaatcttacgcttggactagccactgatgcaatgaatccatatggctgtttaagcacgcaacacaattcgtggccagttttgctagtgatttacaatttgccccattggttgtgcatgaaacgaaaatacatgatgttgtctatgatgataacaggcccaagacagccaggaaatgacatcaatgtttatctcaatcccttgattgaagaccttacaaagttatgagacgaaggagttttagtgtttgatgggtttcgaaatgagacatttaatttgtgtgcaatgcttttttgtaccattaatgattttccaacatatgagaatttgagcggttacagtgttaagggtcatcgtgcatgtcccatctgtgaagaagacacaagctacatacaacaaaaacatggaagaaaaacagtgtacactaggcatcgacgtt

SEQ ID NO: 72629 - DNA, 302 bp, Glycine max
  Clone ID: PAT_MRT3847_36597C.1
ctattatgcctgaaatattagtaatttcacatttagtctagaaggtgttgggtttaatggattacttagttcctagccttttaattgttatgcagtatgtgttgtttaaatgaaatacttggtatgcttagttgtaggatactttttggggattattgatttggtagattgatataaaatgcctgggtccaatgtctcgaagtttagcaatacatgttcaatctatatgagactatgacactagtttgcattgggtttattttactactttgttcgtggcttttatttggttatgcattatg

SEQ ID NO: 72630 - DNA, 508 bp, Glycine max
  Clone ID: PAT_MRT3847_36599C.1
aggcacaccggcgtaccctaccggcgccacaattgctgttctatctaccagcctcacattcatagctggcttacccacgacgaggaccacaccgacatttcctcccttgctagcaccacgtggatagagtcactgcgctcaggcgttgccaccacttgtcgctaataattcacagactgtttactactcgccagacctcgctcatgcccctttggcaaacgatgtctaataccctctcttgaaacgatgggattccttgcttggaatacaagttggatcacggtactttgtaccacgagcacaacacgtcactctggatactatggatggacactactgtaccatgtggaatctgcctatgtatggctgcactgatgctgcttatgtgttgaaggagcttcaataggctgagactgcataccacaatggcgttgtccatatcattggaattcaccactgtacggcagtgcaatgcatcagcttcatcgtctacaaccccctcagcttc

SEQ ID NO: 72631 - DNA, 604 bp, Glycine max
  Clone ID: PAT_MRT3847_3659C.1
gctgcacaaatgagttcaaccacaaccaccaattatgagttaggcatgagatcaagcatagagaatgagcacagtggccatctacgtggtttgttgaactcacaacacaacggaaacaaccttactatgtatcacaacgttcttaaattgcctaagaagatgtcacaaaacaatcttggtttgtgctttggagggtctgataagttgaccttggactttttgggtgttgggggaatggtgaggaatatgaacaatggtggaggggtttcacaaagagagcgacaacaacaacactccatgggaattactatgagccccttggatcctaaattggaatcagcacaagcaaaccaacactatggaacctcaacactctttttacctggtggtgggttcgatggcctcttgacacgcgtgggtctcgtctatgctgttgtgcgggccttggtttcttctcatattaaaaaaaatgttgggtaaatttattaggaagaaaaaaatgtttattatttacaaatgtcctagttctaaacttttctttttattttttcccatgaagaaagttctattgccacttggtaagttagggttgttatgcaattca

SEQ ID NO: 72632 - DNA, 2243 bp, Glycine max
  Clone ID: PAT_MRT3847_365C.1
acgacccacgcgtccgcgtccccatctcagaaacaaacagaaccaaaccaccaccaccattataatacacaccttgaaaactcttgcaccccaataatttgggggaacctcaacccaatcccagaaaccaaaatcggcctcgcaatttaacgaaaccgaggaagagaaatcgtgggcacccttcaaaattcgagatttccccgacaaaatgtcccaactgaagctcctgctgttctctccatcaatttcccaaatctcagaaacaaaccgaaccaaaccaccgctaccattataacacactcctccccgtgcaaaccctactcaagccgacaatttggggggaacctcaacccaatcccagaaaccaaaatcggccttgcaattcgtcgaaaccgaggaagagaaatcgtgggcacctttcaaaatccgagatttccccgacaaaatgtcccaactgaagcaaatgtcgcacatagacagtgcccctccgaccccagggaagttcaagatggataaagcttcgtacttcaaccgcgtgcggtggcacacctcgctggcgaagctcgcagtgtggtccttcgtgttcctgggcgcgatcttgatctttttcctccgctcgccggcatcgtctccggtcccggcggacctctcccggcggtccctgcgaacctacaactggggcggacccgtttgggagaaacgggtccgggcatccgcccaggtccggtcccgaaacgggttcgccgtgttggtcaccggcgccgccggttttgtaggcacccacgtctccgcggcgcttaagcgccgcggtgacggggtgcttggacttgacaatttcaatgactattatgacccttcacttaagcgtgcacgccaggggctcctggagcgcaatggcgtgtacatagttgagggtgatatcaatgatgaggcactcttgaggaaacttttcgaggttgtgcctttcactcatgtgatgcacttggctgctcaggctggtgtgaggtatgccatggagaatcctggctcttatgttcatagcaacattgctggttttgtgaatttgcttgaggtttgtaagagtgtgaatccacaacctgctattgtgtgggcctctagtagctcagtttatggactcaacactaaggttccattctctgagagggataggactgatcagcctgctagtttgtatgctgcaaccaagaaggctggtgaggagattgctcacacttataaccatatctatggtctttcattgactggattgaggttcttcactgtttatggtccttggggtaggcctgatatggcttacttcttcttcactagggatcttttgaaggggaagcccatccctattttcgaggccgcgaatcatggaaccgttgctagggattttacttacattgatgatattgtgaggggttgtttgggggctttggatactgcggagaagagcacggggagtggggggaagaagagggggccagcacagttgagggtgttcaatttggggaacacttcgccggttcccgttagtgatctcgtgagcattttggagaggcttctgaaggttaaggcgaagaggaacataatgaagttgccgcggaatggggatgtgcagtttactcatgccaacattagctatgctcagagtgagcttgggtacaagccgaccacggatctgcagagtggtttgaagaaattcgtgcggtggtacctgaattactattctggcgggaagaaagctgttgagtgactgattctttttaccatgtgataatgtctttgaattcttgttcattatgattcttgtgattgttccttagcgtttctctgttcgttgtacgatcaccgcgtttcatgtgtcaaggatgatgccatataaggaggaagtaggaaccttgtttcctgcactggggaagttttgttgttggtggagattaaggcccaggcaccgatttgctgtgtccaagaaaaccagatacatcatattctcttttattctttttttcttgaatgtaattgttgtagttttagaaatgtagcattcatgactgatagagcatatgctgattggtggcaatgtataataattgttaagaaatggtattaaaatcacacaatagtttgatttccggtttttggactgaatgagtcaataagacatgtattttatttgcttatgtaatttttcagctataaatggactcctgtattaataattcttgcacagctct

SEQ ID NO: 72633 - DNA, 286 bp, Glycine max
  Clone ID: PAT_MRT3847_36600C.1
ttcttccacattattttgcttttttgtcccatagtttgtcatatcttactttcttttactacattcaattaaggggttgtgtctttttgttgggattatttattaggatttattcagtgctccattgctcacgcttctttgtattaccaattactcttttttttacatgtactggtgatacttggtatagttattccattgtttttttccatctttcagttgttctatttctcatgatccatacatattttattattacctggtcctttctatatatttttttatg

SEQ ID NO: 72634 - DNA, 487 bp, Glycine max
  Clone ID: PAT_MRT3847_36601C.1
tctggcgttgctgcaactgtgaagagaaacattccaacccggattctcacaggcatcatgttgtgcaggaacacatggggagtctttcaccacaaatgcagagacttctgccccaaaatgttgatagtgaatggattgaaatgattcttaattgttcttggaatcctctggatgtcctagctgcagttagaatgcttgataataaagcaaagttgaaaagttcaccacttcctgaggatttgtacttggatcatcatgctctggactataatgattgttttaaagatgcaagcagctcttacattgagaaggaaagttcaggggacagtcgtcgtaattgttcggtagaatgcaacaaccattgtaaaattgaaaatgatgtgagaaaaggtgttgaagaccaactatctatggctaatcccattattgactgttggccggtgtctgatgacccttagcgtgcaaaacttctggggaaaattcatgc

SEQ ID NO: 72635 - DNA, 516 bp, Glycine max
  Clone ID: PAT_MRT3847_36602C.1
cacaaacatattttccctcccaaatatttgtgctcaaaaaacacacttctcatcaagacatagttgataaacatatgggcactctagtgggacatgtggctccaggttttggtttcttgttgataggtttgtggcacctctttaaccacatcaagctccacgcccttaacccaaagtcctacaagggcccatcatggttcccaagtgccaagttcagatacatagagcttgtgctcatcatggttggctccacagcctccgtagccatggaactcttcataggccctgagcggcaccaacctcttgacccagatggaaccattccctccaaccatctccacaacttcgagcactcttcaatctccatcaccttcttcctctacgcagcatgtgccatcatcttggaccgggcccgagtccaggcccaattcgaactaacccaattgcttggggccatagcctttgcccaacaactgcttctcttccatcttgattccgcggaccacatgggcccag

SEQ ID NO: 72636 - DNA, 120 bp, Glycine max
  Clone ID: PAT_MRT3847_36603C.1
gatttctgtttctctaagataaacaacatgtgatggggtttttattgaagtgaaccaaattgatttatctcccatatcctaatttgcaatgatgtttgtttattctgcactgtccattat

SEQ ID NO: 72637 - DNA, 909 bp, Glycine max
  Clone ID: PAT_MRT3847_36604C.1
aattcggctcgagcccaaagttacatctggtgagttacacactaccaccctcttcccttaccttttaataatcctatagatcgataacttctggaacgaatggagggagttcgtatataaagaagagtcagaggaattgaagaaggtacatgaaggtggtatcgatcacaagcaagtgccagaatgaggtttgtggcaattgcattagttttgatgctagcatgctgctgctgctgtatgggttcagataggtggaggaacatagaggccaaaatgcatggaaaaaacaaacaagttagtcgcgagaataatgatcatcattcgatccctcttaaagactatggtaaacctggctcaggccaccatgacgtcactgcagcagatgataacaatgatcatcattacatccctcgcaaggattttggtaaacatggctctgcccaatttcatgtcactgatgatcataataggtaccattgcgtccataatagtaattataaggaagatcgtacttgttatggccaacctggcggaggaattaaagttaatcccgggcccgggcattgataatttactcacaagaatcatgccaagcatcctggcgacgaattgaatatatatatatatatatatatatatatatatatttgtgattaatgtttgataattaaatcggtgatttgtatacatatatatgtacgtgtgcgtaggtaagttacgagaaattcttaactgtgttccttccaaggatgcaagaatttctcagtacccatataatcatagaactgagtgtatctcagtatctgtatgtgtcgcctttgatcagtgtatataccaataaaggagtgcttgtagtaattataatcaccacttgttaataaataaagatcgatctgatatagtttaatt

SEQ ID NO: 72638 - DNA, 238 bp, Glycine max
  unsure (1)..(238): unsure at all n locations
  Clone ID: PAT_MRT3847_36605C.1
gttggtttaccaggacctccttacaggtgatgagcttttctctgactccttctgttgcagggaaattgagaatggttttctgtgggaagttgaggggaagtgggttggtaaaggaggaggtgatgtagacatcgccgcaaaccctnctgntgagggtggnggagaagatgagggagttggtgatgtannntgaaaaggaagtgacntngnngtcacatncagccttnangagcaaccc

SEQ ID NO: 72639 - DNA, 570 bp, Glycine max
  Clone ID: PAT_MRT3847_36606C.1
aatgcggctcggctcgacatccaagttacatctgttcctatataaagaagagtcagaggaaggtacgtgaaggtggtatcgatcaccagtgtcagaatgaggtttggggcaattgcattcgttttgatgctagcattttgctgttgtacgggttcagatagatggagaaacatagaggtcaaaatgcatggaaaaaacaaacaagttagcagcgagaataatgatcatcattcaatccctcttaaagactatggtaaacctggctcaggccaccatgacgttactgcagcagatgataacaatgatcatcattacatccctcgcaaggattttggtaaacatggctctgcccaatttcatgtcactgatgatcataataggtaccattgcgtccataatagtaattataaggaagatcgtacttgttatggccaacctggcggaggaattaaagttaatcccgggcccgggcattgataatttactcacaagaatcatggccagcatcctggcgacgaattgaatatatatatatatatatacatatatatatatttggggataaatgtt

SEQ ID NO: 72640 - DNA, 249 bp, Glycine max
  Clone ID: PAT_MRT3847_36607C.1
ctttcacttgacaaggttcgcttgcaaactccttgcattcttatataaggtttcgtattgtaggacgactgcaacaagtaagttgctcattgcgtgtgtcagatataaactctgaaagacaggattaaacaggtgtgctatcttgcactcatgaacgtgatgacagcaccactatgcaatgcactagtcgtgtgagacctcgctccttgtcgatcatatgggaacactatttcggtttacttacaaaat

SEQ ID NO: 72641 - DNA, 918 bp, Glycine max
  Clone ID: PAT_MRT3847_36608C.1
tctcgagccgaatcggctcgaggcgagcgaccacgcgattgtttttgcttattttgttattcagtttttgtaagtgaaccttatctctcaagcttatagttctagctcttgttccctcaagagtcttggtttttagaagggaaacagcatgtgctctttctcttcaaaacagaccctttatttggcacttcctcgtccatggacatctaagagacaccaccacagtcacaggcaccttcggttgggcatgctcaacagaaggagggcacacttgaaagaagcaagacaaaggaaaaggattgttgtgaaatcagagattcagatgaagaacttgaagttgtacatggagaaccaaaccatcatagaggagaatgagaagttgaggaaacaagccatgcttctgcacaaagagaatcaggccctctcgtctcagctccaaaagaagctttcaggacaaaacaacaataccaacaataactagctattagctaattaatatataaacagtttatttgtgtcatagtgtggcaaggggtaggagaaattaaagggtctgtgtcaatgatctttttctcaaatgttatgttagccctatatcttgttgacttagcttcttctttttgtttttaggttgcatcttagtgggaggttaaattaattaattttctagcaataagtttagagtggtaaaataaagataaataggtaatatgccaattgtaagcattacatggaatatagaatcgtgcaacttgtgtaagagtttaaatttatcatttcttgttaattttcctgatggtgtgtctcgagaatactacttaatagtgtcctagctttttctttttcttgttaagtgtatttgattaagctaatgaattcgtttgtaataacgttgttatataaagagtagtgaacaaa

SEQ ID NO: 72642 - DNA, 1026 bp, Glycine max
  Clone ID: PAT_MRT3847_3660C.1
ggaagctggttacggctgcgagaagacgacagaagggggaagaagaatggcgactgagaatgagaagagaaagcggaaagaaagtagtgatgttagaagcaaaaagaagaagaagcagagaagcgaagatgaagaggcgacgaagcagttgcgtttctttgagtcggcgatgggtattgagctttcttcgctggagttggaatccctcaaagataataagtgcattttggaggtatcagaagccgctgattcagacgtgacagtattgggcaaaactattagggcagcgtttggcgcgtcttggaaagaggctctctgcgaagggaagcctgtagagggaaaagtcattgctggaagccccgcagttcttatcataacttcttctgctttaagatgcatagatctcttaagaggctttcgctctatgactgaacaatgccatgctgcaaagttattctcaaagcatatgaagcttgaggagcagatttctttgttaaaaaaccgtgttaacattgctagcggcacaccaagcaggataaagaagctaattgatgctgaggcgttagacctttcaaggttgcaagtacttgtgcttgatctgcatcctgatgtaaagggctattccttgttgacccttccacaagtcagagatgaattctgggaccttttcaagaattatttctatcaaccgatgcttcagggtcatctgcgtatttgtctctatggttaccaggtctctgttcgtttaaaggccaaacataaacataaacaaggacatacaattcccgatgcataaatcctccatcttttgatttaggcatgtattttttaaatattattttattaagatttcatttcatttgcctttgacagtcatgtgtttaagcatgtgtttgacagtcaaacgttgtcatgcaagggtcagattagtcagtcatgtgtttaagcatgtactttcatctttcgagtttgaaccgaatactccttcatatcattcacttcttgaatttactatttctttaactc

SEQ ID NO: 72643 - DNA, 436 bp, Glycine max
  Clone ID: PAT_MRT3847_36611C.1
aattcgagcaaagtgagatagacatgcgatcttaatcattattactgatggttaaagcggggcgcattattacgattcgcttcaatatgatgctatgatctagcgatgtctgatcgatatctgtgaacagagatacacaacatttctggacatgatattctcacgcgaattacaataacttgagctcatttaatacgtcggaccaacccaacttgggacttttttaatgatccaatgactgttatttttatgcgtctaagcatgacggggggggatggaccaaagaccatattctggtggcatttttgcgccccttggatgagacgcgcaaggtgcctgaccacacatgttattaggaacatccattacgaaggtggcattctgaccgcaactgtcttccaatgaattatgtatgagccaatgtgggacggcattt

SEQ ID NO: 72644 - DNA, 640 bp, Glycine max
  Clone ID: PAT_MRT3847_36612C.1
gacccatcgaaaaatcccttcttcacagaaaccattcaacaacgctgcttaaattgttgttactatgagagagcaaaacgttgagtcgttctacgctaagcttcgccaaaccgcgctatcttcttcctcttctccggttctcattttcccctcaacctccgatgtcgactctctctgcgctctgaaaatcatttttcacatcctcgaatccgattccatccaatacgcgtgctaccctgtgtcgtcttttcatgagatccacaaatacacaaattcctcctcaaacgacgagcctctctccgtcgttttggtcaattggggcaaccacagagacctcagcaataccctaaacctcccctccaacgcccgcgttttcgtcgtcgacagccaccgtcccatccacctccgcaacctcagcgaccagaacgacgccgttgtggttctcttcactaaagaggacgagggacaatccgatcttgcttacgatttcgacctcaccacactcgccaacgccgccaccaccgtcgattctgattccgattccgaatctgagtccgaatcggattcggattccgactccggctctgaaaggactggatctagaaaaaggagaaagaagaaccctcaggatgatgatgat

SEQ ID NO: 72645 - DNA, 314 bp, Glycine max
  Clone ID: PAT_MRT3847_36613C.1
aaatggtaggactagctctccatgtacttatttagtaattgagataaagcgaaccgacttggtcttgttatggaacatttgctttttggttccaaagcttttttctttttaaatgtgaacgtatttttatatacgaatacagtcctactacctatgagcctgaggctcctgggcttgaaaaagaaaatctgagaacgagtcgcccagataattggaccgggactacatgaagctttccccccaggcgagatgcctagtgttgacaacactctgatagagaagggacatgatactgttggccaacaaatgtaatg

SEQ ID NO: 72646 - DNA, 460 bp, Glycine max
  Clone ID: PAT_MRT3847_36614C.1
tttccagaaagaaaaaatggtggcagcaatagcatacgaggagagtcgtcgcaagagagtggaagagaacagaaagaggatggaagccctcaatctccccctcctctctcaagctcttcacaaatccccttctcccaaatcctcaccgctgaagcaggtcaagaatcgcaccattcagaaagagttggttgttgtccgaaggtctagccgtgtggcaaatttgcccactcctgtttacaaagaagtggttgttgatcgcgtgacaatacctagaagaacccttggtagaccttacaatagacacagggattatgccaatagggtatatgcttctgatgaagccagagaggaagcattggagaaagcagaaaccttaatgtcgggtctagaatctgaacatccagccttcataaagtcaatgctacaatcccacatcagcgggggattctggctgggcctt

SEQ ID NO: 72647 - DNA, 561 bp, Glycine max
  Clone ID: PAT_MRT3847_36615C.1
gtcaattttaagtataattttcacagcattttattattaaaatcagtaagtttactgtccatgataatatgcgatgaaataattgtcactaactaaaatcaaagaaaaaaagagagacgacaagaatacaatttacacatgtgcatagagctactagggatttggtatgaaaaactaggtatgtatgacaaagaattaagaattagaaaaaagaattcatacatattattttattttgagttaggttccgtatgcttggacagagtatgcatatgttgatgtattggtttgtattttgtaaaagataaaaaatatacgctttggagtcagcagaggatacatgattattgcaattaacgagaggcatgttttctagaaggaatgcttgcagggcacaattatccttttaatgttttcatacagtgcccaaatccttgtcgtatgtttccaaagcaacctactaatactatactatgaaatcgaaataataatgaaatgacaaaaacgttaaacataacataacaaggtcatggtgccactatttattttattaaaataaat

SEQ ID NO: 72648 - DNA, 192 bp, Glycine max
  Clone ID: PAT_MRT3847_36616C.1
ctctccttttttggtacttcttatatctttcactctttaaagatcgattcatacagggaggttggtgccaatggtgtctatcatcttcaggttttcaacaattattttgatatatatgaagatgatactgcttttgctacttctgaatctaaaactgatttttatcataagttccaagaatttggcatctaa

SEQ ID NO: 72649 - DNA, 218 bp, Glycine max
  Clone ID: PAT_MRT3847_36617C.1
agaagatagacaaggagcaattgggcaggtaggagaatccagacattattgtcctagaaacaaaggaagagggaagtcctaagaagggaggagaggtgaacatttttgacaatgacatacgctctggtggaataaaaaagggtaaaaaaccgatgatttgctatttgggagctttctaatgactttttgaagagcatcctttcaatattgtgatggaa

SEQ ID NO: 72650 - DNA, 389 bp, Glycine max
  Clone ID: PAT_MRT3847_36618C.1
agctcgcacgcctgcacgcacccgcggacggaacttgctgggactcgacccacgccgtctcattttctctactactgctagcgtgtgactttggttgtgcgtttaatcaaatccgtgccggcatttgaaatcaataaagatggttagcttatgttagatcatgcatgcacataggctataaagcacagcacccatcctcgacatagtaactgaaaacccaccaaaccgtattgatcagaacacctatcctgattactacttcaaaatcaccaacagctaccacatgaccagacttaaagagaaatctaacgcactgtggtcaaggatacaatcaagacaagacatatgggcctgaactgaaagatcttgatagagaaagccaacatgag

SEQ ID NO: 72651 - DNA, 190 bp, Glycine max
  Clone ID: PAT_MRT3847_36619C.1
gtatcgtgtacctccgttcaacaactataataagatctcactcgctccgatcacatctaactatggccacctcaagcgccaaatcaggccatgagttcaccggtaaagctgccaccggccacgctacaaatcgcggtgactagaagggaaaggcccttagcgtttacaatagtgtccgcactatggggtt

SEQ ID NO: 72652 - DNA, 365 bp, Glycine max
  Clone ID: PAT_MRT3847_3661C.1
ccccctgggggaagctgctcaaaattttgcttaaagaatgggaaaaccggctttctggctttactggttagcacatttaaccactttgattcacacaggtgccgggtaattttttttttggccaaacatggcctttttggcttcattttactaaagaaatactttaagaaagattgggggagggaaagcaaccctgttaggatgcgattacccagttgggggttttagacatcccgggtccccattggtttatctacataaagaacattttcaatccatgcaacaatgttgaatgcttggccctccaaaactcttgaataaccctctaggactggtttccccacacccggttggtttggatcttg

SEQ ID NO: 72653 - DNA, 322 bp, Glycine max
  Clone ID: PAT_MRT3847_36620C.1
aaaggccaaaacctatttttccaaaaaaagaatcaagttttggaatttgccccaaagggcaaaatttttcaaagaagggcaagttttttggtctaaccggccatggtacttttgaaaagccttcataccccatgaataaggcccccaaaaattctccacaaattccttgtggaaaattaaaaagagggaaacctgaaccacgaatggaaatattggccaatttttgggtccatctggattaatccctcctggcccctggggggttttttttgggggctttttctggaaagcctttgggactttttccccgggctgtacaggg

SEQ ID NO: 72654 - DNA, 717 bp, Glycine max
  Clone ID: PAT_MRT3847_36621C.1
ggtccggaattcccgggtacgacccacgcgtccgcggactcgtgggcgcatttaccacccaacttgttgttccagaatgataaaaggcgtagaattcgtctatacgcgtttatccactcagcttgctgctcttgaatgataaagggcgcagaatctgtctctgcgcatttaccacccaacttgttgttcctgaatgataaagggcgcaaaattcgtctatgcgcgtttatcacccaatttgcgaaatctgaatggcaaagggcgcaaaatttgtctatgcgcatttaccactcgactcgctactcctgaatgataaagggcgtagaatttgtctctacacgtttatcactcatcgaccgtgcggatagccgcatgtcatcgggcccgccgcctctggatgacaaaaggcgcagaagacgacgttagtctctgcgtgctatcatgctttgagtcttatagatagaaaaagtatttttaaaagtgcgggaccaaatggtttccgcatgtcatcgggcccgctgcctctggatgacaaaaggcgcagaagacaatgttagtctctgcgtgctatcatgctttgagtcttatagatagtaaaaaggtgtgggaccaaatggttcccgcatgtcatcgggtccgccgcctctgcatgacaaaaggcgtagaagatgacgttagtctctacgtgctatcatgctttgagtgttatagatagca

SEQ ID NO: 72655 - DNA, 420 bp, Glycine max
  Clone ID: PAT_MRT3847_36622C.1
gtacttaatggtgttgcgggtttggactatatggaaagaattcctcttgccacatctgagggttgtactcatgtgctttcacgcaaaaatggtgaaaaaggcaactagagagttgtatctggggatggtgaagagatgacattgatcacaggaaccagcgatgaagaggcttacaacacgctaatatgtgaacttgagaaaagtgttcctacattggtcggcattgaatgtgccaaggatgagaaactttctaggggcagaaattttgacaaacctaagacacgctgcttcactattgtccctatggatgttaaaattgtggtccagcacatattgtaaattgtgtgacgatcattatgaagaaaaaggacaagcttagttgtcaagttggaatcaacccatactccatggaatggactg

SEQ ID NO: 72656 - DNA, 266 bp, Glycine max
  unsure (1)..(266): unsure at all n locations
  Clone ID: PAT_MRT3847_36623C.1
attttgctcaaggtgagttgcaaactgatgtgatccctgggaaagattttgtccattcagaactaaatgaggatgacagtgacactgtggttcctgtaaattatgctgtttcgcctcatgaactaacactgtgcttgcatgaagttatccaatcaagacttgagggacgtgtacaggagcttgagattgcccttgaaaatagccaaggaanttacggtttatggantctgagcatgagagtcatccccanaagtattctcaagttg

SEQ ID NO: 72657 - DNA, 1500 bp, Glycine max
  Clone ID: PAT_MRT3847_36624C.1
ttcggctctagggtaaagagctggatgatcatttcctgaaagcatctggatgtataaaggaaattgctgttcttatagatatcaatggaggagatactcttcttcggcagaattctgggcatcttgataggaagagaggcaattctgcaaaggtcttcagtgtactatcatggagtaggtattcaaaatcacccccatccaccaaagatggtgctgaattttctggtcgtagtgaaccatgcaagcctggagctcattgtgccacacttaaaaaattatatgcagcagagaagaaacttttcaaggcattaaaggaggagggaattgttgcattggagtttgacaggaagtccatgttattgcgtaaacaagaggatgagaatcttgacgtggtcaagattgacaaaactcgatcaagtgttgataagttggagtccgatttaataagcctaaggcagtgcattagtgacacaacttcatcaattttggaaatgatagatgaggagcttttaccccagctggttgcattaactgcagggttgacacaaatgtggaggacaatgcatgagtcccataaagcccaagcactcatctcccagcatttgagtaacctcagtgataatcataacatgatactaaattcggaatatcatcaccaggctactattcaatttgagactgaggcttcttattggtataatagcttttgcaaacttgtaaaatttcaacgggagtatgtgaggaccctctatgagtggattaagcttgctgaaagcctcaaggatagtaatgaatgtagcaatcattcttctattcttgccatttgtgatcagtgggagcgtgggcttaatgagtcacctgacaaggagacctctgaagcaataaaaagccttgtgtcatgcatccgttccataactggccaacagattcaggaagataacattctgaaaaggttagaaaaactcgataggaaattccaaaaatgcttgaactccttggctgagatgcagcaaagaattgatggagatatggctgatacaagccccaggcatccaatacatcttaagaaaactgaaaccgaagcccttaagaagcaagtggaaagtgcgaaagcaaattatttggatgctgttcagtatagtagggccatgaccctagatcacctccaaaagacacttccccctctcttccagtcactgatggagttttcaaatgcttcagctcaggctattgaggctatcaataccacaggaaagccagtagagtagagtgcaggacattgcatcacatctttttttctattgcctggtgctttggatggtatgagcacaaaatatatgtattgtaaattgtgttcttgacagtttgtaaactgaaacaaaattgtgttcttgacagtttgtaaactgaaacaaaattgtgttgagccatttttgtatggtatcaaaattatatacacttctgtatatcccttccaagcaaccaagtactgaatttttt

SEQ ID NO: 72658 - DNA, 235 bp, Glycine max
  unsure (1)..(235): unsure at all n locations
  Clone ID: PAT_MRT3847_36625C.1
accattcgtnggaggatttttgggcgtgtcgcgtaaaaaataaaagtaaaactccctgcaaggatcacaacctttgcctggaaggacgctcacagggtagtctgcgctcttattactattataagttaaccaactgaagcaacttaagacctatcggaaggaaaaataactcagaccccgattgtatcggtgagcgagagctgattgccgcttgaataaaatatctaaagtgtta

SEQ ID NO: 72659 - DNA, 491 bp, Glycine max
  Clone ID: PAT_MRT3847_36626C.1
ggcttggaacctttgggctgatttatgtgcttgcatggtcgtgagaagatgatagaaggggataatataaatacctctcttaccgctcccgaatatctactattacggttaagtccgcctccctttcccgcccttcctcccctagcggtcgtcctgtctcgagagagtaggtatagtaaaacgagcgttagacttaaaagtcgaacgtttctaaattggacaattgcacagagctggaaggcgggcctaccgagattcggaatttcaataataagttaccttagcgcgttggcgccgtttctctctgtcgtatttccaattgtaacgtttcctgcagattccttcatattaatggcttttaggaaactcatacataataaggcaacggcacccccggtacgacacctttgggccgcttcagtatccactaagagttgtaagaactctagtaatgaggatgaagttaggggttttaagattgctattaaaag

SEQ ID NO: 72660 - DNA, 376 bp, Glycine max
  Clone ID: PAT_MRT3847_36627C.1
gttatatatcattgtatttttctattataatatgtcatgtttattaggggggcccaaaaaaacaaaaagatgcgattgtaagactctggggatttttctgggttgggaaaaattttttcaaaattcgaagcgccatgtagaactgggtggggcctttttcaatgcaaaaaacgggggttacattgtccctataggcgggaacaagcccaccaaaaaagccctgttttacattttgtaaatccaaaaaacaatattttgaatttaaaaaggaaaaaaggatacaaacctgttgtttaaagtaagtgaaaccagaacccaaaaacatgggcttgattttgtgtgatgactccatgccaaaattcattaaagattaacc

SEQ ID NO: 72661 - DNA, 967 bp, Glycine max
  Clone ID: PAT_MRT3847_36628C.1
ctcttctctcttctctctctagggttgccttccttctctctcctttcctcctccttcccgttcgccggccggaatcctattttccggccatatttccggctgcctgcaattccccttcaccttccgaactcaatcaatcttttcaattcgaagctgttgctatcttttgcagcgatattggagcagagagagggaagatggcaagtcaaagcggtgcctctagaaggagtatttcgtcgtcgacgaggagagcctctgaatcaggggcgcctcgaaaatcaatttcctcttcgcgacctttggcattggccggagagcggactgtgaaatcattgcgacttacaaaggccctgacagtacctgaaacaacaactgtctatgaagcttgccgtcggatggctgcccgtagagttgatgctctattgctaactgattctaatgctttgctctgtggaatcctcacagacaaggatatagcagcaagagttattgccaaagagattaatcttgaagagacaccagtttccaaagtcatgactaggaatccggtatttgttctttctgaaactcttgctgcagaagccctccaaaagatggtgcaagggaaattcagacatttacctgtggtggagaatggagaagttttggctttactagacatagcaaagtgtttgcatgatgccattgcccgtatggaaagggcagctgagaaaggaaaatcaattgcagcagctgttgaaggagttgaaaaacactggggaacctgaggttctgctttgtagactatatcctttttagaatctgcattttgttttgaagctgttaaatgctagttttggttttggtcctcacccattttttacttatcttcatttgatcctggtagttgttgaaacttgaaaccatgggtgtattctatgtactgaatcaaatatgataaaaaggagatacacaaacattgaaatat

SEQ ID NO: 72662 - DNA, 452 bp, Glycine max
  Clone ID: PAT_MRT3847_36629C.1
gaggggcaatcgaggctcaattcctgagacaacatatagaaccactgtactgatgcatatgcaagagcacactaacctatacttgagtactgatactccaacatataggagagcctagactcaataggaaacaaaggcacacatgaaggactcctgaaaaattctgctgccaaagcaaggcacggctgtctgcatgggaccggaacgggggcgagactggatcatgcacaggccagagcacacaatctccttggagccatatgctggtgggaataaatctgaaagtgcggtctttcccaccggtaagaacaaacacgatgtggggcctatacgccgatcgatgacaggatctacagctagaattcttgtcactacctgcaaaatggcgcgctcatgccttgagcgtgtgaccaaacttgttaaaggctcgaattgcctatgtgtcatcaaca

SEQ ID NO: 72663 - DNA, 280 bp, Glycine max
  Clone ID: PAT_MRT3847_3662C.1
cacacgcgtacattgacgcatgtgtatcaataccataactataggataaataggcggacatatataattaccacggaatatccaataatatatacatatatatagttctatatggcaatcacaactgtggggctcgaatactacaacataccatcatagtctgcaacatcctctatacctactagatatcagcggatgacgactgtagcactacactggcacctaatgaaaattcaaagactctgagttcaagatggactctggctgacacgctgaaact

SEQ ID NO: 72664 - DNA, 216 bp, Glycine max
  Clone ID: PAT_MRT3847_36630C.1
tttttttttttttttttttagcaaaaacccagttcacatttttttccaaaaaagcaaacattacacacaatttaatacactcacaaattcccaaaaagcatacctcaatgaaaacccagtttatgcccaaaaacaacacacacacgttcacacatttattcaaggacccacattgcaaaatgtcacctccccaaaatcccatgtgaatttttttcc

SEQ ID NO: 72665 - DNA, 305 bp, Glycine max
  Clone ID: PAT_MRT3847_36631C.1
tgtcgtttgctccggcagacgcgaaaggtggcgacgggggtctgacatagaaacccacgtttaagcttctaataaccggtggggtccagctaaggcggctcacgctatgggtgaacacaggcgcgggaaggttgctgagtagaactgccagtacagcaagtaagattgtacgaccttaggtgatctgatggaaaaagtcacgaaggacgacgctgagctagcgcgagcttatgattaacaagagtagtgcgtcaatgccgctgcacatggatatcttttagccgggcaacaaggcaggcagtgga

SEQ ID NO: 72666 - DNA, 541 bp, Glycine max
  Clone ID: PAT_MRT3847_36632C.1
tcaccagatgatcaattccataagcataataaaatgtcgttggaaccaaagtctcatatgattcattcaatgtgatgaccccacggacaccaagctcctttaagcggggaacatcaataggaaatggaacagcacctaacaatatgaacccaaattgaaattggcggatcaatagatcgatcgagaaaacctaggaaattggaattctacaacaaatcgaagaaggaatgatatataggacagaaggttggccgagaaaactgggaggagaattttcccgggaaaataaaaccatgtttctttcggaaaagggtagatcgaggaaaagtgattatcgtaatctgcaagagagagaaagagggagagggaaaatttgtcggaggaaggaaaagaataggaagagagagagagagagagaggaagttggtaaattgaatccctaaccctagatttggtagaatcagaaaatggctctttcgctcaacaaactctgcacccgaaagtaaaaggatccccttctgtcgtcttctcgcagccgtaa

SEQ ID NO: 72667 - DNA, 1679 bp, Glycine max
  Clone ID: PAT_MRT3847_36633C.1
gactgacccgtaagacactcaaatgagaaaacagctggaatatacagaggaaaacgagttatagagtcaggaccgccaaatatgtacgattattgggcagaaaatgaaaaacatgacttataggcagctttttcagtacacgtggatatcaacactaatttctcccaggtgattagcccggattgagcaactgctttccctgctgctcagtttctccgaggaaatcttctggtcggtagtagcatatcgcagccaaaggcatgatattctcgccagtgctgcctgtccagcaactcgtacacgatatacaacacttaaatctgcccatatttcacttgccatggctgattgactacttgggtcgtaaccttctagatctgactctgttaccatgactacagaattgtcatcaaacatcacaagatctcgtgaacctgctgccgtctgagaagcctttactaatagattggctgtgggagcacatccaacagccctcctaaccataagatggtaatagtattcttggacagcttgccactgagaggaagctagaagcacccttggtcgaattgatttcacataagcatatgcagcatcaggtgtcatcattttgtggtgcaccagataacaaataacaatagtcgtgctgcgaccacgtccagctttgcaatggacatatgtagttcgtcccgacaatgcattttcatgtatgaagtccacagcacggcaaatgtcatgcagagaaggagcaaaacagtaatctctagtaggaatcaccagatgatcaattccatgagcataatataatgctgttggaaccaaagtctcatatgactcattcaatgtgataaccccacgaacaccgagctcctttaagtggggaacatctataggaaatggaacagcacctaacaatatgaactcatcaaccttatcccaccatcgaaactcggtctgaatcttattccttacgacattgtaaaacagggttggatagaaaagcgcacgagcgcctgctccaaccagcacccttttcgcatcataacccacaaacctcgatcctccctcgagccgattcgctaccacctcacctcccttcaattcctctatatgcataactaactttcaaatcgcaaaacaattacagtaataatatccagatatttacaaaaaccctaatcaacaaattacctatcgtatgaaccacacttttttttacaacctacaacccctcgcgtatactatccacgaagctatcacaatttacaaccaccaaaacaatcacaagaaaatatttacagaacaaacgggaaaacaaaaattaaaatctaattaccccaaattgaaattggcggatcaatagatcgatcgagaaaacctaggaaattggaattctacaacaaatcgaagaaggaatgatatataggacagaaggttggccgagaaaactgggaggagaattttcccgggaaaataaacccatgtttctttcggaaaagggtagatcgaggaaaagtgattatcgtaatctgcaagagagagaaagagagagagggaaaatttgtcggaggaaggaaaagaataggaagagagagagagagagagaggaagttggtaaattgaatccctaaccctagatttggtagaatcagaaaatggctctttcgccggacgcgtgg

SEQ ID NO: 72668 - DNA, 5746 bp, Glycine max
  Clone ID: PAT_MRT3847_36634C.1
gcaatcgtccgaaatattgttgcaactttgaattgaaacgaactttttcgaattcaggtggaattcgctctcgcccaagagtaatagattcaccagctctaactctctctctctgcttcgccggcacgtaagaacattttcgcaacaatagctctttccttatgattttacctcaaccctgatgccaccaacaaagatagttccgcctaccctcgatccattcctgctgctgagtatctccgatgaattcaaagggggggtcatatcataccatattgttagtcatgataggagaaccatttccacatgttccattgatcgtttacactgtgtgggcatttgagacgaatccattgaaattaccattggatctatattaacttaattgagacttattgatggtctgacccgaacaacactcatcatttgaactcaaatgagaaaacagcagaatatacagaggaaaacgagttatagattcaggcacgaccaaatatgtacgattattgggcagaaaatgaaaaacacgacttgtaggcaacttaacgtgctttttcagtacacgtggatatcaacactaatttctcccaagtgattagccctgattgagcaactgctttccctgctgctcagtttctccgtagaaatcttctggtcggtagtaccatatcgcagccaaaggcatgatattctcgccagtgctgcctgtccagcaactcgtacacggtatacaacacttaaatctgcccatatttcacttgccatggctcctgattgactacttgggttgtaaccttctagatctgactctgttaccatgactacagaattgtcatcaaacatcacaagatctcgtgaacctgctgccacctgagaagtttttacaaatagattggctgtaggagcacatccaacggtcctcctcaccataagatggtagtagtattcttggacagcttgccactgagaggaagctagaagcacccttggtcgaattgatttcacataagaatatgcagcatcaggtgtcatcattttgtggtgcaccagataacaaataacaatagtcgtgctacgaccacgtccagctttgcaatggacatatgtagttcgtccagacaatgcattttcatgtatgaaatccacagcacggaaaatgtcattcaatgaaggagcaaaacagtaatctctagtaggaatcaccagatgatcaattccatgagcataatatattgtagttggaaccaaagtctcatatgattcactcaatgtgatgaccccacggacaccaagctccttgtagcggagaacatcaatatcaaaagggacatcaactaacaatatgaactcatcatgattatgtcacgatcgaagctcggactgaatcttattcattgcaacattgtgtaccattgccaaatgctgttcatggcacgagcagcaaacaatgctgaatttgggaattattctgcatggtttcctcctggcaatacttattctgcaattactgtcccaccacttctgtccggcagaggggagcagagttatgttgctggtgctggggcgcaacgtataatgggtcctacaggtagtgctccttttggtcctgaaatctacaggggaccagtgcttccatcctctccagctgttgcttatccacctactacgccttttccctatccaggatttccatttgaaaccaattttccattatcttcaaactctttgtctgtttgttcaacagcatttatggattcgtcaactgtgggtggattatgctttcctaccatgccctcacagccagttgggtctggtggtgttgtttcatctacgtatccccgtccatatgttatgagtcttccaggtggtacaagtaatgtgattcctgacagcagaaaatggggaagtcaaagtctggatcttgggttcggacccccgtggttccgttagtgaacggagaggtgagagattgccttctgtattaatgcaaatgacagtcacaaattcacaggaccactatgcaggacaacttgaagatgtttcagagggcagatgcgatgaaaagaaaagaaccggaaagtggttgggggacaatggatccgggagtatccggatacacgcaatattcatgtcatctagtgtcgtcgctcgtcaacgcaaatattcaagagctttttatggaaaatgtcggaaaattggggatatttttgagtgttgagccatggacaatgagcagagatgttacccttgctgctgatatgcttcttgaattctgacttgataaagcgatcagagcctctgatgcagttgttttgtatgaatctgctcccttattgtcgcttgcagataaagtttttcctgtgtagatatctaactgaaacagttggtgtgataatgccgcctagaatcagagaaatgggcatcaagtgtttgactgtgactgctctgcaacagcaccgagcccaatccattctcgagcatttggaaggagaggattggatgtctgaactggctaggcttgaggccagtttgtctttctttaaatcatttttttttcaacttttgttacatatatagttattgctgtagtcttgactctggaattttgtcacttatcacattctggttattggtatatgcacaggttggccaatgtgtcacttctctccccaagtgcatctgcgtcccatggagatgatggaatgaacctactagctactgtggctgcaggggaaatatcaagatctgaaaatgcctcacccatgtcatcccctgagagaaagtctcttcctgcagatgaattgagctcagccaatgatttcaagttaaaacattctgttgaagcggctggttgcactgtttcacagttggatggtggggctattgcagagcatcctttgaatacagttgattcattgcagataaaaaatgatttgaggcatcctgctacgacttcaggagatggtgaagccatttcatcgagttgtgtagagaaaagtggtgatggtagatctcagataaatagctcccctacagatttcttacaaaatgctgaaggtccatgcttacggcctgaaatcaaagaggatacttctgaaactatattgccagataaaaaggagactaatgtagacctcggaggttctgactctaaattaaagtcatgcacttcctctattgatgatgatcagaaggttgatcacatgaatgagggaaccattgagaatgaggaattgttggttccaaaagctgttgcaagtgttaagtctgaaaatgaatcaggtgaaaagcaagctgagttatcctcaggcgtggataatgagaaccagatttgttcagaaaaagcaacaggtactggtatactagtgcaaaaggcctctccaattgcagaaaactgtgagtccttatatttaaaaaaggagtcacctacttctggtaatgctgtaatggtatctagggatgaaaatgctgatgacatgaagtcagttgtgattgagcctgatgaacgaagaatggagcaggatttatcagtttcagatgatgttaatgaatgtgctgaagatactatgggcagaaatgaggctataggtcagtgttctggctcatcagttcagccagatttaccaacaatgcctaggaaagagaatgatgtgtttaaagcatgtgagcgaaagttggatgcaaatcaatctgaggttgcaggagagaggcatgcaggttctgctgctgggtctgatactgctgtaaaactcgactttgatttaaatgaaggctttcctgttgatgatgtaagccaaggggagattgctaggcaggaagatcctatcacatcatctgcagttcatgttccttgcctattgccttttcctatttcgtccatctctgggggcttccatgcttcaattacagtggcatctgctgcaaaggggcctgttgttccacctgaaaacccattgcggattaagggggagcttggttggaaagggtcagccgctaccagtgcatttcggccagctgaacctaggaaaaatgctgagacagcatccactactaatgatattgcttctgttgacggcacttctatcaaacaaggtcgccctcccttagattttgacttaaatgtggcagatgaaagatgttttgaggatgttggtttgcgtggttctttagaagctggaccacttgatcgtagcactgggggatttgatcttgatttaaataaagttgacgagactcctgaaattggcactttctcgctaagcaaactggaaattccttctttacctagtaagccttcgttgtccagtgggttatctaatggtggaagtgtctcaagagactttgacttaaataacgggccaggccttgatgaagttggcagtgaagtccctgcacgtagtcagcagatgaaaagtactgtaccattcccaactgctgtccatagcacacgaacaaacaatgctgaatttgggaattattctgcatggtttcctccaggcaattcttattctgcaattactgtcccaccacttctgtctggtagaggggagcagagttatgttgctggtgctggggcacaacggataatgggtcctacaggtagtgctccttttggtcctgaaatctacagaggaccagtgctttcatcctctccagccgttgcttatccacctactacaccttttccctatccaggatttccatttgaaaccaattttccattatcttcaaactccttttctggttgttcaacggcatttatggattcatctactgtgggtggattatgctttcctaccatgccctcacagccagttgggcctggtggtgttgtttcatccacatatccccgtccatatgttatgagtcttccaggtggtacaagtaatgtgattcctgacagcagaaaatgggcaagtcaaagtctggatcttaattcgggccctggtggtatggatacagaacggagagatgatagattgccttcaggattgaggcaaatgtctgtccccaattcacaagcctcgatggaggaccacttgaagatgtttcagatggctggtgcattgaaaagaaaagaacctgatggtggttgggagggagccgagagattcggttacaaacaaacttcatggcagtagtgccatggctcttcaacgcaaatattcaagagctattttggaaaatgtcagaaaaattggggatattattttgagtgttgagccatggacaacaagcaaagatgctacccttgttgctgatgtgcctcttcagttctgacttgataaagcgatcagggcctctgatgcagttgttttgtatgaatctgctcccagattgtcgcttgcagataaatgtttttcctgtgtagatatctaactgaaaacagcaggtgtgataatgccgcctagaatcagagaaattggcatcaagtgtttgactgtgactgttctgcaacagcaccgagcccaatccgctctcgagcatttggaaggagaggattggatgtatgaactggctaagcttgaggctagtttgtcttctttaaatcattttttttcaacttttgttacatatatagttattgctgtagtcttgactttggaattttgtcacttatcacattctggctattgatatatgcacaggttagcctccatggccaatgtgtcacttctctctcttattgttatcgccttgcacttgcaacattttctttttggtatcacaactggatttggtttgt

SEQ ID NO: 72669 - DNA, 175 bp, Glycine max
  Clone ID: PAT_MRT3847_36635C.1
agtcacccctacaaaatctgtaaacctcgttgtactacccgtacaatatggtagatccacagggcgccattggcggaacctccaatcaagatgcccactaatgcaagtctgagtcctgcgaggacctgcactggatgtcacttctgggtcaactgcgagtagcagtactcatcca

SEQ ID NO: 72670 - DNA, 383 bp, Glycine max
  Clone ID: PAT_MRT3847_36636C.1
acgaggttctctagcatcagtggcccactaacattatccccctcttcatatgggaccttgttcgcaaggtccattggtgatgacttagaggcatggattgttgagagacgttgggtgtggtttccaactggtgttaggttgttgtcaacatcggggatgggttccaaagtgggaacaggaatccaacgatgaatgagggtgagccacttggaaagttggcaaatctaggtaagtgggaacaggaatccaacgatggatgggtagtcaagggcgtcggatttgaattacgtggcacagatgaaagaggagttaatggagagaaaggatccaagttagatttgctacttggagaatgaggtaacataacaaaagagttcaattca

SEQ ID NO: 72671 - DNA, 298 bp, Glycine max
  unsure (1)..(298): unsure at all n locations
  Clone ID: PAT_MRT3847_36637C.1
tttcctcccacgcgtccgaacggcagcgagaggaggacttttttggacagtttttttggttacaacccacngcaccatcaccagataaaactggggtggtgcctattatctttttctttctctctatcgattctcgtaacaaaccctacccttttgagtcttccaagttctcaccatacgaatgggttccgaaggatccagcgtcgtggttcctaggaattttagattatcggaagagcttgagagaggtgagaagggaattggggatggaacttgtagcttttgaatggatgatgct

SEQ ID NO: 72672 - DNA, 1098 bp, Glycine max
  Clone ID: PAT_MRT3847_36638C.1
tggatcctctagagcggccgcttttttttttttttttttttttttttttttgggggaaaagatgttatcaataaattcttggcatgaagttattatatgaataagtcatctaaagatttctatgtcgaacaatttgaacaaactctacattaattgtagacatttactataaatgtgagcccctgctttgtttaaaggggattggttacatgaaactatggtgcttaattgaagataagccatgcattgcatacaccgaattacatcacacaggtacaaagttacaacgtcattcactcattcaaggcttaattctccactgtgttggagtcttatatgtgggcagggtgtttcaggttctccacttgtccacaaaaccctcaaatctcctcgcttccgccccaatgtcatcagggtcccaagggtaaatggaacgatgtatagtagtgccggttggccatgcccgtccatcaagtttagtgccacgtacgtaattaaaaggccaaagccatatgcaaccattgcccacaagaaatatccacttctaaggctcttatttgccagccaatcgtacctgagtgagaatgccaccagcattcctggtaaaaggatgtctccaaaacctatgatgctgtaaccaccccatggatcaaaaatacgagggaacttcagtaacatgggaattccatcttctccacttcgatcacctcgggctaccacaatcatgacactttccttgaaaaacttctttgagacaaacacccaaaagatgtcgtaaatgaaggcacagccgagaagtactgtaccaaccttgagatttggtacatgtacaatctgtagaactgtgattatcagtgcaattccaagtatatcttgaccaatccaggcaaaggatacgttgcgataaactgcccagagaacggcaaatgttatacagaatggagaaacagccaaagtcaggtatgaaatggctcctaagaaaggtactttgatgtatgactctccagcatgcttgaaccacctggacaaaagagcaaccaagcatgtttgcaagccctccattcccccaaaacaggagagaaccacccagcccgaacc

SEQ ID NO: 72673 - DNA, 2104 bp, Glycine max
  Clone ID: PAT_MRT3847_36639C.1
cgtatttacaaatactatagtaatagtaatatgctttgatttcttctttattttattgaatggatcaaaatcaaaagttgattgttccaagacgcggctgcgtcggtctctctcggtttcaactgtgaactgtgagctggtaatggtttcataaatctcactgcatccatggcttcggagaagatttcctcgattctcttgttttctgctgtaattttgcttgtccgtgatgctccttctgccatagctggggacatagttcacgacgacgattcaactcccaaaaagcccggttgcgagaaccagttcgttctggtaaaagtgcaaacttgggtcaatggtgtcgaggatgttgaatttgttggtgtgggtgccagatttggcagagctattgtgtccaaagagaaaaatgcaaagcacacgcgccttattctttcagatcctcgggattgttgtattccgccaaagaataagattgtgggagatgtcatcatggtggatcgaggcaactgcacattcacaaaaaaagcaaatattgcacagaatgctaatgcttcggccatcctcatcataaataaccaaaaagaactgtacaagatggtttgcgaacctgatgaaactgatttgaacatacacatacctgctgtcatgcttccattagatgcaggtacaaggctggaaaaaatgctgacgactacttcatctgtgtctgtgcagctgtactcaccatttcgaccagctgttgacatagcagaagtatttctttggatgatggcagttcttacaatattgtgtgcatcatattggtcagcttggacaacccgagaagcagctattgaacaggataagttgctaaaggatgcttcagatgaactcccaaacactaaatatgctagtgttagcggagttgtaaatatgaatgtgaaagctgcagtgctttttgttgtatttgcttcatgtttcctgtttatgctttacaaactgatgtcgtcgtggttcattgatgtcttggttgttctcttctgtattggtggtattgagggcttgcaaacatgcttggttgctcttttgtccaggtggttcaagcatgccggagagtcatacatcaaagtacctttcttaggagctatctcatacctgactttggctgtttctccattctgtataacattttccattctctgggcagtttatcgcaacgaatcctttgcctggattggtcaagatatacttggaataacactgataatcacagttctacagattgtacatgtaccaaatctcaaggttggtacagtacttcttggctgtgccttcatttacgacatcttttgggtatttgtctcaaagaagtttttcaaggaaagcgtcatgattgtggtggcccgaggcgatcgaagtggagaagatggaattcccatgttactgaagttccctcggatttttgatccatggggtggttacagcatcataggttttggagacatccttttaccaggaatgctggtggcattctcactcaggtacgattggctggcaaataagagccttagaagtggatatttcttgtgggcaatgtttgcatatggctttggtcttttagttacgtacgtggcactaaacttgatggacgggcatggccaaccagcactactatacatcgttccatttacccttgggaccctgatgacattggggcggaagcgaggagatttgagggttttgtggactagtggagaacctgaaagaccctgtccacatataagactcctacacagtggagaactaaactgtgaatgaatgatgttgtaacttttcacctctgatatattcggtgtatgcaatgcatggcttatcttctgcaattgagcaccatagtttcatgtatccaatcccctttaaacaaagcaggggctcacatttatagttacaagtaatgtagagtttgttcaaatagttctacatagaaatctctaatcagcgttgtttgtagttggtgtatgatctatggtttttgttccagcaattttactttattgggcatgctcatggcttatatgataaaaaaaaatcacgaaagcaaaaaaaaaaaaaaaacaacaaa

SEQ ID NO: 72674 - DNA, 530 bp, Glycine max
  Clone ID: PAT_MRT3847_3663C.1
cgtcctcctgcttgggggggggggggggaagagtaaagtaatgccgcagaaacggtcgggatcgggatacaggagaaaaagggataatatggaagcgacgttagagaaaatgcaaaccacgtttaggaatacggctagattcgggcgtaaaactagtcatacagaataaaccgatcaccccaaacaaaattttattgacaaataggcgcctcggttagagcctggcaacctaagcaggtggtaaagcgtagataacaaagttggaaatactggtagagccgtacctgcaacactgagccttatacagacctgtttagtaggccggcactggccaaggagcaaacagacttttgtcgagctaaggttattaccgtttagcaagaggccttggttttaattaaacgtactagtagccaggccaacttgacgttactgacgcagattaaccgggccatatggcaaacgagcacttttatcaattactctggggacagtcccagctacggtgacagacgtaacagttcagtgta

SEQ ID NO: 72675 - DNA, 468 bp, Glycine max
  Clone ID: PAT_MRT3847_36640C.1
actagtatggagtgtttagccatttgaacaaaaatacccccacgcgtccgtacggctgaaagaagaacacagaagggcaagaatggtgatgaagaaaaccatttggtggggtggccaccagttaaatcatggaggaggaaagaactccatcagcagcatcctgcgagaggccgaattaggaacgataggattcaagctaatgaaaatcaaagtagaggaccaaactctttatatgtcaaggttaacatggaaggggtagccataggaaggaaaatcaatttgaggcttttcaattcttatcagacactcacaagcagcttgatcagcatgtttgctaaataccaaaaatttgaggaagttggagaaagttacacgctcacctttcaaaacgaacaggatgaatggctgcaagtaggacatgttccatggcaatcctttataggtactgtgcggcgtttagtgatactg

SEQ ID NO: 72676 - DNA, 1091 bp, Glycine max
  unsure (1)..(1091): unsure at all n locations
  Clone ID: PAT_MRT3847_36641C.1
atcccaataactttgagaaagctagctagagagctatatctaactttgaaaatttgcccaatatacatgttctactttgcctattgcaacatatcctatagttagcttcttagttcttacattacatacatggaagttgacttagttcttgctctccccactcaaaattccgttgaggaattcaagcttaacaagtcgaaacagatagtgagtttacagttatggagagccagttgcggttcagaaagcgaaaaacgtgtcaaacacaataagcgcagcttcgaagagtcctttggacattttttgaaaccttttcctttactagtttggagtggacagccaaatgaagaagaagaccgtagtgaaaaggtgcaaagaaacattcacacaccaaacaagaatggtgatgaagaaaaccatttggtggggtggccaccagttaaatcatggaggaggaaagagctccatcagcagcatcctgcgagaggccaaattaggaacgataggattcaagctaatgagaatcaaagtagaagaccaaactctttatatgtaaaggttaacatggaaggggtagccataggaaggaaaatcaatttgaggcttttcaattcttatcagacacttacaagcagcttgatcagcatgtttgctaaatgtattctaaattttctttgttatgctcggtaccaaaaatttgaggaagttggagaaagttacacactcaactttcaaaacgaacaaggggattggctgcaagtaggacatgttccatggcagtatgtgcatattttataattaactataaatagattacatactttcagtgacttgcttcagctttgattctttttaataattttgtattgtttcaatcacaagtaacctgatcgaactttcaaatttcaacatctgccaaataatcagcaaaatttacccatgatcgtgaaattgagagcaatggtttaatattaaaacttgtacttgttaagtaatctgcaaggcacttttatagctataattaagcagttggtggggnnnnntaaggatgtggctgtgcatgaagaaagcatgaactaatcaaagtctat

SEQ ID NO: 72677 - DNA, 430 bp, Glycine max
  unsure (1)..(430): unsure at all n locations
  Clone ID: PAT_MRT3847_36642C.1
ggtnccggaattcccgggtcgacccacgcggtccgccaccactccctcactctccactccctcagttgacaatcctgacgttgcctcgcgcacatgaaactcctgtgcgccctgcgagaactcgctctctgtgctgaatgcactcatgctgatgataaataaatgatgcctcgaagaaggagaaagaggctgcgatcgccgcgaagcttgcggaagaagaagaagcttcagaagaatgtagggcacagaatctggatacgggggttcttccgagcgaccgggaaagcgcgctgaatggcctgctgcgggatagactggnctagatccggtttaggaagccgcatacatgctgatgtgagattgtgacggagcaggagagtaactgatggcgtagtggggggagccaatgatgtttgggtacttcttgagt

SEQ ID NO: 72678 - DNA, 254 bp, Glycine max
  Clone ID: PAT_MRT3847_36643C.1
gcatcaaaccaccaatccctaaaaaaagcattatcctccttctttgttctttgcttatctcttttctcttttcctctgaaaacacaccctctttacagatcctgttatttctctctctctctctccacaatttctattctttctagctttgtagctaccaaaacaattttctcaatattactaaaggtttcagctattaaatctgacgtagctaatgttgtttaaatcaatggatacaccccatgtctcttgat

SEQ ID NO: 72679 - DNA, 333 bp, Glycine max
  Clone ID: PAT_MRT3847_36644C.1
tgttttttttcttttttttttttaatccataatgtaaacgaacaacattatataaaaatgacacggtgctttaaaaataataattaatgaaaaataacatgggacataacaaagaacgcagtgtggatgtaataaacagttattgagctggtttgggtgttacaatatttcactggacagcttttgaattttagaagggaagtgttgttggcttgcttctataaaaaatgtgaatgttctgtatgtcctatgcacagatgaagatgcaaccgcgaccgttaggtttgaaatttcgttgaagggaagggcctatgatgcttcatacaaccgggg

SEQ ID NO: 72680 - DNA, 241 bp, Glycine max
  Clone ID: PAT_MRT3847_36645C.1
agatgctcaaggttacaccagcatcttctctccattaaaatgacgttcatatctggacaaatgtgtctccaaatatggactttggactactggatatatgatgctatgggatacatcaggagttccgttggattagtcttccacagacaattctcaagatcatgatccatattcttcaaatgccgttgctaatgattgatataatggcattattggcgcattccggaggtctcgttgtaag

SEQ ID NO: 72681 - DNA, 284 bp, Glycine max
  Clone ID: PAT_MRT3847_36646C.1
aagtgcatacaaaggggaatgggggggggaatttataacacaaggtgttaacaaacgctttaaaatacatgagccaatctcttttgaataggaatgggaagaaagaaaaacatctcttgaactataagagctcagagcacattacacgggagtaccgacatgtagcaagcctttacacaattttaaagaacaactgtgctcagggactgggatgcttctttctttattatacaaacaacccatcatatcctgtaaagaaacataaattttctagttgtgcaata

SEQ ID NO: 72682 - DNA, 247 bp, Glycine max
  Clone ID: PAT_MRT3847_36647C.1
cttgtgtccacgcgtgctgccacacgtccggtgggggggggatataacggcgcactcaaccattgttgtgatgggacattaaaaagcacacgaaggctgtgacatgcttttcactttatgtgccgaaaaacaaccctttatgcggttcctctgatgaaaccatattggtgtggaaaatgttgcactacaagctgggctgtgttgaagctatagcattgaatggaccaaatcatgatttgtgggcaca

SEQ ID NO: 72683 - DNA, 620 bp, Glycine max
  Clone ID: PAT_MRT3847_36648C.1
gctttcaaacttttcggaagggctctatttgtaacagacacctgcaaaccatttccaacaattgaggcatgcaaaccgataccttttaacattggtgtgggaggcctttcctcccccatgggggatgatggccgagctcgagccgattcggctcgagcagcaagtgaaacatcagcaatatccaagctaaaggtgagagtgggacctgaagcatgtggtaaagggtttgtgccatataaaagatgcatatctgttgtgacagctgataatagagaagagcaatgcatccatctttccttgtagcttaccccactggatatttcttcaaaagggttccctttgagatgatgagctgtaatggttgttttagctgctggatgtgagttggcataaaatagggagctgaaaattttgacatttctgttgcattacactgcacattctccagctgttcaaatccgtgaacttgccttttgtatttttttgactttcaagtttcaactgtgaattatatctagtgtttttgtttgttttttttttaaaactttttatgctccttaagagtatgcaaagtgtaagtcacgtacttgtgcagtgcttattaacgttcttgttcatag

SEQ ID NO: 72684 - DNA, 153 bp, Glycine max
  Clone ID: PAT_MRT3847_36649C.1
agaccaccaaaaggggtaaaatggcacaatttgaatagaaaattaagctgaaaggccattcaacttaaggtgaagtcctccaattgccgtccggaaagttgaaaacaccaacagaaaagtgttttccaaagccttgtgggtttccgtccacct

SEQ ID NO: 72685 - DNA, 283 bp, Glycine max
  Clone ID: PAT_MRT3847_3664C.1
attacacatgaaatttcgaactttaaaactctaaattccctatcattgattagatgtgagttctcgtgtactattacggattcaatacggtctttaaagcatcttacatttctagcacttaattctaatatgttcactgtaactataccactctctcttgaccatctatcaaatattgattgacttgatcttgcttaaaaccatctttaaagtactattactgtctctgatgaccaatgaagaccatgccttgaccttcttcttaaggcacaacactttcata

SEQ ID NO: 72686 - DNA, 357 bp, Glycine max
  Clone ID: PAT_MRT3847_36650C.1
gaagaaaccaacacccgtaaaggccaacaaagaacaaggaactccaaaattgttagtgacaaagtcattaccatcatctttatctaatcgagttttaagggctacaaaggggaattagtcgtcattggcaccaagcactttgagccctgcgcctgtggatataaaacaaactctccgtagtctctgtcacaaggggtatatctccactctggtttagctctcactcgggaaaaaaatatgtgacgggcgcttgtgatattataagggcagtaaagggctggaaaaaggggctcagcccattagcattacacggtggttcaaagatgaaaaagtcacaactgtagttgaacccttctt

SEQ ID NO: 72687 - DNA, 256 bp, Glycine max
  Clone ID: PAT_MRT3847_36651C.1
ctcgagccgtgcagttgctattgtaagtctactcttgtgtgtgtgtgtatgcatttgtaataatttatgtttatgttttttttgtccatgaattagttgattacaagtgtactttaatttacacatctggactttaaaatgttaggaatgtattaagatatgattcctttttttccttggtattttgagagttattcatgtgggtgcatttcagctgttattaacctctggatgtggtcattcctggatcttctta

SEQ ID NO: 72688 - DNA, 335 bp, Glycine max
  Clone ID: PAT_MRT3847_36652C.1
gggattttgaccccgagccaagctgtctcttcgctcttccttcgtgataaatgattacgactacgccgcttatagctcttactccttatggttcaccgaggcccttacagcctaggtgccacactgaggaacaatacttgtttaccatgatataatcttctcgggaagttgctacttactgcatcttgatctgtacaagttttaacttctgagaaatttgtatattattggcatgttcaagcggatgttgtgccaatgttatgcgtagaaatagaatcacgtaggcgtaaatgcaaatcattgtcacctttccacttactactagatagcatcac

SEQ ID NO: 72689 - DNA, 313 bp, Glycine max
  Clone ID: PAT_MRT3847_36653C.1
aacaaaagtgggaaatccttttgtttgcaaggggagctttttttttttttcaggggaaggtttccccctccaatttttggttaaaattaccccctggcttcccaatttgtaacaaatttttttaaagccaacttttcaagggggttaaaaaacaaaggggggaaaataataaaaatgggggccccaagaaacttgtttttacaaatcccccccgggtggctttttttcctttgggggaaaaaaaaaagttggggttttttggggggtttaccaatttttatggacccattctttttttcttggaatttggggg

SEQ ID NO: 72690 - DNA, 334 bp, Glycine max
  Clone ID: PAT_MRT3847_36654C.1
cctacggtattacacctggctgtgaacccggatatagagaacccagagaccatgctgcaactgcaactgcagaacagtcatggaggacgcatgcaggggcaacaccagctagatgaagaggaaaacagcggcagcgatctcagtggcttcagtagacacttcttggcacaatccttcgataccagcgaggacatatctgaaaagcttctgtctccagacgactaaaggaagcagatcgggtcagtggagagaggtctcagcgctatcaacccctagtgtcaggaacatccagatgattatgaatatgagaaccaagatgatgaagattaacaaa

SEQ ID NO: 72691 - DNA, 1184 bp, Glycine max
  Clone ID: PAT_MRT3847_36655C.1
gctccttttgtcataaccgccatcggctggcgcagaaagcaacggcccgtttgacgtcttctataggaactcactttctcttctaaatcttttgaaaaaccgataaacatctgaaaaatttatgatggaaataacattatccaaattctgatgccgctgttttcataaattgatactatggcttgatggtggctcatcctatccattaagtctttccaatcacatctcatcagtattttctaataaaaaatttcctcaatcatggtcgagaatagtacgttgatgcggttgaataacgtttattcctagtaataagtgcgcaagggaaaacttgttggttataatacagattgtgaggctgcaattactgcaattgaggatgcactcattgatagagcaaaatctcttgcttgtgctgtatttggtgaagctcagcctttcaaagagttggtcaactttcagccagagaaaggggcaattcttgcgaatgcaacacctgtaggaatgcatcccaatacagacagaattcctgtggcagaggctactttggaagactaccggttagtctttgatgctgtgtatactccaagaagaaccagattgttgaacgaagcggatgctgcaggagcaataactgtggctggggtagaaatgttcctaaggcaggccattggtcagttcaatcttttcactggcctagaagcacctgaagaatttatgcgggaaattgttttatccaaattttgaaggcgccgctttcataaattgatcctacaacttgaaggaggctgcatgcctgcacctatcaagaaattcttgtatcacattgcataacatttttctttaaaaaaaatcccttatttttagttgggacgacaactataatgcaacataataaattgaaataataggcaaaatagcaaaagttgttgtgggcgcagctgaaagacatggttcaacttaatttgtggttttaggaataaaaatgttgtgattctctgaagaagaaaaaaatgttgtcatagcttcataggtaatattaacttgggccttacacaaaaaaatgttgttatatggttgttgtgtgtgccattcacatttttttctatttatgatctacaattattttgtttttttttatgattttatctaaaatttataatatatataaattgtttttttat

SEQ ID NO: 72692 - DNA, 444 bp, Glycine max
  Clone ID: PAT_MRT3847_36656C.1
aaattggcagaggcacttcgtagtaagggagttccatacactatctattggaaaaacgatttttcaaagtatgcagcttcacattttcgacattctttattctctgtggcacagagtacatccagccatacatgggatgctttccagctagctctggcatcttttagactatactgtatacacaacaatgtcttaccttctaactgccataagggtgctggaaagctcgggccacaaattcttggggttcctcccaacattgatgtcagtccatgtgtagcagacatgaaggaagaggaagaagattcaccggagacaatttctgctgtaaagatatatgacgatgatgtgaacatgagatttcttatttgtggagttccctgcacattggatgcttgcttgttggggtcattagaggatggactcaatgctcttctatttgca

SEQ ID NO: 72693 - DNA, 359 bp, Glycine max
  Clone ID: PAT_MRT3847_36657C.1
caaggcaattaccacactctaggagggggggctgaatatataaaggctgggtatgacactatagctcgatattacacaagtggagaatactggtatgctgttgctacttgttctagagatgggggagtaaccatacggcttcctgaaatcttcgtgacttgcactagcggataagcgtggttaaaggaaatgtgaatcatttccataacacttacaagatggataagccttacaagctcaaactaaacatgctgggtgacaataccaaccatgaacctatgagaacgctatgtttgctcaaaggctaattaccagagaatgttacaagggaccccatgtatgaactgtacattcatgtg

SEQ ID NO: 72694 - DNA, 532 bp, Glycine max
  Clone ID: PAT_MRT3847_36658C.1
ggctcgagtaacgttgggagtgggagtgggagtggtgtggagttttattccgatcttactccgggggcggattgattttctcgcgcgctcccgttgcttctcgttttcctgaattccttcagtgctgatggtcattatggatctatgactttacacgagcagagttagcctgtgatgcattagtccgctatccagagtttactcgatgagtccagcatttgaacttgtaccccttagaagcctattcacaatcccatcctcttctaaaacactactctgaagtgatttggtggatgaatagatcaagtgtcctcttggcatgccctgctgccattctgatgatactcattatgataatctgaatgagattgtaaaaattggctgcgaccattgaccttcatcatggatcgaagccatacagccgatcccagaggtgcaagctgcaatcctacggtcacctttgttccaacatcattgatcttaaccagactggtgagcgtgctgctgctctttcttgttattaacactccct

SEQ ID NO: 72695 - DNA, 341 bp, Glycine max
  Clone ID: PAT_MRT3847_36659C.1
tacggctgcgagaagacgacagaagggggcaatcagattaggatcgataaacaatttctgcagatagatagaagctcagcatgtgatggaggatgaagctgtttaagaacaactttaggcaaccgagtatgatccatgcactaagccaaatggattggcacataatctaattataaaatattagctatttgacttttatagtcactgtcgctggtcatcaatgagatgattgattattaatgttgaggatagaacaaaagcaattctacacgaattacatagtatttatcaaaatgctgttgagcttatttatgtctgtagagtgtagatcaagtactatc

SEQ ID NO: 72696 - DNA, 1068 bp, Glycine max
  Clone ID: PAT_MRT3847_3665C.1
ggcgtgcgtcgccgcgggcttcggctcgtgcggctgcgagaagagacagaaggggatctattattattcaaagccaataatttctcaaatatcaagttatgacgagtttgcactttgcagagatggaaaagaaagagagaaagatcatggtggctgtggatgagagccaagagagcatgcatgcactctcctggtgcatcaccaatcttatttccgaaaccaacaagcttgttctgctttatgtcaggccaccttctgctttctactccttggatgccgcagggtataacttttcctccgatgttgttgatgctatggaaaagtacagtatgcacttggctaattcagtcatggaaagagctgaagctgtttgcagagacttgaacgctactaatatcaatatggagagagtggttggtgtaggacatgccaagaatgtaatatgcagtgctgtcaagaaactagaggctgacaccttggtcatgggaactcatggctatggattctttaagagggcactccttggaagtgtcagtgatcactgtgccaaacatgcaaagtgccctgttgtaatcgtgaagcagccataagagatcaatttggtttccttttctcatcacgtaccttcttagtggttggattagattctctggaagcagcttccatttcactactacacaagcaccctcttgttgcctacaatttgtgtatatatgttgcatttcttttttcttgttgaatcatgatagagaggtagtatcccaaaggttggaaatcatgaatattgatacaaaccacgtgcttctgccaaataaattaggtatttaggtttacccaaactcaaaaaaccactggcacaaagatgactataaatcttctgatttaacccaccctttaattaaccatttgaaaccttgttatgtacttgcaaacacaaactggaaggtaagaggtactattgcatgtctcgcttaatgcctagtactaggaagtcaacacattaattagtgatatgacaagtaacaaattaatgtccctccaaatattgcaaagattaggtattcctcc

SEQ ID NO: 72697 - DNA, 2526 bp, Glycine max
  Clone ID: PAT_MRT3847_36660C.1
gcaataagccagtttgtataatatataacctcagccatgctgggaaacttctgctatcaaattacaaagctgttgataaatatgataatagcaaaacgtaattttggatgaaagctcactgcttttctgctcattgcttttctttttctttttctttgcctgatacaaaattacaagtggaaacctacagctctagtattgggggaataagatgaagaaaaaaacaagggtaataaaacaatatcaattccagcatatttaaccggaaaaaaaactatttgaaaatttacaaaggtaaagaacctgaaagatattagatactgatggatactaaggctgaagccgcaagagataagttattacttgttagcttggcggcaggtgtggttcgtgcttgtttaaattttcgaaattgattacttgctcatccccaaagcttgcatgatttgcataagatgcgtccgaaggctactttcctcaacctgcatagctgctactgaagccagtagcatttcacattcatcaagcatggtcttttcttgcactgctatggcagcaacttcagaaattaaattgttcatgccctcaacctgcgagagcaaagagcagattgcagatgccattgcttgcatgacatcaactgcttgacagatagcaaccttcaaatgctcaatatctgccattgctcccccagttacaggaagacgaagagtgctggcctccaagtcttccacagccccagatacagcatcaatatgatctctttcgagtacagcccaatcatcaaggaaagtaatttgatcattaaaaacagaattcagcttaagttcgagcttcagctgctgaagattgatcctcttcctaataacagactcccacagggacaaagtagtaatccatacattatatagagttttctccacaattgcattttggatatagaggacagcctcagctcttgcattggcaaacctccattgcaagtatctattgtggagaagacgtaatttatgagcatcttctatgttggctgcacccttcttcccttttttaaaatcagcaataaagctgagcactgaaattgaattgtttgattgaatggatgaattggttggtctaattcgagatggactaacccccctagaaggaggagttgatggtcttgacctagatggactgacacctcttgaactagaagaggatagcactgaggtcctactaggtgagggcagtcgtgatccaggagcaaacaaggactgagatctgactcccgcaaatgcaagtcctgctttatcggttggagttgcagcaaaagatttgtgaggtcttagttcttgtggcaaacagtcatcaactgatttcacctcacttcctattcggccacttccaacaagcgacaatagccttacagcatcactagatgccctttgcaagggtttactggattcatctgatatagacaacgaaaatcttctcagtgaagaagaaacaccagttcccgaaaccgaagtgtttgacgttctgatatcagcacaatcaacacttctgttcaatacattagaagataccttcccacctattctacttggccaccgatgctgatctattaaccgagaagacaagctgctatcaactggtttggaattctcagactgatcagaagcattcttccctttaaggggacttctctttctctctagcgtaggctttcttatggttggaatttcaggctgcttgtgtgccacatttgaagccggccgcagagagcggtcggaagcactaacaaccggcttctctttcttgctaacaggtatggatatggtatctgactggaaagaaacacttaggcttcgcattgtggaaggccatagaccgtccggcaaacgccgttctggacaacaacttcccatcaacagatacaggcgtagaaggtctttgtggcgttggggaaggaggagttgaaggcctcttcctttctgtggagagagacctctttggaaacaagtgggaggatgacgatgatgatgatgcaggcgttgttcttgtaagatttggtgaagggcatctacgaggaggagcagaagggctagcaggaggacggacgcgtggatatctagaactaatttcccttgttcttgagcgtcttgtggtggtgatggtgactgcattcttttctgccagaaccgagggtggtcttactcttggggtctctggagctttgttcttccctgattcacatacatccattcaccctacctaacgcagaccacattgattgaaaatttcatcaagctagtcagattcatgggaaatacccaccaaattatctagaaaggagatccttttccgtgctgtaaatgattctgccgaaatcaaaggaggaaaaccggtcaccagaggtggagggaggagaggaagaactgccggtcgctggagaatagttttccggctaggggtgtttttattattttgatggagaggcaatggaggccaaagagggaaagagtctcgggctggggaaaaaat

SEQ ID NO: 72698 - DNA, 2489 bp, Glycine max
  Clone ID: PAT_MRT3847_36661C.1
ggccaccaaactcaacatgctcctcaagctcctgcctttgttggtgttccttctgatcccagtttcatctcagccaaaccagctcttctatgctggattcaagggtctgggaagcaacaacatgacccttgatggggttgcagaaatagagccaaatggggtactgaaactcacaaatgattcaagtaaagtgatgggtcatgctttttatccaaccccttttcggttcaagaactctagtggtggtaaagctttctccttttcttcctcttttgctttggctattgttcctgagtttccaaagctaggagggcatggccttgcttttacaattgctccttctaaggatctgaaggctcatccaagccaatatcttggtattcttgactcaagtaacatagggaacttctccaaccacctctttgctgttgtgtttgacacagcaaaggattttgagtttggggacattgattacaaccatgttggatttgacttcaactccttagcttcgtcttcaacgccatttgcaggttatgatacctagagtggtgatgcaaacaaacagaatctcaccctccaaagtaggggacctattctagcttgggttgattatgatgctgctaaaagtgtggtccatgtcacgatttctgcatcttctaccaaacccaaaaggccactcttgtcctatcatgtggatctttcaccaatccttaaggaatccatgtatgttgggttctctgcatcaacagggttgcttgctagctcccattacatcttgggatggagcttcaaaatcaatgggccagctccaccccttgatctctcttctctcccacagcttccagggccaaagaagaaacacacatctctgataactggggtttcaatttctggttttcttgcattgtgtggtttcttatttggcatctacatgtacaggaggtacaagaatgctgatgtcatagaagcttgggagcttgagattgggccacataggtactcctatcaagagctcaagaaagcaacaaaagggttcaaggacaaagagctgcttggacaaggtgggtttggtagtgtttacaaaggaacattgccaaattccaatacccaagttgctgttaagagaatttcacatgactccaatcaaggccttagggaatttgtgtcagaaatagccagcataggccggcttcgccaccggaatttggttcagttgctggggtggtgtcgccgccgtggtgacctcctccttgtgtatgatttcatggaaaatgggagcttagacaagtacttgtttgatgggccaaaaacaatcttaagttgggagcaaaggtttaaggtcatcaaggatgttgcttcagcccttttgtatcttcatgagggctatgagcaggtggtgatacatagagatgtgaaggctagcaatgtgcttctagatggtgaactcaatggaagattaggagattttggattagcaaggttgtatgaacatgggactaacccaagtaccacaagggtggtggggacctttggctatttggcacctgaggtgcctaggacagggaaggccactcctagctcagatgtttttgcatttggtgcacttttactagaggtggcatgtgggctcagaccacttgagccaaaggcaatgccagaagatatggttttggttgattgtgtgtggaacaaattcaaacaagggagaatactcgatttggtggaccctaaactaaatggtgtttttaatgaaagagagatgctcatggtgttgaaattggggcttctgtgttcaaatggttcacccactgctaggcctagcatgagacaggtggtgaggtttttggaaggagaagttggcgtgccagatgagttgagaaagccgggagagggaggttaccaggagggttttgatgaattcttgcactcacttgaatcttcttcatttgatcagatgagcacaggttcctatggtagaaacagagacatggattctagttttccttctttaactgatacatctctttttagtccccatggtaaaggacaaacaatgtgattatctacattttacttagagttgtactttatgtacttaagatatttgtttattttatcatcccatgatgtcttataattgtagacagaaagttcttgtgatgatgaattaaatcccaatacacgaagtttgtattctaattcttccccccattggcatccattttttgggttcattcatataatgtaacctcccccatcattttgtacaactttgattctgtattttgttgttgtgcctagttgatggaacaagtagctttcgagtgtattagagatacaagagatgagttagctagttagttagttagaggttgattagtctgttagttaattagttgcagaccggtttgcttattagtatgtagattctcatttgtatacacttttttctcattctaataaatacaatttcagttttctttcaaaaa

SEQ ID NO: 72699 - DNA, 360 bp, Glycine max
  Clone ID: PAT_MRT3847_36662C.1
gcagacgacaggtcctgctactgcaaattgccgtcttggccttcattaccgctccgggtgggctaccacgctatgggatcgatcagattcctttcctcgtccattaaattccatgattaggtcatgaagcaccgtttctcgagcagtgtctaatgacttaactgcgaacccctagctctacatctgactaagcacacgttctatcgcatatacaacgcttctctctacttcacatctgatattgagaagcggtaccacgcgaaatacggttatagagagacgatacctgttgctgcacacgatgttgctatctcaaaccatgctgttctactgaccgcaattacattgttccagattgca

SEQ ID NO: 72700 - DNA, 381 bp, Glycine max
  Clone ID: PAT_MRT3847_36663C.1
ggcgttcattttgtaatatagaagcaagaaagatagagagactgacaacacctctctctctctcccctcgttgatcccaaatctattaggggtttttattcgatgctattcggcctgaagctttcgtttcgcggatttttttaattattttttttcctgcctatcaggttagattgtgtcttgtaatgttcgcagattttattttcgtttctgttgttgcgttcaaaatcatttgttcaggtttgaatttttttccaatgttttttaaggaatatgaattttggttgggtggaaaaatggatattatcagttatgcatgcagatatgagatatgtactaagggtagacaagtaggattgccatattcaatttttaatatgt

SEQ ID NO: 72701 - DNA, 508 bp, Glycine max
  Clone ID: PAT_MRT3847_36664C.1
aaaaaattccacccgaagctaaggtcgaaccgatcgtaaaaaagccaaggctggaaaatggctatcctgggtggaccagatgaggtccccagaatccccattacattttcatttaaggattggggggcccaaaaatgggcttgcttccagcacccccaggtagaagccccaggcttgcttgggcctcacgaattagccagacatggacctgcccctcacccggaaaaatccccttttaataataattttcgcattcctggcccacgaccacggaatccacctccacgccctctgcccagggcactggcagcagcatttcctggggcactctaagactggggattttaaatggttccacccacactaaaaaaagggcgggcagcctttgtggcagaatttatggcattgatcttcacaacggcgggctcccagacaaggttggcaaaggggtcaccaatcccaccagtggctatgcccacccaatagggggccccctaacaagagggaa

SEQ ID NO: 72702 - DNA, 1393 bp, Glycine max
  Clone ID: PAT_MRT3847_36665C.1
acgggcagatttcgtcagtgaagaacagattggttagatttaagaagcctttggcttgtttgcggatagggtgatgggtgcattactgtggaagaattggccactgttattcggtcattggatcagaaccccacagaagaagagctccaagacatgataaacgaggtcgatacagatggcaatggaaccattgaatttgttgagtttttgaacttaatggccaagatggctcgatttcgaagccgctgagcggctctataacacttagcatttgggatactttcattttcatatttcttcaagtttcattctaaacttttttcatctaataatggctgcaacaacacgttcacgtgcatccatctacgatgtgttcctcaacttcagaggggaagacacacgctatggtttcaccggcaatctctacagggctctttctgacaagggaattcgtaccttctttgacgaagagaagcttcacagcggagaggaaataacacctgcacttttgaaggcaattaaagattccagaattgccatcactgtgctctctgaagactttgcttcttcctcattttgcttagatgaacttacatccattgttcactgcgcccagtataatgggatgatgattataccagtgttttataaggtgtatccttctgatgtcagacaccagaagggtacttatggagaagcattggctaagcataagataagatttccagaaaagttccagaattgggagatggctctgcgtcaagttgctgacttgtctggctttcatttcaaatacagagatgaatatgagtacaagtttattgagagaattgttgcgtcggtctctgagaagattaatcctgctagaatacatgttgccgatctgcctgttgaacaagagtccaaagtgcaagatacccatcaagagcaagaatacagagaggctttcaaggtgtttgacaaggatcaaaatggctacatttcagcaagtgagttgaggcaagttctgatcaaactgggtcaaaacacaactgttggagaggtggaggagatgattgcaactgcagatttcgatggtgatggtcaaattagctatgatgaatttgttaagactatgaaaatttaaaccaacaaattaataagtcttccaattaatgtttgttgtattttacttttatcacatgcattgatgtgaatgatctcagccgcccatttcatttgttcaaacttcaacccgtaattattctttcagttttagtttagtattcttcatgtttcaaaattaattggagtaaatttattcaagaactgggaaattagactctatctttaatttcttgaaacattaatgtatgctacaattttatgatgccaataagttgagttccaaggt

SEQ ID NO: 72703 - DNA, 238 bp, Glycine max
  Clone ID: PAT_MRT3847_36666C.1
gttgtatccaatgcagagctagtcgctttctatgtgcatccctgcccgaatctctttcgggcagagtcccctctggtaatttcgccccctcgcgctgccccaagccgcaccgggcagcacctgcagcaacaacaagaaccgtgcttcaaaatgtttcacctctccgaaacaaacagaggagagagaaagctcctcgcgctataaataccctcgcaaacatttctctcgttgaaaatgc

SEQ ID NO: 72704 - DNA, 405 bp, Glycine max
  Clone ID: PAT_MRT3847_36667C.1
ggggcgggaggacttccatgttaataaaaacccgtacctctgccagggaccaaatattcattaaggagagtctttaacaaagatagggataataatggacatatctgttcccagcgacaaattattaaccgaaaacaattccccaaaggatagaccccccaactatcaaaatttaaggctgaggccccaacattgtgaccaacctaatattaacaaggcagccctctttgcccctttttgaaaacataaaccccacgcctcagtgttttaatgaaacagacaatgcgcggagaaaggcaggctttttatagccctcgagggcgtattttttttactgcacccttaaacgggggcacaggatcatcaacttttttgagaccaaagacattttgatatagggcaaag

SEQ ID NO: 72705 - DNA, 361 bp, Glycine max
  unsure (1)..(361): unsure at all n locations
  Clone ID: PAT_MRT3847_36668C.1
agagcacagactcacattgtagacgactctactcagccgagaccatgaatattcccgaccgcgtgagcacaatgagccacactaaagtgaaacgaggttgacctccactcatctaaaactcaagcgatactaacaccatgtgtactagtacttccaactgattaccgacgatgancggtaaaaggaagctcacgattgattctcgttttggttatggtataaaccaaaacctgcataaccaccggcctcatgcacgttaagaattcgatcaccgtcgtaaccaagggattccgatacaaaaggatattcttgtacgctcattttgcgatcaacgctatcattgtcgtacaacaagcagtcc

SEQ ID NO: 72706 - DNA, 264 bp, Glycine max
  Clone ID: PAT_MRT3847_36669C.1
aaaaaaggaagaaaaaagagaccttggggaattccacaatttattacaaaaccaagttcatgacctctaaagcaccacttaattgggttttaacaatatattttaaggggaaggggaattttgggaaacttttccaaaacccggggaccggggactaggggttggcattaactggatctccttcccggggggtctaaggccgctttccccttccaattaagttaccggagggccaaaaatccccctgggtaatggagggctttt

SEQ ID NO: 72707 - DNA, 1235 bp, Glycine max
  Clone ID: PAT_MRT3847_3666C.1
gttccattatttacagtacggagaaaacaaagtaagtgtaatttatttcttttttaaaaaatcataaatcatcatttaaactattataagataattattttaaaaattaataaattcatcttatattatattattgattatataattaaacaactgtataaaactttttaaattcttaatgcataacttttttctcttaatatatgccataaacataacaatataatatatcaaaaatagtataaagatcatgaaatagtttactatttttagctactcgctgtattgtgtttttcattcaataaattttatttttgtttttaaattaagtttctttttttgtacatttttaaattaatttccatcattcataaatttaaaatgtaatttacttgttaaaaatatttattatgatgaattttattctaatataattttctataaaaaaaacctaacataatttacatattcaaaaatatttattaattataaattcagtcgtctaaaaaatatttatcatgtgctttaattacacacattaaattaatagtgagtgtgtgtaaaattttattcggtactaatattaatgtttcaaaataggggaacgtgtaattttagtttccctggttttacaaaatttcaattctagcctccttgaaattttatttattacaacatttcgtcccttgattttcaaactttgcaattctagtgcttctgttaatttgtagtattgattgttatagttaaccatcatctattaaatcacatgatacatttaaaatgagtttattaaaaattaaattaaattaaatctggcgactccttcttctccaacccttggccttttggaagacaatgacaccgacagaatatttatgtttttaattattttttacttaatttaattaaataattaatatatttatattttaataaaatcattttaaatgtgttatatcatctaataaattgtcaactataacaattaaatgcttgaaatcagcataaagacaaaaattgcaaaatttgaaaactaaaacaaccaaatgttaaataaatttttagaggaatcaaaataaaaattatgtaaaagtaaagggatcaaagttacaatttacaatcaaaataaaaatatttaatttttttctatattaaatctttaagatcatggttagaatattttttttaataaaagctgagaaaatataactgcaatactcttaatttttttg

SEQ ID NO: 72708 - DNA, 202 bp, Glycine max
  Clone ID: PAT_MRT3847_36670C.1
ggctgaccatgattatacttcccttttgaaaggttgtcccatacggacccttctggggtcttctcgcattcgcaccctcctgaagctttctggcagtcactaccctctgtctggtttttggaggcctacccttccagctaattctttattcgtaccactcctgttgtcttcttgtagcagccacacccttttggcggatcct

SEQ ID NO: 72709 - DNA, 260 bp, Glycine max
  Clone ID: PAT_MRT3847_36671C.1
acgcgtccgaacacgcctgagaacgcttgcgaaccgtctacagaggaaggggaacggacaatatctgaggagggcggatattgccaaatataaaggtcagcatgcatacagataacatgctagtctgttcattctagaaaaacatataatattgcaaccactaaacatggataacctctgcatagctattaaactacctgacgaacactatattattatgcacaaacatcatgtcttagtaccaagttagaaaagtgata

SEQ ID NO: 72710 - DNA, 316 bp, Glycine max
  Clone ID: PAT_MRT3847_36672C.1
aggcaggagtccacatttccttgacaaataaatttgaggcaagagtttgtatttatgtggagccagatcaaagtacgaagagcttaagtatattttgggacaacaataaattctcatgactaatgtaaccgaggcttctttaaactttcccttgtgactatttagtatcatggctgcttattgggaataattctgttgaaaacaattctactcaaattctattaatttctaaacattatagaacgacactttctacatattttaatcgctaataaaaatcaataggaatttattcaaaaaatattgggctcccccc

SEQ ID NO: 72711 - DNA, 310 bp, Glycine max
  Clone ID: PAT_MRT3847_36673C.1
gttggtttaccaggaccttcttacaggtgatgagcttctctctgactccttccgttgcaaggaaattgagaatggaatgctgtgggaagttgaggggaagtgggttgttaaaggagcagttgatgtaaacattggtgcaagcccttctgctgagggtggaggagaagatgagggaatggatgatgcagttgttggagagggtgacatggaggacaagtatgaagttagtgagcggaccaggatgaggaggaagagagagagtaagagtatgaggaggaggatgagtagtttgagtgcgatgctggatacg

SEQ ID NO: 72712 - DNA, 248 bp, Glycine max
  Clone ID: PAT_MRT3847_36674C.1
ggacaagcctggacgcctagtggaggaggagatcccatgatttgggggaagacgaatccaagcacaacccccgccaatcgctcgatgaaaaatctaaaccaaaaccctcagcgttttcaagggctccggagggattttatgttgcaagagaagaaggaagactagtcagacaaaatagaagacgagaagaactgatgtagccatgttcatgcttccatgtaatagttcattattccatacatatttct

SEQ ID NO: 72713 - DNA, 193 bp, Glycine max
  unsure (1)..(193): unsure at all n locations
  Clone ID: PAT_MRT3847_36675C.1
gattagttctcatccattaattgccatggaagtccgaaaacagaaaccaaatatacatggatgatggaaagctcaaaaagcaaaaacaagatgggaatggagntcaaagcccaaactaaccaaagtgggggtgggcggctacaaaatgcttatgcaaattttttcaccactccagagagcctgggggccttgt

SEQ ID NO: 72714 - DNA, 296 bp, Glycine max
  Clone ID: PAT_MRT3847_36676C.1
gggagaatgacaaaaattgttgactaacaaagatgttattcgaacaaacttaaacactgaggtgtttttacctgcaaccgtagctaacacatattctacaacaaaccttcgatcaacctcacgcacaatgtcggagggtcgttgcccataattcttaggaaaatcttagcaagggatctacgttaaaaaatcaaaaaaatttctcgacaaagaactcctatgttaatataagctcgagccatcctatgatggccccaaacgcgcttgaaatacataactgatcagggggaacctga

SEQ ID NO: 72715 - DNA, 1072 bp, Glycine max
  Clone ID: PAT_MRT3847_36677C.1
ggctcgagattggtattgactttttgtcaaaaacaatgtaccttgaagatagaactgttcgcttgcagctttggtaggatgaattcctcttcaaatcatatatacaagctcagtctttttatatttgtttgtttatttttcaacaattatattagagtgcacattgctggtacgcctagtaggcattgtttatttttacaatttctgagcttagtatatgttaacttcacagggatactgcagggcaagaaagatttagaagtctcattccaagctacataagagattcttctgttgcagttatagtatatgatgttgctaacaggcaatcatttctgaacactaacaagtgggttgaggaggttcgtacagaacgtggcagtgatgttattattgtgttggttggaaacaaaactgatcttgttgaaaaaaggcaagtttctatagaggaaggagatgcaaagtcccgtgagtttggaatcatgttcatagaaaccagtgccaaagcaggcttcaatatcaagcctttgtttcgtaagattgctgctgccttgccagggatggaatctctttcttctacaaagcaggaagacatggtcgatgtaaatttaaaacccacggtgaattcatcccagacagagcaacaaggaggaggttgctcatgctagagaagactattctcaaaacagccaataatttgttcactgaatataattctgagattggctgcttaaatggaatgatggaactggaggaaaagtgctttcatatcaatgatccttcagtttttgggtgagggggacaaattgcagtaggtattgatgtacgacacaaacattgatagttatttcgtttatttgttatacaattagtcccttgatgtaagaatacaggtaataaacaagctctacaaattgttcctccgtccagcccttttcttttggtggcactcatcgtcctatccaaagcagaattgcctgggttttagggggtgattatggatcttgtttgacttaaaggctcaaccaacctgactactgaccgaaccattctataaaacttatctctttaa

SEQ ID NO: 72716 - DNA, 445 bp, Glycine max
  Clone ID: PAT_MRT3847_36678C.1
caacattaaaaacaatggttggttggccaaccataaaaggataaaggtccaagagagattaattttcccgccaaattttggaaagtccaaaaagaattccctcccataaggggggggttaaaaaaaaatccccaaggcgggacaaataaaaaaaccgggggtttggttttttttctccccaagggagggagggataaaaacctcccaaaagcccaagagtataaggcagttttaacaaggattttttaacacccttaaataacctttatcgtcttggtatggctccatgaatccatcatggaccttttggaaactatccataatatcaggcttgtcttcctaagcgggaaaaatagtggccctaaaaggaaacaccctttttttttgaccaattcctgaaccagaaacaggggatttgccaggggctcccaaaagctggaggcag

SEQ ID NO: 72717 - DNA, 492 bp, Glycine max
  Clone ID: PAT_MRT3847_36679C.1
cgcgagagaacaacacgacgggaatgtggacatgtgacagtgaggctgagctctgttacaaacaccatgcatttgcaagcagacgaccagattagctatgcgtttcagagtcatgaacgtggatttcgttgtccaagaaagatggtgccttccaatgggtaaattgattccaataggaagatctcatggtgcctatgagtgtaagaccatcgaacatgtcgttgaataaaagatggaatggcctaatgcacgttttgttgcatggcatagcactctaacttgaaccaagttccaaggaaactgactgttatgttacatatggctttgctttcttcataggtgatggagctactgcacttgttatggcgagtggacacatagcactgctgcttgttcttcaccatatagctattatgactgaatgtagcatgatgactgttcaagaaccatagatatgtacaacatgctccatagccttgacatgtcccaaag

SEQ ID NO: 72718 - DNA, 433 bp, Glycine max
  Clone ID: PAT_MRT3847_3667C.1
gttagataacactggtgcattaagcgaacgaagatgtcggcttcatacttacaacctacgaacgagtggatgacccccattgtgatgcgagggatggtgcaagcactattatgtacaaatcttgaagcatcaagatcacaaaacaacccgaaggtgctgcaggataagcacttgagccaactgaatcaagtccaaaggctaaaagctatgctactgccgccatggcctgaaactcactttctgtgctgggcgcctattgactggacactgaagatccttacacggtagatcttgactcaccagcatgactagttggcgtagagctctcgctgcccatggaaactggccatgttgcatgtgatcaagttgcaggctcagttgaaactatgctcgatgcccagactttggaggcatttgtaacctttagaactgc

SEQ ID NO: 72719 - DNA, 566 bp, Glycine max
  unsure (1)..(566): unsure at all n locations
  Clone ID: PAT_MRT3847_36680C.1
gacccacgcgcccggcgagcagacgacgcaacggggaccagcgncaacgcaggcaaacgnggacaaggaacgaaagcacacaacaaacgcgaacgaccgaggaccgaaacacacaacaagagacgaagcggcagcaccaaccacggggcgagcngagnacagagncaaaaggggagaagagaaagaggccaacaagccgcgccagggcgcggaccgcggcagcagaggcaggagaggcggaggccaagaaggagcagggaancagcaggcggaacagagggaggagaacagcacaacaccaggcgaaacaaaaaacgagggcnaggacgcaaaccaagaagccaaagccacaagcagcggggacggccncagccaaagcgaaagaagagaaagcgaagcaggcagaagaggcggngagaaccgacagggacccgaggggcggggggcccaacgaaacacagaagcagggacgngaagcaaaccgggaaggacaagcgacgcacgcgccaggaaaacgaacggccggaagaagagaaagggaagacgcaaaagaggcaccaaccaga

SEQ ID NO: 72720 - DNA, 276 bp, Glycine max
  Clone ID: PAT_MRT3847_36681C.1
aatggctgagacccactcgttcactaacccgtgggcaccctactttattttcacttttattactgatctcttaaagacaaaggctattgtggaatcaactttttttcaataattattcttttattagccacagtgtcttcttatagagactatgttaaacattcttcctctaactactctttttattactacctgattccttaacatacttgtttaaatacaacaattaatcattgtcactaaaatcgttagtatgtttatttgtaataacctaat

SEQ ID NO: 72721 - DNA, 268 bp, Glycine max
  Clone ID: PAT_MRT3847_36682C.1
atacaatgaggttcaggctcagatggaaacaaatttgtttaaattgtctcttgatgatgttgaaactcctaaaggttccatgttggatctgaaaatgactcaatctaaaattgcacttccgaagatcacagtttgaggaaccattctgcgtattgttctattggcatattatttgacgagagggcatctttagagcaagtggtgatgtgcagcttcctcactcaattataaggattgttttctttggagcgctcattttgttttactg

SEQ ID NO: 72722 - DNA, 461 bp, Glycine max
  Clone ID: PAT_MRT3847_36683C.1
gggcagaaacaaatcactatctttaagaatagtcatataggcgtcttgaactctataccatgatttatccataatgtcatcactgtgttgggtgggactctgtacatatacccattaggaccctcatattttatcattaggcttatcatatgccgggggcatggtgggacaggatcaactgagtattacgctaggatcagcatgtaggctattccaggagaggaggggtgaactaaatgcacatcctaactcccaccgaggcttgcaaagacatgcaagatggcagatgcaagatccaagtcctgcttagcaacctgaaggtgcacgttggccttgtcagatttggaaagctgcaccttactatgctgcgactgtgatgacaatgtgtatggatacacaacatagtcctttatgggggagcgatcaggtcctagttgatgccctatctggtgcgtgggggg

SEQ ID NO: 72723 - DNA, 1597 bp, Glycine max
  Clone ID: PAT_MRT3847_36684C.1
cctgcaggttccggtgccgaattcccggggcgacccagcgtccggttatgaatatgtgcccatggatgacaagcgggagtgttcttctgtctctaatcctcccactgataactttgagaccaagtttttatctgcttctcatgactgttttatacagaagatgccaattgcaagaagccaacgatttagtgaggaaataacttctgatgaacgggtaaagatgcaacaccctacaagttctgattctaccgtcacagagccaactcaccaaactgcacatgaatgctgtatgcaaatggcaaatgaaatgatctgtattcagaatcaactttcagatattgaaatcaaacaggctaacatgatgcaccaattacagatgtttacaactggcataatggatgccctttctacaatccaatcaagaataacaggcttagagaatgtatttgatagattaagtcaagaatctttgcaaagaggaagacattcttattcagaaaactccaaattagggagacagagtgaaaatgttgcctctcccaggttctccatatgcactccaacaccaaggccatctgtggaaattaataataagcaatcagactctatgtcagttaaaaattccgaaagttgggagaaaaaggcattttcaaggagccaaccaaggattcattctggagatagtttggatatgtggaaaagtaacaaggtcaaggctaccagaaaatttacagagaaggatgttttgaacagctcatcaaaggataccttacaaatgggttctgtaaaaaatgatggtatcttctctgctaccagaataaccaatgccagaaatgattgttctgagagtaataataactactggaagcatgtaaaacgtcttgtatgtgaaggggatctgaactctgcatatagggaagctttgtgtttcagtgatgaatttattctcgttgagcttttgaatacaactggtccagttatagaaagtttatctgtgaagacaatgaatgttcttcttagtactttagcatcatatcttctggaaggaaaattatttaatactataatcccgtggctgcagcagattgttgaaatgagtactatccatggaccaaattgcattgctatctctattgaagccaagaaacatcttttatcggcagtccaggaggccatgaacctgcattttttcagtcatgcagaaagaaggcgtgtggctgaattagcaatgaaattacatcatatatggggtaagatcactgaaagttaatattggtgtatctgacgaaaaaataatgtatgttgccattttctgttgggattcagattttgttcctcgttgaactcaaagccagttcttgttgtatgtattttgttcgttagttggtgggtgagtgttaggttttgcgaataatctgctagtaattctggaattcatgacttgtgaagtgtttttctttttccttcctgaattggcacctgtgtgcattcaaagagtattgcatctttgagaatggatgtcaatattgatcaccatgtactataattatgttcatttttttaatgctcatggtagaattttacattatttaatcat

SEQ ID NO: 72724 - DNA, 395 bp, Glycine max
  Clone ID: PAT_MRT3847_36685C.1
ccagttttgaatatatttttattccttctttgtttcttcactttctttcatacacataaccatgtcttctgagagtgttgtcctcaaaggggggggtcatgtcaagggtgtgctggagcagtgaacagggttttgggaaaaatggaagttcctgttgggttgcgattatataattatgtggttttcttgttcacaattaacttttggacaccatcaagaataccctgcacaagtgaagtgctggtatggtgggtttacttcttattaaatgtggtctgaatttgatgcggcttctatgtatagccgccattgtaagccatccttaggtgatcaatgattctatttttcttctttttaagttgcaagtgtgatatttctaaccttagcttcaactt

SEQ ID NO: 72725 - DNA, 578 bp, Glycine max
  Clone ID: PAT_MRT3847_36686C.1
aattcggctcgagactcaacgaccgccttggaatgatgcgtcatgtaacaactcctgattttaaacttcggactgcacttccatcagcttcccattgttcctcagttctcacctcccacaaccttaaacagtcaccatggcggcggtggcaccatgccccgccacccaaacttgagatctgaagcaaaagtcaagtctcatatcccaatctgaagtagagacgcaaaaatgcggacattaacagcgacagcggcgtgaagatgcggatccgaagcggagatgcgaacgaagacgtagatctgaagcggagatgtgagtgaagacacagatgacagatccgaagcagagatgcaaaactgaagcgaaagttaatcccgccgctcacaccctcgtcgtcaacgcatctgtttccgttattttgcttcctcttttctcttgttgcaggttgttgtggttatatttgtcttggcaatttgttttttgagttgaaaagctaggaagaagcaatattttgtaaagatacattttttcttactgattttggaagatacatcgatgttattttttacttttttaaa

SEQ ID NO: 72726 - DNA, 275 bp, Glycine max
  Clone ID: PAT_MRT3847_36687C.1
cagtaagtgatttattcgtgatgcaactgtttgcttttatatttctcattagaatgccaattacccccccaaattatacaggatatgcaaaaaagctgtctccagatcctccgatacaggggagtggtattttcacaaaatgagaggagttttaccgcctcgagctggacacatatttaaatggctggaggataattgctggtggtcaaggaaggggatcacctacgagagcttttatctagggaaaatttacaatcttaggaaacgaacatact

SEQ ID NO: 72727 - DNA, 759 bp, Glycine max
  Clone ID: PAT_MRT3847_36688C.1
tgctttaatggcattaaggttttgcaagagcaatatgaaactgaaagtattgctcagcatggagttgaattgttgtatgcaactatgacaaagatatttagttcattgcaagaagcatacaaaggtcaaattgttggaattatatactgtcatgtggccactactcaagagtcgggcaagaagtttgatgtgatctttactcctcaccatccgtatgctcgatggttggcagaaacaaatgcagtgaatgcaacattgccagaagtggtgctggttaggagaacccttgcttgggtaacaggaataatattgctcatttcaacctttatggggatatgctacctcatgaatatgccgcttacaagggacacgcttctatattctaatgtcaagcttgattaggcatggatcatggtgcgtacgaagacgaatcttttcaaccaacgaatggaccggtgtagccaattactatattcataatatgaggtattggaaactagtccaatcaggatttgggtcttagaggataggggattattgtaccgatgttgtttaaatgtgaagcattgtgcccccgtgtttaatcaggacgtagatagtcatagtagatgtgttattattccagccatttatttacaataatgggtgtaccccgtggttgtcattttgatccaaattatttcaattttattgtaaaataatgaaatttgccttcctgtttctgaataaaaagcagagcataattttcatacaaacaac

SEQ ID NO: 72728 - DNA, 715 bp, Glycine max
  unsure (1)..(715): unsure at all n locations
  Clone ID: PAT_MRT3847_36689C.1
ggctcgagctggatctctctctctctctgtctctgcaatggagtttcgcgtttccgtcatttggagccttctcctcattgtctctttattctctcctgaaatcaagggtgaggcttctggttccgtcttcttcgtcgatagctccagtaatcaattcattcgcgctagatcatccaacgatgagcaaccttcaatgttgcttcaagaagttggtgctgctgtgtcagtcttgcttggttttgctcctccttccaccttttctgctgccagctcatccaagttgaatgatgttctgattcctaacccattcaagaggcctcgtgctgtgtttttgctggaagtgaatggaatcaatggtctctggccttggattaattataataatcaaattctatattggttctctctttcgtaaaaagataatagtgtaatgtattatgaatgcaggtcttggaaatattgtccaggataatccaatgttcagcaattcattttggagtacaaattcagataaagttgacattcaacttccagatgaaaatgatgtttctgtggtttctttggatgagcaactggaagactggactgacaaagaaattagtgattttgttagttttgatttatattatacatgcctatgagctaattctgcattatntgattattacgtttcttgtggaaatgactttgtcattgttttcttattcatcttcga

SEQ ID NO: 72729 - DNA, 227 bp, Glycine max
  unsure (1)..(227): unsure at all n locations
  Clone ID: PAT_MRT3847_3668C.1
attttcttaacaaggaacagagnnatggaagttcaggaggtaatgtactggtgatagtggttgcagtagtcagttcagtgattgttttggtggttggaatagctattgtggtttatatccgcaaacacagatatatccaaatgaatccaagaggttcaaatgatgcagaaaagttagccaagagccttcaccacaatagcttggcattcnagtattctacactggag

SEQ ID NO: 72730 - DNA, 2117 bp, Glycine max
  Clone ID: PAT_MRT3847_36690C.1
ggcgagaaataacgaagcacgttactgtacggtggaacctctggatctctctctctctgcgatggagtttcgcgtttccgtcatttggagccttctcctcattgtctctttcttctctcctcaaatcaagggtgaggcttctggttccgtcttcttcgtcgatagctccagtaatcaattcattcgcgccagatcatccaactatgagcaaccttcactgttgctagaagaagctggtgctgttgtgtcagtcttgcttggttttgctcctccttccacccttccagctgccagctcatccaagttgaatgatgttctgattcctaacccattcaagaggcctcgtgctgtgtttttgctggaagtgaatggaatcaatggtcttggaaatattgtccaggataatccaatgttcagcaattcattttggagtacaaattcagataaagttgacattcaacttccagatgaaaatgatgtttctgtggtttctttggatgagcaactggaagactggactgacaaagaaattagtgatttttcatcttcgataggtggatcatatgctcctgatgcccttgagccattaaatggagtgcttaccattccattggcaaatggtgcctcagtgaatcttcatatgtcaaagaaagcagaaaggaagttcatcataggtcttatgtctctcacacgtaatgtccaaagagcaattcaaatgcatgacaatttatcacagagtgcaaagagtcctgctgagttgttaacaggatgcttcaatggcattaaggttttgcaagagcaatatgaaactggaagtattgctcagcatggagttgaattgctatatgcaactttgacaaagatatttagttcactgcaagaagcatataaaggtcaaattgttggaattatctactgtcacgtggccactactcaagagtcgggcaagaagtttgatgtgatatttactcctcaccatccgtatgctcgatggttggcagaaacaaatgcagtgaatgcaacattgccagaagtggtgctggttaggagaacccttgcttggataacaggaattatattgctcgtttcaacccttatggggatatgctacctcctgaatatgccgctcacaagggacacccttctatattctaatgtcaagcttgattaagcatggatgcgcaccaagacaaatcttttcaaccaacgaaggagaaccggtctgccgctgaagcttgtaattgggggagtctttttcttgatgcctctaatccgtgtgcatgattatattattgttatagcttttgttacttgtgtttaatggaccggtgtagccaattatattcatataatgaggtattggaaactagtccaatcaggatttgagtctagagaataggggattattgtgtaccgatgttgcttaaatgtgaagcattgttcccccgtgtttaatcaggacgtagatggtcatagtaggtgtgttattattccagccatttaccataatgggtgtaccccgtggttatcattttgatcgaaattatttcaattctattgtaaaataatgatcatttctgtttctaaataatgagcagagcattgttttcatacaacacgagctcaccatttattggcaaaaaaaaaaaatcaaccaacgaaggagaaccggtctgccgctgaagcttgtaattgggggagtctttttcttgatgcctctaatccgtgtgcatgattatattattgttatagcttttgttacttgtgtttaatggaccggtgtagccaattatattcatataatgaggtattggaaactagtccaatcaggatttgagtctagagaataggggattattgtgtaccgatgttgcttaaatgtgaagcattgttcccccgtgtttaatcaggacgtagatggtcatagtaggtgtgttattattccagccatttaccataatgggtgtaccccgtggttatcattttgatcgaaattatttcaattctattgtaaaataatgatcatttctgtttctaaacaatgctctgctcattatttagaaacagaaatgatcagagcattgttttcatacaacacgagctcaccatttattggc

SEQ ID NO: 72731 - DNA, 705 bp, Glycine max
  unsure (1)..(705): unsure at all n locations
  Clone ID: PAT_MRT3847_36691C.1
tcgcccacgcgtccgcccacgcgtccgcccacgcgtccgcccacgcgtccgcccacgcgtccgtctggatctctctctctctctgtctctgcgatggagtttcgcgtttccgtcatttggagccttctcctcattgtctctttattctctcctgaaatcaagggtgaggcttctggttccgtcttcttcgtcgatagctccagtaatcaattccttcgcgctagatcatccaacgatgagcaaccttcaatgttgcttcaagaagttggtgctgctgtgtcagtcttgcttggttttgcacctccttccaccttttctgctgccagctcatccaagttgaatgaggttctaattcctaacccattcaagaggccccgtgctgtgtttttgctggaagtaaatggaatcaatgctcttggaaaaattgtccaggataatccaatgttcagcaattcattttggagtacaaattcagataaagttggcattcaacttccagatgaaactgatgtttctgtggtttctttggatgaacaactggaagactggactgacaaagaaattagtgattttgttagttttgatttatattatacttgtaactatntctgcattatttgattatcatgttatatttgacaatgactttttcattgttttcttagtcatctctgataggtgggtcatatgcctctgatgcccttg

SEQ ID NO: 72732 - DNA, 103 bp, Glycine max
  Clone ID: PAT_MRT3847_36692C.1
gagaataaggttgaataaattctcgtaggatcgggttgtttcccatcgggcgctggtgctctccctctgtgcagacatgttgttcttctcatacttcagggat

SEQ ID NO: 72733 - DNA, 518 bp, Glycine max
  Clone ID: PAT_MRT3847_36693C.1
aaaaaggacaaaaaaggggcccttattaaaggggaaaaagggggcaacaaattggagggggaagggtgggaaaaaaacaaaggggggccccaaacaacaggctaaggcatgggttaaacactatattaacccggaaaaaagcccaaagggtacagggaaaaggcgggccaaaaaagaattttaaaaaaagaaccgggggggctagggggaactaggacatcaaataggaacccccgaaggcccccctttttggaaaccataaaaaaatttaaaatttttttctcccctttcccaaacccaaaaaggcccattgattcggggggtctgggccccaggggcggaaaaaaaaagaaaattggggaattaaaaaaccaaataattcccattattggggacctatgggaattaaaaatataccccacccctattaaatttttaaaaaattaaaaaaggaaattttgaagggggggcctggaacaatggaaaaaccccgggggctaaatgtgaacaattaaaac

SEQ ID NO: 72734 - DNA, 346 bp, Glycine max
  Clone ID: PAT_MRT3847_36694C.1
acgagataaccactcggtaccatatatatatagttagtgagaaaacgacatacactgttcacaggatgaagctttatttcagtgtggaatccattatacacagaacacatacgtaggttgaaaacttagctatggcactctatctatagacggttgatctaggacaacacacaggacatgatcttacatatgctccaccatctactattaagggtgctgaacaggcatgggctacgtttggaacaatggtggtgtgatctgcaatatccacagatttatggggaacccatttgggggcattgtttacgacgatacggctggcaaaggtagcgccggcatcaactcc

SEQ ID NO: 72735 - DNA, 540 bp, Glycine max
  unsure (1)..(540): unsure at all n locations
  Clone ID: PAT_MRT3847_36695C.1
tantactcccantgcacctctctgacgctcaccgctcttctgtttggtattcccctggnacatcatgggatcgaccgncccctgcacatttaaactccatctctttggattctccctgagacgnncatttgggcgttnctctcggttcttactcaaagaanncgcttgcttagggngtctttcatcccctcctcnaagtttnatccantgnaatgnnnggcaaactaanactnccggtttttcnacatctagttactccttcttcctttcgtccaatgagatatgatcttttgtcccccacccccgaataaggttttttgggcggagaacatattttagaatttgcgacaaaaggtnanaagngtgntttcccccnaaatgtttgcnnngnaanatggttctgctataaaggcttnaaaggtccccttnattaaaattccnatttnngctcggacttctcctgttttaggantaatacntcggcangncnnttgcatgtaaacnccaagggatctcaatcatntggggggggccccgttt

SEQ ID NO: 72736 - DNA, 301 bp, Glycine max
  Clone ID: PAT_MRT3847_36696C.1
atttttgagacattgatggccgtgctctggatctggaccttcactttgtccttcaaccactaaaagtctagaatatggttatactagcaaaacaaaaagttccatttctagggaattttttacactgctaaccaatcagaaattatgatgaatttttacaactagtaaattcataaaattattgtataatttatgatgaactttttttttaaataaaaaaaattctctttgacatatgtttgatgatagtggaactttatccacaaaaatagactaatagtaaaacttaaataattaaaaa

SEQ ID NO: 72737 - DNA, 829 bp, Glycine max
  unsure (1)..(829): unsure at all n locations
  Clone ID: PAT_MRT3847_36697C.1
ggtccggattcccgcgtcgacccacgcgtccggttgtgcataccaacatcatcaagtgttgttcttcaaacattgttcctcatctgttgtgcattctttgtttctcaagctcttggggccagaatcccacaaccacaaccacaaccccataagtctcttccgttcatttggcctctgcctgcaaaattcatcttcggcaatgactctctttctgttggccctgcactttctctctctggcaatggtgctgcctctgccattgttcgagatgcttttgatagatacaaagggatcctgttcaagcatggcgacagattcagttttctcagaacactgaggcctgtctatgatgttaccaaattgagcatcaatgttcattcccacagtgaggagcttcaacttggagtggatgaaagctacaatttgttcgtctcaagagcccaggcgctttctggtgctgggcaagtcacaattgaggcaaatactgtttttggtgcattgcgtggattagagacattcagccagttgtgttcttttgattatacaactaaaacagtgcaaatatacaaggcaccttggtccatccgagataaacctagatttccataccgtgggcttatgttggatacatcaaggcactatttaccagttgacgtaattaagcagataattgaatctatgtcctacgctaaacttaatgttttacattggcacatcatagacgagcagtcatttcctcttggagtacctacttatccaaatttgtgngaaagttcatacacagagtggggacgttacacagtagaggatgcatatgaaattgtcaact

SEQ ID NO: 72738 - DNA, 277 bp, Glycine max
  unsure (1)..(277): unsure at all n locations
  Clone ID: PAT_MRT3847_36698C.1
ggcagaaagcaagctcatcctagagttttaaaaatggcagcagcctcctcccatggctctctcttccccnncccttggctggcaaggccgtgaagctgggccatcagcccccgaagtcgggagggtcagcatgaggaagaccgtcaccaagcaggcctcctccggaagcncatggtacggccccagaccgcgtcaagtatttgggcccattntcctggcgagccccgtcctacntnatggcgaatncccaggtgactagggntgggaanntnngggg

SEQ ID NO: 72739 - DNA, 562 bp, Glycine max
  Clone ID: PAT_MRT3847_36699C.1
ccacgcgtccgctcatcctctctgatccaaccctttgaacttctgccttctgcccccttcgacccccgtttttctctagacaccatgtactgcacgctctccgcacgatctagatggtcgccggatgtagaaagggcggaggtctaaaaaatacgccagtttgaaggtacaccaaagccatgctccaattccccgtgggaagaatcggccgttgttaggaataaaggaaggtccgctcatcgtgtcgggaccggggcttccgaatacttgggtggagatatagaatacctagctgcccaagtgcttgagtgggctgggaatgccgcacgtgacaacatagaacaacaggatcattccaagacacactgcttttggcactgaggaacaatgaatagttggggaaatgggtcgctggaatgacaattgcacatggaggcgtgcttacaaacatgaactctgttctgttgcctaaaaagactgacagggcttgcaaggaacctaaatgtacatccaaggctaccaaatctcctaagaaagcttagatgacttagatattgtccat

SEQ ID NO: 72740 - DNA, 225 bp, Glycine max
  Clone ID: PAT_MRT3847_3669C.1
cttgaattcataatttatttctccacaacaacaaaaatgacttcatcaacacttttccttatgttattcaccctttccttgatcctcatttctcatgctcctatgtcaaccttaggcataaccttgtatgaatctctatgcgatcaggctgggcaggacaaggcaaggtgccttgaagttctccaagccgaacctcaaattgttggggctaaagataatgtggag

SEQ ID NO: 72741 - DNA, 243 bp, Glycine max
  Clone ID: PAT_MRT3847_366C.1
gtttcttttgaggacacttttctgacctattgggggggataatttgattgcggggggggtaattgaaagattttaactcaccaccatcctttatactaagggactgaatacaggtgcataccatgtcggaactaaaaggaagggttctcggaaatttgtacccctatacagcaaccattagtgctctccttcgtctaatattttgggtatactctggataaccttcttatagcaccattcttt

SEQ ID NO: 72742 - DNA, 371 bp, Glycine max
  Clone ID: PAT_MRT3847_36700C.1
cacaatcctgaacccaacattcgcgtacaatgggctcgcgctcaaagcatgagacacaacgagcaatggcttcaccaaagtcccactgagatgctggtgtcgtccagtccggggctgtttctcgatttcatagcattgcgggacattgaagaacgggaagaagtctttattgactacgggccaaaatgggaattggcatggcaggcacacgtcgagtactggacgacaagcaactacagtcacagctatcagtcggcgcgggtgtacagtaaagctaatgcgaataaaccctttcggtcacaaagtgagcaagaggtggatccatatccttcttactacgaattccgctgcttagacgtggcttggtacaa

SEQ ID NO: 72743 - DNA, 161 bp, Glycine max
  Clone ID: PAT_MRT3847_36701C.1
accaaaaaacaaaaaaacgggggctattccaaactgagatacacacaaacaacgacctatacttgcggcaagaaacgaaaatgaacataccgaccccctcccacctctgtttgacacgggacccaccactcccacagtatcaaactttttcatccaccttg

SEQ ID NO: 72744 - DNA, 1416 bp, Glycine max
  Clone ID: PAT_MRT3847_36702C.1
cttttcccaatgcctcatcaatcatcgtcaccaaacaaacattcattcattccacgcttccattctctctctaaatcgcattaccttcttctatctccttagttcccggcgagttcgtgcatcggagcctctaaatcgcattaacatcatcgaatcaaaccttccttctctttctcaactccagaatctcgtccttgtgagagaaaaaaaaaaagttagttagggttacgcacagttaattaattatttaataatagaaaaaatgagctttcaggacatcgaggccggccgttccttcgcttcccggcgaaatctaatcaacggcaaacaagaccccacgcaggcggtggcttccggcatctttcagatcaacaccgccgtctccacgttccagagactcgtcaacaccctcggaacccccaaggacacccccgaactccgcgataagctgcacaagacgagactgcacattggacaattggtgaaggatacttcggctaagcttaagcaagctagtgagattgatcacaacgttgaagttaatgcaagtaagaagatagcagatgcgaagcttgcaaaagattttcaggcggtgttaaaagaatttcagaaggctcagcgtctttcagctgagagggaaacagcttacactccttttgttccacaaggagctcttccatccagctatacagccagtgaagtagacattagttctgataagactccagaacagcgtgcccttcttgtggaatccagaagacaggaagtattattcttagataatgagattgccttcaatgaggctatcattgacgaaagagatcaaggtattcaagaaattcagtcgcaaattggtgaagtaaatgagattttcaaagatcttgctgtgcttgtccatgagcaaggagcaatgattgatgatattgggtccaatattgagcattcccatgcagcaactgtgcaagcaaaatctcaacttgccaaagcttcaaagacacaaagatcaaattcatctttgacatgcttgcttttggtgatatttgggatcgtgcttctaatcgtcatcattgttcttgctgcttagtccaaaactctcgattctattatgaatcaaatgctctatatactaagctgcagataagatctccctcgctgatgactacagagtggtgatttaccagatctcacatatgaccggaatttgtctcatcaggtttcagtacatgacgtgggaatattaacattagtgtctcgttatttcgttgtgggtatatgttctacttggggctttaaggatgtatcacaacctgcctgttgtgtaagttatctttttggttccttaataaaagatatatattaaattgttctttacctgtatatgcaacttcaaaattagcatgaccgacccttctttat

SEQ ID NO: 72745 - DNA, 349 bp, Glycine max
  Clone ID: PAT_MRT3847_36703C.1
caatactttcaccatctcgtggcatgctgtgcattgcggtggcaggacatattgagactctcttctagttgcagcatatcatctcaacggatcatattggaccgcgacgcatcaaaggggacgacacagaaactggtgtactcagtgactcaactgtagtaaagatagcatgtacttgtctagcatagacactagacaatagtcatgacagactatgtgaaatttatatgaagaataacttgaactatgtaaagctcatgaatgcatacagaatatcactccattttaatagattaggattgaacaagtgtgctgacattacttctcaggagatcagcaaatagtactt

SEQ ID NO: 72746 - DNA, 406 bp, Glycine max
  Clone ID: PAT_MRT3847_36704C.1
ttttaggacgcgtgggattatgataaaccgcgatcataggttgccgtaccttaaaaccggaaacaaaagctattgttacttgattccaagatttatttaaagtttcttcctactttatttgtgtaccaattattttaatgggaaaagaaaaattactttttttgtgcttggccacatgacttttggtgaattaattttttttttcctattcttaagttatatattgtttgaaccacctttcacaattttgaatatagggaactttcgtgacaagaatattaacacttatttattttgtcttctatatttccaagttccttctgatgtaaattttcaaaggtacaacacctggttgaaaatattttggatttaagttgctttccaatttcttcataattatggttat

SEQ ID NO: 72747 - DNA, 1196 bp, Glycine max
  Clone ID: PAT_MRT3847_36705C.1
cctcgagccgattcggctcgagggctaacccacccccagttcgtccatggtttcgcttagcctcaattcgctctagcccacccccacccccaccccctgcacctgcccctgcccaagagccacgcctgccagcatttagaactgcttcagcaccatcatcaccacagattcagccaactcaaccagctccccagcctcaagaacacccttcttctcaacataacagattctcctcttcttcactccctacttccccagagaataaaaacattacccgtgttcccttgccaagtccctctcactctccaaacacctcacctcccccctctcctctcgccctcacaccttcccagtcgaggagcgagaccatgatacccgaccagcccgagcccaaaaccgtgctagtccagaaaaccatcgaccccaggcccaagccctggcacaatgcccgtcacggacaacacgacaccgtcaaagaaagtgaatccaaggagaaggttgttcaccggaagctctcggagtctgaggagtccggcatgagagtcataaccattgcaggggaaaacagaggagcgtacatggaactcatccagtccccgaagaaacacgatccaaagtaccttcacaagaaggggaattccaacatcaacgttgacggggttgaatccgagggttcgagtgccgaggaagggactgtgaacaagaaggataagaatcagaaaggtacgagttcttcttcgtttccgatgtctgcgtacatgaacagcaacgtgcagtgtgtgaacaactcgctgctgtaccacgcttcatgctcccaccacgaccccggagtgcgcctctctctttccaagaaaccattcggggaaggtttccatctcaaggaacacgctgattccaaacatatatagtactagtgttgcttcttttctgttttctggctatatattgttggagaaaataaaaataggtggagtggccaacttgggggcatggaatgattctaattcttgtgcctgtgctcttcactgcccttggttggaaaatactataataaatatctatctatgtttgtatggaaagagattctgaacataccaaggggttgtgtggtgatcctttgttatttgttaattcacacagtgctctttttcaataaatttgtatctctataatgttgtgttaacaacacatttctt

SEQ ID NO: 72748 - DNA, 128 bp, Glycine max
  Clone ID: PAT_MRT3847_36706C.1
ttcgccgtcaatagtacattgagagctactacctaatctataagtgacaccttcaagtgcctgccgaacttttggtttcatgttaccaggcggacgacgccctcccatggggagactttactggggga

SEQ ID NO: 72749 - DNA, 444 bp, Glycine max
  Clone ID: PAT_MRT3847_36707C.1
gttgattgtaagaccaagtatttttatttaaaaaaacacaaaacatatcgggctaagttgtagattcacatattatatgcgagcaagaagaataaaagaacacatcggtaggaacattattcactaatgagccacgcttgtcgacagagctcatatacgtcaaccttgcggcctaccttaactagttgcttggacaaaagcgatgattatccatgccaagagcagaaagtggtgaagccaatccatcaagaacatcgacactggtatgtaattttttgagcacaaaagacccactgctcaccgaaggtacggatcccactgcttgtgacttggccacaggtgaagaagctggaggtgggacatagaacggggaaccagcagagcatggaaagcttgtgatggccccttcatcatactcaatatcctggtacagggcctcaaaaa

SEQ ID NO: 72750 - DNA, 233 bp, Glycine max
  Clone ID: PAT_MRT3847_36708C.1
tggaaggaccgacccgagcgacgcgtaccgctgacaaaaaaccaccaaaagggactcgatttatgaaattaaaacaaagctttaaacgcacgtgactttcgagtttcaaaattccttaaacacccacccactttaggtcactcaatctgttctaccatcaaaaccttctttacaccaaacctacatgtagctctttctatataaccatacaacactgcctgatcttattataa

SEQ ID NO: 72751 - DNA, 339 bp, Glycine max
  Clone ID: PAT_MRT3847_36709C.1
ccacgcgtccggtcttcttcatccatgttttacgactcatcttctcgctccttttcttctacctccttattttacgacgtggctatgacttcctcgcctcacgacactgtaattacagcgacttcttatgacgttgacagaagaaccccgtatgaaccagtgcatcagcatagtaacaacacacccgatcgtcttaaattgatggaaaatttgaagatgctgattatggtaaaactttgaccctttagatcctaggacaagagaagtacttgctaatgcggctcacgtctcctctaagggtgatgaccactcaggtgaagcatcccgaagagaagttca

SEQ ID NO: 72752 - DNA, 719 bp, Glycine max
  Clone ID: PAT_MRT3847_3670C.1
cccgcgtccgcccacgcgtccgcggcgtttgaacgaaacgcatgatcgcattcgcaggtcacttcgcttccgccttctcctcatctcgtcgttgcctgagaacactgcggtaccttttctcgttttgttaggataagtttcttcacattcgttactcgttctttttcgaatttcaatcttaagcgattagtcggcattggtacaatctaggaatctagaaaatgctttcaggggtgaaattcatttcccgggaccaggtgcatgatgaggacttggattctgtctcgaaagaaaggaaaaaatcagataggaggagggaaaagaataagaggaaaaggaggagctctagggacagctctgatgatgatgatgatgggcttgagaagataaagaaaggatctagaaagaagaagtggtattcgtcggatgaagactctttgatttacacaactgaaagtgagagtgagaaagatgaaaagaagaggaggaggagagcgaaaaagaaaagggatgatggttcgtcacgtgattctggcgaaaggtcaaaaggaagatcacgatccaggagtggtaaaaaagaatatacatctgaggatgaggaagactcttattcttctgatggtagtgataagtttttccgggtctttaaaggtaagcaccaaaagtcagattgaaaagaggggagtaagaggaacaagaatcgaggtggcaccggtaaa

SEQ ID NO: 72753 - DNA, 1342 bp, Glycine max
  Clone ID: PAT_MRT3847_36710C.1
gtttctgctttgtttccattccatgtgcaccttatttcctaacactgcaccttctctctctctctcttctctcagttcctcaatgattcacgggctgattcttcttttttgtgatcgcaggcagaaataagagcaccaaaccagtatgcactagaccaaagtgaattactgcaagctcaaacagtcaaccccactcattctccttctattagtgtgggacagaatagtaaacgaaagaagagctatggcactggatttgtcaagagtataggttttctccattcctatattagcaatggttgcagaatcatggtttcgtagtctgtggaaggctcctcggaagcatgatgctaattctgagaaggtggtcattgaagtattagcatttgaaatagcaagcttgatgtccaagctagttaatttatggcagtctttgagtgataaacagattgttagattcagggaggaaatcacaaattcagtgggcataagaaagcttgtctcagatgatgatcatttcattgaacgtttgatctgtttggagatacttgagaatatggcacatgtggctgagtctgtggctaggcttgctaagaaatgcagtgatccaattttgaaaggttttgggaatgccttttatgagtttatcactacaggcagtgatccatatgggtgggaattcactggcaagaagatggaaaaaaagattaaaaggatggaaaagtttatatcaactaatgcaagtttgtatcaagagatggaagtgcttgcctgatcttgagcaaacttttacaagagtgaaggctaatggtgagtcagatggtgtaactttaatggagtatcagaagaaggttgcatggaagaggatggaggtgaagcacttacaggatatttctttgtggaacaggacatatgattacacaatacttcttttagcaagagccttattcacaatattctgcaagatcaaccatgtatttggacttacagagatggtggatgttggcagaaccactaattcaagtgtcttgaattcggatttcatttacagaagtcaatcggtttctacaatattgcaatcttcataccaaccatcacagaataatattcccaggttttcttcaggaccccttaatgctattactgctagatcaggcccaattggtcaaacaacaaataaaacaagcatttctcattcaggtcctcttggtgactcatccacgaagtcaggccccattttagaaaagcattcaacaaacgtcaatttttactcaggtcctcttgggaggaaattcaatccatcagtcccagttaccgggaaagaaaaaaagagtaagatttg

SEQ ID NO: 72754 - DNA, 283 bp, Glycine max
  Clone ID: PAT_MRT3847_36711C.1
atctaccaacacaaatgttgcatccttgtcaaagaaggttgaggaccttcagaaaattgttaagagaggggattctgcgatagcagcagcgaaggcactttattatgttaccccagacaatcacagtagtgcctcaaagtgaaagaaggtttgtaaaattgtacatctaataatagaaggatgattttgctatatgtaaagaaagacatccaatactgaaatgtattcaaagttttatggccagaaatttcagtggtttcttttgaaaaaaaaaaaaaaaaaa

SEQ ID NO: 72755 - DNA, 353 bp, Glycine max
  Clone ID: PAT_MRT3847_36712C.1
gcgaggggttgactttcttgcccaccggtggacggccagccgtgggatctggtcactgttagaagctcataaccctaggctctgtaaaggggcgagccattgacctccgcctttctttttcatagcctaatgccttcaatgtcgatgtagaactcagcatccaatggctgccggactcattaacttcagcgttcatgcctgctctagctgatgacagaacagctgaatagactgactcagaaggtgatgttggcccaaaagcagacgaggaaagggcccttgtacactactactgtgtataacaccgatgtggactacccatgcactgagagaccacgctctatttttgaagc

SEQ ID NO: 72756 - DNA, 314 bp, Glycine max
  Clone ID: PAT_MRT3847_36713C.1
gattgatgcagagacggctaccgacgatgtagtagatggggcggtcgatacatacgactttgctgaactattcctaagagatactctgcagcagccagaagagggcagtggccatcggtaggctcaccgatcaggtcgtcgcaatttccaacaacatatagcctgtccttcaacaaatccgctgctgaattgctaccacctgatactgatcatcgtgattattcttcctcccaattgcactcatcatcaaattcacaggccaaccatggtaccaacatgaagcctccaagcgcttccgagtcactggatcacat

SEQ ID NO: 72757 - DNA, 797 bp, Glycine max
  unsure (1)..(797): unsure at all n locations
  Clone ID: PAT_MRT3847_36714C.1
ccacgcgtccgcaacttgttcctaaaccctaagattgaaatcgaagccacaatcgcgctggagtgaggttaacactcttaggaggaggcgctgtttggttcgtgaagctgaagatgaaaggcatgcgtaaactgctcatactttatgcctctcagaccggcaatgcattggacgcagctgaacgactttctcgcgaagctgaacggagagcctgccccttcaaccttctctctgtagaccaatatgatcctagtttgttaccacaggaggaggctgtcatttttgtggtttctaccactggccaaggtgatacacccgattccatgaaggtattttggagatatcttcttcagagaaacctaggtcagcgttggctgagtggggttctctatgcggttttcggcttgggtgattctagttatcagaagtacaattttgttgcaaagaagctagacaaaagattaatggacctcggaggaacaactattgtagaaagaggcttgggagatgatcaacacccttcaggctacgaagcttctctggatccatggctgtcttctttgtggagaatgttaaacatggttaaaccagaattcttaccaaatggtcctgatgttgtgattcaagatacagtattgattgatcaacccatagtccggatcacatatcacaacattgcaaatgacgagtcacatttnttctagtgcctcgggtatcccaaacttgtttagttcttggttgacttgcaatgtttccaattntcaaagcaattattttgtgctattaagttatgaact

SEQ ID NO: 72758 - DNA, 329 bp, Glycine max
  Clone ID: PAT_MRT3847_36715C.1
caaacttgattccaagggctaaagggtacacttgaaactgtcactatgccaggctaagattctttagtgcgacactacgtattacatggctgaaacaagttttgaacaagtggcgatccaggatttcactacgcatagtgacccagcggcatgccacatccctacattttatatttaaattcgtacaattaatgcaattccttcttcgacttggctatgtgtacaaaggaacatcagaagggcacgcttctggactcttctaaatggtatgtccaattaagactctattgctcctgaaggtttgatggtattttttcataaacataatt

SEQ ID NO: 72759 - DNA, 815 bp, Glycine max
  unsure (1)..(815): unsure at all n locations
  Clone ID: PAT_MRT3847_36716C.1
tcgacccagcgtccgggattgtggggaggtttaagaaaagagaagcctcgtgaagcatgctgcttcctccatccagcagtatgatatcaacaacacagtcccaggcaaaacaaaactaacacaaacaacattaacaaaaggaaaaagaaaaaaaaaaatctctctctgtctctctttctaaaacctcaccctctggctgtggtgcagatctcaagggggatctgaggtgaggttttgattggggaggaggggacaagacgcctcctttttagggttttctgcaatggccacgcactttccatttcccctctccgctgctcaggttgggacttactttgtggggcagtactaccatgttcttgagaccaaccccgagttggtgtatcagttctattctgatgccagcacaatggtacgcatcgatggcaacgccagagacactgcaactgcaatgctgcaaatccatgcgcttgttatgtcactcagttttattggaattgaaatcaagacagcacaatctctggaatcttggagtggtggagttcttgtcatggtttctggttctgtgcaacttaagggctacaatgtgaggaggcaatttatgcagacgttcttccttgcaccccaagaaaagggcttcttcgtgctcaatgatgtttttcactttgtggaagaggagccagttcatcatcaccaacctgtatttttagctcanagcaatcttgattcaaaattgaatgctcctagcacaattaacaaaccagtgtccaaccacctgttaggtggagatatacatgcaggggactttggtgcta

SEQ ID NO: 72760 - DNA, 413 bp, Glycine max
  Clone ID: PAT_MRT3847_36717C.1
ggaactggtgttttttccccttctaaaaaatagtgagtcttcttattgtgacttaaaaatgctacttacatttcctttgaatttcccatggcatcttaaatatttatgccattgtgtgtttgctttagcatggatgaattatcctttataatacatatctcttgcatatgttaggggaagtcttgtgcttgattatgtggtcacatcataactgtttttaaaacaaaactcaaattgatcatcttactttatgataaaattttggttaatggcaccacctgtaagttggttggggaaactcattgtgtaggatttttgctaaaccaaaattctctttttacattgcaactatgttgattgttgatatcatattactagcttttttgtgaagtagaaagctcgtgttgaatttg

SEQ ID NO: 72761 - DNA, 372 bp, Glycine max
  unsure (1)..(372): unsure at all n locations
  Clone ID: PAT_MRT3847_36718C.1
gggatagtatcatcagcgttgcttgaaaanaggggaacaaagaacaaatgagtgtcattaacttattaagtatggtcttagtagttaatttgggtatgtaaattaatgttacaaaatcgggcatgtatccaacagggaaaaaatctaagagatatgtgttggagatttgtttattaaaaaaaaaaaaaaaggggaggaaaaaaaaaaaaaaaaaaaaaaaaaaacctcaaaaaaaaaaaatcgttcccctaaataaaggttattttccctctaggggggataatggcgccccctgattactacttgaaattgtttttttcctagagaaaaaagctaacctcctaccaatagccaaaaatttagaacccttaa

SEQ ID NO: 72762 - DNA, 738 bp, Glycine max
  Clone ID: PAT_MRT3847_36719C.1
gtgcctcaactccaaaagcttttggcttctttttgtgtatcttctcggtttttggttattctataggggtgttattggggtttggggaataatttattgttctttttttttgttttgctttttaaagtattgggatcctggtttcgagagagtttccaacatgccaacaagagttgtcattggctgtttcagttgagttgttttttgtttcctcgtacttggtccctgtttgtggttgtggcattttatattctgttgagctctgctccatcagcgagtgaaactcggtcccttgatttttgggggtggtgtgtggtatttaaaagcagggaattttatagtaaggggaagggacacatttttttttcttcttatgtgggacttttgtgtttgagtgctcgctatgctgatctctgatgaaggagatagtgatttgttctttgactcagtggattgtttctcaccaacccgagagtctcttttgacaaaacaagagtttggctatgagatttgggtgaatgagcctgtgagtgtgatggaaagaagggaaaagtttttgcaggggttgggattgggtgatggatcatcttccaaggtttgttctcaagagaataatatgatgagttctgatgattcatcagtgagattgggactagagaggatcagggatagtggggcagcttcaaatgcttgtagttgtattttgcctgatgatcaagtttctgagttgggtctctc

SEQ ID NO: 72763 - DNA, 1724 bp, Glycine max
  unsure (1)..(1724): unsure at all n locations
  Clone ID: PAT_MRT3847_3671C.1
tggtcttcgacgactacgagcaggaatgaaaactcaaaacggcggcgtttgaacgaaacgatcgcattcgcaggtcgcttcgcttcccctttctccttatctcgccgttgccagagaacactgcggtaccttttctcgttttgttagggcattggtgcaatctagaaaatgctttcaggggtgaaattcattccccgggaccaggtgcatggtgaggacttggattctgtctcgaaagaaaggaaaaaatcagataggaggagggaaaagagtaagaggaaggggaggagctctagggacagctctgatgatgatgatgggcttgagaagattaagaaaggatctagaaagaagaagtggtattcgtcggatgaagactcttctatttacacaactgaaagcgagagtgagaaaggtgaaaagaagagaaggatgagagcaaaaaagaaaaggggtgatggtttgtcgcgtgattctggtgagaggtcaaaaggaagatcacgatccaggagtggtaaaaaagaatatacatctgaggatgaggaagactcctcatattcttctgatggtagtgatactattttgggtcgacaagggaagcgccaaaagttagatagaaaagacgggagtaagaggaacaagatcaaaggtgaagctacttgcggcacagtagattctacaagtgagatggaaattgcaagaaaagaaatgggattggattggatgcttaggtctgaaagtaagaagcctgtagttactgaaacagaggaaacattgtcagaggaggttcctgtcgaggagtcaaagaaggcaaatcctaaggaactgaatccatatctgaaggataatggaagtggttacccggaagaaagtggagctaaagttggtgctgaccaacttctatcttcttcccttgttggggatggaggagcaagttggagacttaaagccttaaagcgtgcacaagagcaagcagctcgagaaggacggagattcaacgaggttgtggaagaaaggtggagttctcttggtgagttgactgcagctgttgcatctcatgcagctgccccagctcgtgctcatctgcgtgctataaaaaatagacaaagagggataactgaagaaaattcacaagattctgataagcttggtcgaagggattctaaaagggactacttaaaggatgtttctgttcggcaccatgaaatgaaagcacctaaagttcaagattctttgtcttggggaaagcgaaagagccaacaagtggtagctgagggtgccggggtcatctctgctgcagtatctagcctaaataagtttgccaatgatggaaactttatgcatgattttggtagcaagatgagtaataattctgatggctcagcaaggcactcaagctcctgttttagaaagtagtgaattagaaaaggtttcgttggaagcaaacacacctggagaaagaagtgtggtagtcaagaatgagatgagtgaaaaccagttggcagctaaggttatgcaacttcgtttgaagggaaagcatgaagaagctgacaaactgatggtaaggcataaaataagagaatatcgtgtctcttctggactttgtttgcctcttatcaattttgcgatttaaattagtgcattgngctgttttttttctcatctatttcatgtgcctagtttattggcttggaaatgaagctgaattggttctgaaatgcttg

SEQ ID NO: 72764 - DNA, 429 bp, Glycine max
  Clone ID: PAT_MRT3847_36720C.1
ggctcgaggtttttaatcccctataaaacaagaagaagaaatgcacattccgcatgggagggggagcgtgtggtcttgatccaacattggatagttgtggctgatggaacaggatcctgaacgctagtggactgcaaaacacacgcctgtgcaggaccaggactatggatgcactgtgtcacatacactagagttctgcgcaggatgactaggatgcagctagcacattgtgactctgatgccaagctctctaatgtcgccggtgcagatgtcaatccatgagagctggtattcctcaatactgttcacgattacgccatcatatcacatgatacttgtgcatcggcaccggcagtagggtaatctggctgtgctgcaaatttacttgcatagccacaattaccccgggaggagtttcacaatgctggg

SEQ ID NO: 72765 - DNA, 861 bp, Glycine max
  unsure (1)..(861): unsure at all n locations
  Clone ID: PAT_MRT3847_36721C.1
gaaaaaacaaaggggaaagaatgtatatgtgattcctcaagatcaaaggtgcccaaacaaggaaatgagtatacaactgcccaggacttcgagagcctggtctctccccaaatctgttacaactcccttaaaaacttgttaattccctcttataccccttttcatagcacttattataacaattctgatacactaacaggactgggcccatctaatttggacttcttccttatccttctactaatgtatacatttttaattgggtctaacacatttctcaaatataaaacacaaaagttaaaccaattatgtgtctcattaagattggcaacataacacatctaggacatatattccttatgcagatgactatccccatgttggactggatattcattgtacagatctctctttgtttcagcactgttttttctttggctgtacaaagaaaaagttcattttgattatcataaccactataccgatgacataccatttttcttaatacaacttctacaacgcggttagaacagaacttttgcattagtacagagtcacacagaaaaaacaaatgcaaaatccccagacagcattagcacagcacagaacttcaaaatgttcaatccgtagtgatgacctccttaatatcaggccctgaaattaatcagtcgcgggcatcttctaatggactaacctccccaaaccatctnnnnngatcgtaaccatgcccaccaaggggattgcaacgacatatacgccacgcagnnnaaactgnncccttcannnctccatatcgcttatatgccnnnatggaatactcactnnnnnnnggaatgtatngacagctctttggcanannng

SEQ ID NO: 72766 - DNA, 404 bp, Glycine max
  Clone ID: PAT_MRT3847_36722C.1
acgatattctgacgcattaactagtaaagaaataccattgatagccattactattggtctaactagtcacagagctcgataatgtctaaatgggtgggccataggcttagggtaacttcaaatactgtccgctgtttcaatagattattgcgcttcattgtggatcaatgatgctacaattttccgtataatttactaaaacagcgatctcattattgttcatcttagactaaacgctcattagatgcatcattgaccattgggctttaagaagacgtattataaaagtacctatgatatacagttgtggcaaaaggcgcaagaaatggtaatactccaagttgtccgctattagtagattaaatgatgtcctttacttacgaatgccaactattcgattgggg

SEQ ID NO: 72767 - DNA, 285 bp, Glycine max
  Clone ID: PAT_MRT3847_36723C.1
tacggctgcgagaagacgacagaagggatataacctttttttgccaaccgaaataatatatttgttaattgttattgacaccatgcaattgtattttgccggccatacagagtttttaaaggagcagaatgaacttaaaagattaaaattttgatattataccggacggtgtatataattatttatattctttatttattgacactataaaaagttatagtcataatgttacgtttttttttatatataatttactttggaactacaaaattttttatcgatcat

SEQ ID NO: 72768 - DNA, 388 bp, Glycine max
  Clone ID: PAT_MRT3847_36724C.1
gaaaataaaactcctcaatgtttgcgttgcacaaacttcacagattttcatttatattaacaaaataaaatataaattgactttaaccaatcaaaatttattgctttcacaatttcattgtgcattcttcactaaaagtttcaaccagattcctatggggatgattattgacacctattactttcttcttctggcaccttcatttaattcttcaattttccaaatatatatctcaaacattttatattcctatcttcaccaacacaataaatcccttttcctttaggtgaaacacaatctgcaacaaaattttctccttttctgtttccaaaataaaaatttttcacaacctttcctctaatttttattatttttatggattactttt

SEQ ID NO: 72769 - DNA, 367 bp, Glycine max
  Clone ID: PAT_MRT3847_36725C.1
ggtccaagtccttatcatctcctctctctaacggttgcggatcctcacttccagacacggggccaaggcacttcggtcgacccatttcatagaatggtggatggcaggacgccaacatacgtatggtcaagcttgtgctcttaggtgattctggtgttagtaacagctgtattgttctactatttgtgcgtggtcagtttgatatagcatcgattgtacctgttggaccctctttattgtctcggacaatcacactgcaatattctacatcagtgacgtctgaaatttgggatactgctggtcttgagaggtatgctgcgttagcacagcgatattaccgtagtgcaacagttgcagtttactgttt

SEQ ID NO: 72770 - DNA, 822 bp, Glycine max
  Clone ID: PAT_MRT3847_36726C.1
cgatacaccaattcttccttcctttcatctcgtgaaatccaaagagttgcgacacggttgcgcatatccagcatgcaggcatcgcgggcaaggctgttcaaggagtacaaagaggtgcagcgggaaaaggctgttgatcttgatattcaactagtttgtgatgattcaaacatttttaaatggaccgctcttatcaagggaccctctgagactccttatgagggtggtgtgttccagcttgcgttttctgttccggagcagtatcctctacagccacctcaagtccggtttttgactaaaatatttcacccaaatgtgcattttaagactggggagatttgcctagatatcttgaaaaatgcttggagccccgcttggacacttcaatctgtctgtagggctataattgcgttgatggcccatccagaacctgacagcccactgaattgtgattcaggcaatcttctgcgttcaggggatgttagagggtaccaatccatggcaagaatgtacacgagactcgcggctatgccaaagaaaggctgaatgattttagataacttgtttcctatgttagtctaggcaacaagttagcagtagatacatcagttctgtgttccaatcttaatttgtttgaaatgtatacattttaagacatgatattaattgtttgatgatttgtattaaagtagtgacttgtacacaatgtacaaagtgttggtgtgacctcgcatatctggattcgtgccagaatgatctcaaatattcaaataatccttgattgcttcagttttatgaaatccatatcttaaggttgcattc

SEQ ID NO: 72771 - DNA, 287 bp, Glycine max
  Clone ID: PAT_MRT3847_36727C.1
ggttcgaggacagcatttacttgcagagtttgaaattaccgattggggccggttttgttgttcagaccttaggaatgctcaagccgctcaagtgtttagatggtgtgatggttcttaccttgaagaccaggaccaatggaggttatctggtatccaccgtgatgttcttcttatggcaaagccggaggtatttattactgactactttttcaaatcaaaccttgccgagatatatcttgcgcaaagataatgggttgaagcaaaaatagattgatttcaagagacat

SEQ ID NO: 72772 - DNA, 959 bp, Glycine max
  Clone ID: PAT_MRT3847_36728C.1
tttttttttttttttgaatgcaaccgcggggtatggattttttaaaactcaaagcaataaggattatttgaatatgttgacctcaattctcgcatgaatccagatatgcgaggtcacacctacactctgtacattgtacaagtcactactttaatacatataatcaaacaatcaatatcatgtcttaaaatgcatacatttcaaacaattaagattggaacaacgaacataggaagcaagttatctaaaatcattcagcctttctttggcattgctgcaagtctcgtgtacattcttgccatgggattgataccctctaacatcgcctgaacgcagaagatttcctgaatcacaattcagtcggctgtcaggttctggatgggccatcaaggcaattatagccctacagacagattgaagcgtccaagccgggctccaagcatttttcaagatatctaggcaaatctctcccagtcttaaaatgcacattagggtgaaatattttagtcaaaaaccggacttgaggtggctgtagaggatactgctccggaacagaaaaggcaagctggaacacaccaccctcaaaaggagtctcagagggtcccttgataagagcggtccatttaaaaatgtttgaatcatcacaaactagttgaatatcaggatcaacggccttttcccgctgcacctctttgtactctttgaacaaccttgcccgcgatgcctgcatcctggatatgcgcaaccttgaaaacaatttaacgtgtcgcacgaatctgttgatcgatatctctggatttcgcgagtggaaagaattgggacaattatggatcggaaatgaaaagtgtgcaaacaaaccctaaaacagtggacccaccaagaagtctttagttaccaacaccgatggtgggaactaatcagtaatatttccacccccttctgtcgtcttctccacgcgc

SEQ ID NO: 72773 - DNA, 332 bp, Glycine max
  Clone ID: PAT_MRT3847_36729C.1
aggggggacgcctgtagggactggttcggaattttcgggaagatccatttgcccgcgttttgcgagggggaaagaacaggggagtgatgggggacaaatggaaacagagagaacacaattgaatatagaacctagcaagtagggattaagggaaagttaaaaggacgatgaagggggaggaaatagaggggggaaaaaatggagaatggagaaaaataattgaaaacagggcaagttagaaaagtgaagagagatgcagataggaagaaaggatgggtaatggaataaaatgtgaagatggggaatggagaaggaaaaaaggagaagttggg

SEQ ID NO: 72774 - DNA, 1663 bp, Glycine max
  Clone ID: PAT_MRT3847_3672C.1
ggcagttctggagagagaaagagaaagatcatcagtgagagattcttcattcttcttctcattctctattctaaattcttatctaagctaacgatgatgatgaattagaaattcgtggtttccctaaaccaaactcgattcaccctctcattttctgaatttcaatggccgatcactcagattcttctcctctcgttcctccccttcccctcaccgacccttctgtcagattcttctcctcttgttcctccccttcccctcgctgacccttctgagatcgacctcgaagccggtccctccgaacaaatccagtgccgaatttgtctcgaaactaacggtagcgatttcatagccccttgtaagtgcaaaggtacatcaaaatatgtgcatcgagaatgtttggatcattggcgagcaattaaggaagggtttgcctttgctcactgcactacgtgcaaggctccttatcatttgcgtgttcatgttgccgctgataggaaatggcgtaccctgaaatttcggttttttgtcaccagagatattttgtttatttttctgtctgtccagcttgtcattgcttcactggcatatttggtttatctaatagatggttaccagcaatattggcttcgtcttctctggggttttgatagtgaaatgagcggcttctactatatatgggggagctctatttgtttttcgccttgcttggcctttctgggtgcttcattacctgctatgatcgaagagtacgcaatgatttagctcagccttgtagagaactatgtctttgttgctgtcaacctggagtttgtgcagactgtcatttgccaggcactctttgtatgtggactgattgcaccacatgctttgagagttgtggaaccatggcaactgaatgtggtggttgtttggggggtgctggggaagcacggctaccattattattcattatggctttgatgcttctgggactttttaccggatatggcatcgtcacagtgtattggttgctaccatggtaggtcaacggatatggcaacgtcattatcacatacttgcaaaaaggatgttaacaaagttatcacatatgtggaaatcggatgttaacaaaggagtatgtggttgaagacgctgatggagagctgactggatcggattggtctcccccggctctcccacccgaacatgttcagcagttgaaaacattgggcctactatgagtccatgagtttggaagagtcatcagtcatctacttgatgacgtgaatgccactaaaatgtagatatacattggccctccccatgttttggtaagctggtccttttcatgaagacctgcagtttattgataattgtgtaataggcactcaattcactttggctagagttgtacacttgtgctgaaccgctgatatgtggaaatttgtgaatgtctgacacgtctacctaaagaaaatggaagaggattcttttaatgaccaataacaagttacaggtacatcgccatttcttttccttgataggattctgcttggctagtcaggtcttattgattgctggtcgtatttgttttaaatttttattttgatttggatactttactaatcaaactcgtacggttgccccgtgatacaagcatattgtttggagtgaggaaaaa

SEQ ID NO: 72775 - DNA, 637 bp, Glycine max
  Clone ID: PAT_MRT3847_36730C.1
agcatatcttgcatagaatattgattaattaagaaagctcttggtcattcatttgctagctccaataatgggttctagcagattgtcattcattttagcacttgtgcttgtaacattttcattcatcatgatcattgactcaagggttgcagaggcacgtaccctgccaaaatcagccttattgccttccaaagtttatatacctactgttcctcttcctactctgccattactgccaaaggaagagttgcctgttccagtccctccagtaactgtgcctgacctaccaattcctgaagtacctaaagtaccaattcctgaactccctaaagtaccagtaccaattcccaacctaatagttaataacgccaaaataatcccttgagtacctatgatctatccagtcactactacttattttgctctagtcacttgctaaaatgtattttttataatttgctgttgctatttcagggtggttcttttggggtttaatttgtacatgatgtgtcattcagttaaatgttatgttcagtttatatgttgtttcagtcggttggacttcagcatattatttattttgatctgtaatgtatcaacttttcatcttctagttcaataactttttgaatttctg

SEQ ID NO: 72776 - DNA, 192 bp, Glycine max
  Clone ID: PAT_MRT3847_36731C.1
aattcacatatatagagacaagtccaaagacaaaccaacggcatttatatgatacagatcaacaaattgcatgcatcgatgcaggggtacaccactggaaatgcaagacacggatagattcgttcaaattgcacaaacatcagaaccataacgtacacttagcaagatcgaaactctaacaatcaccctggg

SEQ ID NO: 72777 - DNA, 304 bp, Glycine max
  Clone ID: PAT_MRT3847_36732C.1
ctctcatactgatagggtagttgggttaaaaagaaaacacactcatttcacataataatgccctttatttaagggaataaaatatcacgtactagtacacaaaagcaaaaggacactcatcaaccctatttttgaaactcttaccgttctcaagaagacgctttagcatacggttaggggcgttaaaactcaaaatttcattcttaacgccaaaaagaacaaccggtaaagctactggaaaaggatcaactttagtaaaaaaaacaattttcttacctttcccaaatgctgggccaattttttt

SEQ ID NO: 72778 - DNA, 288 bp, Glycine max
  Clone ID: PAT_MRT3847_36733C.1
agacgcccgaatcactctgctcatattcataccaatgtcaaatcctcaaacaaacaataaccgccgccagcccagccgcctgcaggggcgagccccctcctccctgcaaataaaccgcgccgacgagtggaacgtcgacatccctctcttctcggcagtggcagcacccccgacgccgatcgagctaaaaccgccgcaagagccgccggagagggagccggaaaagggcacgcggacggacaagaaggggcagcaccctgcggctgcctgctgtacgagcccgctcca

SEQ ID NO: 72779 - DNA, 830 bp, Glycine max
  Clone ID: PAT_MRT3847_36734C.1
gcctcgaatcattgtcaaggtaacttgtccaaatggtattgttatttactgtagtctttgtgatttgatatttggtttttgttatgggggtggacagagtatagtgttggagaacttgtatgttcagtcaggaaacgatggaactggggtaccaactgatatgttgtcgttgaactcaacggtcagaatattgtacagaaatcctgccactttcttcggcgttcatgtcacttctacccctcttctcattagctattaccagcttgcaattgcctctggccagatgcagaagttctatcaatcgaggaagagtcggcggagtttggctgtagtggtttcaggacaccagattcctctctatggtggcgtgtcagttttagggaatactaaagagcacttggagagcgttgcattgccactaaaactgacatttgtagtgagatcaagggctttcatcttgggaagattagttaagtctaaattctatcgaagaatcagatgttctgtcactttgcatggcaacaaacttggaaaacatcttaatttaacggattcatgtgtctacaagtgatatatattattccctcaatccttaaaatggttcggacatgctatcactttatcacttgtgaagatagctggtacatttttggctcgtttttcttagttttttattgcccatcatctagcagaacgaacttgtccttttgtctccgtaaatatctgaacgccaattttaatgtaatatgtgttcattttgattccagtaaatatcaataccatttggacgagttaccttgacaatgatgtcagaggcctcgagccgaatt

SEQ ID NO: 72780 - DNA, 357 bp, Glycine max
  Clone ID: PAT_MRT3847_36735C.1
gcgattcaagccatgttccctggctgattactgtagctggacttggctcacggatccacagaaattaaaaaccgtcatgagctagacgactcacttaggatctcactatccaaacgaataaagggtcaaaaataagtgccttctacattggggcaccatttgaaatgcattatcacgaactactgttcatacacttggaacagactaaaaaagcatcaccagtgtggtatccctgactcttccgtgatatcagtattctggatacatattaccaaacctggaagaattggagagcgggcaatgtacttttttcgatgcgagctccgccctgtcctgagcatcccttataacaagggt

SEQ ID NO: 72781 - DNA, 466 bp, Glycine max
  Clone ID: PAT_MRT3847_36736C.1
cgctactgaattatggtgttgtgatcaacagctgaagaacaaatcacactgctccgaacttgagatgccgagtggaacctagaacacactatattggtattcctcgatccccacaaacaggaatagaacgaattgcagaaacaagccggcgaagaagcacatgattgactcttatgatgcttactctcaaaaccctcgtccaacccacttacccatcagctgacccggagcttcttacattcttatattgatctctatgccgagttgctactgggttgaaaacccactgtactacaccacggtcctggactgctagactgggcctatttgagcaggctcatttgctcgtatctgatccttctgagaaggagcactagacagcttgcgttgctcaagctacggaacatttgcctctaaaagaccacccatgacagactttacgacctgcatataatcaggcacacag

SEQ ID NO: 72782 - DNA, 411 bp, Glycine max
  unsure (1)..(411): unsure at all n locations
  Clone ID: PAT_MRT3847_36737C.1
cacgcgcccgcagggcacccancaccaacacccacacccaccaccaccaacagcgcccaaaagattggcgcgctaccaaggaccaccatcgacatgcaaacaaaaaccgagcctaaaatcgcttcctccaggggggggggaanccgcccccaaggccccgaaacgaaaaacccccaaaggggagggggcgaagggaccccaaactcaacgccangaaaccccacgggcggcccaacagacgcggccgaacaaccgagaacagncgccccaaagangacgaggggcaacgggggccggccccccacccaagaaaacgcgaacaccccagcggaacgagacgcgcccagaaaaacaagccaagcccccaccccaggaaggggggaaagaggccaacccacaagggcccaagga

SEQ ID NO: 72783 - DNA, 289 bp, Glycine max
  Clone ID: PAT_MRT3847_36738C.1
cccacgcgtcctataaatctcattttaattttaagtcttcactgacgaatacaggcatacgtttctttaacctggccgactacatctactattcacatagcgtcatgaatcacttccaattcataatcaactgcatttactatgttgcatacaatgttatccatgaacctcccgctttttattaactcttcaacataacatatcacgtattttcccagcatatctaattcacgacctattccaatctttcaaacttgaatacctacctattgaatccaacatattgacc

SEQ ID NO: 72784 - DNA, 411 bp, Glycine max
  Clone ID: PAT_MRT3847_36739C.1
gacacaaagagacaattttcccaggacacctaagtctgcaagggaccaagctaggatttttaaaagcttccaattacagttaatatggagtcacattcaaaccaaaccttttgctagttcctctccaaggcatattggatggccaagatgacagcgaagagctcaacatagaggagagattggaaaccaatataggcggagaaacacccaagagatgcacccgtgtggttcctaaagatggcaccgctgctatagcctgtcccggagacccgcccctccattaaaaaattattggtatttaagatttttgcatgcacacggataattgagagcaaaaataatttagttattaagacaaatttaaaataaaaataatatcattgaaaattaaaaacatcagttgatctgatt

SEQ ID NO: 72785 - DNA, 195 bp, Glycine max
  Clone ID: PAT_MRT3847_3673C.1
gttggaggattctaaggcgaataaagaagcaaatccaacaaaaaaaaagcaactaattaatcctcggacagtgtaaaatcaaatttccacatttccgagagagaggatatggcaaaggcatacgagcaagctattgaagatctccagaaattgttgagggagaagagtgaactcaaagccacagctgctgagaaa

SEQ ID NO: 72786 - DNA, 391 bp, Glycine max
  unsure (1)..(391): unsure at all n locations
  Clone ID: PAT_MRT3847_36740C.1
gncgcttgcacgcgtacgtaagctcggaattcggctcgaggttttgnaatgttgcnntccacactgngcnantcaacanntncnagggcnattaggtgctccnctananggaantcnnccaaaagcttccaangttttnncaancaccttnggtaactactncaagaagtgcgcananagtcgagntatanataaccnantggcnagnggantctcngtngnctgcatagaggatgagggccccaaagttgtttccacnannatcccggatntcgcgggannatggatccatcgtaanagcagnnaatgccgcncgtgggtttntnncnggantgtggggttccanattggngcangttngntagntngttccnncctacnngganggggc

SEQ ID NO: 72787 - DNA, 364 bp, Glycine max
  Clone ID: PAT_MRT3847_36741C.1
cccacgcgtacttgtgtagagaagtcaaatctttttccatgtaaagatttcttgggatgcgtgacgttaattcatattattgaatgcttgtgttaaaaaaaattaaaactattttcatatgttaaaaaaaagaacacaatttacaaaattaaaaaacaaattgtaacaaactggatcattgaacaatgaaaataatatttatgcttgtacctataatcttactgattcgaggcttataacctgcgaaactgacaaaaacgataaaaatgtgtacaagaaaataaaagtggcactccctaaaaacatccacttaactttacgccttctaaagacatacgtcgatttttgacatgctcctcattta

SEQ ID NO: 72788 - DNA, 248 bp, Glycine max
  Clone ID: PAT_MRT3847_36742C.1
aaaatttagaattgattatggtgagaagagataagagtgtatgaacagggaagtaaagaaggaccagtacaaccacaactgccaggttcaggggttccttggagtagcattaaagacactgttccaatcttccctcacacatcaccacccaatgcaattcttgaaaaaccatgcaacaacaaaagaaaagaaagctaactacttctttttataagaggaaagctgcattgatgtcttgatgactttta

SEQ ID NO: 72789 - DNA, 408 bp, Glycine max
  Clone ID: PAT_MRT3847_36743C.1
gccacccttacttcttatggtgtgtgagagcacgaaataatgtaaccgatgctacttttgttggggagaaaaacacgttgacccggtagagtcgatgccatgtgggttgggggagagaacacaaagaaaaaggggcggtttgtccttcatgggcacaccaaattcaaatcattagccgcagtccagaatgaaggatattttgactcactgtggatggaattctatccttagtagtgtggtaaagggtgctccatcaatgacatgcgcattgtatgcggagtatgaaaagagtgctattttgctatgcgaatctatcaaagtgtgagtcaggacaggagttgattaaaatggataggcggaatagggctgaaattgggactgagagaaagtgtataatggaagaggagg

SEQ ID NO: 72790 - DNA, 406 bp, Glycine max
  Clone ID: PAT_MRT3847_36744C.1
attgatgcaatttttgggactattcggcccgtgagtgttccaaggaagagtgccatttatgtgtgggggtacaatcaatcagggcagacaggtagaaaggggaaagaggatcagttgaggattcccaaacagcttcctcctgagctgtttggatgtccggctggcaccaatgcgtgttggttggatgttgcctgtggtcgggagcacacggctgcgatagcctctgatggctcactcttcacttggggggctaatgactttggtcaattgggtgatggaactgaagagcgaaggaaacatccagaaaaagtaaagcaattagagtcagagtttgtaaaatctgtatcctgtggagcacattgctctgcttgcattgctgaaccctctgaaaatgatggttccatct

SEQ ID NO: 72791 - DNA, 452 bp, Glycine max
  Clone ID: PAT_MRT3847_36745C.1
ggtttttagagaaaaaccttttttttatattccatactttttttcgcccatgaacaaccatgaatgctttaaaaatggccattcatttttttttgactaacttgttggcttcgacccaagaagagtgactctccattccggggaagcgcgctatcaaatggcatcgggatcataacctgcataagaattttgataaaaaacgttgcagccctatgtttagcctggagaccctctccaccggaccttgtgtggtttaccacgtgagcaagtgcactatctgctttagcggagccgggtccaaccttcaagggcaaaaatttgttatgaagctccctccaacacttattcggggaaaatgcatccccctttgtaaacgcaccttgggatacaaaaactgcaacccctacatggagctaggggccattgcctactaaagcagggctctttggggc

SEQ ID NO: 72792 - DNA, 422 bp, Glycine max
  Clone ID: PAT_MRT3847_36746C.1
gaaggtctaaccggtctaatgagacaagcagtaagtaagagcttttctctgaatttttggttgacaaagacagtgtaccagtaagcattcttcaatatgttgatgatacagtatttttcggggagcctaccatgcaaaatgtcagggtcatcaaaacgatcttgaggggatttgaactagcttctggtcttaaaataaattttgcaaaaagctattttggtgtagtgggtaaatctgaccatggagtagagaagctgctgaatttttgaactgcagaattttttcgctgcctttcacatatttgggtattcccattgaagcaaacccaaggcgtggcgagctgtgggatctagtcattaggaagtgtgagagaaaattagctagatggaaacaaagacacttatcatttgtgaggagagtga

SEQ ID NO: 72793 - DNA, 720 bp, Glycine max
  Clone ID: PAT_MRT3847_36747C.1
gagctagtagagaagatggaagcgctgcgcaacacaatcggggaggtcaatggccaattcaaggacgccgacctgacgaccttcgtctgtgtatgcataccggagttcttgtctctctacgagacggagcgcatgattcaggaactaaacagctacgaaatcgacacccatgcaattgtggtgaaccagctgctgttccccaagaaagataacccgtgcgagcaatgtaacgcgcgccgcaagatgcagaagaaatatctggatcagattgaggagctctatgacgagttcaatgttgtgaagatgccgttgctcgtggaggaggtcagagggaaggaaaagctcgagaagttcagtgaaatgctcgtcaatccttttgttcctccggaggagtaattctcccgatggctcggcagtccgagtgtgctcaccgccctattggatgcggagggctcgagtttgagttcctcagttacgcgactcacgacgcaggccggcgatgtctctgtatccaggaaacctccgttagacttcggtgaatttttcatccttgtcgatacccacagcaacaaaacgctacttatgcctacagtatttgaccgacttttttttttctatagtgctcgctttgcgccaatgattaccgcatacaatcacgtatcctgtgtatttagcactagcacatagaagtcacaattcaactagttcaaaagcgccaaa

SEQ ID NO: 72794 - DNA, 343 bp, Glycine max
  Clone ID: PAT_MRT3847_36748C.1
gagaaggtgagtttgttcattgatccttgcctcactgtcactggaaacagtgagatagtatgtgctccccagctagttaaacttggtctggcatgcttgatccaagaaccagcagagagaccaaccatggtagaggtagtctctagcttattgaaaatatatacaagttatatggagcaaataataccacctagcatcagcaacagtcctagcatggagaggtgaaatgatagaaatttcgctaaactgatatggaatgtacacttgtattgcctttgcaattaatttgtatatattataagtattttcacgtagaattttagtttggttctttaaaaaaaaa

SEQ ID NO: 72795 - DNA, 458 bp, Glycine max
  Clone ID: PAT_MRT3847_36749C.1
ccatactcctagggaacccaagggggggatttttatatctaatgcttttttgaccaactaaaattctgagaacaaattcacattgacaatgccatagcagaaacatgggtagccactaaccactactaatatctcgttaccttcacttcttatatattattctattcccacaataacaattgtcaaccaatcaacaaacagttttgggaagaaaatatcggcaaaagtcaacttttgcatgtgcctagccaattcttgttgctacacatacctaattcaaaattgattccatacaataattaagaatggtttcagattagatgcaccacgggaaggtacattggtgattaacaagggtcgatttctagtacgtttgggaattcttttttgtgcttataaatacacgggctacctaagggtttgaaatgtggatttagaagagtgtgtgggtgaagttg

SEQ ID NO: 72796 - DNA, 1705 bp, Glycine max
  Clone ID: PAT_MRT3847_3674C.1
cttcattcttcttctcattctctattctaaattcttatctaagctaacgatgatgatgaattagaaattcgtggtttccctaaaccaaactcgattcaccctctcattttctgaatttcaatggccgatcactcagattcttctcctctcgttcctccccttcccctcaccgacccttctgagatcgacctcgaagctggtccctccgaacaaatccagtgccgaatttgtctcgaaactgacggtagagatttcatagccccttgtaagtgcaaaggtacatcaaaatatgtgcatcgagaatgtttggatcattggcgagcaattaaggaagggtttgcctttgctcactgcactacatgcaaggctccttatcatttgcgtgttcatgttgccgctgataggaaatggcgtaccctgaaatttcggttttttgtcaccagagatattttgtttatttttctgtctgtccagcttgtcattgcttcactggcatatttggtttatctaatagatggttaccagcaatattggcttcgtcttctctggggttttgatagtgaaatgagcttttactatatatgtggagctctattgtttttcgccttgcttggcctttctgggtgcttcattacctgctatgatcgaagagtacgcaatgatttagctcagccttgtagagaactatgtctttgttgctgtcaacctggagtttgtgcagactgtcatttgccaggcactctttgtatgtggactgattgcaccacatgctttgagagttgtggaaccatggcaactgaatgtggtggttgtttggggggtgctggggaagcagggctaccattattattcattatggctttgattgttctgggactttttactgtaattgggatattctacagtgtattggttgctaccatgggtggggctgtggtgctaggaagcactgatgtaacagaaaggctgccatacggttgtcagatatgtcactgtggatcaggatcctctcttgcctctgcagcaggatgttctgtgcagccaaaatctggaccatttatcaatattttctctctgcatgaattaatgtgcaataaccaatcaacggttatgatttggctgcagacaagattggctggagaggatgagtatgtggttgaagatgttgatggagagttgacaggatcggattggtctcccccggctcttccacccgagcatattcaacagttgaaaacattaggcctactatgagtccgagtttgaaagagtcatcagtcatctacttgatgacatgaatggaagtagatatacattggccctccccatgttttggtaagctggtccttttcatgaagacccgcagttaattgataattgtgtaatagccattcaattcattgtggctagagttgtacgcttgtgctgaaccgctgatatgtggaaatttgtgaatgtctgacacggtctacttatgtaaagaaaatggaagaggattcttttaatgaccagtaacaggttacaggtacatcatttcttttccttgataagattctgcttgggtaatcaggttttattcattgcttgtcccatttgttttaaattttggttttgatttggattactttactaatcaaagaattctagcggtagaatttcattcgtacagttgccccgttttaaaagcatattgtttagagtgagg

SEQ ID NO: 72797 - DNA, 796 bp, Glycine max
  unsure (1)..(796): unsure at all n locations
  Clone ID: PAT_MRT3847_36750C.1
cgaattcgagctcggtacccggggatcctctagagtcgacctgcagattgttttaatatgaatgtacctcatgatgctgttatttgcataaaatattttagaaaaaggagaataagtttacatcatatgtggcttcagattattttgcatggttgacagttttttttttttgttttggtgacatttttataatcattggtcacctgtgattggcacaggaatttccatgggggatcttagtataaaggcagaatcttccttttctccatctagagccaagtaaagctgtctttttttatatcctctatcttccatgtcatctctataccacattctttgatgttgatttgttgattcagggttgaagattcgcataaagctggctcctctaatcgcttggcatccggtttgaattcaggtatagcaaaataagttcatagctaattttagcctttcttgcatcaagttacctgtgttcatcttctttggatctctaacttgtttatatattgcagagtccgatggccccttgggtaacacacatgctgcaaaccaaaaggcatctaatgtgggccgtggaaaaggtggtcctggaatcattaaaatggaaggtgtgcatctttatttttgggcctgaaccccaattgaattctatcctttggactttcactntccatagaaaatttaaaaaaccaacttcttggaataataacttatactttntattcctatanaaaaagaggtgaaggatttgggnntggttttgcatgaaattttcaacctttagcattaatta

SEQ ID NO: 72798 - DNA, 592 bp, Glycine max
  Clone ID: PAT_MRT3847_36751C.1
gtttacccattttattgccgagtccattgcatagtttataaagactttcatagacttctctctctgtgtctctttctctttctctttctctctcttggaattcatggttagaggtggtggactccaatccatggattcagatccaattgggagcttcttcctccacaagccaattgttctcaactctttcccagctgaagacacaaacaacaagtggaaaaaacttagtctccaccacaacatggatgccacagctagcaataccaaagataacaccatcccctttcaagtcagccttagatgttctccaaacaatcatgatgatgcctcttcaccaccatctctccacaacaacagaaccgagatggacttattctccgacaagaatagtaccaaagatgatgacaacaacaacaacaaggttgatgcttctgcctctctccccgacaatgatcatcattccaccactccacccacgttggaattcaaactaaacgtgagtcaccgacccatcatcatattttacatgtgattttatgaaatagtgttgacgctgaggctactatgaggaaggcaagagtttctgttagag

SEQ ID NO: 72799 - DNA, 216 bp, Glycine max
  Clone ID: PAT_MRT3847_36752C.1
cccacgcgtccggggattggcgagatgtctattgataaaagataatctccatggcctgttggaaaaatgggggaaggggcatccgtcggccttttgtgacgaacaaaactttcgtacgcttgctttcgactttgtgaatgttattggtggaagttaattccaatcctatggccctgctgttacagtgtctctactgggaaaaccttgtatatccca

SEQ ID NO: 72800 - DNA, 1129 bp, Glycine max
  Clone ID: PAT_MRT3847_36753C.1
aacataaccgcgtaaggtgtagacggagtctttattgaaaatccagattagttgagcggagagagactttgaagttgtgtcgtgtggcgtttctggctgcaatcacagtctcttccacttttcaatttcattctttaatcagtcaatcggcatcctcatgtccgacgcttattggagatacgccgccgagtcccggcaggccccctcttccatcgccggcaagcgctctcgttccgactacgcaagtttcatcatatggttcgggacagtctactagaaccattggtgggcgaattcccaatcgtgctattgatgattcacatgttgccaatattgggggagtcggcaggggaacaaatgcaaaagacaaaatgccgggattaagtagtggaagggctgaccattctcttccaccagatgctaccagtacactgtttgtggagggtttgccttccaactgtacaagacgggaagtagctcatatttttcgtccttttgttggctacaaagaagtcagacttgtcagcaaggaatcaagacaaccagggggtgatccactggtactttgttttgtcgattttatgagtccagctcatgcagcaactgccatggaagcattgcagggttacaaatttgatgagcttgaccgcaactcggtcaacttaaggtttcaatttgctcgctatcctggtgcgaggtcaggtggcgtgcatcgtggcaaacgttgaattatgcaacatgcaggattcactcacgttgggggggttatgattttgagaggcaagtgaccagcgtcgcagtcattaggaccaagtcgaacattgtggtattcgtgtggggagtgctcgctagagattcagattctgcctgtttgagaaaattgtctaatttatttagtataaattcaaattgtcttgttcgaaacaacgtatgtctttgaaggtgttcactgctctttcgaatatatccaatatttaatactgagaagcatgttctccatgcatgtttctactttctagtgagccttttagatatcaaatatcgttaattgttgattttattagattactataattagacaaatatcggtgcactcactccaaaaattttttgccctcaatacatattt

SEQ ID NO: 72801 - DNA, 165 bp, Glycine max
  unsure (1)..(165): unsure at all n locations
  Clone ID: PAT_MRT3847_36754C.1
cgaaaactccttatggtcaccttcaaaaccagtcaaccaacgtgatgctgatctcatcatttttgggataagtccgaaagctcctgagttncctcagaaatgagtcgacaatttgagcatgatctgatgagtagcacaggaactatggagcttattgatgaaggt

SEQ ID NO: 72802 - DNA, 1219 bp, Glycine max
  Clone ID: PAT_MRT3847_36755C.1
ctgaggtcgagtgggctgacagggagacaaaattgaaaatcaagattggttgagcagagagagactttgaagttgtttcgtgtcgtgtggcgtttctgggaattaagtgcttttcttctgcaaccacagtctcattcatcaatcaatcggcatcctcatgtctgacgcttattggagatacgccgccgaatcccggcaggccccctcttccatcgccggcaagcgctctcgttccgactacgatgtttctggcgttcacgacttgcccggttactttccccatgacgatgatagaggagggctccgagtaattagagatactgaatcccttgatgcatcttatgagcgttacctccgtagtgcgcaagtttcatcatatggttcgggacagtctactagaaccattagtgggagaattcccaatcgtgctattgatgattcacatgttgcaaatattgggggaatagacagaggaacaaatgcaaaagacaaaatgctgggattaagtagtggaaggactgaccattctcttccacctgatgctaccagtacactgtttgtggagggcttgcctcccaactgtacaagacgggaagtagctcatatttttcgaccttttgttggctacaaagaagtcagacttgttagcaaggaatcgagacaacctgggggtgatccactagtactttgttttgtcgattttttgagtcctgctcatgcagcaactgccatggaagcattgcagggttacaaatttgatgagcttgaccgcaactcggtcaatttaaggtttcaatttgctcgctatcctggtgccaggtcaggtggcgtgcatcgtggcaagcgttgaattatgcactctacaggattcactcacgttggggaggttatgattttgagaggcaagtggccagtgttgcagtcgagaattacagtttctttcattaggaccaagtcgaactttgtggtattcctgtggggagtgctcgctagagattcagattgtgcatgtttgagaaatttgtctaatttatttaggataaattatattgtcttgttcgaaacaaattatttttcgaaggtgttcaaagctctttagaatatatatctaataataagaagcatgttctccatgcatgtttctaatttaaagtgaaccttttagatattaaatgttgttaatagttaattttactagattactataattagacaaaaa

SEQ ID NO: 72803 - DNA, 372 bp, Glycine max
  Clone ID: PAT_MRT3847_36756C.1
gcggagagagactttgaagttgtgtcgtgtggcgtttctggctgcaatcacagtctcttccacttttcaatttcattctttaatcagtcaatcggcatcctcatgtccgacgcttattggagatacgccgccgagtcccggcaggccccctcttccatcgccggcaagcgctctcgttccgactacgatgtttctggcgttcatgacttgcccagttactttccccatgacgatgatagaggagggctccgagtaattagagatactgaatcccttgatgcatcttatgagcgttacctccgtagtgcgcaagtttcatcatatggttcgggacagtctactagaaccattggtgggcgaattcccaatcgt

SEQ ID NO: 72804 - DNA, 263 bp, Glycine max
  unsure (1)..(263): unsure at all n locations
  Clone ID: PAT_MRT3847_36757C.1
ttgtcgattacctaacnggtgggggggggatgataattttttttttttcntgaaattctggcgacccactttctctgatccgttccctgtttactcatccccacgaatcgtgactctgtttttntncgcgtggaggagtttgacacatgtgtggaagataatgatgatnttgaggttgatgtttttgagggtgctgattttttgtttggnttttttttggttttgggttttgtggggnttttgcttttttttttctcgtgttt

SEQ ID NO: 72805 - DNA, 197 bp, Glycine max
  unsure (1)..(197): unsure at all n locations
  Clone ID: PAT_MRT3847_36758C.1
gcaaagaangcgaagaagaaatgggttccaaggcgaagaagaagngttcaccggaggacattntggaaaccctaggaganttncacgagcaaagagaantgggacaanttnttcaccctccgcggcgattnnttcgnngtggtacgccnnatggncccatntcagggacccagtngtntncntcnncaaaacnatcc

SEQ ID NO: 72806 - DNA, 178 bp, Glycine max
  unsure (1)..(178): unsure at all n locations
  Clone ID: PAT_MRT3847_36759C.1
accggnccggaattcccggtcgacccacgccgtcggccacgccttcggaccggtgggaaaagatcaccgaagggggggggccttgtaattaccatttccggttccaggaggaaaagcccgccccaaccggtgtgaagtaattgtgtgcggaaaatcgaggaatcaaaataggggttcg

SEQ ID NO: 72807 - DNA, 271 bp, Glycine max
  Clone ID: PAT_MRT3847_3675C.1
tatatggaactcttgtgaggaacccgaaaacgaccatattgctgtgatcggtgtatgcatgaccctcggagactacatttaaaacgaatgtaataagagtttgatgagcgtatatgctgatatgaggctgaatgtgaagaccggagagtatacaagaatactcattatctgtatgttccaacgtgtcatacttggatgccggtgtggtcaacagaatcaatctcggactatagacgcattcggcggacttacacttgtcgaaccatggtca

SEQ ID NO: 72808 - DNA, 679 bp, Glycine max
  Clone ID: PAT_MRT3847_36760C.1
ttacaaaaatatgtatataaaaaaaaattaatacaaaaaactctctctctctctctcttctgtttatttttacctctcctttacaaacatattacaaggcaaaatacatgtaaaaattggttaaaaaaattagttcatctcacactaaaggggaaaaaagttggatgggaagtgaggaaaaaccaagaaaatagaatgactaaatacagaaaatcgcaattgcttgcttgctcagttagctaaatgactcggagagttgttgaacatactgtgccacataaatgcacgagaaagtaccatctcgagctcctgttgagtccagttcttatttggaaggtgctgaaggaacattaccatctcttggaaatcaagcttctggagcttgtcagaccacgttagaagaaaactggcagatatatacacaaggaaatctggtaaggcatctccttcagctagatatgtgtcccaaagacgtgtgacaagatggaagggtatctcgcggattaaaagacagttgaaccagcggaaagcaaattgaagaaattccaatccttgctcctccatatggtttgaagcaggatcatcaatcctcctgaccaattccttcaacttaaaaacaagcctttgaattcctggttgggcaaacgtataatggtcttgcataccatcaagcaacttt

SEQ ID NO: 72809 - DNA, 217 bp, Glycine max
  unsure (1)..(217): unsure at all n locations
  Clone ID: PAT_MRT3847_36761C.1
cgacccacgcatccgaggacacttacacacactcatatttcaaatattagtctcatacccacactnactaaaacagttcgataaaaaaagggagggagctctcaaacccatcaaagtgaatcaaccacgccatcatcagaatatcactcacagaagcataaagaacgagcatgatgaaaacttacatcaaacactttatgaacgacacccatagtac

SEQ ID NO: 72810 - DNA, 235 bp, Glycine max
  Clone ID: PAT_MRT3847_36762C.1
cccgcgtccgagaatgtaccctgtcacttgaccaacacgacacccaacctcgtggagtgaacactatcctgagacatgccttcttcctccaaggcctacgccatgtcctacacacgccatctcgactcatagagcaccactctacctttggctctgctacatgctcctactgtacctctatggattcggagaactcctcctccagattcacgtctgccggtgcggaatctcgcac

SEQ ID NO: 72811 - DNA, 220 bp, Glycine max
  Clone ID: PAT_MRT3847_36763C.1
atctaatcggatcttaaagaactcatggatcttcaaacgatcctgctacctaatgcaacgccgctattttgctttgtgattttagtttttatgcaagtactctatacgatccatgattctctatcgcttaatgatcgtgtattatgatttgtgaattctgacaattttttagccgtacgtagattatactttcgtttatggttacagattcatctaagca

SEQ ID NO: 72812 - DNA, 194 bp, Glycine max
  unsure (1)..(194): unsure at all n locations
  Clone ID: PAT_MRT3847_36764C.1
ctggttggcgttaatatggcgggtttcttaccataccggggcacctatcttcctaatctctcattgacgagatctataaccctatcaatgccagcgttcaccaatcactcccttcggcgataccttctanncccccactcgcctacattctcgtctttcgattccgtctccccttccccttttatcttcttcaa

SEQ ID NO: 72813 - DNA, 367 bp, Glycine max
  Clone ID: PAT_MRT3847_36765C.1
gttggttatattggcggccaataaggtgacacaaattttccatatacaaactaaattcacttctaatccaggaaacggaacctaactagccaacattccaaagttccgaaatttcaaaacatacacataggaaaagactgtgccccaatcattgtttctaaaaacacaagggcaaataactaattaaggtatatttattgaacttattccatcttgctaccctaaacattggaattaacattggtgtcctaaagaggaggcatgtaaaaatctgcttcaccagcttctttatcaatgctcattccaagcttcaacatcctgggaatcctggcaccgaaagtgttgatatcatcaaggctgaacccag

SEQ ID NO: 72814 - DNA, 390 bp, Glycine max
  Clone ID: PAT_MRT3847_36766C.1
aaaaaaaaaaattttaaaaaataaaaaaaaaaaaaaaaaaaaaaaaaaaaaaaaaaaaaaaaaaaaaaaaaaaaaaaaaaaaaaaaaaaaaaaaaaaaaaaaaaaaaaaagggggggggttttattttttcaaattttaattttacttactttcaattgaatagtttttttttttttttacctaaatttaattcaattgccgtggttttaaattttcaatgattggaaaaacaataacctttacctaacttaattttatttgaccttacatgccctttttcctttttttggggtttatattaaaaaaggaaaaggcccgatcgccttttctattaaatgattatcttaaatgtgaattggaatgggccctgcattgtacattaatttaac

SEQ ID NO: 72815 - DNA, 199 bp, Glycine max
  Clone ID: PAT_MRT3847_36767C.1
tgacaagacctcccccgataatgtaagaaccgtgttcttgcgacggtttcttgcgcgcctcaagggcaacactagcataatccaactgtctggtcaagttttctcaagcaggacagggaccttctgtatctataaaaacaacttgcaaaatctggcccactgctactaggcgctttcgctcataaaaaagtccagggac

SEQ ID NO: 72816 - DNA, 390 bp, Glycine max
  unsure (1)..(390): unsure at all n locations
  Clone ID: PAT_MRT3847_36768C.1
gattcagcagagaaatgaaacacaccactctacaaaggagattgcagggacaccagggtacatggctccagagacctttctcacaagtagagcaacagtggagacagatgtgtatgcatttggggttcttgtgttagaggttgtgtgtggaaggaagccagggagtgtgtatgcacaagatgactacaaaaacagcattgtgtattgggtttgggacttatatgggaagggggaagtagttggtgttgtggatgcaaggctgaanaaggaggagattaaagaggaagaagtggagtgtgttgttgttcttggcttggcttgttgccatccaaacccaccccttggccctccatgagaactgttcttcagggtctgaatggggaagccccc

SEQ ID NO: 72817 - DNA, 144 bp, Glycine max
  Clone ID: PAT_MRT3847_36769C.1
ggaattggtcatgtagaccaccaatttctcagccatcaaagtggcatgatgcatggttctgctatgaagaatccatcacgaagtccccattccatttctgggactaccaatggacacttttgtgagctcaagccttctttcagt

SEQ ID NO: 72818 - DNA, 406 bp, Glycine max
  unsure (1)..(406): unsure at all n locations
  Clone ID: PAT_MRT3847_3676C.1
tttnnttttttttgctagcaaaacacggaatttaagtgggggacatttatttgagcatgcatgccttgttcttccaagaaagggatgttaatatgtgcatatatacacagggtattatggtttctcagcctgcatagcctctaaaaggcattagccacatttcatccggaagacatttaacacaatcgcgaagaaaaggagcaaagattattttgttcatttcgctctttttatgcacaactctattctattggttcccttctaaaaaaacagttttaataattaacgctcacaagttgatgatgttcaaaaaaatcagggcgaaaggtacataaaaaattttttggcctgaaagcatgttaaaccttcaaccatactcaaagagcactattttttttgcggttac

SEQ ID NO: 72819 - DNA, 595 bp, Glycine max
  Clone ID: PAT_MRT3847_36770C.1
gcttgaacactacaattagaatgcagacattaaataaaccggggcctcacaacgcaccaacgtcctggctctcggagcgcttaccaaatatgttatgaggggttccgactaacacaacacattataccactaatgattgaaagcactcatgccaccgggggtcataaaacccagttctgggaccaacaggcgcaatatgaagggggacactactaactttgggcgaataacaagctacctataatagaagacccaacagtgcagactataaactcaccattaattgtaaccaacatcccttgatgaaccatgccgcacgatctacttgtttttttgatcacactcgttgacctctggtacgactaggatccttcttgtgaacgtttttgacgactcccacagctacaggtggacacatgtccctaacagcaaacctaccaagtggaggatactcggagaaagtttgaacaaccatgggttccggttggaatcatcttaacaaaaccagcgtcaccgtggctttagaaacttgggctccttataaagctctttgccggatcgcctgacaatcttcgacctgagttcatcaaacttg

SEQ ID NO: 72820 - DNA, 441 bp, Glycine max
  Clone ID: PAT_MRT3847_36771C.1
ctcgagccgctctccaccacctctggcctctgccacacactccatcagcactcccgctctgctcctccagtcactgcactggcagctctgtctccccactaagcccattcatcactccactctcagcgtcgctcgcccgcggcctgcccacaaacaaccgccacctccgcccttggggtcccaccacgcagcaatccaccacagagtcgcttcgacaactgcggtatatgtattcgcgccaaagtcacgcttttcgactcgagcctcctcccgagcaatcatttcgcgatacgcggaaaccgagcagtaaccaccactgtaccaacggctagcccacttgcctacatcctgcaaacacacatccaccccaatattacccggacagtgcatctactgcatgtctctttcggcctacctcaacataccaaccttttctatatt

SEQ ID NO: 72821 - DNA, 402 bp, Glycine max
  Clone ID: PAT_MRT3847_36772C.1
ggctcgagatttcccatcttgtgagaaattgttattgatggcgcgctgaaacttgttggattgcccatggaactgttacatggggtgtgagtgtggatccttatgtcatgatcatcattgctcggtgatgtgctcatgatgcctatatcatcctggtccactgcatgaaagatcagactagggtctaatgcatcagatggattaacatgaccgctgccataatgaaacggagtagctttcaccaacctcctagctgtgtattaaccaacttcttccggtaatagatggtaccatggtatttgtatagctctggaattgatcgttcgagctgctttgactattttgaggatccagtgtagaatttgggttgccaatacatctattcgtctattatatgtatat

SEQ ID NO: 72822 - DNA, 506 bp, Glycine max
  Clone ID: PAT_MRT3847_36773C.1
gcacgagattcctaaaaatttagaattactctagtatatatccattattattatatgctaatgttattgatactttaataactggtctaatatttacatgcttacattaaatacattttaaccatatattgtcaagatcaataaccggtaaatagtttacaatttatcaaaaaaaattccaacaaaaaatttcaaaaattaaaactagtttttagattgtaattttagattattttaatttttttcagttttaaatataaaaaacgtgagagtactctttacattagactgtgattaaagaatttggacctttgccattttacatttaatagcatctactgtgagaatttcttatgtcttcttgttcattgcatcatatggtttcaggtgaaagatattaatgccagactccagggaatccaaccaaaagttcgctcttccgatggtattccaggtggatatattaccggggaaattaaacatcgagtgacgttaatggaagaaga

SEQ ID NO: 72823 - DNA, 315 bp, Glycine max
  Clone ID: PAT_MRT3847_36774C.1
aaagaaagaaagaaaagattgattaacaaggggggtttatgcagctgctgatgcgtgcaagtaataatagtagtgtatccaaaatggaagaatggaagaagaagagactcacaaaagaccacttttattattcaatttcctctgtttgattataatacttactattagcatcttttttatataaccaatttttttttttttaccctctctcataatttttttaggttatttatacttatgaaagtttccatactgggttgtgtgttctttatttcataacccagagtgggaccactctttctttaatttttattt

SEQ ID NO: 72824 - DNA, 1101 bp, Glycine max
  Clone ID: PAT_MRT3847_36775C.1
gggggtggagtttgctgtgaagcgcatttctcatgaaaatgatggtttgcgagagtttcttgctgaagtttcaagccttgggagactgaagcaaaggaatttggtaggtttgagaggttggtgcaagaaagatgttgggaatttcttgttaatttatgattacatggaaaataggagcttggacaagtgggtgtttgattgtgatgagagcaagatgttaagttatgaagacagaataaggattcttaaagatgtagcttttgcagtgttgtacttgcatgaggggtgggaagctaaggttgtgcatagggacatcaaggccagcaatgttttacttgataaggatatgaatggaaggcttggggattttgggttagctagaatgcatagccatgatcaagttgctagcaccacaaaattggttggaacagtggggtatatggctcctgaagtgattaagactggaagagcttccactcagacagatgtttacatgtttggaatcttgattttggaggtcttgtgtggaaggagacctttagaagagggtaagtcacctctggtggagtggatttggcaactaatggtacaagggcaagttgagtgtgcacttgatgaaaggctaagggctaagggagatttcaatgtgcaagaaatggagagggtaatgcacttgggtttgttgtgtgcctaccctgaaccaaaggccagacccacaatgagacaggtggtgaatgttttagaggggaagaatgaggtagacgactcagaaattgagaatatggatacctatttgctccaacagttgaaatcaagggatatattgtctgaatattctcagtattttagctatacgtcacacccaactttccaagatattcgtcactcttcctcaatgtctcttacttggtccgaagttgagggtaggtgaatctgtgtcatgaatgacaacataggatttgttcattagctcatggttgcatcaaacattggattcattttctagcagcaggaattggatttggtgctaccggagactgtgaagccaaaacgcatgtatcatttagcaaattcatttatcatctaatcggattggtttgg

SEQ ID NO: 72825 - DNA, 533 bp, Glycine max
  unsure (1)..(533): unsure at all n locations
  Clone ID: PAT_MRT3847_36776C.1
ccnnnttttngtctttgttttcgtttccgcccggaaaatcccaattaaacccccagcaaggggggtaattctaaaaaatgccaaatttgacgccattaccactagattgacactgacccctttcttgcgttccattggaatctgctaaaaggacatttattcttacctaacaatattaagaaggagccccgaaaccggcctttccgtaactcagatatgaacacacttgtagctttctacagctggataaccttgtgcgataaaaagggccccgcgaaaggatcccacaaaggccccacaggctcgctctggtctgacaagaacttatacgcccccctcggtagcgaacagacaagaagctggaagggtggctaattacctaaaatgcatgaaaaaaagaccccgtacaaatacctagtattttgaccagccgaatccctacactggaacaccaatgggtccagctttagttgactctaaacaatcaccttgtgatctgggatccctcaccatacctgacttgacctttcatt

SEQ ID NO: 72826 - DNA, 854 bp, Glycine max
  Clone ID: PAT_MRT3847_36777C.1
tacggctgcgagaagacgacagaagggtacggctgcgagaagacgacagaaggggattccattacagaagaagaagaagaagaaaagagaagaagcttcttcttggttaccttgacagacagagagtggagcaaacgacaaatcagcgagttggaacattttgtgtttggtggagatgcctattcggagcttggtagaagtggagccaccaagcccactgagatacttgatcggcgccgccgttatgatgatcggagttgtgttaccagtcggttacatgatgttccgtaacaagcgcgtcccctcctcttcctcctactccaaacagacgaacaaggttttgatttgatatagagaattggagatgtgctgctgatggtggtggtggttatgatgtgagaagcctctggtttagtggatttggattgattagcttagaggcctcaacagatctaccattatttgttcaattgtaaatgcattttgacatcccaaatctgaactcctatacatgctgcttgtctttccattaagatactcctgactcaatattgtgtagcacaacaaattttcaatgcacgttatttgcttttatttatttattccctttaagaaaaaaaaaaaaaaaaaaaaaaaaaaaaaaaaaaaacaaaaaaaaaaaaaagggggggcccccagttaggtgcctttttaacccggtatttattaaaaaaccggtccgggggggcccccctttttttttttttttggggcgggttttttctttggggaaaccaaggaaaagggttcttcttggggaaattggggccccataacaatttcccccccttttttttcccaatattttttttttt

SEQ ID NO: 72827 - DNA, 551 bp, Glycine max
  unsure (1)..(551): unsure at all n locations
  Clone ID: PAT_MRT3847_36778C.1
ccgttacagaagaagagagcanaagcttcttcttttttataccttgacagacaaatcagcgagtgggaacattttcattttgtgtttggtggagatgcctattaggagcttggtagaggtggagccaccaagcccactaagatacttgatcggcgccgccgttatgatgatcggagtagtgttacccgtcggttacatgatgttccgtaacaagcgcgtcccctcctcttcctcctactccaaacagacgaacaaggttttgatttgatatagagaattagagatgtgctgaggcctgatgatgatggtggcggctatgatgtgagaagcctatggtttagtggatttggattgattaacttagaggcttcagcagatatgccatttgttcaattgtaaatgcattttgacttcccaaatcttcttagtgctttttcacttcattctgaactcatatacatgctgcctgtttttccatctagatacacttggtcttcatattgtgtagtacaaaaaaaattcaatgcacgggatttgcttttatttgttta

SEQ ID NO: 72828 - DNA, 314 bp, Glycine max
  Clone ID: PAT_MRT3847_36779C.1
cttactcataggagagcgtgcgtgggcaaaactttacaattccagtgcaagcagtgagcttttcttttaggccgtctgggacaggggggattgtggggaatggggggggttttggggagaaacaacagcaggagcaggctttaaagggaggagtggagaatataccatctcaagcatttgcaatatgatgttgctgcgtttaatgagagccagggttccttcaaagcttaggttctgatgcatgggacagaatcctgtgataccttaaagcctgcctgatatgggatggggggggatatcaagcgtggagcatt

SEQ ID NO: 72829 - DNA, 382 bp, Glycine max
  Clone ID: PAT_MRT3847_3677C.1
aagtatatatttaattccccccctgcagggaaagcaagagaggcgtcttttagttataaaaaaaacttacaggctttctccacggggtggctttttttttaagcgggctactaaactcattagccccaaacattttaaaaaagccctggaaaaaaaaaaaaaaaggggtatttttttttttttttttactggccccagggcgaaataattaggatgaccccctaactaagggtcgattaacgagattgcaatacttgggattggtgttctcccaacccccaaatggggaatttttttttttatgccggggatgtgaacatgcaatttttgtggaaaaccccctatttttcccggtggggaaaggcaccgccccccaattggg

SEQ ID NO: 72830 - DNA, 958 bp, Glycine max
  unsure (1)..(958): unsure at all n locations
  Clone ID: PAT_MRT3847_36780C.1
aattcgaagcgcaaaacgagtagcaggatctgttgtttttgttctttttcgttttctacgaggaaggaaaataacaataacagaggaagaaagaaaattacacagtttcaatttcagtatcagctacactttttagaaatggctactctatcaagcttcatcgctacgccgaagaatcccaatacccactttctctcaggttcctcattgacgatggacaaatgcttcttgaaaatcagctccagtgaacactttccaggttcctctttaaagactaaagcaacacgtaaccagccacttgttattcgagcaggtggtgatggtggaagaccaagtagtggaagtggttttgttggtggttttgtattgggaggactaattgttggagcattgggttgtctatatgcacctcagataagcagggcactagctggagctgacagtaaagacttaatgaggaaacttccaaaattcatgtatgatgaagaaaaagctctggagaggactcgcgaggtgctaactgagaaaatagcacagttgaactctgccatagatggtgtttctgcacagttgcggctagatgaagactcaaatgaaattgccctgaactcagaggaaattgaagcttccatataattaaagcaatttacgatgtctaagcacagattatcatctctttttcgtagttaagaaaatactaactttggttattggattaaagttttaggagttaagtttgcttatgacatttaactatttctttttataatggttcgttgtttacatatggtatatctagtgagaatactggtttattgtgagaaataagaactataaatttgaattttgatcaagattaaaaaaaagaaagaaaagaaagaaagaaaagaaaaaaagagggccgcgccgtcttctagnggnatnccagagncttacgtacggcccgtgccatgcgacg

SEQ ID NO: 72831 - DNA, 388 bp, Glycine max
  Clone ID: PAT_MRT3847_36781C.1
gcctcgtgttacgcttgctcttggtctgttcatcgtcaacggaattactgacaatgattttatctccagcattgatctttatgtgattgtcaccttctgggcagcacgatacaaagagcactgtgcgacaatgatgctggatccaagtcccaatggattgagatctttattttcactggctctgactctggcatctgatcttaatctagagatgatggataaagacatctacagtcgtgatgattcacttggcgtcgtgaccatacatgtggatccagtgtttgaaccagggtgtgttcctcaaactgcttgcaatgatgtgaatgacaatgaatgtggtggagagatcagggaggcctctacttctgctgtagagataaatgacgat

SEQ ID NO: 72832 - DNA, 211 bp, Glycine max
  Clone ID: PAT_MRT3847_36782C.1
tttaaacaagtttggtaccttgggaaatgacgtgcactcaatctcttgtttgtcgactcttataatccataacgcttgtgcaggccggcattagctacagaaagggcatgttacgcacagtgcgtgggggcgtgggtcacatggcacttttgtgaataactgctgactgcatactatttgaacgattgtatcagaaaggagaaatgcaggg

SEQ ID NO: 72833 - DNA, 162 bp, Glycine max
  Clone ID: PAT_MRT3847_36783C.1
atggctaacattgaaaggtggataatattaaccatgctccagcagcgtccaaagcatgagctcagcgacggtcagaatctgcaaggacattgttacagtgattccattaaacctcaattagagcatcaagcgaagcagaatcgacaaattgacgcgtggtga

SEQ ID NO: 72834 - DNA, 408 bp, Glycine max
  Clone ID: PAT_MRT3847_36784C.1
gaggtgtaacacccaaagtgttctctcattgcttaaaaggaggagagaacggaggaggcgtgctagttcttggtgaaattttggaaccaagtattgtttatagtccacttgtcccatcacagcctcattacaacttaaatcttcagagcattgctgtcaatggacaacttctcccaattgattcaaatgtatttgcaacaactaacaatcaaggaacaattgttgactctggcacaacattggcataccttgttcaagaagcttacaatccttttgtcaagctataactgctgctgtgtcacagttttcaaaacccattatttcaaaaggaaaccagtgttatctgctatcaaacagtttctgatgatctcaattgaatttatgcttattcaacgtaagtgatatatt

SEQ ID NO: 72835 - DNA, 485 bp, Glycine max
  Clone ID: PAT_MRT3847_36785C.1
cctctgcgaaaacgacacagagggacagcagaacagaatagctcatgcataataagcttgggcttcttcaacacagacaaagcatcaatttcacgattaccttacaagtggattacgttcctgaagaaggctagcaccttgacgaagattgctccactttgattttgcctgctctgacgattgccaatgaggagcacctaggtgcagatctttggattatcatcgatgacttctgacagacgtgagtttgtggaagatcctaacggtttgccctctgtggaaactgatgctcatggaccctttactcaaagagacctgcctctggctatggatgcttatgattccccttctaatgcgtcaattatcaccctacaaacatcaccgggagttaacggtaagactatcgatcatacaaaatatatggtggattgtctggctcgtaccgtaaacaagattatgggggtcctctccatctaaactttggg

SEQ ID NO: 72836 - DNA, 323 bp, Glycine max
  unsure (1)..(323): unsure at all n locations
  Clone ID: PAT_MRT3847_36786C.1
ttcctntatattctctatcaaatacaaacatagaattctaatatcctattaccttgcactttcatatgaatctaccctactttatcatattcttgaacatcccaaacctattcaaactcattctcatcttagttctaactctcatacaacttactatcaaaaaaattatctctaacttgaagaccttatcctatatcacaacatttttgaaaataataatcctctaataactaaagattttcataattattcaaccccaaaaaatttttaataaacctaacaattctcaaccattgtaaaattcacttatacctttttccttt

SEQ ID NO: 72837 - DNA, 340 bp, Glycine max
  Clone ID: PAT_MRT3847_36787C.1
cccacgcgtccagcttcaatggcctctgtttcaacaactagagagagggtttctgcgctcctgctcttgacgctgcatggtctctacatgcgaacgataagttacttcctcgaataaactctgagtatttcgcccgtcctccttaggaggggtgtcacacgtcacaacctacatggggaagaacactacatctttaactgtgagaccaatactgaaaaatgctataactccactgaggaatacctgcatggccagcaatataaatcacactccagtacagataacgcctagctcacctttatgcctcatacctcgaattacatccaaaccacacatttga

SEQ ID NO: 72838 - DNA, 348 bp, Glycine max
  Clone ID: PAT_MRT3847_36788C.1
gaacgagagccatgcttcggcccacccagctgaataagctcccactactgaatgtggtggtgaccaaaacgccaacgctcctatagtgaggataaaggatgccccatgcatgactggcactgacggtgacctttctctgcatgcatgtcagtacgattacaatgctgctgcgctcgccatcatggcctccactagcgatatcccatctgtcactgcttattgttaccttgatgctgctgccggcttgcaggctttgcggagctcttcattgcctattactgatgtgaatgcccttttactaaggcgctctttgcacaactatcgaactgtcagaatgcttacagtttc

SEQ ID NO: 72839 - DNA, 956 bp, Glycine max
  Clone ID: PAT_MRT3847_36789C.1
ggacccaattatctctgccttgttttacaaaaccagattatcagtgaaattgaaacaaccttgctgggtcatttcctctggtgttgccgacataatggagttcaattacaataattatttcacatccacaaaaaaaaatgttattagagatttgattagataggagtagcataaccacatgaactcctctctatgaaatttgtatatatacaagcaattgaaaaaggcatgtgactcttgattaagtacttccaatggagtcaagtaaagacattgaaaaggagctgtcatattcatattccagatcctcaaaaccccagaactcctcttcttgctctttttcttcctctggcattttccacttctctatatccgtctctccttcctccattatctctaatacctcactcatggtaggtcgccaagttgaagatgcccgaatacaaagagaggcagcgcaggcaaaactttttaactgagtcacatcataagccccctcaagccttggatccaccaactcttctatctctcccttgttcaaaattggtttagcccagctatgtaagctttggtgagacccatccactggttttctgccagagattacttctaacaagaacacaccaaaggcaaacacatctgtcttctcatcaacaactccatgcaagtagtactctggggccaaatgtccaaatgtcccttctataggggcaattgaatgatgagtccattgagatggaagccactttgctagtccaaaatcagatatctgtggttcaaaatcctttgttaacaaaatgtttgaagcttaatgtccccggtggattatcctcctcttgcaacccttatgcaagtagtgaaggcctcgtgcagttccgatggctatcttgtgcctcgttttccaatctaggggaggcaatctttcatcatgaagaagagatgcaacagaacctgtg

SEQ ID NO: 72840 - DNA, 321 bp, Glycine max
  Clone ID: PAT_MRT3847_3678C.1
tcggaattcggctcgacgagcaaactcctaggcgcaaaatgacgactggagatgaaattaatcctagtgaggtcgaggctcagactcaagtcgagaaggaggtacatcctccgaaggggaaggaggatgagcctactaaggccactatacgtacccagacatgggcgaagctagaaaattctgatctcgtgctattcccgagaccttgcaagtatcgcatcccacgtttcaaaggtgaaaacgaggcagttgagaagttggctcaactagacatatttaaaaatgcaaaagttgtaaaagtcaaccttgacaaagcgcatg

SEQ ID NO: 72841 - DNA, 282 bp, Glycine max
  Clone ID: PAT_MRT3847_36790C.1
ggagagggaatcatgaggatgtggggctcatcctaattcaggcgttcaaacacacgttttttttgtccgtacacactcacacatcttgagttcgaaaacaagccaaacagaataaagtatatggagggggttatttctttttactgggcgtttggaaggaatagaacctagaaggagacccatggttaccttaactatctgaataccaacctaaccatagatcccgcaagcagccctacatgggaaaacaaaatatccagcgcggggactgagggggggtac

SEQ ID NO: 72842 - DNA, 381 bp, Glycine max
  Clone ID: PAT_MRT3847_36791C.1
accacaaatcaaaaaattttctttttttaaaaatcaatttatttaaattacccaagctttataatggggttggccccccaattacggaaataattttttcggggccaagggggtttacatgcaatttggtaacccaatcagggggtaagggacaacattttgacttaattggggggaagaaaaacaatgggcccaggaaacaaggcttggggggggggagagaaccccaattgggggggggcctttatttgaagggggggggggggagccccacataaaaactgggaattttttggaagccccttttgtgggaggataaaaatcccaaaaaaaatttttttgggggtgggcaaaaaaataaaaagggttttcccctttttt

SEQ ID NO: 72843 - DNA, 310 bp, Glycine max
  Clone ID: PAT_MRT3847_36792C.1
tttcgtccggatatttgagagttgggctttgagtcatatgttgaattgcaagtggagctgcaaacacactacatacgggctacatttctactatatggacttggaatacgggcatagactctactattaccattctctcatatactctatacttatcacagatcctgaacagcgagcaaaaggggactacaacaacaacacttctccgtaggtacaaaccagggcgtgtgctatggtgcctgaactactctaagtgtcacaaacctccgtacttaaatacggagatgcgcgtagctaggatggttattat

SEQ ID NO: 72844 - DNA, 178 bp, Glycine max
  Clone ID: PAT_MRT3847_36793C.1
cgatcattatcattccaaactcaaacctaattttccaccccttttaatcaacggactcgaaggatacttaagggacaaggcgctcacctcagagtaaacacacactcctaattgtggcaaatgctttaccctatatcaacttttgcacctacccttccaattttcacataaatatcaa

SEQ ID NO: 72845 - DNA, 358 bp, Glycine max
  unsure (1)..(358): unsure at all n locations
  Clone ID: PAT_MRT3847_36794C.1
gttatgttatatatctatctgcatatacaaatgatactctctttttacatggttacttttccatccttttttttgcttacattacgagagaagggaaaggcaaggagtatgtgtatataaacaaaagcttacataaaaaataattgagcttggttaaaagcaaaatatattataaacaatacataaagaaggaaatttttctggtgttgagaaagagaacagaggaaaagacagaaagagcaacgtcagagagtttgccgtagggttctccttggtttgtggtttccggtattgttttgcactgcttcagatacagagaagaaggnaatcctnnctctctctctctctctttctcttt

SEQ ID NO: 72846 - DNA, 247 bp, Glycine max
  Clone ID: PAT_MRT3847_36795C.1
gaggcagttcattggtacgctcaagaaggacttggttgttgcatcatagagcgcttctggattggcttcacgaaaatggaaatggtacatggcgtttcatcttgcggtcctgtcagagcccggcgaaggcgcacaggactggagaggcttgcagggtagtttgttcaaatgataccaaacgaacgttctgcctgttgaaaaataaaaataaaaaacaccatgctagaaataaaaaaacaaattttag

SEQ ID NO: 72847 - DNA, 626 bp, Glycine max
  Clone ID: PAT_MRT3847_36796C.1
aactacaaaaccctcaaccccaatcaatatagacaacgatgccaaaacccctcaaggccctcagggaatcgggccgctcgttttgtttttgggggacttaagggacacaagcctggcttgccccgcaacaaaaaaaaaccaaaaaaggccccaaacgcttgaccgaaaagcccagaacccaaatttccaaacccacgacacccttgacaaccctttgaaaacaacaaaaaaaccaagaggggaacccagggaacccccaaactttccaaaccgttgttacaggaggagcaggccgagcccccatttatttccgaaatgccccaaaagccaacaaaacaaaccgttagcctcggttgaccaacatacacaagggtctttaaggcatgctgccgggccaaaaccaaaaaaaccggacttacccgcccttcccaggccctggaggacctggttttggaaagaattgaaaaaatggggccccaggaaccccctcggtacccgcttttcctgctttccaagaacgaaaaaaacgaccttgtggcctttgaggggggggctggggggacgccttaggctccttaaccgtattaacatttttgggagcaagtgcagcagccccgttaaacgag

SEQ ID NO: 72848 - DNA, 2098 bp, Glycine max
  Clone ID: PAT_MRT3847_36797C.1
ttggcgcgtccgccaaaacaaaatttactaatttatcatagacatgaaacatatataagccttgagaaatttttccaaacatgtgcaggttagagatccacaaacagaaatcccacatgctagggagataaagctgggtgaactattgaagaagaaggcagaggaaggagtagctgtgagggttatgatttgggatgatgaaacatctttgccttttattaagaacaaaggtgtgatgaagactcatgatgaggacgcttttgcctacttcaaacacacaaaagtaatatgcagaaagtgtcccaggttacaccacgagtttcccacactctttgctcaccatcagaagaccataactgtggacaccagagcacccaactctgttcgtgccagagaaattatgagctttttgggtggtgtagatttgtgcgatggtcggtatgacacagagaaacactcactgtttcagacactcaccgaggaatcacattaccatgacttctaccagacaaacatagcaggagctagcctcaacaaaggagggccaagagagccttggcatgatgctcatgctagtgtaactggtgatgctgcttgggatgtgttaaccaattttgagcaaagatggacaaagcaatgtgatgcttctcttctagtccctgccaacactctagaaaatctcattcccacatgctcaagccctcccaaagagaggaattggaaagttcaagtatacaggtcaattgaccatgtgtctgctagccagttgtttagaaagctaactgtggagagaagcatccatgaagcctatgttgaagcaattaggcgtgccgataggtttgtgtacatcgaaaaccaatattttattggggggtgccatttgtggcagaaagataggcatagtggatgcaggaatctgattccggtcgagattgcactcaaggtggtcagtaagattaaagcaagagagaggtttgcagtgtacatagtcatcccaatgtggccagaaggagtgcctgaaagtgaaccagttcaagatatactgcactggaccagagaaacaatgataatgatgtataagttgattggagaagcaataatagaaagtggtgagccaggacatccaagagattacttgaatttcttctgccttgcaaatagggaaaagaagggaaaagaggagtatctttcaccacattctccccatcctgaaacacaatactggaatgcacaaaaaaataggaggttcccggtttatgttcactccaagatcatgataggtatgattatattactctccaattaaatttgtttccccactactttgcataaaagcttatttggaataatgttacttttaattttattcaatattgtgcaagtgaatttgtttaaatacctaatgcataagcatcaaagtaattgagttgtataattgtggtacaaactgtattgatattgtagattaactaagctatgttggtgttgcttgtgccaacagtggacgatatatacatattaataggatcagccaatgtgaaccaaagatccatggatgggcaaagggacactgagattgccattggggcctaccaatctcaagatggagctgatcaccacattataagccgtggtgatattcatgcatacagaatgtcactgtggtatgagcacactggaatcactgaggaattgttcttagagccagaaagtttgtcatgtgttaagagaatgctgtcaataggggatcacatgtggggagtctacagtagtgaagaaactgtggacatggaaggtgtgcaccttgtaagttaccctgtgaaagtaacacaagaagggtctgtgaaggatacggttgatggtggagatcattttcctgacacaaaatctccagtgaaggggaaaagatcaaaattcttagcccctatctttactacttaaccatacaactgagacatggacacacagactagactgaccattcttttgcttttcttttttcacaccgaaataaagtgttcttatttacatgaagctgaatacaagctctacacttgctgttaacagctttatggccgaacgcgtgggcggacgcgtg

SEQ ID NO: 72849 - DNA, 431 bp, Glycine max
  Clone ID: PAT_MRT3847_36798C.1
ccacgtgcccctgcagcttcaacccttggatgatttatctcgtgtcaccaaatcaagctttgttacctcccactatttggatgaacctgatgcaggaccgggtctcaattcctagctgccaccctcactttttctgaagccccaacaaacatcaaattatttatcaatcatatgctcacatatccatcttccactgtttggttttgcctcagaaccttgaggacaaggttctatgtgaacttggcggcaatgttaggatgggcctagggaggcctaaaaataccatcaaacccatctattgatgttattttattttaatttccatatgttaggatgatgacacttgcagggtcatcattagcaacaattaggttataaaatcatactcctcataggctatcttcatcaatgaaaaaatatcattttatttt

SEQ ID NO: 72850 - DNA, 307 bp, Glycine max
  Clone ID: PAT_MRT3847_36799C.1
tcaacatcattctcttctcaatctttccattcctgagttctcagggtggttctaaacaacggcgggcctcatgtattcatggtttttggaactaatggtcatcttatcaaaaaatcttttcttcattgcttctttaagcttgctcaatacattacattattttaccttttttttagttcttttggagttcgtttcattgtgcgctgtcactccatatttgtgtgtacatatttgtcaactatttcttaacacaagtatcatcaaacaatttgtggccaaaagtatatacttaaatgtgtaaaattct

SEQ ID NO: 72851 - DNA, 267 bp, Glycine max
  Clone ID: PAT_MRT3847_3679C.1
ctttctccgagaacaaaaaagaaaaaaaaaaaaatccgcgattggcccttcccttggaaaagtgaaacccaaaattacgaccgaaagagaagagcgttttagaagtgagaaaagatggggttgtcgtccacgaagctgttcagcgggttttttccgaaaaaggaaatggggatcctgatggtaggccccgatcctgctggaaggacaaccatctttaaaaaccccaaccttggaaaaatcgtcacgattatccccacaatgggtttt

SEQ ID NO: 72852 - DNA, 335 bp, Glycine max
  Clone ID: PAT_MRT3847_367C.1
atccggcctccggtacaggaataccatccattcattctttctttcacccacacactcctttatctagagtccgagactcgatagcccactcccccagactcaaatacactcctttgctgatctattcctacgatctgagatctcgatacccccttcaataacgacatcatgctcaccaacatcttcgctgttacggcggccatggccgccaccgcttctgcttttgactgccatggcaactacttcagcttcttcaaccgcgctggacccatgagctaccagcagattgaccctgctctcttttcttggaagcagagccctcattttcactcctt

SEQ ID NO: 72853 - DNA, 981 bp, Glycine max
  Clone ID: PAT_MRT3847_36800C.1
aaagcgaaaaatatcctgtattgaatttcttcagaagcccaaagtgtcacttgtgatggataacaacataataagaagtaatcctcactaatcactacaaattcattttcatcccaaaactctgaaatcagtacttcaagtttcaacttgcctattgaggcatggaagattgaaataagatacactgatagtgatagtttaaatacaaataaatcaaagtaaaacagattcttagttcgtttaaaaaatcttgcttgttctgctctcaacctgtatatcttattcaatattccattagactttacagtcagcagagacagaaagtgcatacttagacttcaggtacatttaatggccaaatatcatatttacatgtgtacagaggagtatatattgagacttcgggagaggttaaccccctaaatggaacttcgtagcttgagagatttgtctctggctcttggccaaagatacccggggctaaccaaaaatatatatatatcatattcacttcgcaatatgggagatgaatgcaaatatggaaatcagagaagagggcatcctttggcatgtacatctggagctgtggggcatttggccaaatggcagtgatcagcatcaagaccccaccaggttggaccaaaaataccattgcagcccacgatgccttgaactttctataaacataaaaattgaagaagattccaacaattccccatgtaatataactaacagatctgaatggtgggatattggatgcacatgcaatgatgatgggaaagttgatgagttgaatccacttgtggttggggaatttgcgagaaagcaaccacacaggaaggggtgcaagtagaccaatgaggaaaaaccaattcatccctggataaacaccatccttggtaaacattctctttggtcctactactccccatattattgaagcattatagaacacatcatcaccagggcatgtccatggac

SEQ ID NO: 72854 - DNA, 430 bp, Glycine max
  Clone ID: PAT_MRT3847_36801C.1
tcggctgctagaagaccacagaagggggctcgcatgcaagctagcaacttgtaggggtgctacaaagattataattcttcatcattgcacgtttcaaccattttgaccaaataccaataataatctttctctcctaaacatgaaagtataacccatttatcattgttggaaaaaatcccatatctcaaaaaatgaaattcacgcagagtgacacgtcagagatgatacgcatggcacttgctattgtcgccatttttgacgacaccgtttactattactacttcaccaacaagccaacaagggtgcttccattctgagaacatttaagaattcaatcttttttaaacgcatctttactcaaccattaaggttttcactttccgattttttctttcctactcctaacttaatgttctgactttactattta

SEQ ID NO: 72855 - DNA, 532 bp, Glycine max
  Clone ID: PAT_MRT3847_36802C.1
ggaaaaaaaaaaaaaaaactttttttaaaagctaataaactaacctggaaaaggggcctggcaaacttaaaaaaggcagaaaaataaaggtcttaaaccggcctttttaaaaacaaaaatggaagtttaattgggaccgggggcccttatttaacaccaaataaggcctcgggaaaaaataaatggaaattaaccgggatttggggctgttaagttttgggaaaaaaaaccccccaaaattttaaaaaccggggggggttcggattttaaaaaaacagggaaaaaacaaaatttaaagggggggcaccaggcctttaaggggttcttgggttaaaatccgaaaccaaattgggggggaaaggcctggcataataaagggaaggggcagttccaccaaaaaaagggcaacccctttaaaacacaattaggtcaagggcccctcccccggtttttcccaaggggggaaaaacgggaaaaagcgaagcttaaaagaggttcgcgggacccaagggaaccatttggcgctgccccc

SEQ ID NO: 72856 - DNA, 1683 bp, Glycine max
  Clone ID: PAT_MRT3847_36803C.1
tacggctgcgagaagacgacagaaggggaccacaatttcaacattaatttgccttcatctttctctatcttaagcttcaccttgcaaagggtgccaaacctcaaatggatcatcaaaacaaacacgtagcagtctttgctttcccctttggcagccaccttatgcctctcttaaaccttgtcctcaaactagctcattcccttccaaattgttcattctcattcattggcacagacaaatccaatgcaatccttttcccaaaaccccacatcccaaataacatcaaggcctatgctataggccttgatgttatttgggatgtggggttttgggaaaaacccaactgaaaatttgaatctttttctccaaactggtcctgagaaccttcactaaggtatagaattagcggaagcagagacaaagaagagagtcacatgcatcattgcagatgctgtcgtaacctcttctctcctagaggctcacaccctccatgttccttggattgcactttggcttcccaattcatgctcactatctctctctttttccactgacttgattcaccagcactgtgcaagccgtgctgggaacaaaaccatggatttcgttccagggctgtcgaagttgcgtgttgaagacatgccacaggatctgcttgatgttggagaaaaagaaacagttttttcaagggaactaaattcgctaggtaaggtgctacctcaagctaaggtagtagttatgaatttctttgaggaattggaaccacctttgtttgttcaagacatgagaaacaagttgcagtctttgctttatgttgttccacttccttccacgttgttgccaccatctgacacagattcaagtggttgcttgtcatggttgggtatgaagaactctaaatcggtggcttatgtttgctttgggactgtggtggcaccacctccacatgagcttgtggcagtggcagaggcattggaagaaagtggctttccttttctgtggtctctgaaggaaggtctaatgagtcttttgccaaatgggtttgttgagaggaccaagaagcgtgggaaaatagtgtcttgggctccacaaacccatgttttggctcatgattctgtaggagtttttgtgactcactgtggagctaactctgtgattgagagtgtttccagtggtgttcctatgatctgcaggccattctttggagatcaaggggtggctgcaagagtgatagaagatgtttgggagattgggatgatgatagaaggtaagatgttcaccaaaaatggattggtgaagagcttgaatttgattctggtgcatgaagaagggaagaagattagagacaatgctcttagggtgaagaagactgtggaagatgcaggtaggcctgaagggcaagcaacacaagatttcaacactctggtggaagtaatttctagatcttaatagcacttctttgtttgcatgggttattttatttcaaaactattaaaatgatgtataacttgaatagattctcgggttagttgtgtttgtagttaactttatgctttttgttttgtttgtgaattagttccccgacaagatcctaaaataagtcggcgatttgtatcgagcaaagaaatattataagcaaaaaaatatctaatttatcaagtttaataaaaattagttaaatca

SEQ ID NO: 72857 - DNA, 314 bp, Glycine max
  Clone ID: PAT_MRT3847_36804C.1
gggtttgtttttttggctttgagagtgtaaaaacagttatggggcaagcaaagggcacacaagccatttgtgctgcctggcagcacatgtggtactgactgttgggacccgagcgaggcccatgttttgtgaatcctacacttcactgcacagtgtgaggctggatcaacaaaactgggaacatctctcgatacacacagggaaaggatcaactggtggcgggcccacccccaaaaggaccttcggagcacctctgcttgccccatagctgttttttacctcagaagccccctatagggtcaaaaaataaaggc

SEQ ID NO: 72858 - DNA, 369 bp, Glycine max
  Clone ID: PAT_MRT3847_36805C.1
ctccaagcagctaaaatgcctatgcgagccttgttccatcggaatgtccctaccaatcaactgagctcctacaaagatatctgttggaaatcctatgcctctatgaagggcttcacacgaagaatcggcctagaactatcatgactcgcctgccgccggccattggggtgcctacaaattattcaaataaaactcacccagggagagaggtgatatttgaattttgggctacgcctggagattgcaacggcgcaaactaggcaggtcaaagggcatatattcgggccactagcttttgtatccacccatggcagtgtccagccgtggtaacctaattccagcgcaaagaataacggacgccccttaaat

SEQ ID NO: 72859 - DNA, 761 bp, Glycine max
  unsure (1)..(761): unsure at all n locations
  Clone ID: PAT_MRT3847_36806C.1
ggctcgagctcgcgggctcgagcattaatttaccttcatctttctctcagcttcaccttcaccttcaccttccgaattgtatcaaacctcaaaaaatggatcatcaaaacaaacacgtagcagtctttgctttcccctttggcagccaccttatgcctctcttaaaccttgtcctcaaactagctcattcccttccaaactgttcattctctttcattggcacacacaaatccaatgcaatccttttcccaaaaccccacatcccaaataacatcaaggcctatagcataagtgatggaatcccagagggtcacgtcctaggcaaaaacccaactgaaaaattgaatctttttctccaaactggtcctgagaaccttcacaaaggtatagaattagcggaagcagagacaaagaagagagtcacatgcatcattgcagatgctttagtaacctcttctctcctagtggctcagaccctcaatgttccttggattgcactttggcttcccaattcatgctcactctctctctatttctacactgacttgattcgccagcactgtgcaagccgtgctgggaacaaaaccttggatttcattccagggctgtcgaagttgcgtgttgaagacatgccacaggatctgcttgatgttggagaaaaagaaacagttntttcaagggaactaaattcgctaggtaaggtgctacctcaagctaaggtagtagttatgaatttctttgaggaattggaaccacctttg

SEQ ID NO: 72860 - DNA, 412 bp, Glycine max
  Clone ID: PAT_MRT3847_36807C.1
aaaaaaaaaccccccctttacttttttttacaattcttaaaagggggggggaaatttttaaatggggggggtttttttaaacggggggaaggcctaatttctttttttggttggaaaccaaaaccatttgaaaggaaacccttcccccccatttttccaaaaatttttgttttttaaaaaaatttggtttggcctgtggaaaaaaaaaaggtggcgtttgagggtttcccgcaatttcaaagttttgggaaatccctaaaagaacattaaaaggcgggggttggttgggttttttaacaagggaactttaattccccgaagtttgttttgcccatttaaaactccacattttgaaaccatttttgggaccccacactttttttggaaaaaacaattcccaccaatgggggtt

SEQ ID NO: 72861 - DNA, 431 bp, Glycine max
  unsure (1)..(431): unsure at all n locations
  Clone ID: PAT_MRT3847_36808C.1
gggcgaggagctangnagtantcataaaaanttaagggcacaacagaagcnngaattcgtctcgcgcctcttcggcgatggggtcctacttgccccatcccacgaaggagaacaatctcgcggacttcttcatcgatcgcggtacgggtggcccctctgccgctggatccaagactgccgctgctcccatcgagcgagtcaagctttctcattcagaatcaggatgagatgatcaagtctgggtcgattgactaccccttacaaggggatcaccgagcgtttctctcgagtcattgctgaggagggattcaactcgctgtggagaggaaatcttgccaacggttttcgatacttccccactcaagctctcaacattccttttcaaggatcagttcaagcgaatgtcccgatattcccaggctaaggatgga

SEQ ID NO: 72862 - DNA, 510 bp, Glycine max
  Clone ID: PAT_MRT3847_36809C.1
gattagatattccttgcctccttgataagagaaattcttccatttttcgttattaaaaatttctgatgaaggcactaatcactctgaaagttaagaacttgtacaattaaaatcagttgaaaaggttttcttgtggttgcagcatgctactagtctgtatgtggtaaaaaaatttagcaggggggtgtaacaaggaggcacaattccatgataagcattccatacaatttatggttgataaactttggaaggtagtcagacagaacaggaaatctcaaactgcaagcgttatatatttgaacgtaccttgagatgtatatatcacaaagaaactggtattggtttgtgtttgtatccttgagcaaaccaatttggaagtggttgttatttttttatttgttacaagtcgtgtgtcatgtttaatttgctttgtatttcatatattcttttgctgcaaactttaagaggaatgtacggtaaaaaaaatgcaaattgtgacagtaattggaa

SEQ ID NO: 72863 - DNA, 441 bp, Glycine max
  Clone ID: PAT_MRT3847_3680C.1
gggttttatttgccagtcagagtgagggagtggcactactgcagagacaaggatcaatgacaccaaacagacgggaaatgaatcatggagtcacagctgccggaggaccaaccacctctggattatcactatggcagaggggcacctgccagcagtgcaaatgtgtgctcgcactcaaaatgcaagtgctccttcaccacctgctgataagcaaaagacagcaccaccaagcatcccagcacctgcaccacagcaggggccacaccagcacctgcaccagcaccagcaccagctgataaggaaagtccaccaggaatgcctggaagtctcaaaaacagataccatggcgctgatgggcaaaactgtggctacttgatcactgatcggccatgtaccatggatcatgctgccccccgtggtggatcatgcttgcattacctc

SEQ ID NO: 72864 - DNA, 347 bp, Glycine max
  Clone ID: PAT_MRT3847_36810C.1
aacacgcgtacgttcggctcctataccacgacagtttgtgatcccataacatacacaagcaaatcctagaaacttcagctgagatctatagggctatcttaaatttcacaaaatgaataacgtgtttgtcacatttctagatctgctagttgtatatgttcttacagtgacagcctcagagtcaaagccaccagtcacaacaaattcagcaccaaatgactacaattgttcacaagcgatgaataacttcattgtttcgtgcctaaattaccccattggtgaacatcctgttacttcaagtgttcgcttccaaaatgttaatgcatcgaatgcattaacacaaacac

SEQ ID NO: 72865 - DNA, 371 bp, Glycine max
  Clone ID: PAT_MRT3847_36811C.1
gccactcatccgctccttcatacttttcctcccttaagattctactctatcactcgcatcacacacactcgtacactctcatactctctctctctctctctctactacctatcaacaccaagccatcctaccctaatctctcaatgctaaaactcgcaacctcctccatcctcaccatcacctccctccaccttctctcctccaacatgccacactacccattccatgacattcctccttctctaacacacttgactaaactcatctccaacatctaccccccgaatactccacttacacacattaatcctatatcacccactccctcaactctccctttcattctcacaacccactacattcacccctac

SEQ ID NO: 72866 - DNA, 296 bp, Glycine max
  Clone ID: PAT_MRT3847_36812C.1
acaatacaatatatgtagaaacctgttgaaaagagaggactgttcaagggtcaaagaacatggcaaactctgctattcaccagtataaaaaatttgcgacaactgtttcttctcttagagcagttcttttaaataatggaagtcctttgaacggcttagcgattggagcatctaaggggttgaccaacaaccctgatatcaaatacacgtgaagagctagccttatatgcctctgatacatatgaacttataagaccaaaaattctttcgtttctctttatagacaaccatgcaac

SEQ ID NO: 72867 - DNA, 629 bp, Glycine max
  Clone ID: PAT_MRT3847_36813C.1
ttttcaagtaccaaaaaaagtcttatatagaatattatctcaggaggttctatcacggaaaaataattgagactccattgtccatctaatgtttccaacatcctatctatcacatccaagaggaaacagaaatacagcctaacagttcagacaacttagtgtgcatgtttgtttctctatttggaatgccctaaacgagtatacaaacacaagaaatcgttgcttctcaaaaatgggaacatttgcaattcacttccccgttgcaacaggtatacgaacacaagcttagaaggtgagaggtaataagtcaacgaagaactaatttaatcatttaattttcattattggaagatactattttcttcttcttgtgtttgggcttgacggcatccttgagagtcttacctttgttattctgcccagcagttagagccttgttaattggggtagaatctgtcttaatttctagggggggttccttgggcttagtttcacgtcttgaatccttttgtttactaggaactgacggtccaactcgagggaccaccggggaaattctttgaggctccatccttactttgctcttgtcctgagggggaggcttcacattccataggactttctttctt

SEQ ID NO: 72868 - DNA, 251 bp, Glycine max
  Clone ID: PAT_MRT3847_36814C.1
aatcaaacctttaacaatttagctgattgcatgaaatatgcgggcatcaagggcaccaattgtacatcataaggcctaagtattaccatacacgatattatacaatgacaagctgaaaccccaccatagcagacataaacaactgaacacagtccaaaggctcattggatacctacacattcaacctctgcacacaaaggagactccacataatgagtgcaagacaggtgctattaatttgaaaataaacc

SEQ ID NO: 72869 - DNA, 1131 bp, Glycine max
  unsure (1)..(1131): unsure at all n locations
  Clone ID: PAT_MRT3847_36815C.1
nnntctgctgcgagaagacgacagaaggggatctcaatttcttttctctttgtcgcaaagagaagagatctgcctcctttttatcaaatctatctcttcttcaagaatagttgaaaatggggctgtctttcaccaagttgttcagccgactgtttgccaagaaagagatgcgtatactgatggtgggtctcgatgctgcgggtaagaccaccattctgtacaagctcaagcttggagagattgtcaccaccattcccaccattgggtttaatgtggaaactgtggaatataagaacatcagcttcactgtctgggatgttggaggtcaggacaagatccgtcctttgtggagacattacttccaaaatacacaaggacttatttttgtggttgatagcaatgacagggaccgagttgttgaagctagagatgagttgcatagaatgttgaatgaggatgagttgagagatgctgtgcttctagtttttgccaacaagcaagatcttccaaatgctatgaatgctgctgagataactgataagcttggtcttcattccctccggcagcgtcactggtatatccagagcacatgtgccacatctggtgaagggctctatgaaggacttgactggctctcaaacaacattgcaaacaaggcatagagatttgttagttaaatgcaaggaagttgagcttacttcggccattatgatctccagtttctaattttcttgccctacttagattttcattacttgagcatgtatttttcttgaaaaagaacaacggtttgctactgaagaataatttgaatttttttccatgtataaccaaatagcattgtttactatttgatttgtgaagtcaattgaattatatgaaacctcgtattatgtctatgattcttacgatcatttgtattcgactgtgtcccggcaaattgaagaaaagaagacattgtttttattggtccaattgaatatgttagggacattttgtggaatgccgctatttcttgcttattatattatgaggtgtttgatactatatcatagcaatcgtattgaatcctgtagaatttttacatgattaatgaattacaaactatacatgacgcgatcatgcttttcc

SEQ ID NO: 72870 - DNA, 1089 bp, Glycine max
  Clone ID: PAT_MRT3847_36816C.1
tcgcccacgcgtccgtacggctgcgagaagacgacagaaggggacccaaaattgaacaagaagtcctgagaaggcatctagaacaaagctctgaatctgattttgaaaactggaacgcgtaaaatgaacggtacccctccctcataaataaaatctactactaaacgctcttctcttctgcaatcaatttgcaaaccaaacacaacacaaggagaagaaccagatctctctttctcaaatcaccaagaatagttgaaaatggggctgtctttcacgaagctgttcagccggctctttgcgaagaaggagatgcgtattcttatggtgggtctcgacgccgccggtaagaccaccattctctacaaactcaagctaggagagatcgtcacaaccattcccaccattgggtttaatgttgaaactgtggaatacaagaacatcagcttcactgtctgggatgttggtggccaggacaagatccgtcctctgtggagacactacttccaaaatacccaagggcttatctttgtggttgatagcaatgaccgggatcgtgtggttgaagctagggatgagctgcacaggatgttgaatgaggatgagttgagagatgctgtgcttctagtttttgcaaacaagcaagatcttccaaatgctatgaatgctgctgaaataactgataagcttggtcttcattctcttcgtcagcgtcactggtatatccagagcacatgtgccacatctggtgaagggctttatgaagggcttgactggctctcaaacaacattgcaaacaaggcatagtgattatcggtcatgggttgcatcaaagttcatttgagtttagcggttgtgacttccaatgtttgatgtgcttaccctgtttagaatcttattttctctagcatgtattatttgtcttcgataaagaacagattgtctactacctaatatcaaaataatttgcattttttctccgtgtacaaccaaaaggcatttgtcttacccatcgatttgtgaagtcaatttatcattgaaatttttacatttattcataaatattaaacataaaattaacctttgttttct

SEQ ID NO: 72871 - DNA, 179 bp, Glycine max
  Clone ID: PAT_MRT3847_36817C.1
catctttactctgacacaatacagtgttccaagctcatcttgtacccttcctgcaccatccatggaatttgctgtttctttgagaactcagattcttctgattgggggatggtagttaaacatcaagatctgggtaatagctgtgccttttttttttcccctctaggaaggaggggaaa

SEQ ID NO: 72872 - DNA, 646 bp, Glycine max
  Clone ID: PAT_MRT3847_36818C.1
aaaattatctgacatttgagagcttggagctgcgaggagggtgactaattgactgtgaggccaactggcatggtcttgatgtggatgttgcagggagctacatgtacgtagcacagatgattgatcacttcattgatttcgttattgcgcctcccagggcggatgatatccctgatcagtacctatgggaaaaggaaactactctttctttttcggaacataccaagggcgggacttcgtagctcaagaacaccacaggctataccttgaagtgcagtgccttatcttccttctgcctttccctgaatatacttctcttacttgcggtatatatcgccatggaaacagtggactagtaaggcaacactgccaatgaagctgcttgctattcttcttccttcccatattactggatctacccttgacttctcggagtcagggcttatccgatggagactatgtcaggcttggttgccatgaagaagatgatctcatgatggcggtgtcatatttgaagagcagcaaacgaagatctcgtatatgtcttgtggggacgatctatgggtgctgttactagtcttgtttatggagctcaagaccctgatattgctggaaaggacatggatagtgcctttcctgacttata

SEQ ID NO: 72873 - DNA, 551 bp, Glycine max
  Clone ID: PAT_MRT3847_36819C.1
gccatatgcaggtgatttatcataagttcaattttaaattttgttttatcgattattcttataattttctttattctttaatttatagtcaagtgcttgagtataaatataattatggtgagcctctttattatcatcagtatctttggatctcgttacattgctaagtcaacttcgcaggctcccctttgggtccaaggattagttaaaaatggctttgttggaaagttccttctgatccaagtatcttccaaagagttggctgatattgattctgaaatggccaaattaaatattcaatctcaatcatcaactggaacaaccgagatggatcaacgatcaagtgattggattctgttgacagccatcttggaccgattatttcttattatttatacaatttcattcattatctaccattcctgattctatctgatttttcatctttttaaaactaatattgtttttgcattttgttaacctttactatttactgcaattctggtgcaaaaaggctttagccttcttatatgcttggacaatgggcttca

SEQ ID NO: 72874 - DNA, 1360 bp, Glycine max
  Clone ID: PAT_MRT3847_3681C.1
ctcgagccgattcggctcgagcacaagtgcaaattgaactaattgacctagcaaacttctcattaatcgctatagtgctagtgattaattgcaattttgaataataatgactttctattcactacgttataacgtgttttgcttctctattttgttttctctacttattgccatagcctctgctgatctatcttcagatttctatgcatcaacatgccccaatgccctctctaccataaaatctgcagtgaaaagtgcagttgctaaagagcgtcgcatgggggcatccttgctccgtcttcatttccatgattgctttgttaatggatgtgatgcatcagttcttctagatgacacttcgagcttcacgggagaaaagtcagctgctgcaaatttgaattctttaaggggttttgatgtaattgacgacatcaaaagtcagttggagagttcttgtccggggattgtttcctgtgcagatattgttgctgttgctgcacgagattctgtcgtagctttggggtggtccatcatggacaatagggttagggagaagagattcaaccactgcaagtaaagatgctgccactagtgatatcccatcccctctaatggatctcaatgatctcatatctgccttttcaaacaaggggtttacctcccaagagatggtagtcctctcaggagctcatacaacagggcaagccaaatgccaattcttccggggtaggatttacaatgagaccaacattgattcagattttgcaacatcagccaagtcaaattgtccaagcactgatggtgacagcaacctctccccacttgatgtcaccaccaatgtgttatttgacaatgcttatttcaagaaccttgtgaacaagaaagggcttctacattctgatcagcaacttttcagtggcggttctactgattctcaggtcactacctacagcactagctcttcaactttctatgcagactttgccagtgctatggtcaaaatgggaaacctcagccctttaacaggaagcagtggccaaattcgtactaactgccgcaacgttaactaaaaattaatggagaaaattaatcaatgagcattaattgagaaaattaagctcgagaattatatatgctcatccagtcacaatctttatgtgttatggttttaatttcttggtgtatggtgtgatacgtagtcggtttatttttgtagttctccaaaaaatttatgaactggccaaataaagagtgatattattcatccaaaaaaagagagaaagtgttaaaattctcataccacttttttgtttttttattactcataccactaaaaaaaaaaagtgtattttttttttta

SEQ ID NO: 72875 - DNA, 371 bp, Glycine max
  Clone ID: PAT_MRT3847_36820C.1
ggctcgagctaccaggattcatagtctcctttgatacacaaaaacaatagcttattcttcttctacacgatgactatggctcccgatgcttacgacgcacttgcagggaggcagaatgttcaattgtttgtgaacgctgctcgaactggatcaattgagctctgacagaaattgtcgctgcagatggacgagggtaaggatacctcgaagatcactggaatcaatctaggactgccacacgagaggtgcactgcattaagtcgcgcgcgaagggcaaaccgatggttgcgactacctgttaaccgatatgaagctctctgtaccttctcaagatgatgatggagagactgcactcattcatgctactagac

SEQ ID NO: 72876 - DNA, 522 bp, Glycine max
  Clone ID: PAT_MRT3847_36821C.1
gaacggggcgggagctgaattcaaggcttgaataaacattatccttaagacatttgcattatcgaagtttcctattttcacacgtgtgagattttttattgtacagagagcggaatcttataacttcattcaacacttcacaaattgtggtgacaaaagattgattacaactattaaaagatctccccggatattcaaaatctattaccatattctatttttaagtattgaaattttaaataaattctcctcatttttattttgatttgtatgattgaaaaattctccagcttaactcacaaaaaagtcttctgattctattttatatttttacaaattattatttaaaaagttagtcaacatattttttctaaatgaatgttttttacattgaccaccaatcaccctctattcactttgatttgcgttttttatgacttgaacaataatttgcaaacacaattacttcactttactaatcggaaataaactgaaaatatatcaataatttttgcaattatt

SEQ ID NO: 72877 - DNA, 173 bp, Glycine max
  Clone ID: PAT_MRT3847_36822C.1
gatttgtacctaaccatttgttaagataagttatgagaaatagttatgcagatggcctatacggcatttttctttctttaggttttagaagaggaaaattggagttgattgaactgcagaacttcttgatggcaacttctgattattcaagaacagaaattctaaagaaaaaa

SEQ ID NO: 72878 - DNA, 161 bp, Glycine max
  unsure (1)..(161): unsure at all n locations
  Clone ID: PAT_MRT3847_36823C.1
atacgaaataagcaaagaaaaataaaaaaacaatggggaaaacttagcgtttcctctgatgcacagaanacatatcatatgtgagtgagagaatgggaagagaggcgtctatcctaaatctcaccagatgttgtctggtgcggacaggatgaagctgagac

SEQ ID NO: 72879 - DNA, 374 bp, Glycine max
  Clone ID: PAT_MRT3847_36824C.1
ccttaaaaaaatagcgaaaaaggggttactttttaataaaaaaagggcataaatactggacaccactttaccgcagtgcatatattacacaaaaaagcttttttttaaagctaatgctttatttgggacactatttattatggtacacaggctgaataacggggcatcctttccaaataaagatcgcagtcttgttatcaaccatatattattttataagcaatataaggcttcattatggaggcttaaaccgttggtcgggcccctaatgaattggcggaggactccggggcctgaatagttgaaaatcttggttttttgcccgggattttaaggcctgcataaagctttatgtactaataaaaaacaagctt

SEQ ID NO: 72880 - DNA, 158 bp, Glycine max
  unsure (1)..(158): unsure at all n locations
  Clone ID: PAT_MRT3847_36825C.1
nnnnnnnnttnnttttttttttttttttttttttgaacccaatattaaagtagatataactatgtgtaactcatacagagaaataacatcgcatcacattttaaagccccccaatacaaatgtctaatacaagaggggaggggcataaaagagaaacc

SEQ ID NO: 72881 - DNA, 364 bp, Glycine max
  Clone ID: PAT_MRT3847_36826C.1
gaaaaaaaaatatctctatgcgtttaaaatataaagttgaggaggatactaaaccatatgaactcggatcataaaaaaataaagttatttgaaaataggggcggccccctatttgtgtgctcgataacccggtaattaatttcgaacgggtccttgatgacgatccagctttgcctatttggagacattttatagctgggctaaactatgggcataacgcattcccggtataaaatgaaacaccgcaagatattcagacaatattgtggtcgaacttataacagtgaaaactgggggcccttaatgggggtggaaaccaacattaattgtgtggctctgactgtccctttacaaggagggaaac

SEQ ID NO: 72882 - DNA, 153 bp, Glycine max
  unsure (1)..(153): unsure at all n locations
  Clone ID: PAT_MRT3847_36827C.1
cncaaatgctcttcacagattncctanttctctcttcttcaactttctcangtattcgaagaaagaattcngggngtantgaaanttttaatcntttaancctctaaattttcncccanncnnttacccggtttccnaatttggaatnttngg

SEQ ID NO: 72883 - DNA, 475 bp, Glycine max
  Clone ID: PAT_MRT3847_36828C.1
ttttttttttttttttttttttttttttttttttttttttttttgttgatttttttgttttttttttttttttgtttttttggaaaaaacttggttggtatttttttaaaagagcgaaaaaaaggtatgaagagagcagccgggtataaaaaaaccacgggaaaaggctatcgtgagagccaagggaccaaaaaaaatactatggcaccattgggaccattgcgatttcgcgcacaaaaaaaaaaccccccgtactttcaaaaatttggggggtctccggggggaaaattgccccacccatgggcgcggactttaagaaaaccggggacacttgaaagggtttcggtcagaaaaccccccacaaaagccggggaaaacgcggggcattaaaaaaaaactggtctaaaaagcgtctaatagcagggggggcgcctgtgccaaaccaaaggacaaaacccgagcccaccctctattc

SEQ ID NO: 72884 - DNA, 458 bp, Glycine max
  Clone ID: PAT_MRT3847_36829C.1
gccaaaatccaaaggtatgaactttctgttattcatgattgctgcttagatctcgtctgtgtttcatgctgcatgctcattacatccaatatcatgctcattttcaagttattatatcataaaccgtatttatagagtatcctccttctgatttcaatcttcaatcaaaagcatctaaccttgtattggtctatttggaatctctataattttagtattatgctaagtaacattttctattaatgtgcttcattccgttactctttttattctattttttgcagcaaaattattgaaaggggataaattactcatttactctcttacttttgtaaaatgccgggagatttcttatgcatgcataagtatgttatattctgaaggccggctttcatctaatttgcatgtatgttgaaacttaaaacttaaggtgttacgtttcttatgtactatatata

SEQ ID NO: 72885 - DNA, 1154 bp, Glycine max
  Clone ID: PAT_MRT3847_3682C.1
aatatatactttttatttgctgatattaaaaaaaaacaaaaacactccattgtagttttgctttcaatatcgaataagttcagttaaacatgaaaatacgctcatacatagcaaataaaagatggcaaaggccatgtgatcctaatgaagccaattgtatgccagtaaagtagacagatcaatccaatgcttaggcatgcatttcttttcctttttttttttttttaatttgcagcacactagattaggcagcagaagtctaggatgcttgatcagatggtacaatgcgtctgaatacagcctggaaagtttgtccttcatttctagcaaccttttggccttcttcagtagcagaacttaaaagcttcacaactggatctgcttcaagttctttctcagtcaaggcttcgaacatagggtgattctccagacaagacttcatccagtctccaagctcttctacgtctgatattgtgtatataaatccacccaccctcaagaacataagcatactcatctagcaagaatggactgataaccctacggcgatgattcttctctttaaaatgaggatcaggaaacaagaaaaacatctttgagagcgttcctttctcaaagtaattaggaatatacttcatggagttagttcgcaccacagaaacattttggtattgaccaggatttgctacccttaaagatgaaattcgctccttgacgtactcagtcactttgtctctaagttccattccaatcatcaatgtttctgggaacagagtggaaagacttatgagcagccctccaaaaccacaaccaacatcagcaaactggatctttttggaactatcagcttgaccagacaagggaaataactgagggtaatggagagaatagtcaacatggctgggtgaaattggcactgggaagtgagagtcactcagtggattgctgtgtgctcgtgctcgatagaagcgctttcgaggcaatccagttgacttgctgatagttggatttacctcagtctcagacatgtctatttattcaaactaacagagagatttagagaaaaatataaaattctccgatactgattctgaatgctgtgacttcgctgagcctctataggtagcggttgtagcctcgagccgaattccgag

SEQ ID NO: 72886 - DNA, 614 bp, Glycine max
  Clone ID: PAT_MRT3847_36830C.1
taagttttctctatttcacattaattgtgtgtgagcatctttaaggtctctttttaatatgtggtggtgtcggcttgtcaaaaggtgtattttcccaatattgttgactcctggtaaggtgtatgtacttttcatgggttgcattctaagatccaatggtcagcatatcgtcactgtagccctctggtatgtggtaattgtatcttatggcaacaatcgcatgcctacaaggcatacctatgtagataaaccaaaaaaacattaaattcatagtgacgcaatacataatatccaaaattgacaaatttaactaacttagtggtatacctataagttgccacatcctacatgtgaatgactagttttgtagatccacattaagtcttgtatcataatgacaaaccttaaatctagttccatcaggatcaccaacccagtttgcagtctacttattagattcaactttccccttttctatccttgactgttgcataggtaccaatggtcttaatcttgtagccatttttagtttatcacttttcatcttgcacataatataggtccttatatcctcacacatattcaaaattgcttattttttaacttcagaatct

SEQ ID NO: 72887 - DNA, 329 bp, Glycine max
  unsure (1)..(329): unsure at all n locations
  Clone ID: PAT_MRT3847_36831C.1
cagagaacatttttttattgtgcggagtgtgttaacttatgacaggcggagcaaaccnaggtggttcaaataaatgggccactacatgtgacccaacctgtaaaaaaacccccggatggacccccctcttctgttgacatctctcaacgcttgacattggtactttagcacaatatggggaataacctccacaccaaacaagaaaattgtgtacactatacggttacatcgagccccataattgaaaagacagaagggcatacaaatgctcgtcatcctcccccaatgggtttttataaaaacagatcccgagctctttatctccccct

SEQ ID NO: 72888 - DNA, 303 bp, Glycine max
  Clone ID: PAT_MRT3847_36832C.1
gcaacttgtatcaaatcaaaacgtccttcaagagctatggctgtctgaaagagtactaggatttctaagggaaataagggtggcacgtagaacgctgtttatccttttgtcaagaatgactggtacgatatcaaggtcccttgactattctaggtcacgaatattggcaaaaccctcgtatctcgtatccagtgaaccaatattgtatgctaaagactcaaacattggctttttgaagtctcattgactgatctgaaaggggatgaataccactccttcaagaagattcctatgagagctgag

SEQ ID NO: 72889 - DNA, 2642 bp, Glycine max
  unsure (1)..(2642): unsure at all n locations
  Clone ID: PAT_MRT3847_36833C.1
agatgtcaatgtatagacagagcacgggaaactattggcgggaatgcgacggttcacgctaatttaggaacaatttttgtttttcgaattttgttgacttgttttgtttcttttagtctgattaatttataatctagagataattcaagagattattggcatttaacaatggtttgacaccaaactaggagcagtttttgtttttctgattttgttgacttgttttgattttgtttcagtttgattagtttgtaatctagagacaattcaagagattattggcatttagcaatggtttgacactaaactaggagcattttttttttctttctgattttgttgacttgttttagtttgtttaatttctaatctagagacaatacaagagattattggcatttagcgatggcttgacactaaactaggagcagtttttgattttcgatttttgttgacttggtttggttgtgttttttttttttttttttgcgcgtgggnggagatctgcagatttctttctttctttctatcaaacacagtgcgtgcgtgttttctttctcctaattgtataaaatgggggacaagcaccagcagcaccaccaagacgacagcagcgatttcacctccgaggacgaaggcaccgaagattaccgccgcggcggctaccacgccgtccgaatcggcgacgccttcagcgccggtcgctacgtcgttcagagtaaactcggctggggccatttctccactgtctggctcgcttgggacaccaaacattctagatacgtggctttgaaagttcagaagagtgctcagcactacactgaggcagctatggatgagataacaattttgcagcagattgcggagggagatcctgatgataagaaatgtgtggtgaagcttttggaccatttcaagcattctggtcccaatggacagcatgtttgcatggtgtttgagtaccttggggacaatcttttgactcttattaagtactcggattatcgggggttgcctattgccatggttaaggagatttgctttcatattctggctggattggattacttgcaccagcagctttctatcatacatactgacttgaagcccgaaaacatcttgctcttgtcgacaattgatccgtctaaggatcctaggaagtctggggcgccacttattcttcctaatagtaaagataagatggcgatggagtcagcagggatgaaagatacgaaaatgttgaatggggatttggttaagaatcataagaaaaagattaagagaaaagctaagcaagcagcccatggatgtgttgaaaaggaagcttctgaaggagttgagggtaatgctgaaacctctggggctgtggagtcatctcccaatgcgagttctgcgagagaacaggcttctagttctgcaggaactagtcggttatccgatgctgatggaacaaagttgaaagagcagggtaacaaaagaggaagccgctctatgagacagaagctgctggcattggttgatctcaagtgcaagttggtggactttggtaatgcctgctggacatataaacagtttacaaatgatatccagacaagacagtatcggtgcccggaggtgatccttgggtcaaaatattctacgtctgcagatctttggtcttttgcttgcatttgttttgagcttgcaactggagatgtgttatttgatcctcacagtggtgacaactttgatagggatgaggaccacttagcattaatgatggaacttcttggaatgatgccacgtaagatagcacttggtggccgttattcccgtgatttctttaatagatatggtgacttaaggcacattcgacggttgcgattctggcccttgaataaagtcctcttggagaagtatgacttgagtgagaaagatgcaaatgatatgacagactttttggttcctatccttgactttgttcctgagaagcggccaacagctggtcagtgccttctccatccatggatgaatgctggtcctcgccttttggagccatctgtgccttctaatcacaaccctgctgctgaaacttccgtttcggatcagaagagaaaggacaaagatgagagggaggccatggagacaggaatggggaatattgttatcaattcagattttaaaccactaatgcattctccatcaaagaaagtcttccaaggcagaagccagaagtagttcatctggcaagggctctttcccgtgcgactgtttccatgttcttagcgtgcccctgcatcatttccctcattcattgatgtccatgggaattgttttgggggcatgttcatttagccttggattgggtaggacttgtttgaagccgggtgctcgctaaatcctttcaagtcttccacattgcatcttcaaaaagaagttgggatactccgagagctctcactactaagaataccgttatgatatactctgtgccttgtttctcatgcttacgataggtcaaagatgcctttgtcaattggtaccgttgacttgtttgtgaacagtgttcattatcatgtactcttatgctgaatgatattcttgatatgaaaacattataaacatgtttcaagtcattcgatttttgttctttgggttcaaaa

SEQ ID NO: 72890 - DNA, 680 bp, Glycine max
  Clone ID: PAT_MRT3847_36834C.1
cagtagaaaatgcaatgatatgcagctttttgttcccatcctgactttgttctgagaagcggccaacagctggtcagtgccttctccatccatgcatgaatgttggtccacgctttttgcagccatctatgccttcgtaagctcggaattcggctcgagcttctgcttcggatcagaagaaaagggacaaagatgagagggaggccatggaggcaggaattggaaatattgttatcaattcagattcaaaaccactaatgcattctccatcaaagaaagtcttccaaggcagcagcctgaagtagttcatctggcaggagctctttcccgtgtgacagttagtatgttcttagcgtgcccctgtacatttccctcattcattgatgttcttgggaattgttttgggagcatgttcgtttagcctttggttggtttccagaactgctggtttggatggggtaggacttgattgaagccgggtgccagctaaatcctttcaggtcttccacaactcactactaagaataccattatgatatactctctgccttgtttctcatgcttacgataggtcaaagatgcctttgtcaattggtaccatcgacttgtttgtgaacagtgttcattatcatgtactcttatgctgaatgatattattataaacatgtttcaagtcattc

SEQ ID NO: 72891 - DNA, 281 bp, Glycine max
  Clone ID: PAT_MRT3847_36835C.1
attgaactcccaaataagccaaaaaaacatcccaagaaagcaccattgtggttccacccgcttgatgatagaaggcaagagaggatgaatgtcaactacaaaggcctttaaaatgacagaatcaagccggagagaggcataatttcttctgataatagtggttacaattcttcattgtagccacttgtcatcatgcacaaaaaatgcttgcaaaactcaagccagaggcaaaagcaatgagaacaacagcctaaactgagataagggacctgctcaaattg

SEQ ID NO: 72892 - DNA, 559 bp, Glycine max
  Clone ID: PAT_MRT3847_36836C.1
gggggtacaatggcagcaatggagtgatacgaggacactagcttggtttctatctatgacgaaactagggcacatgtgcgtgtaaatgctttacagaaactactttagtgattttgtggctaatttttacgatgaaacttccaccaagttctttatatcaagttttcaaattaaacaactaaaattggattattatttccacaataaaatcccccatcaagaatatgttgcagaatttggaggggaggggggaatataaagaatttgatctaaaatttctccttttcttttaaactgctaggcatgacagtgactaaaaatttgtgatgtgtcatgtgtcatgtgtgagcattgtcaactgcacaagacaataaacacaaatgatttcacgaagtaaaatggatcaaattgtcggcaatgactaatgagggttcaagagattggagattgatttaaaattctagtgactcacagcgtatacaacggctagtatttctgattgcttcaaaatccagttagttgactcattaaccatgaacaatgatacaatcaacgtcag

SEQ ID NO: 72893 - DNA, 238 bp, Glycine max
  Clone ID: PAT_MRT3847_36837C.1
gttaaacagaatatggactttttctttttcttgggggggacaacatactatttatatttataatcattattatttgcttagaaaaattatcacatatgatataatttttttatgaccctatttacatttgcatcaaatctttgaaaatcttcatgacaggggcaggcaaatctaagaagcactttgatgttccttctcttttgtccattagataggttcagaatcacttttttttttg

SEQ ID NO: 72894 - DNA, 134 bp, Glycine max
  Clone ID: PAT_MRT3847_36838C.1
tccgtctcaatgagagaaactctctctccaaaaaccccaatgcacgttttgcaatccaactcgacaatgggcaacagcaacctccctcgaagaatcatcaagggaacgcaacgtttgctcaatgagccaacacc

SEQ ID NO: 72895 - DNA, 273 bp, Glycine max
  unsure (1)..(273): unsure at all n locations
  Clone ID: PAT_MRT3847_36839C.1
acattcactntagaaatcataaagaaaagaaaagaaatgaagtgtgttcagcatcataggcatccaccatcactattaaacattaactagattantgtccatgtctctctcagtcactgtcctctanatttacccaatggcggtaggcactttcatcaccaagcctcaaccaaggataattttcttgaagattattgttgttgttggtaatacttactctttgtttggcttgcctntttgcggagtaaacctctgncaaaatccaaaagtggg

SEQ ID NO: 72896 - DNA, 496 bp, Glycine max
  Clone ID: PAT_MRT3847_36840C.1
gtttgggctttggtttttttttttttttttttttttacacttcaatggatattcttttcttgaatttcatctgggttcattccttttttcatgctttgactgaaggaaaacccttttttgtagggggttgttttttttttcctgggccaaaaaaaaaaatctggggcctttttgagacccacccaggggggagagggcccccactaaaaaaagggttagggggcggaccaaccctcggggtactgtttgttaaaaaaagctggaggtgctggtgtttacacccctaaaaaaaaatttgatctttgggccccttttttaaaaccaccccccccctttgttgggggggaccttttaatcaagctcctcctaaggctccttgttggggtggggcccccccccctcatgtgcacaaaattttctcaatgggtgtgaccccatttgtggtggggaagcatcactatatacttgccaaggaggtggggagaggcccaaaacc

SEQ ID NO: 72897 - DNA, 764 bp, Glycine max
  Clone ID: PAT_MRT3847_36841C.1
cggttggaaaaggacaacaaagggggagagtcctaatcatttagttcgaaaaatggctagctgtgttgctttggcattgtctaaaattattgatccaaagaatcctctgtaccttgatgatagctgcagtggggagacaattgattgggaatttggattcactatccccaagaaagggaatctggctgcctcaaattgtggaggaaaaggtgttgaggggacaaaaatatctactgtgtcatgtccggagaaggactctgattccccttccaataaagagaaaagtatttgtttaaagggtaaaaagaagttattggactttaatgcgcttgatccagatgagattattgatccagcatcactgaatcttgaatcagacgatagcgatgaggatgctgacgatggtgctagtgagaattcatattcttcaagtgattcatctttacggccatatgatttgtcagatgatgactcagatttgaaaagaaaaatttcacagttggctgatgtagttgcagctcttagaaaatccaatgatgccgatggggtggaaagggctattgatgtagctgaaaagctcataagagcatcccccgatgaactaaaacatgcagcaagggatatgaccagaactcttgttcaggttcggtgctctgatatagctttagaaggtgcagaagaatcaactgaagacaaaagacaaagatcattagttgccttagtagttacctgcccatttgaatcacttgagtcactaaacaacc

SEQ ID NO: 72898 - DNA, 413 bp, Glycine max
  Clone ID: PAT_MRT3847_36842C.1
ttaaaaaagcgcgcacttctcacattattaagaccattataagagggggggaaatgttcaaatagaccgagcatactcaacaagagggccatggctaaatacctcttattgcagaagcggccgaacaatccagagattaccaaattccggaccatgcccgggattccgcattttctgaaaatcagggagaccactgtggaacaaaaaaagctgagcttccaagattacccccaattccggaatctggggaaaatccccaaaaaaaaacaaaaaccgcccaccggctgggcttcgccacaacgaaacccaacagcccccaaccttgttctggccctccacaaacccccccgtaataaaataccattattgccccgcccccctccttgtggaaaaacaacacaaccacaaaagcg

SEQ ID NO: 72899 - DNA, 979 bp, Glycine max
  Clone ID: PAT_MRT3847_36843C.1
gctgagttgtgtatgaatgttaaatgcccattctcggaaggtgccgaatccattgatgccgttgtgtgtttgctcttggaagatataaagcgaataaatttgtcagattctggattaatgtcagacaattataatgacagacaatggtataatcagggtgctgttcaatgtgccattagcaagaactcttatgtgccctgtttgaaaaactggatgatttctgctactcaaccagatgcccttatgaatgctaacttttgtcttctgaatgatgtcctgtcattggtggaactggttgcaaacaaaatgagctggcactgggttgatatgaaacttgttcctcagcttctgaatttactcgactcatgtgtagaggagaactttgctgttcgtataattgttcttctaggtcaacttgggaggactggagtggatgttggtggatatgaagataacggagttggaaacctgagatgttatttgtatacttatttttgccgaacctcttccatgaaagcaggtctttctcttcaagttgctgcggccactgctctgtttgaccttcttcctcttgattttgaaaccctttttcatactaaaatcaatctttcagcatattctaaatcggtttctgacaatgctgaaagtttgaggaagtggttctctgggctggataaagatcaacagaaattgctatctgatgtatttaacatgtaaattttttgtactttcacatgaattaaaataggattcctgagccagttgatttaattggcaaacgctcttggagaagttttgtagattggcccaattttttgaaattagattagatggcgttgattcaataattttgagagccttcaacatggcttgtaatcttgtacgctgttgtgattccgaaatttgtacattctttttttggctgtaaacctgtaaattttttattatattttatagtgaaacttgttatccccctgcc

SEQ ID NO: 72900 - DNA, 3278 bp, Glycine max
  Clone ID: PAT_MRT3847_36844C.1
cagatgtgtgaagccaaataatgttctcacgcctgctatctttgaaaatctcagtattatccaacaattgcgctggggtggtgttcttgaggcaattagaatcagctgtgctggatatcctaccagacggaccttttatgaatttcttaaccgatttggtgttcttgcccctgaagttctggatggaaactgtcctgacaaggttgcgtgccaaatgatcctggataaaatgggtatgaaaggctatcagataggcaagacaaaggttttcttaagagctggccagatggctgaattggatgcaagaagagcagaggttcttggaaatgctgctagaatcatccagaggcaagtacgtacccatattgcacgcaaggagttcattgaattgcgccgagctgcaatttgcttgcaatctaatttacgaggaatattgtcccggaaactttatgagcagttgcgacgtgaagcaggagctgtaaaaatacaaaagaacttcaaaggatacattgccaggaaatcatacttaacagggcgatcatctgcagttatactgcaaacaggtttaagggctatgaaagctcgtgatgaatttagatttagaaagcaaacgaaggctgcaatttacatccaggcttatttgcgtcggctaattgcatattcatattataaaagattgcaaaaggctgcagttgttactcaatgtggttggaggagaaggattgctagaagggaacttagaatgcttaaaatggctgctagagaaacaggggccctcaaagaagctaaggacaaactagaaaagcgtgttgaagaacttacttggcgtttgcaaattgagaaacgtttgagaactgatttggaagaggaaaaggcacaagaaattgctaagttacaggaagctttacatgcaatgcaaatacaagtagaagaagcaaataccaaggtcatcaaagagcgcgaggcagcacgaaaggccattgaagaagcacctccagttgttaaggagactcctattataattcaagatactgaaaagattaattcattattggctgaagtcaatagtttgaaggaatcactcctattggaaaaagaggctaaagaagaggccagaaaagctcaggctgaggctgaagctagaaataaagagatggttaaaaaggttgaagattctgaccgcaaagtggatcaacttcaagaattggttcagagattggaggaaaagatttccaatgcagagtcagaaaatcaagttcttcgtcagcaagcactggctgtatcaccaactggaaaagctctatctgcgagaccaaggacagtgattattcagaggacacctgaaaatgggaatgctctaaatggtgaagcaaaaattggatcggatatgactcttgctgtatccaatgtgcgtgaacctgaatctgagggaaaaccacaaaaatctctcaatgagaagcagcaagaaaaccaggacttgttgatcaagtgcataacacaagatttgggattttctgggggcaaacctgttgctgcatgtgtcatatataaatgtcttctccactggaggtcatttgaagttgaaaggacaagtgtatttgaccgtataattcaaacaatagcttcagctgttgaggcccaggataatactgatgtattagcctattggttgtctaatacatctactttgttgttgctactccaacgcactcttaaagctagtggagctgctagcttaacaccacagcggcggagaacagcatcatcttctctgtttggaagaatgtctcaagggctaagggcgtctccccaaagtgctggattgtcatttctaaatggtcgaggtcttaatagactggatgatttacgacaagtagaagcaaaatatccagcactgctgtttaagcagcagcttactgccttccttgaaaaaatatatggaatgataagagacaacctaaaaaaggagatatctccattacttggactgtgtatacaggctccaagaaactcgcgtcaaagtctagtaaaaggacgtgcacaggcaaatgcagttgctcagcaagctttaattgctcactggcaaagtattgtgaaaagcttaaacaattatctaaagataatgaaagccaactatgcaccccctttcttggtccgaaaagtgttcactcaaatattctcattcatcaatgttcaattattcaatagtcttctgttgcgtcgggagtgttgttcgtttagcaatggagagtatgtaaaaacaggtctggctgaattagagcagtggtgcatcgaggcaacggaggagtatactggctctgcttgggaggaactgaaacatatcaggcaggctgttggattcttggtgatacatcaaaaacccaaaaagtccctgaatgaaattacaaaggagctttgcccagttctcagtatacaacagttatacaggataagtacaatgtactgggatgacaaatacggcactcacagtgtgtctacggacgttataacaaacatgagagctatgatgtctgaggactctaataatgctgtcagcacttctttcctgttagatgatgactcgagcattccgttttcggtggatgacatttccaaatcaatgcaacaagtagaagtagcagacgtggatcctcctccgttgatacgtgagaactcaggatttgggttcttactagcacggttggagtgatacgagtacccggtgattattgtatctgatgctccatctcgtggctatcctcagggtattgcaccaaggtgcaggtgccaagctgtgcatataatttcgttgtattcacgtgtatagtgtattttagccaactcaggcttctaacattggtttgttgcctgggttaattcatttttacccctcaagtttcatcaacgctaggggttttgttcagaagccatgtcactattgatgcatgtcatgtgacaaatggcggtcataggtaagagctggtgtccaggcattctgtcacacctgccagggttctttttccatatgggttggttttcaagtgttaaatgtggatgcaattagtgactccatgtattttataggtgagcatatttgtttcatgcgattacttttttgtatttacttgtgcaatattctttctttcttttttcaaagttaaacttaagatagttttttttttttgaacgactgagttataatggaagatgactcagtgcacctgtacagacatgagatcatttatttgagtttcatttctttttaagagggttttctg

SEQ ID NO: 72901 - DNA, 919 bp, Glycine max
  Clone ID: PAT_MRT3847_36845C.1
gaattcggcacgaggctgggatgacaaatacggcactcacagtgtgtctacagacgttataaccaacatgagagctatgatctcgagccgctctaataatgctgtcagcacttctttcctattagatgatgactcgagcattcctttttcggtggatgacatttccaaatcaatgcacccagtagaagtagcagacgtggatcctcctccgttgatacgtgagaactcagggtttgggttcttactagcacggtcagagtgatacaaatacccaatgaatattgtctctgatgctccatcttgtggctatccccggggtattgcaccaaggtgcaggtgccaagctgtgcatataatttcgttgttgtcacgtgtatagtatattttagccaactcaggcttctaatattggtttgttgcccgggttaattcatttttacccctcaagtttcatcaacacgaggggtttttttaagaagccatgtcactattgatgtgagtcatgtgataaatggcggtcataggtaaaggctggtggtgtccaggcattctgtcacacctgccaaggttcttttttcgtatgggttggttttcaagtgttataggtggatgcaattagtgactccatgtattttataggtgggcatatttgtttcatgcgattgcttttttgtatttacttgtgcaatattctttctttcttttttcaaaattaaacttaagatagtttttttttttaaatactgagtcataatggaagatgactcagtgcacctgtacagacgtgagatcatttatttgagtttcatttttttaagagttaactgtatcttaaaataccatgttgaaaactactgggaggaccagcgttatgtaacaccatcagaagtagaaatttcaacgtgaaatttacatctag

SEQ ID NO: 72902 - DNA, 630 bp, Glycine max
  unsure (1)..(630): unsure at all n locations
  Clone ID: PAT_MRT3847_36846C.1
ggtaaatagcagctttttttcctcgagccgcttgtgggtgtcaggtgctctaacccgagcagctcaggttgcttctgatatgggtactcacagggataggcagtaaataaagcattgacatgattaaacactatcttttagatatgtctgcttctgctaaatagcttttgaaacttcagttagcaatattattatacttttacaatacataaatcctgtttggataattttttggataaacacttatagaagtaaggtaaaatgaattgagcttctctcgtaagttaaaatcaacttatgcacttaacttttataaaagatttttcatttaacttttctgaaggccgaagtacataagttgattttagtttatgagaaaatcacatttcattttactttcttgtaagtatttatagagaaatttatcttaacaggatcatagtgcatgtaattatgaataaatctagtgtatgcccagacaggattgaactatgaaacccgtgctatttctacccctgaactattatcctgattccaaactttacagtacgtcgcggtagtagtcagtaaggggctgagattggtacattgaaatcattatgatttgttaaaaggatagngatttaatac

SEQ ID NO: 72903 - DNA, 871 bp, Glycine max
  Clone ID: PAT_MRT3847_36847C.1
cccacgcgtccgcccacgcgtcatggagtacctcggatctcgcactgacctgcattctcttcctctcccaacctccatcatgctctcagcctcattcaccttgctctcataattcacttggtacgcctccagcattggaaatcttctcctcatttgctgaatccacgactcgtcttcttccaggaatatcgtccttcccccgtgattcagcgcattccacatcaggctgtcgtgccccaacccgaacaccaggaaattgcacggcgacttcttctccagaactcttgctgtcactgatatctctttcaccgtttgctgtggggttatgcttgatgttgagtagtggatcagtgcttccgacaccgatcccggtatcttcatcttgttgcaactcccatcactctttactaataatgcctcttgctgcttcactcctttcgtgtttgatgatctaattagcacaaataggagggtaatggcaaccaagaccgctacaatgaggagcttcaagttgaggccgggttgatgagctttagtcctcatgcttgatcttcttcgtgcatggaattgcctattgtctgggaatggatatcaacttataaattaagagaaagagttgaaggtatcactcacgtttgatgcttgcttggacgccaagggaataggcatgcagtatggatggatggagacaaaagacctgcctgcctacctgcctgaattgtgaatcaagcaaactctatagtgcttgttgttgcatctgcaactgcaaatttggtggaatttctttttataccccaatctctctcatgtctactcttatcaacatcaacatcaaatcataaccagccactccaaaactcagcttcttatt

SEQ ID NO: 72904 - DNA, 194 bp, Glycine max
  Clone ID: PAT_MRT3847_36848C.1
gcgcccacacgtacgtacggctccgagaagacgacagaaggggggcacacaatgaaaatagctccggtccaattctagcttgaatattcacaagtgcgttaagtaatcacaactgtgaattgagatgtatggattcagaagaatcaatcctggagaaggccgatacccataaactccaattgggttttgttttg

SEQ ID NO: 72905 - DNA, 612 bp, Glycine max
  Clone ID: PAT_MRT3847_36849C.1
aattcggctgcgaggcgatgtttctgcgcgttttgaaatttgaatgattcaacctgcaaaaccctaaaccctttctctctctgcataagcacagtcacatagatgaggaagaagcttctgttcgcaaccactaaaggcctctcctttcgctccaatcgcaacttcactcccaaatccaatcacttattctatgaggtatgctattctgctgatccgccgaaattccagcagcgtggatggtcacatgctgcttctgtcccttctgaggaaccagaagccccaaaaggccaaaaaagggttccaagacatgaaaggagagctatggtggagtctttcgtgaacaagtatagagcagagaatgctgggaaattcccaaaaatatcagatacccagaaacaagttggtggcagttattatgttatccgggaaatcgttctggagctagaatataaatctaaaatgaattcttcaaacagtgtgaataagttttttgtgggaaagcaatttgatgagagtaaactacttaccactgaatctgtgaatgttccatctggtaatattgagattgcaaatgaaagctctgtcaaagatgattctcaatcagtagtttta

SEQ ID NO: 72906 - DNA, 636 bp, Glycine max
  Clone ID: PAT_MRT3847_36850C.1
attagaaagagggggaaatgatatagatatcatatatgggggtggtagttagtattttggtgtaagtattggaatggaggaaaaatgggagaatgggggagtgtttttggaaagggttgattgtgagatgggagggtggatagtatgggatgggtggtggttgtggtgagggagagatttgggagggtttgaagggatgaggataggagaagggagaggaaggtgggtggtgagataagggtggggaaatgtggaggagggtggggatgggggggggtggggggaggagaggatggagggggggagtggggggtggggagtggggggggaggtggggggggggggggggatgggaggggggtgtgggggggtggggggggggaggggagaggagggggggggggggggaggggggggggggggggagggggggggggaaaggaggtggggggggggggaggggggggaggggggtaggggggggggaataggtggggggggggagggggagggaaagagagagaggagaagggtggggggggggggggggggggggggggggggggggtgggggggggggggtggtagttgggttgggtggggtgtgagagaaggggcccgccccccccccccccc

SEQ ID NO: 72907 - DNA, 137 bp, Glycine max
  Clone ID: PAT_MRT3847_36851C.1
tcattcttcatccatagacatggccaccgtcacttctgcagccggtgctattcccttattcactggccttaaagcaagccccagcaaagtgaatgccccaagtaaaggctcaactccccaagccacaaaggtgggca

SEQ ID NO: 72908 - DNA, 935 bp, Glycine max
  unsure (1)..(935): unsure at all n locations
  Clone ID: PAT_MRT3847_36852C.1
acctatataaatagcaccccttggaatctttattatatatattccaataatgagagagaataacaatgagagggagaaaaccttcacaaatagaaaatattatacttatttttttgggtataattgggttgtgggttgagtgttttataaacacctattttacatttttttctctttcaataaaaaaggtctgcagcagcctagagacataggcataattggctaaactccattatcaattgtgtgattattccacatttatatttgtttctcacaaatctgattataggaaattttgcataatttcacacaactgagcttttttctaatttatcaatgtaactgattggagtgcgttttcttcttttcaacaaggaatggtttgaacaacattagtattccaagtccttcaactatgttcaagacaaagaagaccatatgggtgcctgcagtcaaatgtacagcagtaagtaagctcctaataatacagctagcaaaagaatcaatgctcttaataactataatgacatcaaggtctagctagacaatagtttattgtaccaccacaagcatactgtctagtcaaacataataccataaggaattcacatgtaaatcagttctacatttgcttttttctttgtccttcaacggtattagattaacacaaaataaatgcataatctgatcttaggtccatacacattaaaacatagtactataaggaattcacatgttattcagttctacattagcttttttctttgtccatcaagggtattagattagcacaaataaatgcacagtctgaacttgggtccacacggattaaaggctgctgtttttcaaggctaactgactntaaagatagtcaaagggttccatgttccatatatgaaacagaaacccagacanataaattaattgagcatcat

SEQ ID NO: 72909 - DNA, 270 bp, Glycine max
  Clone ID: PAT_MRT3847_36853C.1
gtccgttgcgaggagacaacaaaagggaaagattttgatgaccgttgaatgcatagggggaaacaaaatcaattgtataagcaagtccagtaaaaaaaagaaaaagtctccaccatggctcaagaacttactcacctttgtgaaacttcccccagctgtggaatacctcaaacattgcctctctatggcttgatggttggctgccctcttaaaaattctggtgaaactgtgcctgctatataggaggttatttcttcggctgctaactta

SEQ ID NO: 72910 - DNA, 423 bp, Glycine max
  Clone ID: PAT_MRT3847_36854C.1
aacagcataagccagccacatgtataaaacacaattgcatccaattgttcttggttcataataataaccaaaagataaatgtgatagtggggagtaacaaagtatggtgagacacagttctctgaagctactaaaaacaaagaacaaagctaacgcttatgataacaatggagcatagatattaccaggtctagcggaccctaaagacagacactcaactaacaaacgctgataaccccaaattcagatggacctagtgtgtatagaattctcatcaaaacttatctgctctgtccctcttatctatatatgcttttcaaacttaggatatggttgaatggccctgactcggccatcatgactgtgacgaactccttatagttgatctgtccatgaccatcgacgtcagcctcaaagatcatc

SEQ ID NO: 72911 - DNA, 389 bp, Glycine max
  Clone ID: PAT_MRT3847_36855C.1
acgcgtcaaccgacgcgtccgcatttcccgacgaccaatcggagggaaggggctcgacgtgctgcatcttcgtgacagcaccttcacgccgacgaccttctgagatggccgcggacgaatcagcggtcaaacaatgcgtgtccacgcacgatcatgcccacctacacgactctgtgcaggtgcactatctcaaccgcggctagttccatgcaccaaggattggccacggaacgaagcatgtccccgagtaggtgaaatcagccacgaccatgagtagacacgattcaccagttgtgatggtgaaaagcaagtccaatgcggagaccaactaatagactgcgtcaccatacgatgccaggggaatggccccagatctgattctgcgacat

SEQ ID NO: 72912 - DNA, 379 bp, Glycine max
  Clone ID: PAT_MRT3847_36856C.1
aacaaaccaaagtaaaactttgtagttttaattttaattaacatacttcatttcaaacatgtttaaacttaaaattaatttttttaaaaatttaaatggaaccttagatattttttattttgagcctgttaataataatttataagccaccaaacagttattatatttccactctattaaatagaactccaagttcttatgatcaatgaaaactgaaaacagacttccgcaaagttaacacagattaacaatgttaaccattacaaacactcaagtttttgttggagtcctaaactcgtaataaaaaatgctcttaaagaaaaaatatttaatttttattttcccaaacagattagaaaagaattttttttatttccct

SEQ ID NO: 72913 - DNA, 294 bp, Glycine max
  Clone ID: PAT_MRT3847_36857C.1
tacggctgcgagaagacgacagaagggatgtggtatgtttaagggtgtcaccattggtagggtacatcatgcaaatgcaaaagcttaatgtcatagctttcatggaggtcaaggtcgaccctgggcatagctaaacgtcgcaactaaatcttattaatagttgtgtagaattgttttatattctttgataatttttataaatgagttgaaattattttctcattttatgtctatttattcaaattaaaatttgaactgcaagaagaaagtataaaagatttagtttttttccct

SEQ ID NO: 72914 - DNA, 295 bp, Glycine max
  unsure (1)..(295): unsure at all n locations
  Clone ID: PAT_MRT3847_36858C.1
gtcgcangcacgcgtacgtnagctcggaattcggctcgagngcgctggcccgcctggcacctttcggtcgcgttggaggccgcctgcttcggggctgccgcgcgcgggcagctggagacggtggagtccgtcatgttggcgatggtgggacacattcagccccggtacagggagtttccccagcttacccagtcccaggtgatccatggtgaggtcttaagctcactcatgtggttctggattctttggagattttggcatgactcggatgctgtgctgggtcacttttcatatt

SEQ ID NO: 72915 - DNA, 266 bp, Glycine max
  Clone ID: PAT_MRT3847_36859C.1
cttctttttctcttttttttttttttttaccataaatgttctcagccattaacagaggtaactcccctcacaagggcataatctcaaatgagtttcactttaatagacctaaagggccacctgctgcaattcagatcataggataaattatcaccattaccgaggactggcaggacggtatatcggcagcagaaaccccctgcacccccattcaagcaactctttattgctgtcatccctagaaacactcacctctccgcacccat

SEQ ID NO: 72916 - DNA, 436 bp, Glycine max
  Clone ID: PAT_MRT3847_36860C.1
ctttaacaaagctcgatcctgaatatggactctatacgagtgtggagccacctattatgtatgcgttaatgggaactttaatagaaatatcagtggcacccgtggccgacgtttacctgatgtgctcatcaatgatttacatgcttattgaccctggcaatgaaccatatgcgtgtagaaagcgtgtttgcactaccacttactgtgctggcatatttgaggctgcttttggactctttatgctaggagcccttgtggactttctgtgccatgctggtatggaacgattgatggggggagcagctataatgactggtctacaacagctgaagggactatgtgagatcagttgtttgacaaacaacacatacatattctctgtcatgaaatccagaacggaatcgggtgatcattcctggaagcctcgcagttttgt

SEQ ID NO: 72917 - DNA, 844 bp, Glycine max
  Clone ID: PAT_MRT3847_36861C.1
tttgtggatcgagaaaaaccagttaattcatgagaaagagatggatatgagcatcggaacagctcagcattttatccacaagaccaggataatagtcacaccagtcccgaaagagatttatcaattggtggaaagccatttatgaggaaagactataatgctggtgctggatttgtgtcttcaaggccttatcataaaggagaaatttcagagcctcatttagatgaatatgctcatgtaaaaccacagaggtggaaccaatcagcagatggagatcatcttagcagaaatacagagattgattctgattttcatgaaaattattttgaaagatttggtgatggtagaacgcagggtcattcccgtggcaatccatgtcctccattccctgagcgtacttatccaaattctgagtcagagggaccctatgccttggggaggtcacggtattctgtcaggcagcctcgagtacttcctcctccttcactaggttctgttcacagaacttacaaaaatgaaaatgaacaccctggcccttctgctttcctagaaaatgagatgcattataatcaggcaaccagaagtgactctacccttccaactggttatgacaatgggaaccgtggacaacctgaagtagtggatgcccggcaagagactactgagaatgaggaccataaagtggaatccacaccgaagtgtgattctcagtcttcactctctgtttcaagccccccaagttctccaacacatctttctcatgatgacttggatgactctggagattcccctacgatattgacttctgaaggaagcaaaaatgaccccctcacagctccagata

SEQ ID NO: 72918 - DNA, 513 bp, Glycine max
  Clone ID: PAT_MRT3847_36862C.1
cgccgaagctccaattaccacagcctgaatcccaatgttataattatagaacacatacagacaggggatatgtgcacttcacttcgctcttcccctatactcaaattatgcctcttcaattgtttttcctttcaccacaaaatacacttcagatgctaataaacctgctctttaaaaacccttactcctttactgggaccaaggaccacttaacgcaaaaaacccagaccaggcatctaatatccggaatggaaataattataccgaccacataggtggaacgcgagcaacattatgatgttacacatacaacccttcaccaaatctacgtggactagaagaaagacgaaacttttgcaattgttatcaacataaagaatactgtcttaccttagaaatgataaaatgcgtagatgccatacgacatgtctggcaagaatgatgatgtatcactatcccaacatatggaaacttatcttgaacaattatggccatataattggcaccaaatat

SEQ ID NO: 72919 - DNA, 327 bp, Glycine max
  unsure (1)..(327): unsure at all n locations
  Clone ID: PAT_MRT3847_36863C.1
atcggttgaaggattttaattgggcataccaggggtgcnggcgaaaagggggaccccaaatttttttttcacacgcattgataggggaacccaggggcccaacatacgacgtgaactggaccattctgaaaagcacctccactctccggccgaaaataagtgactttcctccgagaagggggggaagaaagattacaaagggcccggggaaagggttaatttccacaaggcaacccccccacacaaagaggggcgttttttggggataggggctataaattttcccatacaaacaggttaaatcttattgttgggcacccacatttt

SEQ ID NO: 72920 - DNA, 523 bp, Glycine max
  Clone ID: PAT_MRT3847_36864C.1
aaaaaaaccccctcggggggggaaaaaaaaaagtttttccctaacaacaagcaaatttttggaaggggggaaattttttgggggacatttttcccgggaaaaaaaattttccctaaaaaaaaccttttccagaattcatcaaaattttgcaaaacaaacagaaaacggacctttggggggaaaaatttgggggtgggaaccccccaaaaaaaaaaaaactgggaaatggaaaagttgggcccgcccaaaacccttatttggaaatagttcccaaaaaactttattggtttaaggggatttttgcaaaaattccccccccatggattggggggaagggggggcccgggttttttggaaaaaacccaaatttcgggccagggcaccccgcaaaaaaaaaaaatcagggggggctttttttgggaaaaaaagaagctttccctggaacccacctagaaaaaagggaacccccaattccgaaaaaaataaacggggacttttcaaaaaaaactttccaggccccccc

SEQ ID NO: 72921 - DNA, 534 bp, Glycine max
  Clone ID: PAT_MRT3847_36865C.1
cggtctcgtgggctttgcattcgcgcctgtaggctgattcgatcatcacttcgaaatctcccattgtcacagtgctagcgcttgccctagcagtagcttctctcctgtgtcacaccttcttccctttgtcgtgcttcgcgctcctcatcccgagaggtttgtgcattgtgtcgtcttctgcctgagctctcatccatgtcgctgatgtaacttgcgttaccactaacaaaggtcttttcgaggcagataacgtggttggccaatttcgtagagttcgtaaaccttcacctcacactcaacaatctgactccacttcagcaggggttaagagcatttgttaaccgcaactgggtatccatagtagaaaacaagttagaaagcttggaaggatttgaaggactgagtaagctcactagggatcacatcatcaacttcgtttgcttaagattattcgtagtgcttttgtttaggattcattccaggaacaagcaacataagggagttttgttctgcatgggccataggacatcctga

SEQ ID NO: 72922 - DNA, 1598 bp, Glycine max
  Clone ID: PAT_MRT3847_36866C.1
gattgagttactgcctgcaagtgatcctggtatggaggtgaagaccaaatcagatattgtgcatcaagagcaacattctggaagagacagctctgtatctgatccctctccggcagacatacgaagcattgaagctcatgaacccaaaaaggctactgagaagaaatctaagaagcaaaaatcagccaaatctcagtcttctgatcaaacaaagggagtgctaaagagtgtcacttcgcagccagcaaatcaggcagaagttgaaataccaaaattaagtgagttgggggaagccaacagggctgaatcattacatgaaacaaacatgcaacaaacaagagttaagggaactcagattggaagtgcagtcatagaggcagttgatcaccaacaagctggtggctggtctgctaatgttactggcaacgtcactggatcagttgatgtgggtgaggccaaggcagctagctctattgtgatgcagaaagctgaagtacctgcaggacgagcttggaaacctgctcctggtgtcaaaccaaaatctttcttagaaattcaacaggaagaacagaggaaggcagagactgaaatgcttgtatctaatattgctgtttctgtcaattcaatgagtctggtaagtccctgggctggggttgtgtccaatccagactctatgaaagtttctagtgaaagtcacaaaggagccaatacagaatatcctgttaaatctgaaacttctcaaaatcttaaaagcaagaaaagtcatctacatgatctattagcagaaagaagttttaaagaaatctaatgaaatagaagctgaggttctagatagtatattgcccttacataatatagctgtacattcagaatcactggatgatggcaattttattgaggcaaaagatactaaaagaagccgaaaaaagtcaggaaaatcaaagggttcgggacccactcactatgaaagtttctagtgaaagtcacaaaggagccaatacagaatatcctgttaaatctgaaacgtctcaaaatctttgccgcccgtcccggcagctccctgacctggtggctgtggctgtggtaaggagagcgagtgccaccgagcccgtcgccctcgccagcatggtcccctgactctggctggctccacgtccagcttccgtgggggacggcctgtttattgaggcaaaagatactaaaagaagccgaaaaaagtcaggacaatcaaagggctcccgaactaaagcttcattgccagttgcatcttctgaggcacctatagtttcaagccccattgaaaagggaaaaaactcctgttcagcacagcaagagaaagaccaagcttctcaatcaaagtacaaaggggatgatgacttgttctggggtccaatcgagcaatctaagcaagatactaagcagtcagatttccctcagcttgcaagccagggtagcgggccttcgccaactgcaccctgggacggtctgaagccgcgggtgtggacaggcccttctgcagtgcctggcagcccaacgcctccccctctggaatctccgcctcccccgtctacatggggccgggagaattgcctgccatc

SEQ ID NO: 72923 - DNA, 479 bp, Glycine max
  Clone ID: PAT_MRT3847_36867C.1
gattgcgtatttggagagggccatttactagaaatccccccgcgttcctccccggagaagtttcatcttctgtctctccgtgcccctccctttcgttctcccacctccactgctgctgcaagccccttctctctttccaattttattcatgtttttggctatttgggaattgttgtgtttgactatttaattcactttatgggctgctattggcatcatgacattgtgagagcaagtgcacttcctcatcacaacggaaaacgaaagagaaaaggagatttgagattatttaaatatccttttcataaatcttgtttatcttctttagtaataaaagaatgactacttctcccatgcgtcaccttcacgattttctccaaatttcattttcaaatttaataggctaggttacggcgacgttaggttgcaggcctcataggtcacgttgctgaagctcatcttcaaagacccatgttgac

SEQ ID NO: 72924 - DNA, 761 bp, Glycine max
  Clone ID: PAT_MRT3847_36868C.1
gactgctagctatatgattgaggcagtatgtgcaaaatcatatgaagatcccacccaaaaactgaaggacaatgaagctcaaattttaagaaagaggaatgagctacgccaatttgaagcagaatatagaaaggcattggcacgctatcaggaagtgacagacagatacacaaaagaaaaacaatctgtagatgagcttctgaaacaaagggatggtatccattcttccttcaccactgtgaagtcaaccaattttagtggaagtggtagtaatttaagcaatggaagttctagcaaaattaatggcgacgagagccccggggaagatggagggtcagatggcaaggataaatcaggcaaaaagaaatggtttaatttgaatcttaggggttctgataagaagttgatttaatattattaatacacttgattttggttgtctctttcaagcagcttgggttgcagtttttgtctagaatattttcctttgcttggttccgccaagctggttaatctgtccattggtaatgtgatgcattcgaatgaaggtatacggtgtttatcttactgtttccaattccaatatttttgttactccaacaaacaagacccacatcatccaatttcctatattgtaatttgttgtgatatattcattcttgtaagttactttttttcatccttgctctgtgactgtatatagaacaccgcagacttttcgaaaaaagatattaaaaaaaaactgtgcatatatttatatt

SEQ ID NO: 72925 - DNA, 247 bp, Glycine max
  unsure (1)..(247): unsure at all n locations
  Clone ID: PAT_MRT3847_36869C.1
agaagctgtgcttatgatggaagttgttaacaacgttgtaaaaaatgatgggggtttttgtgtggtagctgaggtggaacaaggaaccgggttgttttttgactagaacagagatttgttggggggtggtcgcttttttttttttggtaagcagagtgaaagcgagtgtgctgttgcgtgtgggcaattgaatgccccccctgaggctcgggccggatacggnattactgggcttactgtggttgaa

SEQ ID NO: 72926 - DNA, 383 bp, Glycine max
  Clone ID: PAT_MRT3847_3686C.1
ggggggcagagaagggggaaaccactggctcctacgcatccttatgagccttgagtaatatctacctacgtgagcaaatttacccaggaaaggtgaccgtggtaaaaattagttggctttagcaaatcggacaagtctatctgtttcttgaacccagaacaaacttgggccttcttttgagttcatcgtaaccattgaacagatgtgcactttcaacggataacaagtccttgttaacctctaaattatagtgtactcatgagccttcactcatagcacagccatatagcagcctatcgatagtgtgactacaaaacagcccacatccaatgtggtccccactgttcaaaaccaggtccaagctaaagcctcgccatcatcta

SEQ ID NO: 72927 - DNA, 846 bp, Glycine max
  Clone ID: PAT_MRT3847_36870C.1
ggctcgagctgactgccctggttctttttgttcctttgcatctgtatgcttctgattgtaagcagtattgaacagctaattctcatgatttggtaaattcttataaatcatctttctcttctcttcctgcaaattcaaaacccaatctcaatcttttcctttcgttccatttccttcatttgaaattgaccacacccacgcagatcccaaatttccaactcgtaaattatccgccttttttcccattccgaggaaagaagccaatccacgaccgatccaatgccgctttgaatcgcgtgccgtcctccttccctgggaacatctttttgctttttgaattcgatatttggagcagttgggtcgatgagtaacatgtgacactatttctgaaacacaacaagacccttttttattccctttggagctgctctggtttgaagagtgtgagagagggtagtgaatggggatgggttctaaaatggaaggaccgtctaccccagcaattcgacgtgacccatacgaggtattgtccgtgtcgaaagactcaaccgatcaagaaattaaaacggcttacagaaagcttgctcttaagtatcaccctgataagaatgctagcaatcctgaagcttcggagctatttaaagaggttgcatattcttatagtatcttgtctgacccagaaaagagaaggcagtatgacagtgctggatttgaggcacttgatgctgatagcatggacatggaaattgatttatctaatcttgggactgtgaacacaatgtttgcagctttattcagcaaactgggtgtccctatcaagactaccatttcagctaatgttcttga

SEQ ID NO: 72928 - DNA, 1886 bp, Glycine max
  Clone ID: PAT_MRT3847_36871C.1
cattacagaagccatccctatatacgactgaaactgaatcgagtttttttctgttcctgcaaattcaaaacccaatctgaatcttttcctttccttcatttgaaattgaccttacccacccagatcccaaattcccaccttgtaaattatccgccttattttcccattccaaggaaagaagccaatccacgaccgatccaatgccgctttgaatcgcgtgccgtcctccttccgtgggaacatctttgttgcttttgaattcgatttttggagcagttgggccgatgagtaacatgtcacactgtttctgaaacacaaaaagacccttttctttaattccctttggaactgctccgtgttttaagagtgtaagagagaaggagagtgtagtgaatggggatgggttccaaaatggaaggaccgtctaccccagcaattcgacgtgacccatacgaggtattgtccgtgtcgagagactcaaccgatcaagaaattaaaacggcttacagaaagcttgctcttaagtatcaccctgacaagaatgccagcaatcctgaagcttcggagctatttaaagaggttgcatattcttatagtatcttgtctgacccagaaaagagaaggcagtatgacagtgctggatttgaggcccttgatgctgatagcatggacatggaaattgatttatctaatcttgggactgtgaacacaatgtttgcagctttattcagcaaactgggtgtccctatcaagactaccatttcagctaatgttcttgaagaagctctgaatggaacagttacagtcagaccccttccaattggatcatcagtcagtggaaaggtagagaagcaatgtgctcatttctttggtgtgacaataaatgagcaccaagctgagtcaggcattgtagtaagagttacttcaactgcacaaagcaaattcaagttactctactttgaacaagatgcgaatggaggctatggtttagcattgcaggaagacagtgagaagactggcaaggtgacatctgcaggaatgtatttcttacattttcaagtgtatagaatggattcgacggtgaatgcgttagcaatggccaaggatcctgaaggggccttctttaaaaggttggaaggtcttcagccttgtgaagtctcggaactaaagcctggcactcatatatttgctgtttatggagataacttctttaagactgctagctatacaattgaggcagtatgtgcaaaatcatatgaagataccacccaaaaactgaaggacattgaagctcaaattttaagaaagaggaatgagctacgccaatttgaagcagaatatagaaaggcattggcacgctatcaggaagtgacagacagatacacaaaagaaaaacaatccgtagacgagcttctgaaacaaagggatggtatccattcttccttcaccattgtgaagtcaaccaatattagtggaagtggtagcaatttaagcaatggaagttctagcaaaattaatggtgacgagagtccaggggaagatggagggtcagatggcaaggataaatcaggcaaaaagaaatggtttaacttgaatcttaggggttctgataagaagttgatttaatattattaattaaacacttgatttatttgtcagtttcaatcagcttgggttgcagtttttgtctagattatttttctctgcttggttcagccaagctggttaatctgttcattggtaatgtgatgcattcgaatgaaggtatacagtatttatcttactgtttccaatatttttgttactccgacagacccacatcatccaatttccttgtagcgacctgtatacttataatttttatattgttattttgtaatgataaa

SEQ ID NO: 72929 - DNA, 435 bp, Glycine max
  Clone ID: PAT_MRT3847_36872C.1
acggctgcgagaagacgacagaagggtatctttacattagcgaagagttgcagccagcctatgaagaccgagtaagatatataagtagtggtgtgaatagttccttcttcaagacacgaaagattgcatgtggaggagaatggttgatgactgaaacctaaataattggtgattgtgagagaactaagatttggagtagaaaacacaattttttgttgaatggtgtccaagatcttcaggtctttcaggttcaaaatggaaaggttagaattagatatgaagagtacttttgcatcaatgtgcaaagagcataggaccaaagtatttagcgagtggcaggttgaaaagggttcggcgcaaccattgtcagttgcagtaaaactgacatattccaagagcaagcttttcaacgctggtagctgcacagaatttgga

SEQ ID NO: 72930 - DNA, 205 bp, Glycine max
  Clone ID: PAT_MRT3847_36873C.1
ctcgagcctaattcggttctactgtcaactgggaggggttattttgatgatggtattcacaaacactccaaaaatacaactactactaaaaaggtcaatcttattatcgattactatgactatgcaaaaaattcttatgaactattcattctaaccataccctattaatttaatttctatcacttcttctatctttttgttaacc

SEQ ID NO: 72931 - DNA, 616 bp, Glycine max
  Clone ID: PAT_MRT3847_36874C.1
ggttatcattatcctcatcatcgttattgttatcactaacaaaacaacgcagtcctccgcggaggaaggctccggcaactccgccaccgccggcacggagtggacgttctccgcaaagtcccatgcgccctcctcggacccctcctgggacgccatacagcgctgcggtggcgccaccctggcactcggcgacctccgctttgtgcagcgcctggggagcggtgacatcggaagcgtctacttggtggagctcaagggctccaacggttgcctctttgcggccaaggtgatggacaagaaggaactcgttgccaggaacaaaaacaggagagctaaggtcgagagagagatattacaaatggtggatcatccttttttgcctactctttatgcctctctcgattcgcctcgctggtcttacctcctcaccgagttctgccccggcggcgacctccacgtcctccgccagcgccagcccgataaacgcttccaccacgccgcccgtaggttctatgcatctgaagtagtggggtgcgttgagtacctacacatgatggggataatataccgtgatttgaagcctggaaacgtgctcataagatcagacggtcacata

SEQ ID NO: 72932 - DNA, 302 bp, Glycine max
  Clone ID: PAT_MRT3847_36875C.1
caaaaaaccgccatggacagtgcagacgcgtggcgcgtggccgcgtgtggcaactccaacgtcaacaaaataatgctccgcttccgcccgatcgcgccgaagccggtcaccggaatttccgccgccgaagctggctccgccgtcggagaagttactcagaacaaccacgtgtcagtcctggggaagagaccgaagaggaagtacgttaggattcggagggacagtggatacgtgagaaagaatacggagacagtaacggaaaaagtaacggtaacggtaacgatgagtcttccgacgtggcg

SEQ ID NO: 72933 - DNA, 145 bp, Glycine max
  unsure (1)..(145): unsure at all n locations
  Clone ID: PAT_MRT3847_36876C.1
ttttncccccttataattccccccccgggaccaaacaacggggttttaattataattaagaccggtcttccaaaagcaagccgatataagttccggatgagggaaaacctggatgacccgtattccaatttcaagcgttaacaaa

SEQ ID NO: 72934 - DNA, 1208 bp, Glycine max
  unsure (1)..(1208): unsure at all n locations
  Clone ID: PAT_MRT3847_36877C.1
gccccaagtcctttggtccgggggcggtgcccgccctgtggctgggtcggagcccccgtggaggatgagggcatgaggagttctgctgtgcagcggaggctgcttaatgggattagagagaagcttgatggggtggtggtgaatgggagcttggagaggcgctatgtggggaatttgaatttgtcatttgcttatgttgaaggggagagcttgctcatgggtttgaaggaggtggctgtgtccagtggcagtgcctgcactagtgctagtttggagccttcgtatgtgttgagggcgttgggagttgaggaggacatggctcacacttctattaggtttggaattgggaggttcccaacgcaggcctgcatagtttagttgggtgcgttcttatgtgttgagggcgttgggagttgaggaggacatggctcacacttctattaggtttggaattgggaggttcactaccgatgctgagattgatagggcggttgaactcaccgttcatcaggtggagaagttgagggaaatgaatccgctttatgaaatggtcatggaagggatcaacatcaaggatattcattgggcacaacactgattatcaagctttattatttagttatattgtatccttgatgttacattacaattaagaatttaccctggtagagctatttattaggtatacaccttttatttaaatgattggtagttctacttttgtctgacgaaagacatcctttggtactttatgggctaaccaatgnttggtgttattatggtnttcagatgaacctctcccacacttcttcctagtttccccttcctcggcttaaggaatagcgatttcaagttttgctctatctctgttcttggatcgggaagagggggagctggcgcaggtaccttggttttgttttgcatttttggtcgtttgtactatggtattgaactcgtccagcattgaggcacaggcctctttcgccatttctagctttgctctggaaattgctacttgttatactaaacataataaaaagatataaacccaattctctgtaacttatgtctgcagtaaaaaaaaatgtctactagtattattctctaaactttttttgcattatttctttcctttccctgttttctctgtgaaagagattagaattttacttttaatattattgtgttgcaattttatattcaattct

SEQ ID NO: 72935 - DNA, 196 bp, Glycine max
  Clone ID: PAT_MRT3847_36878C.1
tatgcggtcagcggatcgtgatgtctatccctcgtgtgaacaaatgcttcttcagcgttattatgacgagctctctgaggtatactgcctagcttacgtctcacagtacaggaatcgtaatgtaactattcattcattacctatataatatatatttgtgaggaatgcacaatattgctagctgttatgcttattc

SEQ ID NO: 72936 - DNA, 741 bp, Glycine max
  Clone ID: PAT_MRT3847_36879C.1
atttctatacaacttgatttggtcattggtgtgtgggcattgcaccccaaaaccaaaaccaaaaccacattgtcattaagccataccgttaaaacttaaaagggtgtgtattgagtttcacaatttgttcccttcttttcatccttttaccactctttcatcataaattggagtcgcctatagtttcttatatactacaaaatatagaagaagaaaaaaaaaaaagaaaggaagatgaatacatttagttccgaaatatgcagtagtgggtgtgagtctggttggactctatacctggagaattctttccttaaccagaatgctgctgcttcacatagaggtggaactgaggggttttatgaggaggaacacaaagacaaaagattcaaaggtgaggaggaggacttgtccatggtatctgatgcttcttctggacctccacatttcccagattatgatgaggcttacttcaatgaagaagtcaatggttgcttttattcagcttccaacaaggcagtgaagctggccaagagtggtgcaaagaagcagaaagttaaagaaaatcaacaacaccttcaagatcagcagcatctgccttcttttcttcatgacactgctagctctcctgtctttgacttttccactaacaatgttaatgtggccaaccaacaaacttccatagggagtatgctagattattcacaaggtttttctgcaacttattttgagggaagaccatca

SEQ ID NO: 72937 - DNA, 256 bp, Glycine max
  Clone ID: PAT_MRT3847_3687C.1
ccctcttgtttttttttttttttgaagcccacaaggcgattttgaggaacattaaggaaaaccacaatggggaacccccagcccttcttagggccctaagggggcccccccccaaaaaaacttgcccccggggaatgacaaagaacaaacgggggaaaaggggcacctaaacctattattaaaatttggaatggccctccggggggaataaaaaagggggaaaaattttggatccccccctcccggaaacccaagg

SEQ ID NO: 72938 - DNA, 377 bp, Glycine max
  Clone ID: PAT_MRT3847_36880C.1
ccaccagggaaaaaactttgttttgttttccccgtgcaattgaacgtcaagcccgacactttttttgagtttgggccggcgactttgcttctggcgccaaacgagagttttctcttcttgttagagtgagtcctttagagagagacaaaccaattgggagaaaaagtgccgatgcttatgatatcaggttaatgccagaggggattatgatctagtgccaccatttttgcccggagaaggaagacggcatcacctgcctcatcttggtggcttgttccttacattttgtaaggctctgagctgttacgattcgggccctcatggcgggcagcctgtgctgatacgacatgcagactagtttcaatggggtgggggga

SEQ ID NO: 72939 - DNA, 453 bp, Glycine max
  Clone ID: PAT_MRT3847_36881C.1
cgggtgtagggtgtccgaacacggcattattgatggggtcttgcagcggcgatcttgcggcaacgacggcggtgtggtatggaggggaagatgacgcggtcgagatcagaggggacgaggaaatcatcctatatgttgtcgtaatttgaaatggtggttttgttttcttcaatgtttgtgctgcttatttctgtttgaggtttgggagtggatttgccaatttgtaacttggacttggaacaatgtcgtaatggccaccgaaggtggaaagctaagaaggctcttgttcaacagttttacaaacttgtttatttggatccttatctgttgcaacgtggcaattgtagccggaatctgggcacatgtttagattttgtatactacttgttgtcatgtattaggttttttttcttctactggaaattcatgtgttctttagtgttgttcttgaat

SEQ ID NO: 72940 - DNA, 364 bp, Glycine max
  unsure (1)..(364): unsure at all n locations
  Clone ID: PAT_MRT3847_36882C.1
gaaggcggcgtgggttctcccacggcgcacgcggaacatccgtgaggcggtcaaagttgggcggaagctcggcganggccaattcnggaccaccttggantgcacgcgccgggcgagtggtgggaanttcccntgcaantcaattgcggaccccgcgctgctgtgcggcgagcgactcgaggacntgcggcncnacattcatataattcaccacttgtcggaacacgcccgcgttgaccgcatctaatggacctactaagatgcgacggccgtgctcctggtcatgganttgtgcgacggtggagagttggttgacacgatcacgcagaacggacacttcaccgacatacacgccgcgacgctg

SEQ ID NO: 72941 - DNA, 549 bp, Glycine max
  Clone ID: PAT_MRT3847_36883C.1
aaaaacccaggggagcacccaaaaaacttcccactaaacccagaggaaaaaaagggggaaaaaaggggcccgggccgggggcccccaaattacccccctaaaacccccaagtaaaaaaccccgagcaaaattaaaactgggaaaaaaaacaacttcccacaggggaggggcgggcaaaaaagggcctttggggcccaaacaagggcccattttaattataaaaccggggaaaggcccccttaaaacccacataaagacccttaaaaaccgggggggaaaaaaaaaaaaaagcggtttgcccaaatttgggggaaccgcttggggggggggctttgaaaaccaacaggggaggcccccctgggattcggggggggggggcccaaaaaaacccccccctgaaaaggggaaaagttggggtacccaagggacccaaaaggctgttgggagggctgttgtttttgccaaaaccccccgggggggggattccgccccgggaagcggaaaaacgggcggggaggaaccgaaaacattgttcaaaagctaggcccg

SEQ ID NO: 72942 - DNA, 867 bp, Glycine max
  Clone ID: PAT_MRT3847_36884C.1
atgctgtgttcctgagtccacataagtttcttggtggtcctgactctcccggggtgctcctcatgaataaggccctatacctgctaggatcttcaccaccgtccacttgtggaggtggaaccgtgacttatgtcaatggcttcaatgaacaggatacattatatttggagaacatagaggaaagggaaactggaggcacccctccaataatccagacagtgacagcagcattggcattttgggtgaaggaatacataagctatgaagagattgaaaaacgggaacaactgtacattaacaaggcattcgagaggtttggttcaaaccccaacattgaggttctaggaaacttaaaggccaagagacaagccatattgtcctttctgatatactctaccaccaccaactcttcctcagctggtgagtggagtgatggtaacaaagaaaatgaaggggagcttgatttgtgggcagaaacggggaaccaaagaggtaaaccacttcatggcccttttgttgcagcattgctcaatgacctctttggcattcaagctcgaggagggtgtgcttgtgctggaccttatggccacgaattgctccacatcaacaagtctcaatcccttgccattagatcagcagttcaagagggctatattggagtaaagccagggtggactcgagtcagttttccatactacatgagtgaagaagattttgagtacattctaagagctatagagtttttagctgtgtatggccaacgattcattcctctgtatagtttcaatttgataaatggcagctggagattgaagacagagaaatttgaggcactaaccaaggaagacatgcgaagggacgaatcat

SEQ ID NO: 72943 - DNA, 431 bp, Glycine max
  Clone ID: PAT_MRT3847_36885C.1
cccgtccgtaagcttgaatcctttaaaccggccgccctgtgtgggggggggtttttttttttattggaccccgcgcgattgtttcccgagaaaaatgaaccataaaaacattttttttattttcataagaagtcgacaaagaacaacgcaagatgccgaataaaataccaatattatatgtccaaccccagtttggggaagtcgggagacggctccaaagattcattattcacgctttcaaaaatggaccatatgggtgggagcagctacagaactctttgtaaagatcaaaccgggctttaatccgttcaaaaactaccaatgaccgcggagcaagattcattatgaacctgggggggggggagaaattctaccaattatagttgacatattctatgcccaattcctaataggcatactgcggggaatga

SEQ ID NO: 72944 - DNA, 526 bp, Glycine max
  Clone ID: PAT_MRT3847_36886C.1
tttttgtgttttttttttttcctttcttttttttttttttttttttgttttgtttttttttttttttttttttttttttttttcaaaaccggattaagggaccccccgacccaaaaagggaaacctttccaaggctaagttaaaaataccttcaaaaaatcaccgaccaaaatgggccctgggggttcccccccccccaaaaggaagaaaacccccccttttaacctgggttagccccccatttaagatttaaaaaaaggccccccttaattttggaaaacccccttaacctagttcttttttggggccgctccctgggaaggggcctttccctgggccctggttttggttgggaacttcaaccccatgatcccccccccccctttttttttgttttaaccgcccctggacatggaaggggcccttaatgggccccgggggccaccccggaaataccggcccggtcccggggggggtccaaattttccctatagggggcgcattaaaacgcgggggcgaaccaggg

SEQ ID NO: 72945 - DNA, 207 bp, Glycine max
  Clone ID: PAT_MRT3847_36887C.1
gtaaggtttttttttaaaaaaattacatatattttttactaaagacaatcttatttgattaggatcactatgagcaataaaatttttggtccaactattatttaacacccactaataagagatgacaacaccaagcctttcgtccaactattatttaacaccgagttgtatgcatcattttctttaaaaaaaaaaaaaaaaaaaaaa

SEQ ID NO: 72946 - DNA, 416 bp, Glycine max
  unsure (1)..(416): unsure at all n locations
  Clone ID: PAT_MRT3847_36888C.1
tataaaagaggggagggaggctggaattatcagctttacattttgcccccccccccttttactttcattccactatcataacttgagatgaacacgttcccgagacatcggaaatttcctctgctgaaaatttcacgaggatcaggcggtttacncaatcttttttggagcgtgtgatcnggccggcggcagcgggccaggaagacgaggagcattccgaggaggtcatgagcatgagccacaaatgcaagtgggaacgaagaatggggctaggagataccttggacaaggggcgtggtgtggtgtcctatgtcatgagtgcacatatgagaagggaaaaatcctcatcctttagctcttatttcacgcattaaagtctctctctctggaatgtggagcaacagccagcactctat

SEQ ID NO: 72947 - DNA, 219 bp, Glycine max
  unsure (1)..(219): unsure at all n locations
  Clone ID: PAT_MRT3847_36889C.1
ctnccttttttttttttttatataattttttttttacacaannnaagggttgggctctttttttgtcactcccttaaatagggctttgaacacatgacctaacaaagtcatgtggaaaggaaaccccttttcatgtcggcacattcaaaacacacactgcaatatcaacaggggattttccttcaacaaggtgttactcctaaaacagcaaatccgggc

SEQ ID NO: 72948 - DNA, 956 bp, Glycine max
  unsure (1)..(956): unsure at all n locations
  Clone ID: PAT_MRT3847_3688C.1
cctcgtgccgaattcggcacgaggaacttgtttggtaagttttcactagacatgtcaaactttacatcattggtattcatcaatcttggagagaataatttttctggagttctaccaacaaagatgccaaagagcatgcaagtgatgatattgaggtccaaccaatttgctggcaagattccaccagaaacatgcagtctcccttctctatcacaacttgatctttcgcaaaacaaactttctggatctattcctccttgtgtctacaacattactcggatggatggtgaaagaagagcgagtcattttcagttcagcctcgatttgttttggaaaggtcgagagttgcagtataaagacactggactgttgaaaaatcttgacctttcaacaaacaacctgtccggagaaatcccgcctgaactttttagcctcactgaactgttgttcttgaacttgtctagaaataatttaatgggaaagatacctagcaagattggtggcatgaaaaatttggagtcccttgatctctccaacaatcatctttcaggggaaattcctgcagccatctctaatctttctttcctgagttatctcaacctgtcatacaatgatttcactggacaaataccattagggactcagcttcagagttttgatgcacggagctatgctgggaatcccaaactttgtggacttcccttaacaaagaattgctctaaggaagaaaattatgacaaggcaaagcaaggaggagcaaacgagtctcaaaataagtcactctatcttggaatgggagtaggctttgttgttggcttatggggactttggggttctttgttcctcaatagagcatggagacacaagtattttcggttgctggatcgtattctagactggatntatgtgtttgtagctctcagataaantaagttggtgaattaagggcaagttct

SEQ ID NO: 72949 - DNA, 1585 bp, Glycine max
  Clone ID: PAT_MRT3847_36890C.1
catggtttggacgatgtttggaatgagaatagaatgtaacaagaatctttacatgctgccgacgaggaggaggatctaaaagaggaccagaaggttgtctttctaaaagagaaacaaaaagaacacatgtttgagatgttttggaatgagaaagtgtattgagaaacaagatttgagaattttcaagagaggatagcaatattgtctctgctttaatttatcaccacattccttctcatctcaagagatgctttgcttattgtgccatattcccaagagatttacatatgtttgtaagagagcttttaattttgttgtgaatggctgaaaattttatacaatgccctcatgagagtatttagatgatatattatgtgggtatgttgttaaacaatcaagcagagacaaatgtgtttagtcatgcatgaccttctcaatgatttggcaaaatatgtttgggggacttttgtttatgttggaagtcaaagaagcacaagagtttttggacagaatttgtcatttctagacgatagatatgatgtttctaaaaggtttgatgccttacatgaggctaacagcttgcttatgtttctaccattgagatagatatgaagtttctaaaaggttggaggcctttgtatgtatggattttgtcatttgtcatgctcattgatgtatgactgtcctccaagattaagtctatcgttggcggatgattggaatgtgacctagtatagtgacactaaagacaatcttgatcttgaaatgatttggtaggagcatgctcataaatcataattgcatctctttgatagtttgtttatttggagctgtcctaaatttgtatcattttcccaaggaggacttgggcacctaggcaagagttgcttcaaattcagatattgaagaacttaaaatcattgcctaattgtatgcagaccctcctcccttctctttctccgataggatatactcaattgtccacaatcggagtcaccctctaatgccatcaaatgggaagttttgaaaactcctgttaattacaagactcaagaaatcaaggttgtcttcactacatgtagtaagagagttgcttcaatcgtgcagtcaaataaagcaagtcaactagaacagttacatgaagaaaattgttagaaatatgagttttggttcatgtctctcttcctgatgtatgacttgttctccctgagacagtgggtattgattgccatgttttatgttcttctactttttcataagcttccttggaattctatgatgggaagaatgcgaatataaacatgtgaagggtattttctcttgcctaagacagctttctatacagttgccagagcaactttgatgtttaaagaactaattatttacaattgccaacagcttgtagcttctgttccaaatgcttcagctattggctttaccaaattgtagggttatgtaggggcccagttagagatatagttagtagttgatagtcagttactagttggatatataatgcctataattatggcctgatgtaattacttttactcattcaatcaaatagcaattttactttcatctc

SEQ ID NO: 72950 - DNA, 390 bp, Glycine max
  Clone ID: PAT_MRT3847_36891C.1
ctccagagcggccgcttatttttgttttttttttttttttttttaacggtcattgaaaatattatattaaactaacaatggagatattttaacaacaacattctccatcaaaaagaaaaaaagaccaaccttgtaaaactttaaaactctcatcccatttcattgcaaccccaccaaaccacaccaacacacaattctccaaccaaaaaaaaaaacaattttaccaccccaacaaaaccccaataaataaccttacacacctacttttaaataacaaaaaaaaacaacctctccaaaccaaaatttatttttttccatcaccaacataaccccctcaaccattttcaacaatattcgccaaaaccataattaaaactacccccttcctct

SEQ ID NO: 72951 - DNA, 448 bp, Glycine max
  Clone ID: PAT_MRT3847_36892C.1
gaagcaaaaaattaaactcaatttcatttaaataaagagaaatatgacacaaccaaaaataagacagggcaatcagaaaaatgaaattgattgattcgtacaatcctctttctcttttgccttgcagaacaacagtattgtcatgacaatccaaaaatcatgatatgcatcccagacaccctttctgaaatacaaagaattggaaaattaaaaaattactttccatttcattggattttgacaaatggtatgtgtattttggccttttacaaaatctggtgcagttttgtgttttgaagaaaaccatggtagctggcagaggtcaaaattgcagaatgagatggctccagatttatggtgctagaatccgatccatacttaggaggcatctgaattttttgaggtatgcttgcaattactaagaattttagtctttctaatgaatgat

SEQ ID NO: 72952 - DNA, 258 bp, Glycine max
  Clone ID: PAT_MRT3847_36893C.1
taaagtaaatattttgacgggaaaacgacctatccgcgatggctaatgaatattcaatacaaataccgactcatgttatgagagtactgaacaggattttacgcccaaaacatcattcttgagaacgattcgatcaggcgggagctttaacatctgaagttttacaatgaaaggcggggcttatgatatgaccgcctatagacgtaatgtaattaatacaacgttgtacattgtctaccccgaaattattaccacgca

SEQ ID NO: 72953 - DNA, 195 bp, Glycine max
  Clone ID: PAT_MRT3847_36894C.1
ggacaaagctaatgaactattaaccggggatggggaaataataattggtaccgactttaacggtccatataaaaccatattcacggttaatccaattacctatttgttatagatcgttataccaatatcggatttgaaaggagtaatatgggttaaaattagccgcatggatcctactaatatagtagcatttta

SEQ ID NO: 72954 - DNA, 417 bp, Glycine max
  Clone ID: PAT_MRT3847_36895C.1
acattgtcgacactcgacagacatataaagtaactgaagctcaaaacggtgatggaagaaccgaacaagacagagaacgaagatgacagggacgaatcagaacaacgagtgtggagttggggtgctggaaccgagggacagttaggaacaaagattcttcaggatgagcacttccctcaactccttcaccaattctctctctcctccatctcttcccttgcctgtggcggtgctcatgtcatagccttaacctctgctggaaaggcactatcatggggtaggggcaattctggccaactgggccatggggaggttgtgagtaacactttgtatccaaaggctgtaacatcattggatggctatttcataacccatgtctctgctgggtggagccactctggttttgtttcagatact

SEQ ID NO: 72955 - DNA, 259 bp, Glycine max
  Clone ID: PAT_MRT3847_36896C.1
gttggggctggccctcttgggcattgggggtaaaatttgggttaactttcccaagggggaaacaaattttgcctccgaaaaccccctaaaccgctttgggtgggtcttttctggcatcgtaagaagtggcctgctgatgctcctgccagcatttgtcttcattgggctggaacaggattactgctgtggctgctttggccatgaaaactgtggcaaacgatgtgcgatgctttcttctgtattggctgctctcattgga

SEQ ID NO: 72956 - DNA, 309 bp, Glycine max
  unsure (1)..(309): unsure at all n locations
  Clone ID: PAT_MRT3847_36897C.1
attggtctggctacctactttcttaaacttcaggtggctgtgngacaaagattggtacccctaggctttttcctcccaaggttgacctttggaataaaaattaatgggcacaatggtttttcggggtgaaatggtaatggcaaatttctggtaatttttaatggatccctaaaggaggggcatattaaaagtaggggggccttaataacctggtttaaggctttcacaatccttccgataaatttggaaaaagattttggcggaatccaaataagctcctggattaagcagatggggatgaattgaacc

SEQ ID NO: 72957 - DNA, 680 bp, Glycine max
  unsure (1)..(680): unsure at all n locations
  Clone ID: PAT_MRT3847_36898C.1
cccacgcgtccgatcagaacatcgaggaaatagcagcattggatgccattgatgcagggaagttgtaccattggtgcaaggctgttgacattcctgctgcagcaaatactattcgttactatgccggtgctgcggataaaattcatggggaggtcttaaaagcgtctagggagttccatgcatatactttgttagaaccaattggtgttgtaggacacattattccgtggaatttccccagcaccatgtttgttgccaaggtgagtccttccttggctgctggttgcacaatggtcctcaagcctgctgaacaaacacctctctcggccttgttttatgctcatcttgctaagctggctggaattccagatggagtgcttaatgtagtacccggatttggccaaactgcaggtgctgcaataagctcacacatggacattgataaggtaagctttacaggttcaacagaagtggggcgtgaagtaatgcgtgctgcagctaatagtaatttgaaaccagtttcacttgagctaggaggcaagtcaccattcataatttttgatgatgcagatctagataaagcgggtgagcttgctctcatggccgtagtatataacaagggagaaattttgtgctgcangctcccgcgtatttgttcaggaaagggtctatgatgaatt

SEQ ID NO: 72958 - DNA, 373 bp, Glycine max
  Clone ID: PAT_MRT3847_36899C.1
atgttgattaacataattttaatcctattcttcttgaaatttgtttatgtggttttaaaaaaaatcccgaacccggggggacgaaaactttatttagggcttccccaaaaaaaaaactcttaaatggccccctcaaaacccccttttttgggttttaccaggggggcggattttaagggggcccctacggaggggaagaaaaggttgggggggggctggttcttttccccaaatccaaaactggtgttttaaaaaggggggcccccggtggacaccccccccaacgggggtaaaacggggggaaccctccccggggaaaaaacaacccccgggggggggccggtgaaaaaagattacaaaatgggggggggcc

SEQ ID NO: 72959 - DNA, 414 bp, Glycine max
  Clone ID: PAT_MRT3847_3689C.1
aaaattatctatagtataataaaatgaattatatttttattgcaccccaaacaaacccccaaaaccccccgccaagaggcccggggggaaaaaacgggagggggggggggaggaaccaagggaacaaccagggcaacaaaaaaagcaagaggaacggccaaaaaaccaagtgaaaaggagggcccaaaaggggccccaggggggggacccggggggcccccagggacccccgcaggggtaccagcagaacaaacagcggggcgaacaagggggggcccaaccgaaaaccaaagccgggccccggggggcgccccggtccccccaaaaagccgcccaaaaaacgacccgggaaccaaggggaaaaccccggccgagaggaaagaggggcccaccgaaaaatacccccgaggtgcc

SEQ ID NO: 72960 - DNA, 704 bp, Glycine max
  Clone ID: PAT_MRT3847_368C.1
tgatgatggtgatcctcaaaccgcaaatctttatgttggaaatctctcacccaaggttgatgaaaattttcttctccgtacttttggaagatttggacctattgctagtgtgaagattatgtggccaagaacagaggaggagagaaggcggcaaagaaactgtggctttgtagctttcatgaacagagctgatggacaggcagcgaaagatgaaatgcaaggagttgtggtttatgaatatgaattgaaaattggatggggaaaatccgttgccctcccatcacaagcactacctgcacctccaccagggcatatggccatcaggagtaaggagggtagtactgtgatcttgtctggtccttcaggtccaccagtaacaactgttcctaatcagaattctgaactggttctaactcctaatgttcctgatataatggttacaccccctgaggatgaccatttaaggcatgtaattgatacaatggctttgtatgtcctggatggaggatgtgcttttgaacaagctattatggagaggggtcgtggcaatcctcttttcaatttcttgtttgttcttggctcaaaggaacatacctactacgtttggagactctactcatttgcccaaggtgatactcttcaaagatggaggactgaaccttttatcatgattacggtagtggaggtactctattattcttttc

SEQ ID NO: 72961 - DNA, 290 bp, Glycine max
  unsure (1)..(290): unsure at all n locations
  Clone ID: PAT_MRT3847_36900C.1
ttgtgattggtccctatttctaactncaatcctattatctcaatgccttcatcatctcacaatgctttggtgaattgaatnnatggaacttggactcagaagctttgtccatttcactcccatgcccaccatcaccatacacatnnnnnnnnnnnnnnnnnnnnnntttttcaccatttctccaataattctcttctcttccctgcatgtctcaccctcttaaacactacttcttcctctttcatggctacccatttgcaggtatcagaaggtgcacccatgaagcattc

SEQ ID NO: 72962 - DNA, 350 bp, Glycine max
  Clone ID: PAT_MRT3847_36901C.1
gtttctgagaggcttaacaaacctcgcagaacaaaaagaaactcactctgacacactttggttggcgaaaaccctttacttctctattgtgtttgcagttgcttatacgatgctatcgaacccttttatcccaagttatgaaaaggtaaaacctgtattactactcatatttgctgattgtgtgttaaatattacaaagtggaggcccgttctgcacgtataaccaagaagctatggaatgagccgaggagcactctctttatgatcaggaagggtttggaggcctagaggaagctgaatatggacgtgactttgaggatgaacaaagggagattgctcagataatctat

SEQ ID NO: 72963 - DNA, 977 bp, Glycine max
  Clone ID: PAT_MRT3847_36902C.1
aaaagtaaatatactgatgtcttttgttaggggacattgaatcagaaaactgtgcgaccaattttctcagccatgtatgatgaagaagcagagttggccatataacatgtattttaactttaagcataagtatgcttgagttatataagtggacattatccaccatctatacagaaaccatttagatcatgggacaagacatttgcaaaaggggcctagttaatccaagatttccagataaaatgtaaaaaggcttcagctatttgatcaaaaactttgatggtgactctcttcaatttctgcaggctgcttttacgcttccaagcgcttgacaaatttggtcattgattttgttccatctttctttcttttttcttttaatctctacggcttatgttgcatacaccttcattgacatcatcattacattctttagtcaagaattttctctccagttgaaaagatattccagaccaatgtgcctattatgtacaatgcaacagcaaccttaaaaacatcatcccaagaacctcgttggagtatgtatccagttgcagctgtaccaaagacaccagcaagcacacctgcagtatttgatagtcccagcaatactccagcatagcgtggtccaatgtcttggtgattggaatatagaccagattgcgagaacgcatcagatccctgactgcaagccatgcatagtactgccatggcaggtgttctcacatggcttagctgtgtaagaaaaaatgcaggacccagaaacccaatcgattgcataatctttcgaacagaggttatggaaaggcctttgctcacaagtgtatcagcaatccagcctcctatatttgcaaaaatagccatggttaaccatggcaggacacaaaatagcccagattcagtgagattgaacttcagaacctgattgtagtaggtaggcatccaggttaatagaataaatgtcccccattatggca

SEQ ID NO: 72964 - DNA, 290 bp, Glycine max
  Clone ID: PAT_MRT3847_36903C.1
tcgcatctctctctctctctttctctctccagcctcaaccatggcttcttccacttcctctatctctctctcccaagccctactccgccccaccaccacctatctcccctcctcctcctcctcctccctccgcctcacccccactctccgccctaccccacccgccctctccctcccgagacgcctcaccacctccatccgcgccgtcgacttcgccaaaaccgatcagaaggcaaccgtggacgccgcgctggttgaaaaatccgtcaacaccacccgattcctcgtca

SEQ ID NO: 72965 - DNA, 1342 bp, Glycine max
  Clone ID: PAT_MRT3847_36904C.1
tccccagccgcgtccgctccccctctctctttctctacctttctgtgaatttctgttgcattaattttctctacagaaagagaaaaaaaaagagcttccacaatggtgagcgctgcaattgctcgtaacgtcgtcggcgtaataggcaatatcatctcctttggcttgttcttttcacctgctccaactttctatggaatcgtaaagaagaagacggtggaggagttcaagcgagattcatacattccatccttctctttctctctctctctctctcactttctctacctttctatgaatttctgttgcattaaattttctctgcagaaaaaaaagagcttccacaatggtaagcgctgcaattgctcgtaacgtcgtcggcgtaataggcaatatcatttcctttggcttgttcttttcacctgctccaactttctatggaattgtaaagaagaagacggtggaggagttcaagccagatccttatatagcaacggtgttgaattgtgcgttttgggtgttctatggaatgccttttgtgcacccaaacagcattttagttgtcactatcaacagcgttgggcttgcgttcgagtttgtctatcttaccatatattatgtctatgctaccaacaaaggacggaaaaagctactgatttttcttctcatcgaggttgttttctttgctgccgttgctcttataacaatgctggcattgcatggcactcgccaaaggtcgttagtggttggtgttctctctgatatcttcaatgttatgatgtatgtctcccctcttacaattatggcaaaggttataaaaactaagagtgtgaaatacatgccattctggctctctctggctaacttccttaatggtgcgtgttggacaacatatgctctcatccacccatttgacctttatgtcctgatcagcaatggtatcggagcaatctctgggcttattcagcttatattgtatgcttgctactgctcttgcaagagtaaaaatgatgaggatggtgatcaagatttgaaaccaagtggctttcagctctctaacttaaacggaagagctgcagtagtctgatgtcacatatatcaacatccgtttaaaacctttctttttcttttttctttttactccttcttgaccttatatttaatcctttctttttctttttttttaactccttcttgaccttatatttctatctgtcctttaaatttcaatgtcaaatatgacatttatatagatatagatacatatatacgatggtgttgctttttataatatgcgtgtgatgcatactagttaagcactagtttggattttcattttcaa

SEQ ID NO: 72966 - DNA, 1419 bp, Glycine max
  Clone ID: PAT_MRT3847_36905C.1
catgctgagaagagtcattgaaacgtcaaagatgtactctctgcaatgcagaaattgaaactggttctttgatccctaaatcatgctcttagagctgcagcagccgctgtcaagcatgaggacgatcggaggttatttcgtaatgccgctctccgaaagcggcggaaagaaatgggtgaccaaatggattcaatgagaagagtgaatagggaaaatggagattttaatgctaccgatggacttcagcggggcgtacaatatccattttcggtaaatgagaaagttgttattaagggcaacaggagaacaccagaaaaatttgttgggaaagaagctgtgattacatctcagtgtctcaatggctggtatttgctcaagattattgaaaccggagagaatgtccgcctgcagtaccgttctcttaggaagatcttaaactcaccagcggaccagtgtccctcacagccaattcaaaatagcagctcttaaaattgatttattataggttttctttctttccttttacctccaccagaaaaaaaggaaacttttgtagtcttgatctttgattgtaaagaattacattgactggtccggctccttacagcatgcgatagaagtttataatgtatcaacgaggttgtttgtgtagatgctaatattaggtcggcttataattattgtaaagaagaaagcaggcaaagataaattagatagcatgtaaattgtagcttgcatttactaaaatagatcttatgtttttttttagttctagcgaatcaacaacgaggttgtcaaaaggtgacccataaaaaaaagtgaagtgggtaaagcaaaaacagccaggggatactttaaatttttatatttgcaaaataatcaatccatcccattcatgtatagaaagctaccctgccattacagggtgagagcagttcaaacaacaatgtcattggaggaatttttactcaaatttggattactggaaactgcccttcttggaaatcttatgatatcatgtcttcattggaaattaaaataataattgccgaaaaaaggagaggtcttgctctttgaagtttgaagagtatacagcacctggttattataacatgtagctcactcttgcttagtagctctctacttttcaggtcattgcttacttagttacatccacacattttggtttattggctttattcaattataagtctttttttttcttctttaagaaaaacaattgagagatttcttaagttatttaatctattgtcgcctaaaaattacgatatccactatctctaatcatgagtattattgtcttcatgactatctctgcaatacttttatgctatagttcatggtttattgcaaaaaaaaaaaaaaaaaaaaaaaaacaaaagcggccgctctagagga

SEQ ID NO: 72967 - DNA, 480 bp, Glycine max
  Clone ID: PAT_MRT3847_36906C.1
ggggtgggttttttttttttttttttttgttttattgttccttttttttcccaaaggggcggcaaaattttaaaacttatgcaccgttctacgaaccccccattaaaaccattccccttcctgttaacctttatgaataaggggaaaataaacaacaagctggtccggggtctccgcaagaaaaagcttatgtttaaattatttttttccaggccgaaatagttttggggaaaaattttgtgggcgtgccttgatccacaactcaaaatacaacgcctccttattttttatgggggggcctaaaccacgataacccttaacctcccatcccacaccaattttttcaaggaacgggggacctgtttgtccggcctcaaacattaccgtttattaaaccaccccatgggaccattataggggggtcgtgttcgcctctggggaaatttgttctttagagaaagaattaaagggacccccccc

SEQ ID NO: 72968 - DNA, 284 bp, Glycine max
  unsure (1)..(284): unsure at all n locations
  Clone ID: PAT_MRT3847_36907C.1
cggcaatcacctgataggtgttacaagaatttgtaaaatgaagtattttcccttattacattcttatctctgatctaaaattgtatttcttttgcattttcttctacgatcactgtnattaatgatgctttgttttatcttgaagaacgaaattgtcccttatcccttcacagccaccacccttcaccgcctttacaccgtccatgccaccagatctcaccacctcgccaccaaatctaacttccaccacccagatctcaccgtgcttaaggactgtcacatgc

SEQ ID NO: 72969 - DNA, 371 bp, Glycine max
  Clone ID: PAT_MRT3847_36908C.1
agctcacttttttggcggccgccctcttttctggtggtggggggtgtgccttttttcttctttttttttgggtttttggttttctgttgtttgtttcctgcaaacactttcctcggggggctctttttattcccttgttccgctcctgttcggattaatgggcgtggtcagtttaccctcccttggggggcggtcccctatttgggtggggggcttggtggccccctctttgcccctctttttttctcccgggggtgggggcggctctcgggtgcccccctcccttttgaggcgcgttggcgtgtttcgttctcctcgctccggttcgggttgctgctccccgcctttgggctgtcgctgctgcgtgcggc

SEQ ID NO: 72970 - DNA, 288 bp, Glycine max
  unsure (1)..(288): unsure at all n locations
  Clone ID: PAT_MRT3847_36909C.1
ttgtttacgcgcggggcgaagcaccacacccccgggcctattgcagagcaccacccccactcaccaaagcacgccaacacaacacngaccccagcacaggaaaccaggcagacccgaaaagacacaaacgcgaaaagaaacggacaaggccaaagaagagcccgacgaagcaaaagcaaaaacggaggaacccaaggaagaacaaacagccacgacagaaacacccgagaaccggaaaaaaacccacaacgcacagagcaancagacgcaggaagcaaagcccaaagc

SEQ ID NO: 72971 - DNA, 463 bp, Glycine max
  Clone ID: PAT_MRT3847_3690C.1
tatctcgatcgaactgtccaaggtcctgtcacaaaagtttcagttggtgttatttatgctgttggttgggttgtttgtggtggttaatttgaagggatttttgttgggtaagttgtttggtcaagtgaatttgtttgattaataataataatttgagggtgtattagagcagtactagtaaatcttgcttaattttaaggttatgtttgatgtagataatttgcgtttggtgtttgatagtgatgttccatttgttgttcggttgttcaggttcattgatcaattgctagatgacgtgttcgcacctttcagtaaccgccacgtgatgggcatcataccgattcagttgcagggatgctcagttaggttcaggccccagttcagggggatcccacacatcgccgcctctacagcagccagatccacaccccgcgagctgagcaacccctaacgccaatttgat

SEQ ID NO: 72972 - DNA, 457 bp, Glycine max
  Clone ID: PAT_MRT3847_36910C.1
tacggctgcgagaagacgacagaagggctagacatctacaactctggaaattgaaaattaaagctgcttactcaaagaaaagatcaatgactcgttgaatggttcctgagttggccaattctttttctgccacttcatttccagtttttagaagtactgcaataaactccacgatctgaaataagttgcaaattggtcagagaatgaaaatgaattcaaaaatggcatcagcgctctatccttgctcaggaatatgaatgtttgaagtacacattgaaggttatcaatggaacaaaattctatatcaactgactaactataacctagttctggagggaacagccatacatatcaaatttatcaaaagtaaaaatcataacaaacctttaatcgatgcttgccacagcgaggtctcaattcacccatatgttgaaggcagtcccttattatcagatga

SEQ ID NO: 72973 - DNA, 181 bp, Glycine max
  Clone ID: PAT_MRT3847_36911C.1
acgtttccgcacacgtttcctcccacccttccttccggttgagagaggccgccaaagggttccggttgcaaaaacacccagaaggtccggttgcaagaagccaacagaaggattttgagttgtgataacctcaaaattctaaataaaatgaaataaaaatgaccaacacacaatatttcat

SEQ ID NO: 72974 - DNA, 332 bp, Glycine max
  Clone ID: PAT_MRT3847_36912C.1
ccagttatgtctccactttcactccactccgagtccaagtgcagctccctcaactacactccccggcggtcatattatatcccacctcctgtagtatcttgatctaggaccccttacccgtgcgtctgctgatagttgactgactcgtgctgtttccatccgcgtttagatccgtgtgctgtctgataataggtgtgctttgctgtatgctactctttgcattggtagtggtgttggtggttcgatatattggtgccgtgttggcatgatgcacttgcacgcttggatagcaccctctcttttgttcttcatgctgcatgcaccttgtttgg

SEQ ID NO: 72975 - DNA, 1641 bp, Glycine max
  Clone ID: PAT_MRT3847_36913C.1
cgacgcgtccggtttgattgcctcaattctcatttttcagttgagttcagttaccataaccataccataccttaccagaaaattaaactgaagtgagagagagatgacagtactgtctccttctctttctcggcaaaagttgcaatcttcctttctttgttgccctttcaaatattctaagcctacacatagaaatattcaaccaaaacccacttcatatccactcatttcagctttggaccttgatctaaacacgatagtggctataagtgtaggtgttgttagtgtggctgttgggataggcatgccagtgttctatgaaacccaaattgataatgctgtgaagtgtttttgactccacactataacatttattttatgtattctaatctaatattgaaaatggcgattctagttgggttttgattacaggttctctttgtttgaggcgaagcgagaaaacacgcagccctgtttcccatgcaatggatctggggctcagtaagtattttcatctttaaggtatttcaaacttaaagcttggactctatagggaaattaaattttcaatgttgaccattattaaagcaggtcacaatttgtaattgtaattgtaattgtagtagaatgaggatgcgttcagctaaataactttaagtgttgtgttaataagtgttcttatcttataagagcttatgtcaaaattttgatcatgaaacttactaatgtggtctggtgatgggtgttagaattcaattgcaaggtgtgagacttgagtctcaaattggaagtatgaaattctagtgtggggtgtataaggctctacaactacaacaactagctttttgtggtgtggttcttgcaagattggtatgagagcatttcaacatgtctctcggtgtgtggacggtgatgcctgaaatagtgacattgaaagtatgagatttataataataataatgtcttggcctctccaaccataacaactagcttttgtggtatagttctcccaaggttcttattagtgggggatagggaaattggaatgaatagcatctgtgggaattgaacctccaaatccaaatacaacaaaataaaaggtcgtgatgcttatgaggatgccaaattgaagctatttaatttgtgccagacaatgaagtaagtcacaaatttgaacttctttcctttgaaattgttacactttggccagagaaatgcagattttgcttgggaaatgccaatgtgaaagttgaacttggtggaggtgaggaggaggcgtcgcgatgcattaattgtgacggtgttggttcattgacatgctcaacttgtcaaggatctggaattcaacctcgttaccttgaccgcagtgtgttcttcggcggcctctggggccagcttagattcagtgctgccgatgttctatccaagtatgaggttattgtactcgtgtaatttctttgatctgtgtacacacctaatacaactgtcaaaatcatgttgatgctttcatttggtttacatttcaatcgatgatcatatgatattaggccactcactttcgttgcctatgtgtgtaaaaatttgacgttttctaggcattaatttattcaattgttcgaaaaaaaaaaaaaaaaaaaaaaa

SEQ ID NO: 72976 - DNA, 322 bp, Glycine max
  Clone ID: PAT_MRT3847_36914C.1
atgataaaaatatacattaatataaataatttgaataacacgatttctcttggatcctacatatttatacattcgttcataaatgagatgatattatcttgtacacgttcataacagacacgagtgggataattaagtactcatatacatgatactcataatagtacatcgcaatcacaactttttttcgctggccgttcaaacggctccagatactatcaatgtcctaaatcagtagagggatgtcgatcaattttccacaccaatgttttaaacccagagatgctacagttgataaggtgaagggttccttccttccgga

SEQ ID NO: 72977 - DNA, 905 bp, Glycine max
  unsure (1)..(905): unsure at all n locations
  Clone ID: PAT_MRT3847_36915C.1
cggctgcgagaagacgacagaagggggcctcacttctcattcttaacgattccttttgagttgagttcagataccagaaaaccgaagtgaagggagtgagagatgacagtactgtctccttctctttctctgccaaagttgcattcttcttttctttgttgccctctaaaatccaagctatcatcatcagctacaaatagaattcaacaaaaacccacttcttatccacgcattagagctttggaccttgatcaaaacacggttgtggctataagtgtaggccttgttagtgtggctgttgggattggcattccagtgttctatgaaacccaaatcgataatgctgctaagcgagacaacacgcagccctgtttcccatgcaatggatctggctctcaaaaatgcagattttgcttgggaagtggcaatgtgacagttgaactcggtgggggtgagaaggaggtgtctcgatgcataaattgtgatgctgttggttcattgacttgcacaacttgtcagggatcaggaattcaacctcgttaccttgaccgcagagagttcaaagatgatgactgaggcaagctaagaataagtggtgccgattttgtttctaattgtgaggatattgtactcttgttttttttttgatttgtggacacacgtaatacaaatnnncctgtcnnnatcatgttgntggtttcatttggttcccccttcattcggtgatattaggcccctccctttcgttgcaccaggaaaaaaaattttgccattttctaggcattagtttattcaaatgatcaatgtcccgtgttgtaagaaaatggacaggtctggtaaagtttcataaattattgcgggtctatgcttatgtaaagaactcaggatagttcatcccttgcgat

SEQ ID NO: 72978 - DNA, 863 bp, Glycine max
  Clone ID: PAT_MRT3847_36916C.1
ccacgcgtccgcggacgcgtgggttcactaacaaaatgaatctgatcaagccctttattttgctttgttttctgtatggggtgatcctcatcgctgcggtggtggctggtgagccatcgaaggatgaggaaaaaggaacaaatggaattcacgaagagtttagtggatgcgatgacgtgcagggaagccttttgagcggaaggaaattccaactaaatcatgataccgatcactgtggaaaaggaaaaggaaagggaaagggaggttatggcggtggtggaagccaaggaggagggggcagcgccggaggtggtggtagcgaaggaggagggggtagtgctggaggtggtggaagcaaaggaggtggcgaagctggaggaagtggtggtagtgaaggaggaggttctagcggtggtggtggtggaggtggaggcggaggtggaggtggaggctacggtggtggtggcgataaaggaggaggaattggaggtgacaaaggagactatcatcatggaaaaggaggaaaaggtgacaaagatggaggagacaaaggtggcggaggaggatattgaattagtattagagaaagctatgtcatgtagaataaaggaaaaggacctgttggttgatatggaaccaaagtctagagttagacaactagtacttagttctttgttgaacttaaatgtagctttggagatgatactagatttcattctccaattttcatctaatactttacattgatctatgaatgaaaacttgacaatttacgtagagtaaaaaaaaaaaaaaaaaaaaaaaaaaaaaaaaaaaaaaaaaaaaaaaaaaaaacaaaaaaaaaaaaaaaaaaaaaggggggg

SEQ ID NO: 72979 - DNA, 780 bp, Glycine max
  Clone ID: PAT_MRT3847_36917C.1
gtttcattgcctcaattctcatttttcagttgagttcagataccatagccatgccataccataccagaaaattaaactgaagtgagagagagatgacagtactgtctccttctctttctcggcctaagttgcaatcttcctttctttgttgccctctcaaatattctaagcctacaaatagaaatattcaaccaaaacccacttcttatccacgcattagagctttggaccttgatcaaaacacggtagtggctataagtgtaggtgttgttagtgtggctgttgggattggcattccagtgttctatgaaacccaaattgataatgctgctaagcgagaaaacacacagccctgtttcccatgcaatggatctggcgctcagaaatgcagattttgcttgggaaatggcaatgtgacagttgaacttggtggaggtgaggaggaggtgtctcgatgcataaattgtgacggtgttggttcattgacatgcacaacttgtcaaggatctggaattcaacctcgttaccttgaccgcagagaattcaaagatgatgactgaggcaagctaagaataagtggtgccgattttgtatccaagtatgaggttattgtactcgtgtaaattctttgatctgtgtacacacctaatacaactgtcaaaatcatgttgatgctttcatttggtttacatttcaatcgatgatcatatgatattaggccactcactttcgttgcctatgtgtgtaaaaatttgacgttttctaggcattaatttattc

SEQ ID NO: 72980 - DNA, 515 bp, Glycine max
  Clone ID: PAT_MRT3847_36918C.1
tgatgctgttgggagtttcattgcctcacttctcattcttaacgattccttttgagttgagttcagataccagaaaaccgaagtgaagggagtgagagatgacagtactgtctccttctctttctctgccaaagttgcattcttcttttctttgttgccctctaaaatccaagctatcatcatcagctacaaatagaattcaacaaaaacccacttcttatccacgcattagagctttggaccttgatcaaaacacggttgtggctataagtgtaggccttgttagtgtggctgttgggattggcattccagtgtactatgaaacccaaatcgataatgctgcgaagtgttttgactttacgctataccattgattttaccttattttaattatcatctaatctaatgatttggcatttctagttgggttttgattacagcttctctttgttgcaggctaagcgagacaacacgcagccctgtttcccatgcaatggatctggctctcaaaatgc

SEQ ID NO: 72981 - DNA, 288 bp, Glycine max
  Clone ID: PAT_MRT3847_36919C.1
ccatattttcattttgttcaatcttctcttgactttcgggcacgccgcctttgactccatctacactcttttatcactgccatcttttttactctcttaatcccatcatcaaattctaactctacactcaccactttcttttattaatccccccacatcgattgtctcagagggtgtcagtgttaccatattacactccatcgtttatgccatagcatcctgttccactgctgagtataccaccaaattcgcgaaatatccaaatgactctactatttttactaacac

SEQ ID NO: 72982 - DNA, 216 bp, Glycine max
  Clone ID: PAT_MRT3847_3691C.1
tagtaggcggcccggggtgttttttttttaacaaacacaattttttcggagatacgacaatcaagagaatgatgtttctcttctaacacataaaatctttgtaagggaagttgctcgatccgcaggggaagaaaaactactgtgggtgacaccatcagaggaaaatcctttttcttagaaggtggttctaccacaccagcagcgaggataaagctg

SEQ ID NO: 72983 - DNA, 149 bp, Glycine max
  Clone ID: PAT_MRT3847_36920C.1
gcgatgttgggtggaaagatgagcacaaaggaggttgatgaacagatgatcaatgttcagaacaagaactcatcctacttcccggaatggatccccaacactgtgaaagcgactgtctgcgacatccctgcaactgcgttgaaaatcgg

SEQ ID NO: 72984 - DNA, 950 bp, Glycine max
  Clone ID: PAT_MRT3847_36921C.1
gtggacggtgatgcctgaaatagtgacattgaaagtatgagatttataataataataatgtcttggcctctccaaccataacaactagcttttgtggtatagttctcccaaggttcttattagtgggggatagggaaattggaatgaatagcatctgtgggaattgaacctccaaatccaaatacaacaaaataaaaggtcgtgatgcttatgaggatgccaaattgaaactatttaatttgtgccagacaatgaagtaagtctttttttgtgtgtgtgctatggcattaaaattaattctcacaggcactttgtcttccccatgaatggctgaaaattttcaatcaattataagaatggaaaagggaaacaattcaaccgcactgaattaataagaatgaagaagagaagaaaacaccgcagcaagccatggatctgctatttcatatatttacaaatttgaacttctttcctttgaaattgttacactttggccagagaaatgcagattttgcttgggaaatggcaatgtgacagttgaacttggtggaggtgaggaggaggtgtctcgatgcataaattgtgacggtgttggttcattgacatgcacaacttgtcaaggatctggaattcaacctcgttaccttgaccgcagagaattcaaagatgatgactgaggcaagctaagaataagtggtgccgattttgtatccaagtatgaggttattgtactcgtgtaatttctttgatctgtgtacacacctaatacaactgtcaaaatcatgttgatgctttcatttggtttacatttcaatcgatgatcatatgatattaggccactcactttcgttgcctatgtgtgtaaaaatttgacgttttctaggcattaatttattcaattgttcaatgtctcctgttgtaagaatttggacaggtcttgtcttttgtct

SEQ ID NO: 72985 - DNA, 357 bp, Glycine max
  Clone ID: PAT_MRT3847_36922C.1
tacctcccgcgcgcgcgtacgctagctcttcattctcctctcgcaacaccttttcctttcatgaaacccccatcttcccaatagaagcgtttctttccaaagaatagctttctcattctacattcttatgatactcctaaaaccttttatcattcgtttttccttatcacttatcctataccttcccctgtttttattattctaccctaaatttttcaacatcatgaaactattcctaattctgatctaccaattttgtttcctgcacacatttcttgcttacctttttttaccactgatatacattcataacctattattaagtttttctttgaatctaacattcctttttttcat

SEQ ID NO: 72986 - DNA, 1484 bp, Glycine max
  Clone ID: PAT_MRT3847_36923C.1
cttagcttttaatatcaacgtacaaacttagcttttccctcttttaaataacaatcatgaaaacatttctcaaagactcatagttagtagcaccaacagttccatataccctctctctagcttccttcactcacttaattgtgcaatcccaattcaattcccatcagaatgatgaaatttcaagcatgttcaaaccccatctcaaacttgttctatgcgtgttgtgtccttcttttaccaccaaccatggccttaggagattgcacttgtgacacaaaagaggccacaaagagtgactcaattgaagtcctccactacaaaattggctcaattgcttctgtgcttgttgctggggcacttggggtgagcctcccattgttgagcaagagaatcccaacacttaaccccaagaatgacatattctttatggttaaggcctttgctgcaggggtgattcttgcaactgggtttgtgcacatacttcctgaggcatatgagagcctaacttcaccttgccttaaggaaaatccttggggcaagtttcccttcactggatttgttgccatgttgtcctccatagggaccttaatggtggactcatttgccacagggttttatcataggcaacattttaacccctctaagcaggttcctgctgatgatgaggaaatgggagatgaacatgctggtcacatgcatgttcatacacatgccacacatggtcatgctcatggatcagctgtgtcccctgagggttcaattacatctgaagtaattaggcagcgcatcatatcacaagtgttggagataggtatagtggtccattcagtgatcattggaatatcattgggtactgcaggcagcattgataccataaagcctctcctcgtggccctgtctttccatcaattttttgagggtatggggcttggtggttgcatatctcaggcaaagtttgagtccaagtctatggcaattatggcaacctttttctcactgacaaccccaattgggatagcaattggaatgggggtgtcaagtgtgtacaaagagaatagccctactgctttaactgttgaagggattttcaattctgcttctgctggaattttgatttacatggcattggtggatttgctagcagctgattttatgagcccaaggttgcagaaaaatttgaagctccaactaggggcaaatatttcccttctcttaggagcaggttgcatgtctctattggccaaatgggcttaattttggtgttttactttattaatggttaaatatatctctcataattattaaatatactttctttctctatcttttttattaataaatttacttaaataaaaaaaaaaaaaaaaaaaaaaaatttatttatttttaaatagaaatttaataatttatatcactcagtcaattatagagtttttttctttctttggctctaattttctgtcccttcacttttgggcgatctt

SEQ ID NO: 72987 - DNA, 599 bp, Glycine max
  unsure (1)..(599): unsure at all n locations
  Clone ID: PAT_MRT3847_36924C.1
acgagcagcacagaagagggaaaacggcaccgccgccgtagaagaaaacaaccatggtgcacgtctccttttacaggaactatgggaagacattcaagaagccacgtcgtccatacaagaaagaacatctcaacacaaagttaaagctagttgataagtacagacttcgatacaagaaagagctataaaaggtgcantacacactcagccgcatccgcaacaacacacaaaacctcctcaccctcgacaaaaagaacccgcgccaaatcttcgaagaagaagcactactccgagaaatattccattacagtctcctcgatgaaacacagaacaagcttgattacatcctcgccctcaccgtcgagaactttctcgagcaccgcctccagaccctgtttttcaatttcagcatgaccaagtgcatccaccatactaagattcttatcaaacagagacatatcagagttagtagacgagttatgaacattccatctttcttagtaaaagtggactcacagaaacacattgacttttttacttacaatgccctttgtagtagtcgcgctttaaaaagtaaaaagagaaaccaaaaagcttct

SEQ ID NO: 72988 - DNA, 299 bp, Glycine max
  Clone ID: PAT_MRT3847_36925C.1
aggggggtaggtttagcgtgaaaacagaagaaagcgcagggcgcagcatgagggttcgcgatcgagctatgcctagaccctgcgttggagaatcagggtgtggaaggcggggacggtcgtgcgagaagacaaatcaacacgcacctgattgagaggggggggggggccaggcataaccctattgtgggcgcggtttttagagcacttcgaagctggggtgtattgtgagaggctgaggatgggggggggtgcgggcggtgtcaccgtgtctgggatagtgactgggcgcgtggacgggg

SEQ ID NO: 72989 - DNA, 1444 bp, Glycine max
  Clone ID: PAT_MRT3847_36926C.1
gcaaagaacgtgatgttagtgaccttaatagtttaggcctgtccaagagaagtcaagaaaatcaaagtggtccaaccaatgagaagggctcgaggtgatgaagagcgtgctgagcatgaaattccagggcatcgcctgtcaagaaaacagcgggaagacatgtcctcagatgatgaacagcaagattctcgcagaggacgctctaaattggaacgctggacaagccataaggaaagagatttcagtgtcaacaagtcctcttcttccttgaagtataaagacattgataaggataataatgatgggtcttctgaagctgggaagcctgcggatgaacctgctaaaactgttgatgttgataatcaacatctcttgtcagttgaagcaagggattctgcagatatggaaaatagggatgctgatacaaaagaatcaggggatcggcaccttgacacagttgagaggttgaagaagcgaagtgagcggttcaagctcccaatgcctagtgaaaaagaggccctcgtcatcaagaagttagaaagtgaacctctgccttctgccaaaagtgaaaatccagtagtagattcagaagtcaaacaagaacgacctgcccggaaaagaagatgggttactaactgaataagaaatctgggggcatcattattttgccggagagtctaatctaatctagtttggcccagggaaaatttcagcttggcctgatttttttttatgattctagaaccttgcaagccagccatgcttagtatctctatatctatggaacgttgaaaatggcatctatagggtttgggacaatttgtacttcagtaatgtcatcttgtaaaccttgctacctatacatttattgtacactgtatatatacaagtaaaatgtaaaacatgaactgccactacaggtagcacatattttgggtgtccaaatatggatcttacctagatggatctgggtaatgagaattattggtgaacgttaccaaggttggatgcatttgacattcagaaacagctggcatggctggtaggcattgagcctgatactggcaccttccacttgaggacttagcaggtcaaagcttttggaaaacatcttggtgaagggctatccaaagaaaaacttttggaaaacatcttggtgaagggctatccaaagaaatgcatgctgcttgcttctcaacgtgtttctttaaattgaattatagatgccatgaaattattttctttgttgtagactttaagcaagtacggattactcatttctcccccatttctatctttacattttttacgcgggaatcaggaaaccttagcaatgggcctttgttgtatctagagatcaaatgacatgtagtttaggttgggaatttcaacaggtaatgaaaggaagtaaagcataatttattgcctttgtcaaaaaaaaaaa

SEQ ID NO: 72990 - DNA, 230 bp, Glycine max
  unsure (1)..(230): unsure at all n locations
  Clone ID: PAT_MRT3847_36927C.1
gcgcaaatataactagcttgagtctgcggggggggtctccttcgggggggtgggggcgtaatgagcaaccagtggggtttgagttgcgagtggggccttgcgaagggggcgaatgagtttgaggggaagggggctgggctcnagctgagagccctttcccttctgagtcctctctgcgtgtcgcttctgcgcttcgatcttctgcgttccccgcgtgcggacgcgtgggg

SEQ ID NO: 72991 - DNA, 365 bp, Glycine max
  unsure (1)..(365): unsure at all n locations
  Clone ID: PAT_MRT3847_36928C.1
ccttctgccaaaagtgaaaatccagtagtagattcagaagtcaaacaagaacgacctgcccggaaaagaagatgggtcactaactgaataagaaatctggggcattattattttgcccggagtctaatctatagtttggcccagggaaaatttcagctttgcctgatattttttataattctagaaccctgcaagccagccatgcttagtatctctatctctatcactatcctctatcactatcaaacgttgaaaatggcatctgtagggtttgggacaatttgtacttcagtaatgtcatcttgtagaccttactacctatacatttattgtccactatatatatacaagtanaatgtaaaaca

SEQ ID NO: 72992 - DNA, 222 bp, Glycine max
  unsure (1)..(222): unsure at all n locations
  Clone ID: PAT_MRT3847_36929C.1
aaaccagaatcacatattcacatcaaatttatttttctgattatttcatcaggctggtcttataccccagggagggaaacccttcccagaagaagattcccgagaaattcaataatacacaattctcntttttattttcattttcccccctttaggaatcaacggggggaagctgctcgggggtgggggtgataaaaaccaccttgtaaaccagggcaggga

SEQ ID NO: 72993 - DNA, 394 bp, Glycine max
  Clone ID: PAT_MRT3847_3692C.1
caacaaaatgcccctttctcctattctgactctgattccgactactcctacaacgaggcagaggacgaggccttccactgtgcctttggccaacatgacgacggtgacaactcgtcatctatggagaacccgaatcgcgatgacccggaggtgaactttcgtgccttctcggaggcgctggagagccccgcgatgaaggagtttcacaacggcgtcttcgcgtagtcgattttgattctaatttgaatgtgaacatgtttgtgtgtgtactgttgagtgagaggggaagtcgaccaggggcgtttgtttttatttaagtggaaaatattctgagacgttttgtaaaaatctaactatttaatatcttatataacaaaactcatgctaggtgaaa

SEQ ID NO: 72994 - DNA, 539 bp, Glycine max
  unsure (1)..(539): unsure at all n locations
  Clone ID: PAT_MRT3847_36930C.1
ttcggcacgagcaacaacttcctatgcagcactcctgagntgagaaaacactaccaaatgctagtgaaatccaaggaccaagtttggtcacctaagcttgaaaccatttcggaaaacaaggttaggttttcaccgtgtagatttatataggtttagaaaggaattaagaaaaagagatggcagaggttgtatctactagatagttttcatttattaaaaagtagagaggtatgcacttgaaaattgtacaattatacattacacacatatacatcaattaattacgccctagttttgttcataattttgtgaagtgatatgatgaaagttgtttgtaaaatagtcaaaattaatgaagatccaaagcaaaaactgaattattagtaccaccgtgagcactccaaagccaccgtcaattcaacctggaaacaaagtgtgctttcatctccaaaatgccataccagtgttttttccaaaattatttcatccaataaataagttctccgcaaaaaaaaaaaaaaaaaactccangggggggg

SEQ ID NO: 72995 - DNA, 877 bp, Glycine max
  Clone ID: PAT_MRT3847_36931C.1
cctgcggtgccaattcgccgttgctgtcgctgattttggcggaggtaggcggcgggaacgtgttcggcggtggcggcggaggggcaaagagtccgccggggtttctggaggagtttttcagggacccggattttgacagcttggacaagattctaaagggtttgtatgaggagctgagagggagtgtgatgaaggtttctgctcttgggaactttcaggactcattgagggctttgttgtatttggttaggtttcccgttggtgctaagtctcttgtgaatcatgaatggtggattcccaaaggggtttatatgaatggccgtgctattgagatgaccagcattttgggtcccttttttcatatcagtgctcttcctgatcatgcttttttcaagggccagcctgatgttgggcagcagtgtttttctgatgcatcaactaggcggcctgctgatttgttatcttcattttccaccatcaaaactgtcatgaacaacttatatgatggcctagctgaagtactcctcatcctccttaaaagtcaagatactcgtgaaaatgtactcaagtatcttgcggaggtgatcaatataaatgcatccagggctcatatacaggttgaccctattacttgtgcaagttcaggcatgtttgtaaatctcagtgctgtcgtgcttcgtctatgtgagccatttttagatgcaaatttaacaaaaagggataaaattgatgcaaaatatgtgcactactcaaaccgcttgaaagctaaggggttgactgctcttcatgcatcatcagaagaagttattgaatggcttaatagtaaaaacccagcttagactggggcaaccaatcaatataatgatgatcagaaacg

SEQ ID NO: 72996 - DNA, 387 bp, Glycine max
  Clone ID: PAT_MRT3847_36932C.1
ggctcgagcgaagatggtgtcctttaagcttcttatgcgcctcgccactaacttccttaagtgctgcatgggccaggtcttgcttgatccaaatgaagtcaccgaaatctgcatggccactactggactaaacataaagaagatggctatggatgggtttattatcaagatgccgtctatgattcactctcgctcccgtgctcttctaatgaaggatgccaagagaacggggcgtctctctggttatggtatgcgcaaggggactagggaggcaaggctccccaccaaaatactttggatgatgcggatgcttgtcctcaagcgcttgcctcgcatgtacagggaatcatagacgattgcctagcacatgtgccatgacatgtacat

SEQ ID NO: 72997 - DNA, 323 bp, Glycine max
  Clone ID: PAT_MRT3847_36933C.1
aacctatattttacatttttttttatattttttaaaattttattttttttcttaaccatcatccaaaccccaaaaaaaaaacccgtaaaatcctggcgttccaataatgggagccccaacatcacccaagataaaaatttatcattgcggacgcttaatccggggcaagacatcaagaagaataaattttttgggacccaaaaaaaccccaaaatctttgacggcattaattaccataaaactcaaggcagccataaacacttcctcaccctcaaaaagaatgggcgtccccccgaagccccattgcatgtaaaaaacccatc

SEQ ID NO: 72998 - DNA, 434 bp, Glycine max
  Clone ID: PAT_MRT3847_36934C.1
gctcgagcggctcgtgtacggctgcgagaagacgacagaagggggggacgcataggtaacgaatttaccgttacctgtggcgtcgcgtctcagatccctctctctttggagagaacgccccaacaatctaaatctgcatcgcattatcatcatcatcatcatcaatacttcatttatggggttttattagctacaatacttgtttgctgcaggctgccaacgaaaaggtcaaggcattttggatcagacatcttggccctgcaagcttgatgcaacacaacaaatatatatatcatggggaaaacacacgacaacgtagttgggcttatattggccatctcttccactgttttcatcggctctagctttataattaaaaaaaatggggcttaaaaaaagctgcgaccacggcaacaggagcagccaccgggagg

SEQ ID NO: 72999 - DNA, 1109 bp, Glycine max
  unsure (1)..(1109): unsure at all n locations
  Clone ID: PAT_MRT3847_36935C.1
agcgaactgcagctcctgatctaactgaagaactggatcctcatgtaactcatatcacaattccaagtnacttgcatggntctttgtgcaaaggaaaggatgataatgacaccaacgctggggcgtctcctggcggaaaaggatttatgattagaggatagaattatcttaaagatagttctaaggtagttggaggagatcctcttctcaagcttgtagcagttgattggtttacagttgataaatccgcggatagaattgcccttcaccctaaatgtttggttcagtcagaagctgggaaaacgcttccatttatccttgtcattaatctccaggttcctgctaaaccaaactacagtctggttctatattatgcagctgacagaccgataaataaaaattctctgttagctaagtttgttgatggaagtgatgcatttcgggactcaagattcaaacttattccaagtatagttgagggatattggatggtcaagagagctgtaggaaccaaagcttgcctcttaggaaaagctgtgacttgtaaatactttagacaagataattttttggagattgacgtggacattggatcatcttctgtagcaaggagtgtcattggccttgtcctgggatatgttacaagtttagttgttgaccttgcaattttgatacaggcaaacgaagaggtggagctgccggagtacattcttggaactgttcgattaaaccgtttgaaacttgaatctgctgtaccattggaggtttaaggtgttctgccagaaatattaaatcacctggtttcattccattattatgactaaatttacacgggattcaaataagaaatgatgagtaaattttctgagataaaaaaaaaaaaaaaaaaaaaaaaaaaaaaaaaaaaaaaaataattaaaaaaaaaataaaaaaaaataaaaaataaaaaaatataaaaaaaaatagttggacaattcttaattttttcattgttaatattatatgggggggcccgttttaaggtttccaggctttcccccccgttcatacccctttttactttttttttagggtccctaaatttaattcccttgcccggctttttaaa

SEQ ID NO: 73000 - DNA, 355 bp, Glycine max
  Clone ID: PAT_MRT3847_36936C.1
gctggtgcttctcacaatcttccgcaatcgatgttgcatcctggtacaaaaccttctgctagtgttgggtccacattcccacaggggcagacaccacttccaggtcaaccatcatctcagccaccttatcaggttgggaatatgcctttagggcctgattttggcaaccaagctggaaatgctatgcaagtagacagagggtcttcttggatgcttggtccctcagaaaacctagcacatctatctggtcctcctggaccaccatctgtagtttctggtcagatgggtgctgctgctaagcagcctcttcggcctcctgggttgacaccggagatggagaaggcactgcttcagc

SEQ ID NO: 73001 - DNA, 314 bp, Glycine max
  Clone ID: PAT_MRT3847_36937C.1
ggaacctttgcattcgatgcactcaagattcagcaagtgtgttttggaaacaaagatccatgtactccgcgatggcacgtatttggcaacatgctcgtacctcacctggaagaaatgctcccacgaagcaacttgcaagctatgctgcacgtacgtcggcagtaacatgcgctggtttgaagaatgctcagcgttcacaccctagaactggcgctcatagtaagcctaagaaataccttaagaccactgaggacctaatccagagccatccatatcaatcgtacgcccgtgcaattgcccaagattcttacatt

SEQ ID NO: 73002 - DNA, 352 bp, Glycine max
  Clone ID: PAT_MRT3847_36938C.1
atcatatcctcggatcaacatctaggtactactaacgcttatcgaattgaacctactgtggttcgagtctactgtgctagccggagtatggctgaccttgcaatgagccctaaagcgctaacggtacctgtagaacaccgtaatacaactttggccactggctatgctcatgtcactgaacggcatattccaaccattatgtctcgtgaatctgctcatcttgctactcaatgatgaaacattggctctgattaaaatacatttgcctaacaacatttccgatatgttaattacatgctatgtctctggcaataccggtcttaatgaaatatatatataggaatggctctat

SEQ ID NO: 73003 - DNA, 412 bp, Glycine max
  Clone ID: PAT_MRT3847_36939C.1
attaactctactgggtagttcatgtatgatctctgtttcatgtacagtcataccagcggggtaaagggattatacataggccactagcttgcctttgaatagctgggtgtcatttatgacactagttcgattctgctgcaagctgccctttattgtactaaggaatatatattgaacaaattaatctacataatatgtatatatatcacgatcccaaagtgcagtgcatcagcttcatcgcctacaagcccccaagcttctaagtgtgaaatattttcaaagcatttgtagccgccaccccactttgtttgtttgtacttaaactacattcccatttgattttgctttttgagatttcatcatcctgtatttttggttactgttttcggacttcaatggaaattaatggatg

SEQ ID NO: 73004 - DNA, 680 bp, Glycine max
  unsure (1)..(680): unsure at all n locations
  Clone ID: PAT_MRT3847_3693C.1
attcccgggctcgacccaccgtccggttttcctccctctaactcctccatctaagaactaattctttctttcgcaacattctcttctctgagattctagggtttatcactcccatggccgccgagaagctcagagatttaagccaacccattgatgtgcctttactcgatgccactgtcgctgccttctatggcaccggatccaaggaacagagaactgctgccgatcagattttgcgcgatttgaaaaataatcctgacacgtggcttcaagtcatgcatattttgcagaacactcaaagcctaaataccaagttctttgccttgcaggttctagaaggtgtaattaaatatagatggaatgcattacctgttgaccagcgagatggaatgaaaaatttcatctctgatgttattgtacagctttctggtaatgaggcctcatttcgaacagatcggttgtatgtcaacaaactcaatattatattagttcagattttgaagcatgaatggccagtgagatggagaagcttcattcctgaccttgtttcagcagctaanactagtgaaacaatttgcgagaattgtatggcaatattgaagctcttgagtgaagaaggtttttgatttttcaagaggagagatgactcagcagaaagataaagagcttaaacactcatt

SEQ ID NO: 73005 - DNA, 300 bp, Glycine max
  Clone ID: PAT_MRT3847_36940C.1
aactatttaacaccatagtaactttgaactactctatagttatctatgggaatcgattcttctttatggtgctaatgaccaatgcacactgaaccgatacagtttttatcaccatcatcaagttgaacccttaacatgctatcatgatgctggagcatgaagctagcagtttactcgatggagaactacaatttagcaaagctggtacgaaacacgatacgagaatacaatctttgcagtgaaccgtttaccgtaggacggcttatgaaagtgacaaagaagcctgctatgttgacatct

SEQ ID NO: 73006 - DNA, 565 bp, Glycine max
  Clone ID: PAT_MRT3847_36941C.1
aacaaaaaattgggggcatcagtatatatattcaaacacccccccaataagaaagttacatacgttttttaaaaagttcaagcaaaaacaagggggaaagctacaacattacaaaacaaagcaaaattaacaaggggaaaaaaacaaagtctaaaggcaaaagggaggccttaatattatgaaaaaaacaaggaaggcaacttaaataaaaaacaacaatccctaaaacattggtattacccgggctttaaaaagggcttccttttttaacttgaacggaaaaaggccccttaagggttctttttttccaaaaaaacccacctcaaagggctaaatttgctgatattttacacacaacttataaaatggcggacaaaaaagggccaatcttttgaaataactatataaggccatatcaccaattttaatttttaacactatcatccgacaaattcacaggcaaccttgaccaaaacacaaattccctcgatccagtcaacctcctacaaataactatggacaagctcaaaacaaggcaaacaggcgccaccaaagtaaacagcaa

SEQ ID NO: 73007 - DNA, 420 bp, Glycine max
  unsure (1)..(420): unsure at all n locations
  Clone ID: PAT_MRT3847_36942C.1
cgaaaccgaaccggnnccnacanagagcggganacgcggccaggganccgaagacggagcagaaaagngccgccaccgccgacggcgnncggccggggcagagcagacgcgagccgggacgcgaggggacaagnacaacacnacncgggcacaggcacaggcnganaggagccagagggancgcaccgccgcgaggaaggggagagggccggacgggaacacganggcggaggaagcgaacggcggggacaggaaaggggcgccggggacggggacggggcagggcacggcggcggcaagggaggccagagngcggaggggccgggagaagaggaagaaccggaggggggaggaggacgnggggggcgcgggggggaaaggcggggccggaacgaggggccggaagggaaggaagggggg

SEQ ID NO: 73008 - DNA, 429 bp, Glycine max
  Clone ID: PAT_MRT3847_36943C.1
atgtgacattactgagcatcgtctagctatctcgatcgaactgtccaaggtcctgtcactagtacggcacggcaccacaaccaaacccaaaagcccgaaccagtgcactcaccaataacgcgtggttagcaaccaacttggtgtcgaggtatatgcatcaatcgtcagttgttgtcactgcccagttgcacacgtgtgccaccgaatttcatctacgtttaatgtaaacttagtgccagcaacagaattgtatcctttttggtcatggtttttgaggttgtcagtgaagccattaaatataggaaatttgaatttggtcagtcttaatgttctcatcttggtaaccgttgtcataaccatgttattcctggtcgtcttcgtgttcagtgttcctatagttgtattaatagtcgtcacaactgtcacttt

SEQ ID NO: 73009 - DNA, 355 bp, Glycine max
  Clone ID: PAT_MRT3847_36944C.1
ggcagaggaagggttggaaatatataactatgacgatactacagcgtcgtacatttcctcttctctgcttcggaggattgagattgaaacacgtcactggcgttcgcttcgttcctcggtagagtcgtcttcgcttctgtcatcagactcgttgcttaccagttatttaatgactttggacttgatgtgggacctgctagaagtgcactcgaaacgaagtttgatgcctttacacatctggtgcattctctgatcggctttcacattccatagattaatctgaagtttttaagtgctggggctattgctctgaaaggtcttggacgggttccttacacaccaggcggctcttttg

SEQ ID NO: 73010 - DNA, 622 bp, Glycine max
  unsure (1)..(622): unsure at all n locations
  Clone ID: PAT_MRT3847_36945C.1
gtacaatagatgatattcaccaatttattttaattttctcttaaactcatcacacaggcacgaagacgtgtattattatacattcaacaacactcttaatttctacttgcgaaatatctctagtggtatgaaagatcatggactcatgcatgatgagaatccatgcctctccagtcacaagctgttttatttcatgaaattaaaatatctaaagtactaattaagtagaactgcatcgtcttaatcgtgagtcttatccaacagcttcgccagcggcaacctccgttgtatgtccggccaccgcaacagccatgcctacagtatccaccaccacggccagggtagccgccaccatgaccagggtggccaccaccatgaccaggatagccaccaccaccgccatggccaggataaccgccaccgccatggccaggataaccgccaccgccatgacctgggtaaccccctccatagcttccaccgggatatttggcatcatccactccatttgcctcctcttttgtattcgtggatgccacctcagaggagaccaaaaggagcatgagggaaaggcctangatcagtaacgccatctttaaacccatcttttagtataaactac

SEQ ID NO: 73011 - DNA, 839 bp, Glycine max
  Clone ID: PAT_MRT3847_36946C.1
tctcgaccgattcagctcgaggaaaagcaccgtacgaccttccctacggcttctcttgtctgtcgcgagtgaccatggtgagggttagtgtgctgaacgatgctctgaagagcatgtacaatgctgagaaaaggggaaagcgccaagtcatgattcggccatcctccaaagtcattatcaaattccttttggtgatgcagaagcacggatacattggagagtttgagtatgttgatgaccacagggctggtaaaatcgtggttgaattgaacggtagactgaacaagtgtggggttattagtccccgttttgatgtcggcgtcaaagagattgaaggttggactgctaggcttctcccctcaagacagtttgggtatattgtattgactacctctgccggcatcatggatcacgaagaagctaggagaaaaaatgttggtggtaaggtactgggtttcttctactagagtttaatttcgattaagaggatgtcaggaatttcaattgagattcatggattgtaatggaggatatgctaggcccctagtaatatcaagcatagcaggagctgttttgtgatgttccttattttgtttgcaaaaccaagttggtaactataacttttattttcttttatcattatttttctttataccaaaatgtactggccaagttgttttaaacagtgagaactttgattagaaagtgggagcatggcgatgtttgagttggtgtgggcgagtcatgatatttcattgaatagattgaattctcatgttcaaaaaccactattaaattatgctgattcgaatttgatattaaaaggaaattttcaagct

SEQ ID NO: 73012 - DNA, 665 bp, Glycine max
  Clone ID: PAT_MRT3847_36947C.1
aaagttacgtgaaagaatattgtctcaggactcaagagaaatgtgtttttttagaatgctgtacgaatattcactttttatacacatttaatcaatacttatcatttttctctatcacatcatataacctataagggttatactttttttctcttttttccctctctcacttggtgttatataacgatgtccataaattattttccgttttattatcagccaaggagaaatgtggcatgtgttgttatccttgcccttttgattaaaaatgttatattttgataacaaaaattttcaaatacctaaccgatattttttttatatttttcttcttattaattacatcattaatcaaattaatcacttatttatttatttttatttttcttttaagttataaggaactaaaaattattcaagaaacatttttatttgactaacccagaattttgaacttagatgttcatgtatcttcgtgtcaattgacacctcagacacatggtcatagctggaaggcagccgtacggtgttgggcacggtcttggactctggtctgccagcgacacgtacgaacacctatccacgtgatgtccttttttttttatatagatgttttttttttcttcctttttaagagttttcgtggaagacttattatggatatg

SEQ ID NO: 73013 - DNA, 856 bp, Glycine max
  Clone ID: PAT_MRT3847_36948C.1
acggctgcgagaagacgacagaagggggcgtgttttcatcattgtcgttctgaacggaaaagcactggcgcagctaccctgaggcttctcttctcttctcttctctgtcgtgagtcaccatggtgagggttagtgtgctgaacgatgctctgaagagcatgtacaatgctgagaaaaggggaaagcgccaagtcatgattaggccatcctccaaagtcattatcaaattccttttggtgatgcaaaagcacggatacatcggagagtttgagtatgttgatgaccacagggctggtaaaatcgtggttgaattgaacggtagactgaacaagtgtggggttattagtccccgttttgatgtgggcgtcaaagagattgaaggttggactgctaggcttctcccctcaagacagtttgggtatattgtattgactacctctgctggcatcatggatcatgaagaggctaggaggaaaaatgttggtggtaaggtattgggcttcttctactagtttaatttttatcaaggatgtcagggatttcaattttgagattcatcggttgtaatggaggataatgctagccccctagtagtatcaatcatagcaggacctgttttgtgatgttctttattttgtttgcaaaaccaagttggtaactattacttttcttttttctttatcgttagttttcctatatgtactggcaaagttgttttcaatggtaagaactttgattagaatctgggagcatagctatgtttgagatggtgtggacgagttatagtttgatattgcatttgatagattgaattctgaaattagttgattttggctttcagaaaaatttcatgttc

SEQ ID NO: 73014 - DNA, 1717 bp, Glycine max
  Clone ID: PAT_MRT3847_36949C.1
tttttttttttttttttttttttataaaactagagacatttgatttgacagatgattatttccataattcaaaaaatcgtatccattaatatttctgagcaaagatcacaacaaaaaaaggaaagaatcataggtatagattctcattatcagatctatacacataaaatgattatatattttgcaaaccaaataactcattaaagtgaatccatggtcaccatgagactgctagcagctgtagccggtgacggctagcaaaacagcaatagcaagtgcagctgttgcccatatatttctcccttgctggtggtttgacgatgcagcattcaaattcagacttggtgatggtgctggtgttgtgtctgattctgctgtggaatcaggtggtgccgggggacttttgcgaacaattgttggtgctggagctggtgcctgatgcctcctgtgcctgtgcctgtgccttctatgcttatgtgacgatggcgccggtgctggtacctctactaccggcgctggtgccaatgttggtggtggaggaacaggagctggagttggtgctggctttgtaggtgcaggagcgggtgctggtgttgcctttgctggtgcaggtgcagggggtgttttggctggtgttggtggctatcctggtcatggtggtggccaccctggtcatggtggcggctaccctggccgtggtggtggatactgtaggcatggctgttgcggtggccggacatacaacggaggttgcagaaggtgctgctataacgctggcgaagctgttgctgcacaaactcaagataagactcacgattaagacgatgcagttctacttaattagtacttttgatattttaatttcatgaaataaaacagcttgtgactggagaggcatggattctcatcatgcatgagtccatgatctttcataccactagagatatttcgcaagtagaaattaagagtgttgttgaatgtataataatacacgtcttcgtgcctgtgtgatgagtttaagagaaaattaaaataaattggtgaatatcatctattgtacaaaaaaaaaaaaaaaaaactcgagtttttttttttttttttttttttttaaagaacatcacaaaacaggtcctgctatgattgatactactagggggctagcattatcctccattacaaccgatgaatctcaaaattgaaatccctgacatccttgataaaaattaaactagtagaagaagcccaataccttaccaccaacatttttcctcctagcctcttcatgatccatgatgccagcagaggtagtcaatacaatatacccaaactgtcttgaggggagaagcctagcagtccaaccttcaatctctttgacgcccacatcaaaacggggactaataaccccacacttgttcagtctaccgttcaattcaaccacgattttaccagccctgtggtcatcaacatactcaaactctccgatgtatccgtgcttttgcatcaccaaaaggaatttgataatgactttggaggatggcctaatcatgacttggcgctttccccttttctcagcattgtacatgctcttcagagcatcgttcagcacactaaccctcaccatggtgactcacgacagggaagagaagagaagagaagcctcagggtagctgcgccagtgcttttccgttcccccttctgtcgtcttctcgcagccgta

SEQ ID NO: 73015 - DNA, 350 bp, Glycine max
  Clone ID: PAT_MRT3847_3694C.1
tacatcctcagcaaggtgccgttgcagttcaagtccctgaactacatccgcgggcgcagcttccagcagagcctgatcctgatcgatgaatgccagaaccttacgccgcaccagatgaaaaccatcatcacccgtgccggcgccggttccaaagtggtgtgcctgggcaacctggcacagatcgacaccccttacctgtccgcgaccagctccgggctgacctacctgaccgaacgcttcaaggacttcccgaacggcgtgcacatcaccctgcagggcgtgccgcgttcgatcctggccgaatacgccgaatcccacctgtaatcccatccacacccaggggcggccaa

SEQ ID NO: 73016 - DNA, 223 bp, Glycine max
  unsure (1)..(223): unsure at all n locations
  Clone ID: PAT_MRT3847_36950C.1
cgaaaccctccctaccaacaaccgcaaccacaacaaccttatancccaccctatgatcaccatcaaacgcctgccaagtacgcccgtcccaacaccaattccactgccttagtatacaccggatgttgcatacagctacacgggagagtcctccgatccttcgattacgacgtacgaggcggatacgacggttcggtgaggcccgatcatggtggaggctatt

SEQ ID NO: 73017 - DNA, 501 bp, Glycine max
  Clone ID: PAT_MRT3847_36951C.1
ttttgtttttttttttttttttttttttttttttttttttttttttttttacttgtttgtatgagggtgaatccctttttttttttattagaacccgaaaattgggccccaatacaaaaaaagggccccaaacaggcaaaaaacagaaaaaaaaccctggggggggaaaaagccccccggggggagggggggcccaaagaacaccatgccgacgaaaaaaacccggacaaagaaaaaacaaccatagacaataagaaacgagggggaaaaaaaagagggctgaaaaaaaaaaaggggggcaaaaaaaaaaggaggggggccccccccacccaaagggggggaaaaaaaaccgggaggaagaaaaaaatccgggccagcccccaattttagagctccggcccgaggccgggaaacacacccgggccataaaggggtactaatttttaaggggggcgccgcattcaaaaagcggggggggggaaaaacgggggggagcggaaa

SEQ ID NO: 73018 - DNA, 554 bp, Glycine max
  Clone ID: PAT_MRT3847_36952C.1
atttgtgcaggaccttactagttggatggaacaaaagaaaaacaagctagaaaaacgtgattttcagcactatgtggtaagttaaggattttgtcattctttatgcttctattgattattattttgtgaatgcatttttcattttgtaatttggatcttgaggctctagaattttctagtattatagaagttggttttctatagatttgatgtaaacatgccttatagtgttatttgcaattagtaattgattggaattgcaataatcaaactgaataaaagggcattggggaaatgagactccacttgggttgggaagatactgttagttgtaataaaagtatatctactctgatatctactctaataatgtgttaattagaaattgatcctttgatcttatttgtttctgtttgattgcttgcattcacgtcacttactatttgagaattgaagggttgctttaagctctatgtacttccagtgattaaattctttttcctctgttgcaaacttgcaactgaattgatattttgaaaaattatttgaccgtt

SEQ ID NO: 73019 - DNA, 1666 bp, Glycine max
  unsure (1)..(1666): unsure at all n locations
  Clone ID: PAT_MRT3847_36953C.1
acacagnntggtangnnctgaaggggactagnnnagaaaatcatccctgttgatctgcttggcagccttctccctcgtcatttacaaattttatatgaaataaattttaaatttatggaagagttgaagaaaaagattggtttagattacaaccggctgtcccggatgtcaattgttgaagaaggtgctgtgaagagcattcgaatggccaacttgtcaattgttggctcccatgctgtgaatggtgtttcaaaattacatttagatacactgaaaatgaatacatttaaggacttctatgagctatggcctgaaaaatttcaatacaagacaaatggtgtaacccagcgtcggtggattgttgtgagcaatcccagtttatgtgctcttatatcaaaatggctaggaactgaggcttggattcgtaatgccgaccttctgacaggattgagagatcttgttgacaatactgatttccggtgcgagaagaaaatggataaaaaggtcaataaaatgaggcttgctgaatacatcgaaacaatgagtggtgtgaaggtcagtttggatgctatgtttgatgttcaggtgaagcgtatacatgaatacaaaagacaattgcttaatatacttggaataatccatagatatgattgtatcaagaatatggacaagaatgacaggaggaaagttgtaccccgtgtttgcataattggtgggaaagcagctcctggttatgaaattgctaagaagattatcaaactttctcatgctgtggcagaaaaaatcaataatgacactgatattggagatcttctgaaattggtttttatccctgattataatgtctctgttgctgaattggtaataccaggggctgacctttctcaacatttaagcactgcaggacatgaagcttcaggaactgggagcatgaaatttatgatgaatggatgtttacttttagctacggcagatggatctacgatagaaataattgaagaaataggatcggataacttgtttctctttggtgcaaaagtgcaggaagttgcagaactgcgtgaaaaaggatctactttaaaagtacctctacaatttgctcgcgtgttaaggatggttcgagatggatattttggtcataaagactacttcgaatccttatgtgacacggtggaaattggtaatgatttctatctgcttggccctgattttggcagttaccttgaggcacaggctgctgccgataaagcatttgttgaaccagagaagtggatcaagatgagtatccttagtgttgctggctctgggagatttagcagtgacagaaccattcaagattatgcagagaggacatggaaaattgatccctgccgatgccctctctgatctcattattagaaattttagttttgtttggggaggccagaagaaaagggacaatgaaaaattgtaatatcttgctcatttagaataataaaattttggtcatgacccatgacaacaaagttcactagtctagccctgaagtacatttgcttaatttgttgtcccgttacttcggggaaaattactattacttctggtgattgactcactgtatcttaacctacctgacatgaaaatcgatatcgatactaaagtaattttcattaatcttgagtcgctg

SEQ ID NO: 73020 - DNA, 672 bp, Glycine max
  Clone ID: PAT_MRT3847_36954C.1
ggttttttagactaatttgcttttctcttcagtgtgaaattttgttcttacaaatgctcctatttaaaggcaatttacacgatgcatgtgatcatctctacaataaaaaattacaggccattaaaactgtatgcatgtgaatataaaattgtatccatgtgaaccctcagcatgcccatgcccttgcctgcaaatcaccaatgccctagcctgctgcatgtcaccctaacctgcaaacagtgccctagctgtagctggtgtgtgaaggcgtgaaggcagaaccctagttgtagctggtgtgtgaaggcgtgagggcagaaccatgagtccacgtcggtctcgcaagaaccaatggcgggactgatccacgttgcaaatgtcccgccattggtattggcgggttgcccagtcagcagctgtctcgctggacacataccttgtaccgcaattggtgctggcgacacccagccacgtcagcaccattctcgccagagctagtggcggcatcgttggaatcgctgatgcagctggcggcatccaatacaaaacagacccccccgcaatttctttcataagagaccctaatccgtaaatagtttataaatatgaccctttgtcgtaaatttgccaattttctgtcaactttgtggtggaaagttttgtggtcaaatt

SEQ ID NO: 73021 - DNA, 432 bp, Glycine max
  Clone ID: PAT_MRT3847_36955C.1
aagaggctggggtgccggactcttttgctctcatagggctcatctgggagctgggctgcctggcttaccaagggcttgtgaaactttgctcagatatctggtcctataaagagtcctaaccatcggtaactgtagccacgcataggtgcttgtgctgcccgaatgaggaccagggagtgctgaagaaaagtgatcattgattaattaatagagtggtcccagattgtgctgcagcactagaccatgaagtacatcaggggaggagtaatgcctgctatacagattccggggctttatgagagcttgaacatctaagggatctgtgcttagtagcgtgaagaaagacagcttcttctccagatgaagatgctggatctgatggattatgggaaggaacgatgcgacagagtcgaagctatggatcttggtgag

SEQ ID NO: 73022 - DNA, 669 bp, Glycine max
  unsure (1)..(669): unsure at all n locations
  Clone ID: PAT_MRT3847_36956C.1
aatgaaaatttctttagtatcgatatcgattttcatgtcaggtaggttaagatacagtgagtcaatcaccagaagtaatagtaattttccccgaagtaacgggacaacaaattaagcaaatgtacttcagggctagactagtgaactttgttgtcatgggtcatgaccaaaattttattattctaaatgagcaagatattacaatttttcattgtcccttttcttctggcctccccaaacaaaactaaaatttctaataatgagatcagagagggcatcggcagggatcaattttccatgtcctctctgcataatcttgaatggttctgtcactgctaaatctcccagagccagcaacactaaggatactcatcttgatccacttctctggttcaacaaatgctttatcggcagcagcctgttatcatatttaatcaaggttaaatttcaatattaaataaaaaaactgatggtaatataaatggttaggagactaaaaaaaaaaaagaacgaaagtacctgtgcctcaaggtaactgccaaaatcagggccaagcagatagaaatcattaccaatttccaccgtgtcacataaggattcgaagtagtctttatgaccaaaatatncatcttgaaccatcccaaagggattttagtatacttaatttta

SEQ ID NO: 73023 - DNA, 309 bp, Glycine max
  Clone ID: PAT_MRT3847_36957C.1
catgcgtggactgtgttttgtgatattaaaccccgacagcaagagaactggcctggttagcacaaatacaaatcactccaattacccaccatttttcagaatcattaggaggagcagactaaattccaggtttcgaacaagaaggccgtttcatatacacaaaacttcttcatgaagatggttaacaaaggccaaggatatataaagagcctgcaataggaatggacttcacttcagagtgaatttactaccaaatttggatttttggcactgactagtgaaagctttggagcctcgctgaaggaataa

SEQ ID NO: 73024 - DNA, 1586 bp, Glycine max
  Clone ID: PAT_MRT3847_36958C.1
ggaattcggcacgacgcactcagttcccccttctcccgcctgcttcaccctctagttcttctttgtctctcaccccccctccatttcctcacgtccccctgttggcaccctccccgccccggctccgcacctcaattcggctcgagatcaaaactcaaaacttctcttttctttcattctctctcttttattcttatcatcacaatgccttcaattcccgaagagcccctcctggctccgaacccggatcgcttctgcatgttcccaatccaatacccgcaaatctgggaaatgtacaagaaagccgaagcctcgttctggacggcggaggaggtggacctctcccaggacctccgccactgggactccctcaccgacggcgagcgccacttcgtcacccacgtcctcgccttcttcgccgcctccgatggcatcgtcctcgagaacctcgccgggcgcttcacaaaggagatccaactccccgaggcccgggccttctacggcttccagatcgccatcgagaacatccactccgagatgtacagcctcctcctcgaaacctacatcaaggactccgaccagaagaaccacctcttccgtgccatcgacaccatcccctgcgtcgctaagaaagcccagtgggcccttcgctggatcgattcctccgactccttcgccgagcgtctcgttgccttcgcatgtgttgaaggtattttcttctctggaagcttctgcgctatcttctggctcaaaaaacgaggactcatgccggggctcactttctcaaacgaactcatttctcgcgacgaagggctacactgcgatttcgcgtgtctgctctactctctgctgaggcagaagctcaccgaggagcgcgtgagggagattgtgagggacgccgtggatattgagcgggagtttgtgtgcgacgcgctgccctgcgcgttggtggggatgaacggtgatttgatgagtcaatacattgagtttgtggcagatcggttgctgggggcgcttgggtgcgggaaggtgtacaatgttcagaacccgttcgattggatggagctgatttcgctgcagggaaagaccaacttcttcgagaagcgcgtcggggagtatcaaaaggcttctgttatgaacagcttgaacgggaacggtgggacccacgtcttcaagatggatgaggatttctaatttattattatgggattgggattaggtttaggaccggatgctgatgatgataatatttcactgtattattaccgttgttacatactccagttttatgtgctttttttatagtgcttttttttttttttcttttctttcgttagggttatgtgctttttgtttgtctctgatctctccttgagaaatgataaagtatacttttcagcttaaaaaaaaaaaaaaaaaaaaacattaaattgaatctagtatgttgtatatttatagtgtagtacttagagcattgtcattgtattatgttctatgctatgtatatttgattaatagatatgtctaattgttatatttttggtgatgaatattatatatttatatgacactttacctttctagtt

SEQ ID NO: 73025 - DNA, 270 bp, Glycine max
  Clone ID: PAT_MRT3847_36959C.1
ggctcgagattacccgaatggctcttcacagatggacggtgactctctatcatctcaaccgttatggtcatagctgagagtgctatgccagagacgattgttttaggcgtgcatgatggccaaacactttcagccgaagatcagtgactgaacgtgtatattatggacgatctaaccttggaagctgttataaccctgagcgaactgtagacacacagtacatgtaaacctgcttctattaataaggccttgatgcgtacggatgattga

SEQ ID NO: 73026 - DNA, 250 bp, Glycine max
  Clone ID: PAT_MRT3847_3695C.1
tttgctcggcaaattagccaggatgatatgggcgacgactatcgcgtagaagcacccacatgggtgttgagattaaacgggtctgaacagacaatcctttgttaaaatgataaccactctccagtataaattaaaaaaccgtgtccatggtacattcccgtcctaatgttgagttataattgtggtcgagccaaatcattagcttaagtactcatgcatgccaccggcaagctgttctatagttggacca

SEQ ID NO: 73027 - DNA, 395 bp, Glycine max
  Clone ID: PAT_MRT3847_36960C.1
tttttgccacgcgtacgcccacgcgtacggggggtgttagtagacaacagatgggggtgtccactacggtctttaagggggctcaggaagcaaaagcctacatgtagactagaaaattaaaaaaaaaaacattaaggaaaataatactaaaccgctgagaaaagggacacgtactctaaaaccacgctacctggtagaatctaaaagtgtgaagagcgataatagccgatgaaaaagaatcaacgtcacattactcttattcaaggggaaaatgcatctctagacgatcccgaagacccagccaagcttacaccaagataagccaacttctccactagcaaggatagctagatttgtctccagagtcaggtctctaagaaatatatgactggacg

SEQ ID NO: 73028 - DNA, 543 bp, Glycine max
  Clone ID: PAT_MRT3847_36961C.1
atccccaataaaaacacactcaaaaacccttttttttttcttattcatcctctagttcttctttgacattcacaatgccttcaattccagaagaggcattgttggcaccgaacccggaccggttctgcatgttcccaatccaatatcctcaaatctgggaaatgtacaagaaagccgaagcctcgttctggacggcggaggaggtggacctctcgcaggacctccgccactgggactccctgaccgacggcgagcgccacttcgtcagtcacgtcctcgccttcttcgccgcctccgacggcatcgtacttgagaacctcgctgggcgcttcacgaaggaaatccaaatccccgaggcccgcgccttctacggcttccagatcgccatcgagaacattcactccgagatgtacagcctcctcctcgaaacctacatcaaggactcctcccagaagagccaccttttccgcgccatcgacaccatcccgtgcgttaccaagaaagcccagtgggccctacgctggatcgattcctccgactcct

SEQ ID NO: 73029 - DNA, 464 bp, Glycine max
  Clone ID: PAT_MRT3847_36962C.1
gattgatcggtcttctcgttctgtagggcccaaagttccgggaccaaatttgacaaactagtaacgccaaccataacacaaccagtatcggcgatgaaacaacgagcacaaaataattcaccccatcctccaacacaaaagaatacaatgcctccactccaaaatagaaaaatgtgggcctcgcgccactaacacaacatggtctgatggaaagagcccgctccatgaacaaaatggcgcttgtttccagacagtcaaacaacaccaatacccaaccctcaaaacctaagggggccttggggctccccccacaggccctatcccctaccataaggggcgaacctcccccccccccttagagggaaccggctgtctgtccccccaaggcggcacactggggagcccatgggaccgcgcacacggacatagctctagaaacaggcacgcacgcgatatgggcggac

SEQ ID NO: 73030 - DNA, 653 bp, Glycine max
  unsure (1)..(653): unsure at all n locations
  Clone ID: PAT_MRT3847_36963C.1
gatccatcttagttggttgcggagacaccatgcaagcttctgagatatttggttgcagatgacagtcatgttgatgctgacacaccatatgctgaagttgaggtcatgaaaatgtgcatgcctcttctttcgcctgcttctgggattattcatttcaaaatgtctgaaggtcaagcaatgcaggctggtgaacttatagcaaggcttgatctggatgatccttcagctgtaagaaaggcagaacccttcactgggagcttcccagttctgggacctcctactgcaatttctggtaaagttcatcagaaatgcgctgcaagcttaaatgccgcacggatgattctctctgggtatgagcacaatattgatgaagttgtgcaaagtttgcttaattgccttgatagtcctgaattgcctttccttcaatggcaagagtgcttggcagttcttgcaacccgtcttcccaaagagctaaaaaatgagttggaaaaataaggagtttgagggggatttcaagctcccanaattgttgatttccctgccaaattattgaagggaattattgaagctcatctttcctcctgtcccgacaaagaaaaaggagctcaagaaagactagttgaacctctattgagtctggttaagtcttatga

SEQ ID NO: 73031 - DNA, 703 bp, Glycine max
  Clone ID: PAT_MRT3847_36964C.1
aaagaatccaagataaagaaatactaaagcagagagccttagaataaagacaaggtaaaccaatctcattatgagaaaaatagtaaataatggacactatagcatcacttttcaatttttatagccaaattggaaagttgaaagccaaatagtcaaactgaggtggtccacagtacccacatcattgattattgccattaatattctgctattgaaatttttttcaaagcagtgggggaattcggcacgaggtgccatctcctcggggagaagctatgtgaaccaacctatcagtcagcaactcataaagttaatttaattagctatgttccctatttcaaaatgcttccccttcatttcattctttatgcagaagcacaaactaccacattcaatgtgttagacaaagtctagaaacaaagactaacaaagtcatgcttggtgaccattgaccaacaacccgtaaccaaagttagaatctttgtgacaaaagctcacatgggtgcctctctttcagcatagtagtacttttggaagatttttgctccaaaattggaaatgagtttctctcatctcctccttcatctttgttctgttggttgcatttaatccacagctactagttcttggaaatgcaaaattaagagcactcatggaattgaactcctctttggacccccacaacaacctccttggcccctgg

SEQ ID NO: 73032 - DNA, 403 bp, Glycine max
  Clone ID: PAT_MRT3847_36965C.1
atgtttttatgtgtacctgctcttccgctgacatacgaggctcacgttctggcagttgttgacagcaccttgatcccgggctgggtcatcaatctcaggggcggcttgactatgtatactgataacaagttcctcatcttcaacattcatccagatattattgttgttggcttactagaccatgggggtgaagctattataagttacaaagcttttgccctaaagaaacgaagggacaaaattgagacacctcgctctccatgccacaggataaatacttggaatagttcaacatcatactgcctacaaggttcacattgaatgcgggattggcaatcttcaccgcacgcattcattgctaggaactggagctattgcactctatggcatccaacgaatacat

SEQ ID NO: 73033 - DNA, 216 bp, Glycine max
  unsure (1)..(216): unsure at all n locations
  Clone ID: PAT_MRT3847_36966C.1
taaagtggatgtcccaagcaacattgatatttaaataagctgcttctngcttctattctcaattctcatggcttcccggagaaggacgccggagcnaattntnncctcnaatccanaggtgaatggtggcncgcgggttnccatttaacgnnggcgatcgtnggncnnaccatactnacgctaccgtnttcntngagaagnttggngtgnnganta

SEQ ID NO: 73034 - DNA, 355 bp, Glycine max
  Clone ID: PAT_MRT3847_36967C.1
cccgtgtttgtgttttcaaagtccgctaaacgcaatccctctcttttcatctatctttctatttctcggtcccttcaaatcttgcactgtattttcaccccctcttgccgttcatctctgttatttgagtcaaaggattatcgccatgtcagttgcaccagttgacagtattccctcattaagcagtgatctcttctatgatatatttcgtcgacttgatggtgcaacattggctagtgcagcatgtacttgtgcagcattgtgttccatctcaaaagaagagaatttatgggagaatgtatgttcatctatgtggccttcaaccaatagagaggatgtcaaaagtttaatatct

SEQ ID NO: 73035 - DNA, 362 bp, Glycine max
  unsure (1)..(362): unsure at all n locations
  Clone ID: PAT_MRT3847_36968C.1
taattcacatctttgcttttatatancaaataattaaaaattggggaacgttaaatttataaactaccttgcccaactctttattccctctacttttttccttcattacttcattactctatgattttaatcacatttcatcatattattacttctaattccatatttcattacttaacttacattttccatcttacaaattcctcttttttatatcaatttataccaataatatataatttaataattacccaaattaccaacatcaccataattttcttttcttcaattaactattacactttctaaatcctcaatatatcttaatattatacatttctttcatctacttttattcatat

SEQ ID NO: 73036 - DNA, 476 bp, Glycine max
  Clone ID: PAT_MRT3847_36969C.1
tacggctgcgagaagacgacagaaggggatcccaatcaacacataataaagagagcattacatgacaataactctagtctctctttttttaaaattaggcgaacaaggaagcaaaatgacacattagtccttcttccctgtttccactttccaggttttctacttctcgtttgttgagcgctctctctctgcctatccctcttgttgactcaggcagagatccaactgctaatataattcaagacaaaatcccgcattttctgcatttcaagacgctctaccctacaagctgacatagaaactcattataggaggcatcagctgcaacttcatcattttcccctgttactccaccctcggcggactgtgggtggagcaggcaccacacttggtggtagggcctgccaccctagcaggcctaatatccaattctggagctaacgaaggcttgaatactaaggcaccagcccctccga

SEQ ID NO: 73037 - DNA, 801 bp, Glycine max
  Clone ID: PAT_MRT3847_3696C.1
gctgatctggatcaataaagaagagatgatcttccagattccatggaagcacgctgctaagcacggctgggacatcaacaaggatgcctgtctgttccggagctgggccattcacacaggccgatacaaagcaggagaaaaagagccagatcccaagacatggaaggcaaacttccgttgtgccatgaactccctgccagacatcgaggaagtgaaggatcagagtaggaacaagggcagctctgctgtgcgggtgtaccggatgctgccacccctcaccaggaaccagaggaaagagagaaagtccaagtccagccgagacactaagagcaaaaccaagaggaagctgtgtggagatgttagcccggacactttctctgatggactcagcagctctaccctacctgatgaccacagcagttacaccactcagggctacctgggtcaggacttggatatggaaagggacataactccagcactgtcaccgtgtgtcgtcagcagcagtctctctgagtggcatatgcagatggacattataccagatagcaccactgatctgtataacctacaggtgtcacccatgccttccacctccgaagccgcaacagacgaggatgaggaagggaagatagccgaagaccttatgaagctctttgaacagtctgagtggcagccgacacacatcgatggcaagggatacttgctcaatgagccagggacccagctctcttctgtctatggagacttcagctgcaaagaggaaccagagattgacagccctcgaggggacattgggat

SEQ ID NO: 73038 - DNA, 177 bp, Glycine max
  Clone ID: PAT_MRT3847_36970C.1
ggcatacgttcgtttgcacgtagagaagagacaaccactagagatgatagcacgttcactgcgactggcctgacctaacagataaatgcaaccagagattcatcatgatactcgtggcactccacagatgtagtggtcaaacacaaagaaggattattgaggaatggaacgaatcct

SEQ ID NO: 73039 - DNA, 506 bp, Glycine max
  Clone ID: PAT_MRT3847_36971C.1
agcacggactcacaaataattactattttaatatggagggtacaactttggttggaactagtggacaaatattttttatgggtacgaaagtatagctacacgcatgtagcataagaatgtagagcgcctgatactagataaacgggttaactattctaggtaataacttggaagactacatcatttctgcaaagaagaaataatagataatacttacacccatgttgacttgattcgttgttggccatgacttgtaacaagggaaatgatcagtcatgtctatctcgaaaacgcctgctcttgatggtaaaacgatgaaataagatgcatcaagttatgaaccttgatacgatccccatgcatagtcatcacaacaccgtgcgtcttggtttcgaataggtcatgcttactaagcataagtacaacattggcttgggtggttaggattacagacactgaactacgcatatacttccctgcgggtgttcctgcatataactcagcac

SEQ ID NO: 73040 - DNA, 695 bp, Glycine max
  unsure (1)..(695): unsure at all n locations
  Clone ID: PAT_MRT3847_36972C.1
tgcgcttatcttcattccagtccaaatgctcctccacactcatcatcttcatcctcaccttctcttcccttcaccacactcccatgcatcaccatttccatttccattcccatctagaaccaacacccttcggtctcgaacattccccgctacttccatcagaacaggttcttcttctctcaggttccgcagctatggccgcagaatccgaaactcggcggcgaaaggcggcgtgagcgaaacggagcataataagcaaccggtcactagggcgtacccttttcacgagatcgagctcaagtggcagcgtttttgggatcacaatcgcactttccgaacccccgatgacgatatcgacacgtcgaaacctaaatactacgttctcgacatgttcccttaccctagtggagccgggcttcacgttggtcatccactgggatacactgccacagacattcttgctagatacaaacgaatgcagggatataatgtgttgcatccgatggggtgggatgcttttggattgccagcagaacaatatgctattgagacaggaactcacccgaagctcactacggtgaggaacatcaatcgctttcgcacccagttaaaatcattaggattttcatatgactgggatcgtgaagtctctaccatagaacctgactattacanatgggactcatggatctttc

SEQ ID NO: 73041 - DNA, 1079 bp, Glycine max
  Clone ID: PAT_MRT3847_36973C.1
gttctctttctctaaggatggccattagaaaatcaaacaagatctacttctcaaaccacagaacctcaagcgtatggttaagaccagttcctgataaaaaaacaaatacgggtacgatgatgttggtctccctttccccgtacccaaaggccatttcgccgtctacgttgtccaaaacagaagcagataaatcatccctatctcgtttttgacccaccccgagtctcttccttttctctcgacaagctgattaggaatttagtcaagattacgtctcaggcctcagtcttcaagcaaatcctcaagaggtgttccatctaaggaaagaaaaacgagtacgatgatgatggtctccctctcgatgtccccaaaggccatttcgctgtctacgttggacaaaacagaagcagatacattgtacccatctcgtttttgactcaccccgagtttcagtctctccttcgacaagctgaagaagaatttggttttgatcacgaaatgggtctcactattccatgtgaagaagttgttttccgctctctaacatccatgctaagatgctagatatatatatatatatatatatatatatatatatatatatatatatatatatatatatatatatatattatattctgcttattgcttgaaggaagaaaagatcgaaggtggccaagatgaagctgcttttgcttctcttttttttaacatcgatctctcttcacttcatcagtaccctagtcattgtgttcctcatcgatcagttcgccatctagttcttttttggtcccattttttttttcttttgttttttgaacagccccatttgggttcttatgttcatcatgtgactctaacttttgtccccataagtatttctggggtgaaaattgtataaagggtttgtcgttgagattttcctcacagaggttctacatactataccctgtgagagaagttggtttttttttcccaatgaaagctgggatgtttgtagtgattgacatgccatctctctgtttctctctatatctcttgtcctgccagaatatcatacgctgttgagatttgtgccc

SEQ ID NO: 73042 - DNA, 705 bp, Glycine max
  Clone ID: PAT_MRT3847_36974C.1
ggtgttccagcttaggaaagaaaaacgggtacgatgacgatggtctccctctcgatgtccccaaaggccatttcgctgtctacgttggacaaaacagaagtagatacattgtacccatctcttttttgactcaccccgagtttcagtctctccttcgtcaagctgaagaagaatttggcttcgatcacgaaatgggtctcactattccatgtgaagaagttgttttccgctctctaacatccatgctaagatgctagatatatatactattattctgcttattgattgaagaaaggatcgaaggtggccaagatgaagctgcttttgcttctcttttttttaacatcgatctctcttcttcacttcagtaccctagtcattgtgttcctcatcgatcagttcgcgatctagttcttttttgtcccatttaagtttttttttttgaacagccccatttaatttgggttcttatgttcattatgtgactctaacttttgcccccccaagtatttttggggtgaaaattgtataaagggtttgtcgttgagattttcctcgccgaggttctacatactatacactgtgagaaaagttagtttttttctatgaaagctgggatgtttgtagtcattgacatgccatctctctgtttctctctatatctcttgtcctgccagaatatcatacgctgttgagatttgtgcc

SEQ ID NO: 73043 - DNA, 478 bp, Glycine max
  Clone ID: PAT_MRT3847_36975C.1
gtactatttcggtgattcattcagttaatggtgttgggttgcttcattgataaataataaaattgtggtgttgcttgcagattgatcgagtgaataatattggaaatgatggatctgaatgtgaatgagaaaaagaaatgttgcgctgattgcaaaaccaccaagacaccactctggagaggaggaccagctggacccaaggtataggaagagaagggcttgttcgaggaagcgagaggagcagaggtggaagatgttgggggaagaggaacaggccgcggtgtgcttgatggccttgtcctctggttttgttttcgcttgattgcaaagcattccttaatttagtaatccacgacaatcctttttgatgtcgcatacctaaccttgtaaaggtcaagcctctgtttataacatggtgttcttctctggtctcttggttccctaattctctaagttcacggttattggtgcaaggatc

SEQ ID NO: 73044 - DNA, 517 bp, Glycine max
  Clone ID: PAT_MRT3847_36976C.1
cccacgcgtccgattttaactgtgtgtgtgtgacaaacgtgaaaagtacttttttttatgattttaactcaactttgctatttataatctactatgcagctgagaagctaaacttgccatacttaagtgcttatctgaattcccttggaaccaattaccggcatggggcaaattttgccactgggggatccaccattaggaagcagaatgaaaccatatttcaatatggaataagtcctttctctcttgacattcagattgtgcaatttaaccagtttaaagcacgcaccaaacaactctatgaagaagccaaggccccacatgaaaagagcaagcttccagtgcctgaggagttctctaaggctctctacacatttgacattggtcaaaatgatctctctgttgggtttagaaagatgaattttgaccaaatacgtgaatgcatgccaggagttgtgaggcgggggggcaatgcgggggggggtgtgtgcgggcgggggggggggaagctgggggg

SEQ ID NO: 73045 - DNA, 2739 bp, Glycine max
  Clone ID: PAT_MRT3847_36977C.1
atcctgtatagcgggcgcccctccacgcgttcgcccacgcgtccgattttaactgtgtgtgtgtgacaaacgtgaaaagtacttttttttatgattttaactcaactttgctatttataatctactatgcacccacgcgtccgcccacgcgtccgcccacgcgtccgacggctgcgagaagacgacagaagggggcgcattttgtgaaaaaaaataaaaaatggggataggggtactatttgttgggtttttcttgctatcttgtgttgtgtgtgtgaagggtgtggagccaaaagcctcacccacttgtacatttccggcagtttacaactttggggactcaaactcagacactggaggcatatcagcttcatttgtgccaattcctgcaccttatggcgagggcttctttcacaagccttctggaagggactgtgatggccgtctcattgtagatttcatagctgagaagctaaacttgccatacttaagtgcttatctgaattcccttggaaccaattaccggcatggggcaaattttgccactgggggatccaccattaggaagcagaatgaaaccatatttcaatatggaataagtcctttctctcttgacattcagattgtgcaatttaaccagtttaaagcacgcaccaaacaactctatgaagaagccaaggccccacatgaaaagagcaagcttccagtgcctgaggagttctctaaggctctctacacatttgacattggtcaaaatgatctctctgttgggtttagaaagatgaattttgaccaaatacgtgaatccatgccagatattctcaaccagttagccaatgcagtcaaaaatatataccaacaaggagggagatacttctggatacacaacactagcccctttggctgcatgccagtgcaactattttacaagcacaatataccagaaggctatcttgaccaatatggatgtgtgaaggatcaaaatgtgatggctacagaattcaacaagcagcttaaggatcgagtcatcaaattgaggacagagctcccagaggctgcaattacttatgtagatgtatatgctgcaaagtatgcactaattagtaataccaaaaaagaaggatttgtggatccaatgaagatttgttgtgggtatcatgtgaatgacacacacatttggtgtgggaatttagggactgataacgggaaggacgtgtttggttctgcttgtgagaacccttcacagtatataagttgggacagtgttcattatgctgaggctgcaaaccattgggttgcaaatcgtatactcaatggctcttacactgacccaccgacacccatcacccaagcatgttacaggcattaagcatcatagtcagaaaatcatttctgattggacattaattcctaaaggaacttatatatcagaaattgtaatattgcttgagacttttatttattcctgtgctagatgagaaccactagtttggtgctccttgaatgttccaatacacatcattcgggagataggcaaattcattggccaattaattggtgcttttcaaacattggttgcaacaaactatttaaaatttgatgcattcttggccttaactttaaaagcatttcatttctcaacacgtgcttgttctcgaaagtttatattgtgcatttgatcagattaatttattacatgttacttccatctctaaattcagttcggtagccaaatatatactgtaattttgcaaccaaaaaaatgtacaagatttgatcaccagttgtatcactggattaatggatggtgatattgttttattgtttttcatcggtcaacattttcctgctccataatacctcgccggaaactttggagttatcatgagaggctgcgttataaccagccccgagttcatctctttaaatgctatgacaccatacacacccccagagctgaagtaaaatatatgcaaaaagcccctagagtaacagacggcgacagagacactggtcacaaaaaatatagctacaaggttctctatctcttcttttgggtgtttatctcccttgtatattggcgagaatagctgagtaaaacattgtgtttttgcagctctttaagcttgtcaagcagttcggaaaacctgcgccggcaagctattacactatccccacagctctcatttataaaagcacagcgtagaacaacattttttggaatctctagccgttgattcatgaactctaaagctacaatcacctgtattgagtagagattatcccaagttatcttttcagtggcaatttccccccgggaccaactgccctactgggttcccagccctgctggctggtcttgctgctcgcgcatcgtcgcccgccgcgctggttcactatgcccgcagctctcatttagcgtcgcccaccgccgctgtgtcggatctcttgccgccgaggctggctaggactccttttgggtgctttccttggcagtggatcgggcagcctggaactgaatggcatactgtttttgaagctctttaagattaactgattcattttcttgatcattctgtctccaggacccagcaacacgaacattcattgcatctgatccttctcgatcttttgttctccacggccatgataatgttttcctttgaatccaggcttcagccttaggtatgattttatgaatagattttccttcactctcatcaccagactctctcagag

SEQ ID NO: 73046 - DNA, 580 bp, Glycine max
  Clone ID: PAT_MRT3847_36978C.1
aaaaaaaaaaggggggaaaaccttttggccccaaaaggaaaaggggaaaattgtctccccttccctttgggggctttttttggggtttggggtccccctggaacggttagggaacggaacgatttccctaattttttggggccccccgccaggaaaaaccggggaaaggaaaggccaaaaatggccgggggggcttaccccccttttttttcccgaccccggggaaaaaaaaaaacattggagttttaaaaacaactaaaaggggggggtttccgctccttgggggggggcccaagtccctaccgggggggggaccaacccccttaataaaaagggttgcaaaaggatttgcccttatcccccccccggtttttcgcccaaaagcacccgcccccccaaagtcttctggccccttttggtgcaacctctcccctccaaacaatttaccggttcccccaaactttttaactgcccggtcgccccccctgtaaaagggaaccgcccttgcccttgggaaagggttgccctgggaaattttcttggggggcccctccctttaaaggggttttccccgggcccc

SEQ ID NO: 73047 - DNA, 256 bp, Glycine max
  Clone ID: PAT_MRT3847_36979C.1
aacataaaagaaaatggggatattaaaacagccaatatcccccccccaagaaagaaaaaaacgggggggaaaaaagggccgggggaacaacaagggcttaagctgggggggcaaccacaagaaccccccttttgggaaacccacaaattttttttcttccggatggcaccatcaacaccaagggcctttctagggaacaacataatcaaaagcctcatccgggggggggccatgggcattccccacccaggaaaaa

SEQ ID NO: 73048 - DNA, 379 bp, Glycine max
  unsure (1)..(379): unsure at all n locations
  Clone ID: PAT_MRT3847_3697C.1
cgacgaagccggaaggggcgcgagagaaaacaaggaannncnccnccccacaanannacccgagggccgcaaccgcccgggggaaaaaaggacaaacgaggggganccanaaaaccnaaancnncccaagaggagagcagnaccccagacgacccnagcgaaaaaacaccnccggncggaacagcagcgacgacgcaaagaaaggccnccgagggagaggccggaaagaaagggcccgaaccaaaaaaccgagacgcncgcacaagaggcncgcnagagcagaaacagcggaaggcccggcaagcngacaaggangcagaaacacagagaggccagaagccgcnggcggaggaggaggaagccgcccacaaaagaaaag

SEQ ID NO: 73049 - DNA, 253 bp, Glycine max
  Clone ID: PAT_MRT3847_36980C.1
tcggaagattttgattacaggatggtgtaccactttgttcaatagttcaggaaaaagaacatttaaggacattatttgaaaccccatagcacttataaggttgaggactgattttgagagggccaagagaacacttttctttattgctcagaccaacattgaaattgattttctattccagggaaatgatttcttctccagtgttactcttgccaaattctgggaaactcaacatggatctcttctggaaatg

SEQ ID NO: 73050 - DNA, 364 bp, Glycine max
  Clone ID: PAT_MRT3847_36981C.1
ccaaatttggtgacttattggaagtctctccttccattaacaacaacaattgtgtggaacaagaccttcaagtggatccatctctcagtgactttgatgaaaagaaggctgaagaagagtacactaagctcaaagagaagtatgacaacgaacacttcaacttcaagggattaaaggtctctgcaactccattgtgtccttacattcttcccaaagtgaagaatacaatctatgttcttcttgagatcaaagttggcaagaaacaagaggaagagaagaagaagagatccccttatgctgtgtccattgttttggatcgctctggctctatgagtggctctaaattagataaagccaaagcagc

SEQ ID NO: 73051 - DNA, 1416 bp, Glycine max
  unsure (1)..(1416): unsure at all n locations
  Clone ID: PAT_MRT3847_36982C.1
agaaaatactctgcaaaggacaatgatgatctatgcattgtttgttgggatggtggtaatctattgctttgtgatggatgcccaagagcatttcataaagaatgtgcagctctatcaagtattccacgtggtgactggtactgccaattttgccaaaacatgttccagagagaaaagtttgtggcgcacaacgccaatgctgtggcagctggaagggttgaaggagttgatcctattgaacagattgccaatagatgcattcgcatagtcaaagacattgaagctgatcttagtagctgtgctttatgcaggggtgttgatttcagcagatctgggtttggtccacgcacaataatactctgcgatcagtgtgaaaaggaatatcatgttggttgtttgagggatcacaagatggcatatttaaaggaactgccagaaggtaattggctttgttgcaatgattgcacaagaatacactctactttggagaatcttttggttaagggggctgagagactccctgaatctctcttgggtgttataaagaagaagcaagaggaaaaaggattagaacccatcattgatgtaagatggaggcttcttaatggcaaaattgcttctcctgaaactagaccattgcttttggaggctgtttcaatctttcatgaatgctttaatcctatagttgatgcagctagtggacgtgaccttattccagccatggtttatgggaggaatgtgcgaggtcaggagtttggaggaatgtattgtgcattactaatagtcaattcatctgtggtatctgcgggcatgcttagaatttttggctcagatgttgctgaactccctttagttgcaacgagtaatgggaaccatggaaagggctacttccaaacactcttctcctgcatcgagaggctgctggctttcttgaatgtgaagaatcttgtactgccagctgcagaagaagcagaatcaatatggactgataaatttgggtttagcaagatgaatccagatgagctcaccaactatagaaagaactgccatcagatggtaagtttcaaagggaccaatatgctgcataaaatggtaccttcgtgtcgggtcatcaataatcaatcatgacatttttttttatagaaacgaaatcaatcgtgaaaggggaaaacccctagctttctcgcttcctttttccctttcttctggttttgtatatattaaacttttggctatttgaagccattgttgaagcgttcctgccatttgtttaaacatttataatgccatgtattctatttttattttaattttaattttagtaatatacaagtttagaagttcttgtctcggacaagtactcgaatataaaatatctttacccganaaaaaaanaaaanaaaaaaangggggggg

SEQ ID NO: 73052 - DNA, 1376 bp, Glycine max
  Clone ID: PAT_MRT3847_36983C.1
ggctcgagattgacttctattatgaaatctaccaacaaattttttttacatgaaataatcctctggtaaatcaaagacagcaacaacagagaaaaaaaaaatggaggcactgttgtgcagaaaactgggtgatccaacggtatctttggaagacaacgatgatagcccaatagttctgtcaaagaatcatccaattccccaactcgattctcccactgcagtaagagtgagaatcaaagccacaagcttgaacttcgccaactacttgcagatactgggcaagtaccaagagaaaccctctttgcccttcattcccggttcggatttttctggcttcgtcgacgccgttggatccaaagtttccaaattccgagtcggcgacgccgtttgctccttcgccggcctcggctccttcgctcagttcatcgtcgttgacgagtcccagttgtttcaagtgccccaaggttgtgatcttgttgctgctggggcacttgctgtggcgtctggcacttctcatgtagcacttgttcatagggcccaattgagctccggtcaggtatctgtgtgttgttggttttgggtgcagctggaggtgtgggacttgctgctgtgcaaattggaaaagcatgtggggccattgtcattgctgttgctcggggtgctgaaaaggtgcagctcttgaaatctcttggtgttgatcatgtggtggacttgggtaatgaaaatgttactcagagtatcaaacagttccttcaggctagaaagctcaaggggattgatgtcctgtatgacccagttggaggcaagctcaccaaagaatctttgcggcttctgaaatggggagctcacattctcataattgggtttgcgagtggagaaattcctttaatccctgctaacatagctcttgttaagaattggacagtgcatggcctttactggggtagctataaaatacaccgcccaggtgttatcgaagattcactcaaggagctactgtcttggttggcaagaggcttgatttccatccatatttctcattcttaccccttgtcagaggccaaccttgccttttctgccatcaaagataggaaagttattgggaaggtgatgattgtttttgatgagaaacctacaagatctaagctctgatcctgccaaaattatgctatatggttgaataatttgttatattagcaaccaagagatgttagtttacggaaacaaaataaaaggagcaataattgccaagttatgagaaaaaaatgttacccttgaagccctcacattgttatgtggaatctttacgttggtgctaagattgattttcttttttctaaataaaaaaaattaatttttatcagacttttatctta

SEQ ID NO: 73053 - DNA, 1867 bp, Glycine max
  Clone ID: PAT_MRT3847_36984C.1
cggctcgagctcgtggagacgtcatcatcgcgattgtggatggcagcgcgcgcccttggcgtgcctcggcacctgcgcgctcctggcgtcggcctgtgggctccccattcggcccgtcttgaaacacggaccaaggagtctgacatgtgtgcgagtcaacgggcgagtaaacccgtaaggcgcaaggaagctgattggtgggatccccctgtgggttgcaccgccgaccgaccctgatcttctgtgaagggttcgagtgagagcatacctgtcgggacccgaaagatggtgaactatgcctgagcggggcgaagccagaggaaactctggtggaggcccgcagcgatactgacgtgcaaatcgttcgtctgacttgggtataggggcgaaagactaatcgaaccgtctagtagctggttccctccgaagtttccctcaggatagctggagcccgcgggcgagttctatcgggtaaagccaatgattagaggcatcgggggcgcaacgccctcgacctattctcaaactttaaataggtaggacggtgcggctgctctgttgagccgcgccatggaatcgagagctccaagtgggccatttttggtaagcagaactggcgatgcgggatgaaccggaagctgggttacggtgcccaactgcgcgctaacctagaccccacaaagggtgttggtcgattaagacagcaggacggtggtcatggaagtcgaaatccgctaaggagtgtgtaacaactcacctgccgaatcaactagccccgaaaatggatggcgctaaagcgcgcgacctatacccggccgtcggggcaaggaccaagccccgatgagtaggagggcgcggcggtcgctgcaaaacccagggcgcgagcccgggcggagcggtcgtcggtgcagatcttggtggtagtagcaaatattcaaatgagaactttgaaggccgaagaggggaaaggttccatgtgaacggcacttgcacatgggttagtcgatcctaagggacgggggaagcccgtctgatagcgctctgtgcgcgtactccgaaagggaatcgggttaaaattcctgaaccgggacgtggcggctgacggcaacgttagggagtccggagacgtcggcgggggccccggaaagagttatcttttctgtttaacagcctgcccaccctggaaacggctcagccggaggtagggtccagcggctggaagagcaccgcacgtcgcgtggtgtccggtgcgcccccggcggcccttgaaaatccggaggaccgagtgcctcccacgcccggtcgtactcataaccgcatcaggtctccaaggtgaacagcctctggtcgatggaacaatgtaggcaagggaagtcggcaaaatggatccgtaacctcgggaaaaggattggctctgagggctgggcacgggggtcccagtcccgaacccgtcggctgtcggtggactgctcgagctgcttccgcggcgagagcgggtcgtcgcgtgccggtcgggggacggattgggaacgggcccttcggggcctcttccccgggcgtcgaacagtcaactcagaactggtacggacaaggggaatccgactgtttaattaaaacaaagcattgcgatggtccctgcggatgttgacgcaatgtgatttctgcccagtgctctgaatgtcaaagtgaagaaattcaaccaagcgcgggtaaacggcgggagtaactatgactctcttaaggtagccaaatgcctcgtcatctaattagtgacgcgcatgaatggattaacgagattcccactgtccctgtctactatccagcgaaaccacagccaatggaacggggcttggcggaatcagcgggg

SEQ ID NO: 73054 - DNA, 440 bp, Glycine max
  Clone ID: PAT_MRT3847_36985C.1
cggctcgagcttttcccttttttttttaatttcctttctacttaattcgtaaaaaaggaaaaaaaaatgtgggggttttcatgtttggggtggggtatgcttgttctgagttttgccgggttttcagtcagattcattttgattggtgaaattgttgctaataataagtgaaatttgttttttattttttttactataaatagaaaggttcattttttgaaaaaatatatgtagtaagtcgttttctttaatgtttgtgtatggtaattaatttaacaagataatggaaatgtaaggatcgggatttcctaccgctgggaattcactgttaaatacagattgtattactcataacttatctcaatgaatctaacttaagcctgtttcgatacaaactagaaatgtttttgagagttttctactaaaaatattaatctttt

SEQ ID NO: 73055 - DNA, 262 bp, Glycine max
  Clone ID: PAT_MRT3847_36986C.1
gggtcgagcactcagttagagctatgccttaggaataaggttttctatgacacagggctattacaaggatctcttggggtaagtcatgaccttggtatacaggaccttagaactgaccttattactggctagggagatggctagacattacctagttttcacgaggaacttatacgcggctattacgctggtggtacatcataaccataataagggcaccataaccaatgtacacatacagggacatgtacagctgaatgtg

SEQ ID NO: 73056 - DNA, 517 bp, Glycine max
  unsure (1)..(517): unsure at all n locations
  Clone ID: PAT_MRT3847_36987C.1
ttcttgcactatatagggagatttattctcttctcaacccctccttccatgggttcagagtccaattcaaatcttagaatcaccattgagagcgatcctccagagtgcacgcctagccgaattgagcatcaagtgttgggcaaaggggggggtggctccaggggagtgccaattgaggtttgaggctgaagagacatgcgatttgctgagaggggaggggaaggcgtatccaaaagggggatcagaggttgtgcgaggtggggcgtgggatcttgtgaccataccaaaggggctcaattgcgcttgggagtggtcangtgccgtgggcaagtactacaaattcgaggcaccaaattcttcttaagagtcaacatcatcctagggtgtttgggcactcatcattcatcattcatcgcttggtattgtgaggattaaattaggtttagaactttcattcatcaaattattattcgttctaggaattctttcacaggttcattggatattgggantattt

SEQ ID NO: 73057 - DNA, 1941 bp, Glycine max
  Clone ID: PAT_MRT3847_36988C.1
agataattagttcccctctgctgttactccttcttcttctccaccgttttcttcaatccttcattcgttccaatggcgctagggttttatctcaattagaggcaccgaacgctccaaacggaaccatgaatctctcgttggcagctccttcggcatttcgcgggaatctcctcgttcctctgtcgcgctgcacctcttgcttcaaacttgatctccgttttcagcattccgacggttttcgccattcgcgttgtcgtcggagtttgttcaagctgattcgggatccgagatcgagcaggaggagagggattgcttgtagtgttaccgagccagataacggtagcgacgagaaggagaaagaagcagataaaaatggagaaacgctacgtgtggaagattcctctgagcaaagtatccctccacctgtagatgcagaacaactaaatgagtttagtgatgaaaataagggtcaaagtgatgtgcagaatatggatgatagcaatgaagttgccagtggatcacctctgccaggtatgaagcctcagaaactggatgaagcaataaaaattcccaaggaaacgaacagaggtcttgttgtatgaagattgggtctttcttttctcgtaacaagccaatcctgaggtgggtggagtgctgttcaaaggaaacttgcgagggcaagctgctaaaagttatgataaaatatctaagagattgaaagataaatttggagatgaatacaagcttttccttttagtaaatccagaggataataagccagtggctgttgtggttccaagaacaaccttacaaccagagacaactgctgtacctgagtggtttgctgctggatcttttggactgattacagtttttaccttacttcttcgaaatgttccttctttgcaatctgatttattatcaacttttgacaatctgaacttgttaaaggatggcctacctggtgcccttgttactgcacttattctgggggtacatgaacttggtcactttttagctgccaaagacactggagttaaacttggggtcccgtactttgttcctagttggcagataggctcttttggtgccattacaaggataagaaatatagtacccaatcgtgaagatctgctcaaggttgcagctgctggaccaatagctggctatgccttgggtcttttgcttctgcttctaggttttgtcttgcctcccagtgatggtattggtgttgttgttgatgcttctgtgtttcatgagtcgtttcttgctggcggtattgcaaagctgcttcttggtaacgttctcaaggaagggccaacattttccatgaaccctctcgtgatgagggaactgcaatttctatcaaccctcttgtgatttgggcttgggcaggactcctcatcaatgccatcaacagcattcctgcaggagagcttgatggagggagaatttcgtttgccctatggggaagaaaggcttcattacgcttcacaggggtttcaattgcgttgctgggagtctcgtcactgcttaatgatgtagctttctattgggtagttctgatattcttcttgcaaagaggtccaattgctcctctttctgaggaaataactgatcctggtgagaaatatgttgctattggagtaacagttttactcctaggtttgttggtatgcttgccatatcctttcccatttacagaagaaaccctcacaagtttctagaaataatggctccatatactctggcagcatcgatttatactgctagtacatgaaattttgagaactgaggtacacaggtaggattttcagtgaatcaaacagtcaacgttggctcatacgctaggtgaataatcaaacctcaaaatattgaggctgaaacgccctagttttgttattcatattcattaacaatggaattttttttaagggttaa

SEQ ID NO: 73058 - DNA, 245 bp, Glycine max
  Clone ID: PAT_MRT3847_36989C.1
gtctgttttgccgtggaatatcaagtaatatcatatgaaatggaaatgggtaggtggtggtcgagcacgttggttttcactgttctctctgcaccaatacttataatagcattactctcctccacgttcgaagaagttgaccatgataacacagtgcctgtgacgggtcttcttcacacggattcccgatggatcctcgaccaagatggccgaagggtgaaactagcctgtgtcaattgggtgtc

SEQ ID NO: 73059 - DNA, 322 bp, Glycine max
  Clone ID: PAT_MRT3847_3698C.1
gttggggttgttttttatgtgtaaattaaaacacaccctttggtcatagtaaggcgcgttatttaagtgaataaaattcttgatactagttcacaaatgctaaagggcacccattaacctgtattttgagacttttacagtttttaagaagttgggattgtataggtattggggtgttggaactctatatattttttttaaactcttaaaaagaacagcttatttagtttctggaaaaggttcaatttttgtaagaaaaaaaattttgtttatctttttcaagagggtgtgggaattctctttttttatattttttgggggt

SEQ ID NO: 73060 - DNA, 664 bp, Glycine max
  Clone ID: PAT_MRT3847_36990C.1
gcagaatatggatgatagcaatgaagttgccagtggatcacctgtgccaggtgtgaagcctcagaaactggatgaagcaataaaaattcccaaggaaacaattgaaattcttaagaaccaagtttttgggtttgacacttttttcgtaactagccaagatccttacgagggtggagtgctgttcaaaggaaacttgcgagggcaagctgctaaaagttatgataaaatatcgaagagattgaaagataaatttggagatgaatacaagcttttccttttagtaaatccagaggataatatgccagtggctgttgtggttccaagaacaaccttacaaccagagacaactggtgcttgtttagctcctgcaacattgtggatcaaaaagtgttctttcaatagtaaagcttatgatgttacttatatttgcagctgtacctgagtggtttgctgctggatcttttggactggttacagtttttaccttacttcttcgaaatgttccttctttgcaatccgatttattgtaagctgttttcttatgccttaagttgtcatttcatactgtgttatctcttagggaagagtgtagtatcacacaacactgtctcatgtactttcattttctatactgattcagttgtgtttactccttcgcttgagt

SEQ ID NO: 73061 - DNA, 210 bp, Glycine max
  unsure (1)..(210): unsure at all n locations
  Clone ID: PAT_MRT3847_36991C.1
cgggncgacccacgcgtacgaccacgcgtactttcctataaaactacatatttttttaattgatagctccttcaattaggctgttggtcttctatatctactatgtccaattcaacgttatctttcttttagaggagtaacaagacccacaccctttttgtgagttttagtcgctctatctttcacctccataagaattattgcttttct

SEQ ID NO: 73062 - DNA, 1585 bp, Glycine max
  Clone ID: PAT_MRT3847_36992C.1
agtccatagtccatacacattactcaactcatcctttctggttctggttcaacacagcacaccatttctaatgctgtaaaatttgtaccatgcagcaaggggctctgcttctgcttttgtgcttggtctctctgttccccctcactcactatgcctgactttcttgccacaaacccacttaccttttcagctgccgttcctcccacattcccccttaccatttcagctgcagaatctccaagattccccttcttcaattcatgcccaactcttacaccaagaccccaactcaacccgaatttccgtatccccttttctcccaaaccatctaaaaacaagagcgtctctttggcactgagctccaggtcgaatgaagggtcatcaaggggttatggcttttacaacgagcttgagtttgaggacagaaaggacaagacttttgggttggagatgaaccctgttgttggtgaagattcccagagtgaaactgggtcaatcccctttgatggggtggagggtggtgatgataagggagaggatgatttggttcgggctcagggggatgcagatggggatggggatggtttgaagaaaggttatgatgatgaagaaggtgagaatgagaaatttggaggtaaacttagagtcagaagaggtaaagaggtaattagaaggtcgaatttgttggccaagcaagtgatcagcattcactctgcccttagtttgggattcgtctcgcagctttgggtggacacaagctcttggatggtgttatttgtggaggtgaggccaaacttgctttctggggattcagagaaattccttctggatgatattagtcaggttggagatgttgtccttgtccaggatgaaagtgtgacagacaatgaatttaaaatggttggcttggagacactggttggatacaaagttgtaacaccctctcgacggaatattggaaaggtgcgtgggtacactttcggcatcaattcaggtgctgttgaagaacttgaacttgattcatttggactatccatcattccgtcaagtttggtgagtacctactctttgctggttgaggacgtgctggaagtagtatctgacgcagttgttgtgcatgaagctgcagctttacgaattcaaaggctttctaagggttttttgggcaatcagaatgtgagagtttcagtggatgattttgaagattttgactctgaacaatctgacacatacggtcctatttcaaggagaagaaaaagtttcggaagaaagaaacccagtcatagagattgggatgatgaagataattgggagcttccaatggactatctctgattctaatggattttctgcaaaatttcatgtaaaacatgttttttacattattaaaaagaatgaaagtttaaacaaacctattaaaaacaccggaaggaaattcttttcacttttggctataagtaggctttcatttatttgtacagttagtttcattgaatttctttagattttcctacctcactgactatatgttcgatatgtaatgataaacaatttcccatagtttgataaagatggtgtttcttcc

SEQ ID NO: 73063 - DNA, 335 bp, Glycine max
  unsure (1)..(335): unsure at all n locations
  Clone ID: PAT_MRT3847_36993C.1
aaagtcccgtacaagccncattacattacattagataaaactaagatacgagaggcctgaccattacatgccctgctacacaacctagatgcattacataaattaaaaacttggtttgctaagccaaatttcaccacattacagccaactctgaaagggactagggggaagacccaacctctttgggaggaggaacaggagaacctcccagtttattcattttattccgaatggccccaccctgccttgctttcattaaacgctgcgctacataagcaaatttttttcttttgacccaaccattttaacctacccagggggtgggggcaactttg

SEQ ID NO: 73064 - DNA, 469 bp, Glycine max
  Clone ID: PAT_MRT3847_36994C.1
aggtcgcgtgttgtcacccatttatgaggtagatctatgattacacttcgtggacacaggtggcgttggctgccttggatctatcttgtcattggatgggaacagggggctacagacaaccttagacacatacgtcttattatgctgaaggaaattcgtctgtctgatcatacacactctcgcgatgaatgcactggatcagagttgtcatgcctaacccggaaactgtgattgtgaacatgtttacatgatcgaaagtataactagagcaggtacgacgcttgtgtaatatgtgattgtcgactgcacaagataatcctatatacgcgatcacttgcaccttaagtgtcatagcccatggcttgtggcatctattcaatgccttgagacctggacttggatgaatgggcattaccctcgcttgaggagcactcaagcgcgttatcttgcattcacttgatcatgcatc

SEQ ID NO: 73065 - DNA, 211 bp, Glycine max
  Clone ID: PAT_MRT3847_36995C.1
tacaacgtttgacgctgtaaaggtgctctcacatgtcatggattagtagtctcagagatctgtaactcttgcatcactggtgtataccacttatcatccattgggtcgtctggtgagacgtcagagtatgtgctcgttggtggcacaacctctggatagtgtccatgatggtcaacttgctcttggatcagatatagcaatgagatccatc

SEQ ID NO: 73066 - DNA, 748 bp, Glycine max
  unsure (1)..(748): unsure at all n locations
  Clone ID: PAT_MRT3847_36996C.1
attttattctatatttacattttgataattttctttgtagttgatagccatggctacccgtggaaagcttgaggttgacattgatctcaagtccaacgcagacacgcccacaaataaaaagaagatatcctcaacctcacgccttaccttgtattacaaaggccacacaagttctcaacccttcattctcctctttctacttttcacacccatcttcctcttcccaatggatccccagaaggtggtgttaaaggtccttactatgacagatgacaaaacaaaaaagaaagcaattgaagcagctgcagatatctatggggttgattcgattgccgcagatgtgacggaacagaagttgacagtgattggtgaaatggatgcagtggcagtggtgaagaagctgaagaaagtagggaaagtggatataatatcagttggacctgccaaggaagagaaaaaagaagaaaagaaagcggaaaagatggaagagaaaccagaagggaagccagaagagaaacaggaagagaaaaaataaaatcatgtcatcatatttttcaaattcttcccccttcttttaatatttcctatacagatagtaagctgcaaattgttcatatgatttatcaataatgaaaagttttattggttcatatgacttttctgagtgtaatgatatctatgcttctgctcatgcttgtaaattgtaccaagagtgtgtacaggtagaaggnnnaaaaaaatggtatat

SEQ ID NO: 73067 - DNA, 260 bp, Glycine max
  Clone ID: PAT_MRT3847_36997C.1
actattttcacacggaatcatttagatattatatgaaactaattttcaaaagaagaaagaggatttttaaagatactaattgtaaaaacttgaatgtgaaacctgaagctgttaaaagattaatcaatttttttctacctggccctgctgaaaaaaaagtcccgtctcgcccttgaatagcttccttaaaaaggactactgcttccacagggagtgatttgggaaaaaatatgctccctttgaaccgagggttattcttg

SEQ ID NO: 73068 - DNA, 1071 bp, Glycine max
  unsure (1)..(1071): unsure at all n locations
  Clone ID: PAT_MRT3847_36998C.1
attcggtccaagtgcccaccttggaccggttctttccctaacctttgttaatccaggggatctgtggtcgggttcagaaggaggaggtataaaaatatggcctttggaggctgttgaaaaatctattcatcttacaaaggaggaaaggcacagtgctgccatatttgtggagaggtcctatgttgacttgaggagccagctatctacaaatggcttcagtaacatgctaacttcagatgtaaagtacttagtatctgataattcgagagcaaaggtgtggagtgctggctatttttcatttgctttgtgggatgctcgtacaagagagctactgaaagttttcaattcagatggacagattgagaatcggttggatgtgtcctcaattcaagacttttcagtggagcttatttcaagttcaaggaaagacaaaacacaaagttccattgggttctttcagcgttcacgtaatgccataatgggggcagcagatgctgttcgtcgagttgcagcaaagggaggctttggggatgataaccggagaactgaagcactagtggtaacaatagatggaatgatttggacagggtgtacaagtggcttactggtgcaatgggatggaaatggcaatcgcatacaagattttctctaccattcatcttccattcagtgtttttgtacttttggcatgcaaatttgggtaggctatgtgtctggcactgtccaggtattggacctcaagggtagtctgattgggggatgggtggctcatggcagtccaattgtaaaaatgacagttggcgctggttatgtatttgcattggctaaccatggtggcattcgtggatggaacatcacctccccaggacctcttgatagcatattgcgttcagaattgggtggcaaagaatttttatatactaaaatagaaaatataaaaatattgagtggtacctgggaatgttggacaaggaaaagcatctctagattcccttacttcatggctaggttctgtggcctcagatgttagcctttgttgntggttgggttgcaaagagttgaaaatgggtg

SEQ ID NO: 73069 - DNA, 649 bp, Glycine max
  Clone ID: PAT_MRT3847_36999C.1
cacgcgtccggtttctttctctctctctaaacggtttcctccatttcaaaccaggcttcctttccagctagtctggtccctccctcatccttaagcacagtacccaccaaccgtttttccccaccattgctttttcctcttcaaaaatctacccattttcactctctctctttctctctctgcatatttttttttctcttcataaaaatagtatttttgtctgtcactccaataaatctttgtttatttatttcttggtatcttagtctttttgctttgagtttatttgtgacccacttgaggtcacctatagttaaactacatgtaaaaaaaactgcatcttggtttcgtagggcttattctggtattgttctggcattcctgcacctatctatgctcattgggttcgttgatgttcagagagaaaaccctttgttgcttttgtgggtgctggaagtagaggatcaaggagggtgatttcgatcaacacaaaggaggggaatgtctttgattctactctctgaagaatttggaggactgatttgatcagcttgtagcagccatgtcaggaaaacagtctttgcatgtggggattatcgagggaagactttcttttttggggattgcgaattatggggtttttgattgg

SEQ ID NO: 73070 - DNA, 918 bp, Glycine max
  Clone ID: PAT_MRT3847_3699C.1
cgacgtatagttcagtacaagactgcatactattcattttaccttccagttgcatgtgcattgcttatggcgggtgaggatctagacaaaaatgttgatgtaaagaacattcttgttgagatgggaacatactttcaagtacaggatgattatttggattgctttggtgatcctcaaacaattggaaagataggtacagatattgaagatttcaagtgctcttggttaattgtgaaagccttggaacttagtaatgaacaacaaaagaaagttctacaagagaactatggtaagccagatccagaaaatgttgctaaagtaaaggccctgtacaatgagcttaatcttcagggtgtatttgaggagtacgagagtgggagctatgcgaagcttgtatcctccattgaagctcatcctatcaaagcagttcaagctgtattgaagtcctttttggctaaaatttacaaaaggcagaagtagagtcaacttaaggcgaggaccaaaattgtttaacatgcaatagaaactagagttctgatttctatctagtatctagagcagtatcatgtttcgtggcttggaatcttttaaaaattgattttcttcttgcctttgttttttctaattttgttttttcagtgttaagatcttgttgtattttatcttgtaatattgtttgactattttcttctgaaacttttgggtcattattattagagttctgctatttatataatatattttcagtaaaaaaaaaaaaaaaaaaaaaaaaaaaaaaaaaaaaaaaaaaaaaaaaaaaaaaaaaaaaaaaaaaaaaaaaaaaataaaaaaaaaaaaaaaaaaaaagggggggggcctttttaagggaccaagttttcctcccccggcttgccaagttaaaattttttttttggggcc

SEQ ID NO: 73071 - DNA, 729 bp, Glycine max
  Clone ID: PAT_MRT3847_369C.1
tatgagtatttgttgaaaattatacagataactttcaaaaaaacacttattgcgtttctttgcgtatgatacagtgacttggaagatgccctgtatgtaagtttaaatatttaaggtagagaagttgttcgtgttggtggaaggatatgactttgttaaaaatgcttattgcgtatctgaatggtaaccacagtgagcgtaatcccccccatacgtatatggcatgtgatctggttttctgtcatctgggttatttggaagaccagaaatttgagctttttcagggcagcaacaagacctgcaagatatggtggaaaagattatgattttgtcgtggcaatggttgtctacaaaaggtgtcatttcatattcattagcttgttggtggaaaggtcctagatagtgtttatatgcgacctgggatggcataattgtggtacgtactggtttttgtttattgcacagacgctcaataagtttcaagatgggaaggtattcagcggttatgacttatgagtgtggtactgtatgttccgttaatatgctgcaatactttgttatatttgggactttttaatgttttggatagtgtactgtggttgccgttaaacagcagctcaacttttgtaagctttttctttttttcttgtctttgtcacgcttgtggctttgacaatgtttctcaaaatgaattttgcttttacctcttcaaaaaacaaaaggtggagg

SEQ ID NO: 73072 - DNA, 312 bp, Glycine max
  unsure (1)..(312): unsure at all n locations
  Clone ID: PAT_MRT3847_36C.1
gctgcaatttcccaatacattgagcaccntgccttatcccccctttttataaatccggccaacccccaccgacggggggaataaaaccagccggtcgatgcgctcaccagcagaggttctaataactatccctctccggctgcttacccagactaaggaagtagagtgagaacccccgaagactcttaacttcactttatttaactcacagatgctatcacttgccgaaaccaatccaacagagtcctggaaacagtgccatcagcttattacccatgggtgatatggacatatcattgttaaaaaatgatc

SEQ ID NO: 73073 - DNA, 166 bp, Glycine max
  unsure (1)..(166): unsure at all n locations
  Clone ID: PAT_MRT3847_37000C.1
gttgttgtgagctataantagtntatcgngangagnatatgaagttgtntgntttccttgttgctgnagtagtttggtagcatggcnatgncatggcgcaggcaaccaagggnccctctccgaatgaaanactggcaatggtgaccntncttcggaggnaaatcgc

SEQ ID NO: 73074 - DNA, 151 bp, Glycine max
  Clone ID: PAT_MRT3847_37001C.1
tacccatgcgttcgtggttgctataatacgaccaaaaacgcacctagacatggtttattgatcaagtccctcccaagagacgaaccaacgggatagagaccttggtttatttcgcgaaagaacataaccgaatccaattgcttatttttct

SEQ ID NO: 73075 - DNA, 211 bp, Glycine max
  Clone ID: PAT_MRT3847_37002C.1
caaagagtcggctgaggctgcacaaaacaccccgaaaaagccgaccgaacgggaggatgaaaccacgacaaaggccgataaaaccagccagacaaaaccacatcgccgagaacacgaaccacggaccagagaacagacaacacacaaaacaaatgccaagacccaacccgcagatgaaggacacaaaccgagaacagacaggcacggaaag

SEQ ID NO: 73076 - DNA, 152 bp, Glycine max
  Clone ID: PAT_MRT3847_37003C.1
gggagttcttcttattcccccaacatatggccaactatgattctattatcaacctttaaggccgaaaccctttgcccttgttaccattgggggaccaaggtttacgacaagtggagaattgggaaaaacgatttctccggccgtataactac

SEQ ID NO: 73077 - DNA, 575 bp, Glycine max
  Clone ID: PAT_MRT3847_37004C.1
gtaaacaacaaaaaagtaatgtactgggctgtgtgagaaagcaataaacactactaaaataatagtattctacgatctgcattcaacaacagtggttccaaaaatgttgttgttttagaggcggtggtattatagtaaataacagatttatttcaacaacgtttttgttgaaaacaacgtcatctgcgcgttacaaaaacgggtttagtggacaccgttgttgaactgcattatccaaagacgggttttataaacaccgtctttgaatctgaagtaaattttcatctttttccctagcatacttgcactctaccctagcccgcattacctcactcattttgcgcccttaagcttgtctctctaagttggttgccgtcgtgaagcacaccagcactgtcgtggttgtcgtcgacgattttacacttctagttttgaatatatataccctagggtattattgtatactactgatgctgtgtatttgatacagaaaatcgaaaagaaaaattggattcgaggccagcacctccagacaaggtaagagtggaaggtaagcttaagttttcatatctcca

SEQ ID NO: 73078 - DNA, 201 bp, Glycine max
  Clone ID: PAT_MRT3847_37005C.1
cagatttcggtcttgctagggagggcccaacgggtgatcagacccatgtatctactgcggtaagttgaagtcctataataaattttcactactattcaattatatgacttttcacatatgctattattcgtcaccattccaattactacatttggtccctttgtttgatgcatgaccaatccctaaagccgtaatttaagc

SEQ ID NO: 73079 - DNA, 561 bp, Glycine max
  Clone ID: PAT_MRT3847_37006C.1
ggctcgagatcgttaaatacctaattgcaacaaattcctactcaaaccagaaagaagattggattatactagtattagaaatctgaaacaattcaaattaattggataatattacaatttacattttttatcattttagattcttgatttttttcaactttttggttgagtggtttctgtaggcggaatacattgctacacttaatcatgaagaaacaagactagcagttgtctgtgagagggcctttcttcagactttggatgggtcttgccgcactcctattgcagggtatgcttgcagaaacgaggatggcaattgtttgtttagaggattagttgcttaccctgatggaacccgggtgctagagacatccagggttggtccatatgcagttgaagatatgattgaaatgggtgttcagtagttagcaccagattaaagtgcgatcgggtgcacaccggtttcatggtcagctttcggctattgctttctgagttaattcattctttgaccttttgtaactttagagtagattaaatgttcaattgagtttgggaaag

SEQ ID NO: 73080 - DNA, 284 bp, Glycine max
  unsure (1)..(284): unsure at all n locations
  Clone ID: PAT_MRT3847_37007C.1
gtttagtcangaccgtggatttggttgtgncgcttggatatattannntggntggnananagctccccataacatgtntgatataatgtctgacncatagaaaatntgagtanngtgttgagaatgttcncattggaaaccgtgggccatatttcggggtcaantgtattatatgntatnngtatntctnanattccgtgacctttgnttgttgcaagcacnctctgggagggtnatagcatgaattaaataangacatgaatgtttcctttatcatcatgtgg

SEQ ID NO: 73081 - DNA, 294 bp, Glycine max
  Clone ID: PAT_MRT3847_37008C.1
aaaaaagggcccccattttttttttttttttttcagggccccaaaaaaaaaaggtttttgggttcaagggcaaaaaacaccccttttgttggccccccccttccaagggaaggggctagggggaccatccttggggaaactataaacatgggggcccctttgtttgaaaaatttggaataataagggggcccccagttcccggaattgcaacaatcctggtcggttttaaaaacagggcaaggggttgttgcaccccccttgggtttttagctgactagggccctgtcccttaa

SEQ ID NO: 73082 - DNA, 529 bp, Glycine max
  Clone ID: PAT_MRT3847_37009C.1
gccagactcctgagatagaacactcaccgattgttgcggcaatacagaagatattatatgctccagatgacaatggaatggctgtggtcgaagctcaagctatgatttctgttggtcgtaaggaaatagagggattaagccccattgctgaggtttcggaggagaagagcagttcagaaactcataagagaaagaatattgccaatattgattttgatgttgctggcctcgcaacgttgtctcccagacagaggctttctgatgtttcagatgttcattgtagcgagtcacctcttatgacttgttagggaggaggaaggatcaccttctgttgttaattcagttagcaacttgttaaaactgttttggtcacagtaattcctgttacaagtgtgaattgacagggttattcataatggttaggggttttagggagactattctgttatcaagtatcaagtatcgggtatcgggtatcagcccagaaaaaaaaaaaaaaaaaaaaacccaaagcggccgctctagagga

SEQ ID NO: 73083 - DNA, 1951 bp, Glycine max
  Clone ID: PAT_MRT3847_3700C.1
gctctccttgcattttcttatgtatgtcacaatctcaactaaatttttaaagcaacgaaaattgctctcactatttcaatctccgtgtttcagtccaaatgcaacaacaataactcaattaagaaattctcttccggagccatcgcacatcttatctctgcattcttgtcccttcttgtccattcatatatatcacaatttcaactgcaaattttgaacaaaacttaattaagaaatccttctccggagccatggcagatctcaagtccacattcttgaacgtctattctgttctcaaatctgaactcctccacgaccctgcttttgagttctccgatgatgctcgtaattgggtcgaccggatgctggactacaatgtgccgggaggaaagttgaaccggggactgtcagtaattgatagctacagattgttaaaagaaggacaggcattaaatgatgacgaaatttttcatgccagtgctcttggttggtgtattgaatggcttcaggcatattttcttgttcttgatgacattatggataactctcacacacgccgtggtcagccatgctggtttagagtgcccaaggttggaatgattgcagccaatgatggagttctactaagaaaccatattccacgtatccttaaaaagcacttcaggggaaagccatattacgttgatcttcttgatttgtttaatgaggttgagttccagactgcttcaggacagatgatagatctgatcaccacactggaaggagaaaaagacctgtctaaatacacattaacactgccatcgacgtattgttcagtacaagactgcatattattccttttaccttccggttgcatgtgcattgctcatggcgggtgaggatcttgacaaccatgttgatgtaaagaacattcttgttgagatgggaacatactttcaagtacaggatgattatttggattgttttggtgatcctcaaacaattggaaagataggtacagatattgaagatttcaagtgctcttggttagttgtgaaagccttggaacttagtaatgaacaacaaaagaaagttctacacgagaactatggtaaggcagatccagaaaatgttgctaaagttaaggccctgtataatgagcttaatcttcaggctgtatttgaggagtatgagaacgggagctatgcaaagcttgtttcctccattgaggctcatcctagcaaagcagttcaagctgtattgaagtcctttttggctaaaatttacaagcggcagaagtagagtcaacttaaggtgaggaccaaaattgttgaacatgcaatagaaactagagttgtgatttctatctagagcagtatcatgttccgtggcttggaatttttcaaaaattgattttcttcttgtcatttttttttaatttttgttttttagtgataagatcttgttgtattttatcttctaatctgtcttgggatacttgtttgactatttataatttcttctgaaacttttggttcattattattagagttctgttatttatataatatattttcagtgattttctggaaatatcaatatctctttactccgccgtggtcagccatgctggtttagagtgcccaaggtcggaatgattccagccaatgatggagttctactaagaaaccatattccacgtatccttaaaaagcacttcaggggaaagccatattacgttgatcttcttgatttgtttaatgaggttgagttccagactgcttcaggacagatgatagatctgatcaccacactggaaggagaaaaagacctgtctaaatacacattaacactgtgagtactgaaaaaaaaaaaaaagagaacaatcaggtagaaatgattactgatgaaccacttttttgataaacatgaaatgctgggtcatatgtgagtgtgactatagtaactatgc

SEQ ID NO: 73084 - DNA, 461 bp, Glycine max
  Clone ID: PAT_MRT3847_37010C.1
ggctgtggctgaagctcaagctatgatttctgttggtcgtaaggaaatagagggattgagccccattgctgaggtttcggaggagaagagcagttcagaaactcacaagagaaagaatattgccaatattgattttgatgttgctgggcttgcaacgttgtctcccagacagaggctttctgatgtttcagatgttcattgtagcgagtcacctcttatgacttgttagggatcacgttctgttgttaattcaattagcaacttgttaaaactgtttttggtcacagtaattcctgtttcatgtgtgaattgaccgcgatattcataatgattaggggtttttagggagactattctgttataaagtatcagtatcagcccagaaaaatgtaaccagatatgttttgcctttataaaaaaaaaaaaaaaaaaaatgatttgcggccgctctacaggatcca

SEQ ID NO: 73085 - DNA, 574 bp, Glycine max
  Clone ID: PAT_MRT3847_37011C.1
ctctgatgtcacaaatccttggagcttaattactcctttatctcaagccaacaaaccaaatggcctcccgggccatttactactcccttgggtgcctggcactcacataatgaagagctaagccatttttcgagccgaacaagctctccaaactgtcccgcctagaatacaaaccgaactgactacagcttgattctactaacttgaaggcgttaactcaatgcgatccatgcctgattgtgcttgcctattaacacggcgcattagcatacgcaaaccactacctatctacttttgagacgcgacgttcttgaatctatcctatgggatattacagatttgtttatagctaggatatataatgtaaaagccaaaaatctgtgtgcgctagactttggcccaagctcatcaatgaaactggggcgtattaaccctgccttgaggaggtggtgactaatgatctgcttataaccctcatgtttacgtgcccattgagtggcttgatcgggaccataaccatgtcatgccagatctcctaactaacatcgcagcgctccttgagaggaatgcctac

SEQ ID NO: 73086 - DNA, 264 bp, Glycine max
  Clone ID: PAT_MRT3847_37012C.1
ttggggcagcttggtagttgcattgaaatggaggtggtacgtatgttggagttagtcgctagagttttgcgcatcacaccaatgtcacggcccataccagcagatgttccggcatcagaatgaaaactcggttaggttggcaatacaccaatgatgtggcatgtgacagttctcggcatggcatggaagcaaacgacgtattccaatgtcacgctgttcctacaccttactgccattagatacctcatcacattctatgacatc

SEQ ID NO: 73087 - DNA, 527 bp, Glycine max
  Clone ID: PAT_MRT3847_37013C.1
ggctcgaggctaatgtggcttgtaaaagtgtgagaatgagaggtaaggataggccttcaatggacaaagtgacaacagttttggagagagcacttgcacagttaatggggagcccttgtattgagcagccaattttgcccactgaggtggttttgggaagtaacagattgcacaagaaatcatcttcaaacaggtcagcctcagaaagcactgatgtggaggatcagaggtttgagtttagagcaccatcatggatcactttccccagtgtcacttcttctcaaagaagatcgggctcggaggccgaagtcgaggggaaaaatgcagaaggaaggaatttgagcaatgttgacgacgtgtggctgtttgcagaagtcttgatgaagagattggtcttgcctctcctcgagagagattgttcttggcacacaacttttaaccgtgggaaatttgaaggaagcagatggtattagtaaattctggtctgctttgcttaactgatgagtttcatcatgcatggatgcaac

SEQ ID NO: 73088 - DNA, 780 bp, Glycine max
  Clone ID: PAT_MRT3847_37014C.1
ttgctgcctgcgattacctaattgtgctctgctccatttcctttctgctatttaggtattcctattggagttaaccccaaaagaaaggtggtgtgggatcctataattaggaaatttgaggctaggctgaacaggtggaatcagagaagcatctccatggctggcagactcactcttattaatgttgtcctaacagcattacctctgttctacttgtctttttttcagggcccctaaagcagtgatcaataggttatctgtcattcaaagactttttctttggcgtggtaaccgagaagggaagaagattgccttggtatcttggagacaatgttgtgcttctagagatgtgggaggtctggggatctaagatcttaacatcctaaataatgctctcctaatcaagtggaaatgactgatgtttcatcaaccacaccagctttggaataggattttgatctctaaatataaaggctggagaggattggatcaggggcctcaaaaatattatttttctccctggtgggctgacctaagggctattaatcaacaccagaatatgattgctacctctaatcaattctgctggaaggtgggtaggggtgaccaaattctgttttgggaagatgctttggctgatgatgggattcccctcaaagaccaatttccagaattataccgaatttcctcccaaaaaaacttcattgtggctgatatgggatccttctccgaaagtgggtgggaatggaatctcctttggagaagacctgtttgataatg

SEQ ID NO: 73089 - DNA, 368 bp, Glycine max
  Clone ID: PAT_MRT3847_37015C.1
tacggctgcgagaagacgacagaagagaccgatgatgaaaacacataaagaaaagatgaaagcaattcatagtcatagtcatagtcacaggaataggcatgcaaattgataccacatcacaaacgatattgcacggatcaaaattgattgaataaacaacaaactgaattttttttttaaaaaaaagagtgagatagagaaacagagttggtagcaaaaccagcgtacaagcatcgagggaaaggagtaggaatgcaccgatcattgagtaataccacaataaaacggaacaacatcaagagacaatcccgaatcataccatacaaagtgatgatcttccacaatgatcaacaaaatatgacattggc

SEQ ID NO: 73090 - DNA, 1756 bp, Glycine max
  Clone ID: PAT_MRT3847_37016C.1
ccacgcgtccgagaagagaacgggttaacagaagttccaagcaacatcaagttggagcatatggaggtgaaagacagaatcctagggactatggggcttttgtccaaccacctagtcaaactgagaaagtaccgaaaggtgctgtggtgaggctgaaaggggatcatcaagaagaggcaaggagattgaggactattccaaagccgcaaggcgagcaagagaaggatgaacaaagaatggaaacaatcccaaagctgttagagcatgagatagatatgagttcactagatgtattttcaatgccttctccaccgccacctcctccaccacttcctgctgagagggttattgttgaatcagcctcattccacaaagaggctaacatcaatcctcccaaaaaaagtcctgttcctcccacttttgtgaaaactttcaccattgcatcccttcaacagtatacaaatagcttttctcaagacaatcttataggtttaggcatgctggggagtgtgtatagggcagagcttccagatggaaagatacttgctgtgaagaaactagacaagagagtttctgatcaccaaacagatgatgagtttcttgaattgataaacagtattgacagaatccggcatccaaatattgttgagcttattgggtactgtgcagagcatggccaaaggcttcttatttatgagtattgcagtaatgggtcgttgcaggatgcactccattcagatgatgaattcaaaacaagactgtcatggaatgctcgcattcggatagcactcgggtccgctagggcattagagttcttgcatgagaagtatacaacatatgtttctgatcacaaatcagaggatgagtttattttaattgataaacatgtatttgagagaatatctgtttgtagttattgtcgaccttaatggatactttgtggagcatggctatccgctcaagatctaatgacaaatggactaatgggtcgcggcattaagccatccatttacatatttaagactgataatgacagttttggagtagttatgttagaacttttgacaggccgtcagtcctatgacaggacacgccctcgaggggagcagtttctggtgaggtgggctattcctcagcttcatgacattgatgcattatcaaagatggttgatccttctctaaaaggaaattaccctgccaaatcattgtcaaattttgcagacattatttctagatgtgttcagtcagagccagaatttaggccagcaatgtcagaagtggtcttgtacttaataaatatgataagaaaggaaaatcagaaaagtcaatcaaatgaataaacaatggaaatggtaatgatatttgaacatgaatgcatgtgcaaagaattacatgctgattgctgaatctctactagttgagatatgcatgattgcatgtcacccaaggaggggcccaattagatgcccccatattcgaagtactgatccatccaatattcacatgccaggaagtttgaccaatcagcttcagagaattgtagctaccgacactcctcgcactcgagtagtttatatttttttatattatatatacatatatgatcatttaatggttcattgaaccatgccatgttgcagtgccctggaaattatttaaacccatttgtttgatgattacttccttattgttgatttagaaatataatttcattgtgcatcctagtgattttttatatcaatacttgatgatgaaa

SEQ ID NO: 73091 - DNA, 397 bp, Glycine max
  Clone ID: PAT_MRT3847_37017C.1
agcagagggatgatggttcagtgcaacaacactaataacaacgtgtgcagctgcaagcgctctccctcggccaccttagaccttctaatcctcctcctggtcctcttctccggcgccttcctactctactcctacctctgctacatcttcaactccctctccctcctcctcccctgcctccccctctcctacctcctccccttcctcctattcttctccctctccctcgccgccttcttctgcggctcccgatcccgccgctgccagcgccagggatgcacgggcctcaagaaggccatggagttcgatttgcagattcaacgcttcggcttcttctacgacgaaatcgattaacttccctggaaaggccgcactgaggccaaccccgattacgact

SEQ ID NO: 73092 - DNA, 403 bp, Glycine max
  Clone ID: PAT_MRT3847_37018C.1
aaaacattaaaatttttagtttttttcaggaaaaacaccatatagctccttgccatttttgatcaaattgtttcaaggacaaaaaaacatatttttggaggcacagttgtacccaacagtttttgggccttcacccccaaatcccttcttggcctcagtactattttaaggaagaggggaagggccacacttgtaaccaacagggcaattaacaagggtgcaccgttttgggatggttatggcaaccttaggatcggctccaaacatttttggtgggttggagagcataacagcccacaaacaactggggtttttgccaagtttttcaatctgagcccaacaatttttaaaaactttaacattttcattttttgggggaaaaacacaaggaaaaagctttatt

SEQ ID NO: 73093 - DNA, 1152 bp, Glycine max
  Clone ID: PAT_MRT3847_37019C.1
ctattttccctttctctgcatccctgttggcggagctctaagccatctcttgtctctctcgagaggggaaagagagagagagagagagagtgtttcggtgtcacaacgcaaacccagaaagtagcaaatgccaaatggtagtgcggtattagcattgtagcgtagtgttagagagagaaagagaagaaagaaaaaaggcactaccgtcaccacaaccaactaggcctcggtcggaaagttgctacaaaaaaggtttcgccttctgggtcactctttacttttctgggatctccatttctgaactaaagtctgaatttttgaaggaatttgatcgtggggtttctggttgcttattctgggggtgtcaccaagttcccttaatcaactgaatatcgagccttatctgggtatttggcctctgattcctgttgggtatttccttttttttttttaatctgtgtggaatctgagtgattttgatcttggagggtaccctgaataggtgttgtggtcactttgcggttgatattgggcatactcattgtctcttaaggttagttttgatatctataagcattatgaagtttctcagaatgaagtttgtgcagtatgagtgagatgcctatcattatgagccaaatgccgccactgcaagttaccattaacgaggatcttgcaagtagtattctgcctaatagaacatagcgggcaaagtgctgactccatcaatatttccaacacaaatctaagtgcatcagtgtagagaggttcgcgttcttagctgcaactgttttggtgctagctacatgacattgaggagctagggagtatctcaggactttccagagtttctaatccatctttgatcttattgctccctgctgaaggaaaccttggaactcctgttgtataaacaaaaagaaaaaagaaaagggagaaaataggaaagcgattaatataacaatggtttgagctaaatgcaccttattgatttcagagtgcaggtgtttttctcatgccataggaactattgtagatctatttatgctagtttgtcatcaacttcaaattttaagtaatgctcatatttaaccgttgatagatgttgtgtgatgtgtgaaagtaaatcattatttacataatttcttgggt

SEQ ID NO: 73094 - DNA, 758 bp, Glycine max
  Clone ID: PAT_MRT3847_3701C.1
cggtccggattcccgggtcgacccacgcgtccgcccttgttttcattctcatttgcagttttcctttcttgttcccccttcccaccttaattagcctcgtcatattcaatctctctctctctctctctctctctctcttgaagatctgagaaagttgcatttgggcttgaaaaaatagatgtattttatttctgttgaggagatgaaggttgacgcggggttagggcgcgtggtgtgggacgatgaggacaaggccatgcttggggctgttctgggtggtcgagctttggagttcctaatgacgaactccgtgccgaatgagagtgttttaatggcggttgggagcgacgagggacttcagaagaagctgtcggatctggtggagcgtccccacgtgtccaatttcagttggaactacgccattttctggcagctctcgcagtccaaatccggtgactgggttctgggttggggagacgggtgctgcagggaacccaacgaggaagaagaagagggtgctgtgactgtgagaagacgaacactgcgcgtggacgaggaggagatgcatcataggatgcggaagctggtgctgcagaagctgcacaccacgttcgggggcgaggatgatgacaattacgcttttggcctcgaccacgtcaccgacaccgagatgttctttctggcttccatgtacttctcattccctcgcggccatggtgccccaggtaagtgcttcgccttcgggaaccatttctggc

SEQ ID NO: 73095 - DNA, 253 bp, Glycine max
  unsure (1)..(253): unsure at all n locations
  Clone ID: PAT_MRT3847_37020C.1
gcagatatatgtgtagcactggatatctgtcatttgatgggcattttgcttgaaccatccgttgcncttgaaggcattcaaatggttttgagctcgccgaactttagtgctttatcttatgaagcaggcagcttgcatggatgcaacgctttgtatnccaggtagatctactacnacagggagagtcaggtggcctttcatgcagagagcatcagaaggtattgactcgtttgtttcgcaagtacatagctga

SEQ ID NO: 73096 - DNA, 1727 bp, Glycine max
  Clone ID: PAT_MRT3847_37021C.1
catcgcgcccggctagcctctgagtgtgggccggtagggggtgtcctaatgggtttcaccttctgggtcactccctacccagataggatctccattttcgtagcagaaggctgatcatcttgaggattttgatcgtgggattcctggttgcttattctggggtgtcaccaagttcccttaatcaactgaatatcgaaccttatctgggtatttggcctttgattcctgttgggtatttccttttttttttttttacttttaatttgtgtggaatctgaataattttgatcttggagggtaccctgaatcggtgaattggcgttgttgttttggtttaaagatggttgctgatgctagttgtggcttaaggtgatttagggaagtttttagataacggtataataaggatggcagcacagtcaaacgctggatttcacaatgaagatatagattctattttgaacaggcatgcaatatcatttcatcctggtgttgttactattaacgggttgtctgagatggttccaatgggaaattattttgggcatcgtagttcgtctgtgtcgatgatatattctgggaattcaagcatcattaacagtattatcctattttagtttgtgcaattcgagctagtaatctatccagttcctcgcttcttctcgattcggtcccggcggctagaagacgacagagggttggctgttgagtggtctgttgatgaacagtacagattggaagaaggccttgccaaatatgctgatgagccaagtatcatgaggtatatcaaaattgctgccctgttgccagataaaactgttcgtgatgttgctttgaggtgtagatggttgacaagaaagcgaagaaaatcagaagaacacaatctggggaaaaaggtcaataatagaaaggataagccagtggaattagcttcaaagacgaatttacattcagctctgccctcaagcatggctacatatcctcgcatgtcacaccatatggaccaaagtcaacagatacaatatgatggtatttgtagccctttgaagcaactcatggagcagaatgctcaagcgttcaatcaaatcactgccaatttgtctacttacaagttgcaggataatatcgacctcttctgccacacaaggcacaatattaataccattcttaataatatgagtgagatgcctggcattatgagccaaatgccgccactgcaagttaccattaacgaggatcttgcaagtagtattctgcctaatagaacatagcgggcaaagtgctgactccatcaatatttccaacacaaatctaagtgcatcagtgtagagaggttcgcgttcttagctgcaactgttttggtgctagctacatgacattgaggagctagggagtatctcaggactttccagagtttctaatccatctttgatcttattgctccctgctgaaggaaaccttggaactcctgttgtataaacaaaaagaaaaaagaaaagggagaaaataggaaagcgattaatataacaatggtttgagctaaatgcaccttattgatttcagagtgcaggtgtttttctcatgccataggaactattgtagatctatttatgctagtttgtcatcaacttcaaattttaagtaatgctcatatttaaccgttgaaaaggaactattgtagatctatttatgctagtttgtcatcgacttcaaatttaaaaaaaaaa

SEQ ID NO: 73097 - DNA, 480 bp, Glycine max
  Clone ID: PAT_MRT3847_37022C.1
ctcgagccgctcgagccgtctcgagaggggaaagagagagagagagagagagagtgtttcggtgtcacaacgcagacccagaaagtagcaaatgccaaatggtagtgcggtattagcattgtagcgtagtgttagagagagaaagagaagaaagaaaaaaggcactaccgtcaccacaaccaactaggcctcggtcggaaagttgctacaaaaaagctctctataattgaccctcgtgaagatgaagcttcttttcttctccagacactgactttggttttttctgggctttaacttcaggtttcgccttctgggtcactctttacttttctgggatctccatttctgaactaaagtctgaatttttgaaggaatttgatcgtggggtttctggttgcttattctgggggtgtcaccaagttcccttaatcaactgaatatcgagccttatctgggtatttggcctctgattcctggtgg

SEQ ID NO: 73098 - DNA, 708 bp, Glycine max
  Clone ID: PAT_MRT3847_37023C.1
tgaatttgattggtgattaaggggaaaggtagcagttatggttgatgacatgattgatactgctgggactattgccaaaggtgcagctctgttgcatcaagaaggggcaagagaagtctatgcatgcactacacatgctgttttcagtcctcctgctattgagaggttgtcaagtggtttgttccaagaagttatcataactaatacaattccagtggcagaacagaactatttccctcaattaactgtcttgtcggtggcaaaccttctgggcgagactgtttggcgtgttcatgatgattgctcaggtggaattgaaccttattcaagtttgggcattgattgaacaatttgtatcattggtatgctcgttccagcttatgacactgtggtaacaagcggcagaattgtaaagtccattcatagtgaaagcttttgtttaagtacgccttatagagggctgtctcaggagatttttgtacgtacaagatacattttatagggtattgcaaatccacactggaagtagcgtggcgtctcactttttcctttactacagatttaagtcaaaatggtgaattttaccacatgaatggtattgaattgtgtggctatgttctcagacatttaattccttgtccttgtgtattcatagcaaacagtttattcaaaattaaacctgctcaagcatatatatgttttgcatac

SEQ ID NO: 73099 - DNA, 373 bp, Glycine max
  Clone ID: PAT_MRT3847_37024C.1
gttcctttcatttcccatttcatctaaatcccatcatttgtctctggctataaactgataaactttctctacatacactacccacacggcctcttccacatatcccccaaaccttgcgaagcgatcaattaacactacgccatggaatctgcccgaaacacatccacgactccggactccaacacgcaacccattatacgttcatacaatcaaccatgtgatgaacagggcccgccacgcgcccgtcatctgcagcgggacccgggaccaatgtattaaggagcatccatctatatgggactcaaatatgatgcaagctgctgccattgttggcaccatagaaaggtgcgacagacgcgtaacaacagactca

SEQ ID NO: 73100 - DNA, 2461 bp, Glycine max
  Clone ID: PAT_MRT3847_37025C.1
ggcactttctagaaaccaaagcaaagttccctgtttcactttctgttctgttttggatatttctcaacataaccaaaccaaagcgttttactattttgttttctagtttcctccatctccctcccatactcaccttctctctggtcagttttccttcttttccacctttttcagtttttattttcaaacaaaacaaacacgccaacacgggtttctgttacaagagttttttaaaaaaagaaaaaaaaatcatagataaatttattgttcccttcgtttctttatatgcttgtctttcgtttcttttagtttttagcgtgtctttgtttctggacttcgttttgttggtttaaggttaaagcgtcagcgtgttgtctttccttaaatgtcgaacaaagcacggttggcttgagttttcttcaagacttactttatcaaagaaaggaagagttagatagattaagagagagaaagagttgtcattgttcgtttttgtttatgtgaactatgtgttgagttggaaacattattattggctaaaacagagaaattgttgtcgaggagataaaaataagacagctagactgagagttttgcgggagaaaaattgcaaaaaataataaaaaaattcagtttttaagttctaaaataaaaaaactttgactcttcttcgctggtgggataatttggtttcagttctctttcttctgcgttattaacctcaataatttctcaacttctgtgtcccttgcttattttccccctcatattaattagttctcattgtaaagaggaactgaaactccttcaatctctttgttttacttttttctcggacaccatgattttcgatcaaaatttctagaaaccaaagcaaagttccctgtttcactttctgttctgttttggatatttctcaacataaccaaaccaaagcgttttactattttgttttctagtttcctccatctccctcccatactcaccttctcgtttttcagggtagggaagctaaaaactccatcttccctccctcttctccccccccccccccccctcctctctctctctaaaaaacatgatttttaataaagggtcaatgcattctaaccttgactgtttcgtacggtgtaccacacctgtggttcaatcccagtttcttccaaagtcggagattacaagccttaaccgtttgtggcatccgtgggagagagaaagcgtggaatattttacgttgggggatctttggaattgctacgacgaatggagtgcttatggagcaggagttcccattaccttgacaagtggggagacacttgtgcagtactatgtgccttatctctccgcaattcagattttcactagcaatagtttcagggaagagactgaatcaggtgactgtgaaacaagggattcctatagtgattctttcagcgatgagagtgagtatgacaaggtatggaggtgggatggaacttcctcagaagatggaggctccgagcaagactgtctctggcatttcagtgatagattgggtcacctttattgccaatattttgaaagagcaactccgtatggaagagttcctcttatggacaagattactggattagcacaaagatacccggggttgatgtcattaagaagtgttgatctttctccagcaagttggatggccgttgcgtggtacccaatatatcatatccccatgggaagaacaattaaagacctttctacatgcttcctcacttatcacacgctttcatcttcatttcaaggcatggaccttgacgatgacatagaaggtggccaccaaaagaaaaaggaaggggaaggcatagcactgccagcatttggtttggcaacttacaagatgcaaggggggaacgtgtgggttgcaggaaatcgtggtcgggaccaagaaaggctattgtcactattgagtgtggcagattcatggttgaagcaactcagggtccaacatcatgactttaatcacttcatgggcattcggcatggctaaaaaaaaaaagggttaatccactactctacaaagaattcgcacttgcaaagctaaaaatcatccttttctcggatgtttgattttatgtgcactttcttggaccattaattgcaccatattttcttcttctttttctttttttcttttctcctgaggggaagtgtgagaaatgaggatatataagtatgtagtagtagttgttgttggcctttaacccttgagagcattttaggaccaaaaacccttgttaggttccaaccaagcaaaaagggtgtgtgtgtgtgtgtatgaattgactcctttcaacagcctctcatgaagaggtaattgtatgtagagagataggtgagggaggtcagagggaaagaagtgagagtatattgtgtattgatcacaatggttaatggatgtgacaaatgatgtagaatcaggttgcac

SEQ ID NO: 73101 - DNA, 251 bp, Glycine max
  unsure (1)..(251): unsure at all n locations
  Clone ID: PAT_MRT3847_37026C.1
atttctcttgctctaatctcacaagtcacttttataatgctcccattttcctcttcaatttacgctttcatctttcacttttattggactcatccatacatttcatctactctatctcaactatctcttntttcttattcttatcttattacaatttttattatttttttctcaacctcatatttttttatttttttttctatatatctcttcttacattatcaatttatttctttattcttctttttaaa

SEQ ID NO: 73102 - DNA, 565 bp, Glycine max
  Clone ID: PAT_MRT3847_37027C.1
gaataaactgtttgctatgaatacacaaggacaaggaattaaatgtctgagaacatagccacacaattcaataccattcatgtggtaaaattcaccattttgacttaaatctgtagtaaaggaaaaagtgagacgccacgctacttccagtgtggatttgcaataccctataaaatgtatcttgtacgtacaaaaatctcctgagacagccctctataaggcgtacttaaacaaaagctttcactatgaatggactttacaattctgccgcttgttaccacagtgtcataagtgagcaatcatcatgaacacgccaaacagtctcgcccagaaggtttgccaccgacaagacagttaattgagggaaatagttctgttctgccactggaattgtattagttatgataacttcttggaacaaaccacttgacaacctctcaatagcaggaggactgaaaacagcatgtgtagtgcatgcatagacttctcttgccccttcttgatgcaacagagctgcacctttggcaatagtcccagcagtatcaatcatgtcatcaaccataac

SEQ ID NO: 73103 - DNA, 1793 bp, Glycine max
  Clone ID: PAT_MRT3847_37028C.1
tacggctgcgagaagacgacagaagggggagcagcgagtccaaaggtttcgaaacgcaatgtccactctgcttcactccgctcccacttcttctccttccttctctcggatcatcactcctcgtttcgctttcgctccaatcactcgcatctctctccgaaacggcgtccgtagcaaggcgatcgaagcagtgaagttggagaatggaaggccgagcgcgagcgagttcgtagtcagcggaagcggaaacgcaattccgagttacgtcgtggcgccaaacgcgcgtgttcaggatttggttaaccgaaacgacactcgcctccggatattctccggcactgccaatccggctcttgctcaggaaattgcatgctacctgggcctggagctaggaaaaattaagataaagcgttttgctgatggtgagatatatgtccagctgcaagagagtgtcagggggtgtgatgtgtttcttgtgcagcccacatgtcctcctgcaaatgagaatcttatggagcttctcataatgattgatgcctgcaggagggcttcagccaaaaatattactgctgtcattccatattttggatatgccagagctgatagaaagacccaaggacgtgaatccattgctgccaagcttgtagcaaatttaattacagaagcaggtgcaaatcgtgtacttgcttgtgacctccattctgggcagtccatgggctattttgatattccagttgatcatgtgtatggccagcctgttatacttgattaccttgccagcaagactatttgttcagatgatttggtagttgtctcgccagatgttggtggtgttgccagagcacgtgcttttgccaaaaaattatctgatgctcctttagctattgttgataaaaggcgccatgggcataatgttgctgaggtgatgaatttgattggtgatgtaaggggaaaggtagcagttatggttgatgacatgattgatactgctgggactattgccaaaggtgcagctctgttgcatcaagaaggggcaagagaagtctatgcatgcactacacatgctgttttcagtcctcctgctattgagaggttgtcaagtggtttgttccaagaagttatcataactaatacaattccagtggcagaacagaactatttccctcaattaactgtcttgtcggtggcaaaccttctgggcgagactgtttggcgtgttcatgatgattgctcagtgagtagcatatttctgtagaataagtttagttagttatttttcattcatgatatagagaaaacgaaaccacactcaatactcttgcacatgcatgcttgcgtacatatatttatctatttttttttctaacaaaataataaaaaaattcgttatgttgaattgaaccttattcaagtttgggcattgattgaacaatttgtatcattggtatgctcgttccagcttatgacactgtggtaacaagcggcagaattgtaaagtccatttatagtgaaagcttttgtttaagtacgccttatagagggctgtctcaggagatttttgtacgtacaagatacattttatagggtattgcaaatccacactggaagtagcgtggcgtctcactttttcctttactacagatttaagtcaaaatggtgaattttaccacatgaatggtattgaattgtgtggctatgttctcagacatttaattccttgtccttgtgtattcatagcaaacagtttattcaaaattaaacctgctcaagcatatatatgttttgcataaaaa

SEQ ID NO: 73104 - DNA, 263 bp, Glycine max
  Clone ID: PAT_MRT3847_37029C.1
gtctgtgagatcacttaacactacaggttacccaggatgtaacagatactgatccacaatgtacctgaagtgtcttgggcacccataagcaggtgacttctggcttagggcaaggttcatgaggatgcgcactcacagtaactctcgggtctccagagaacatgctatggttgtggcagcctatggattcgcggctattgtaggtgaggctctgtatgtgttatccaacgtgcgacagcaggagtcagagctctgcctcatgg

SEQ ID NO: 73105 - DNA, 393 bp, Glycine max
  Clone ID: PAT_MRT3847_3702C.1
ggctcgagctcctcaactagatgtaatatttctacttatatatcccttttttataatatatattgatagcatactaatttttattttaatattaaaaaaaagcaaacaaaaaaaaaaaaaccaagcctaacggtcgcccacctaccgagcatgcacggaataaaagtcctgacattcaaggaccaccgtaccaggttgacagatttagagatgaaataacgacagacgaggctggggaagctccctcagaccgctgggtttggcaatccactgaacagtgcagcacggcaactggacgctcaatcgctagtagaatgccaggatggccgaagggatgatgacctgacatgatttgataatcagagactggcggatccacaagctggaagacgg

SEQ ID NO: 73106 - DNA, 730 bp, Glycine max
  Clone ID: PAT_MRT3847_37030C.1
ctgcggctcgagccgattcggctcgaggggccattgtcacatagttagcacaagccctcccgaggtatacaaggcttaccttaagcagtttcaacaagattttaaattgtttctaaaatcacgttcggaggaacttgtgcctggaggagcaatggtcttattgtttttcggtagagatgaaactcctagaagaacctcttttgaagtaactagcctaatactcaacgacatgctcttggagggtttgattgaagaagaaaaaatggactcctttaacataccagcttataaaccaacggttgaagaaattaggcatgtgattgaggaagaagggtcattctttgttcaacggttggagattttaatctcgccttggtacgaaggcataaatattgaaggtggtgatggtttttttgttaatggaaatgtaagagccgaatacattaccaagaacataagagcagtaatggagcctctcttgtctacaaagtttggtggtgaagttataaatgaactattcatcaggtttaaaaagaaaattgagcaaataatggaggtggagaaattggagggtgctactttggtgatatccatgacaaaaaatcattgaagatcatatctgttgctcaaaagatcttaaaaacttgtttttcttcgttttgtgaacttgttttgatttgttaaaataaagttatggagcagtgcatgatataataaaagatgattttcc

SEQ ID NO: 73107 - DNA, 241 bp, Glycine max
  unsure (1)..(241): unsure at all n locations
  Clone ID: PAT_MRT3847_37031C.1
ccngagnanagcgnatcgccnnnacancgatgnaacacaagatcannccggaatctcagctacagcntacngncagancaggnatcacaccaaactaactagngtattgangcacattgggctctctatagtacctanatccatgaagaaatggatantcatgaaatganatagacagtatcctgtatgngtatnaggccatgncaggatagaagacnaanacangtactnagccgncccc

SEQ ID NO: 73108 - DNA, 902 bp, Glycine max
  Clone ID: PAT_MRT3847_37032C.1
cgtccgccaacccttccgttaaaatgttttggttaagtgcttgatttgaatttttcttcgttggtgtggcatgggcagtttcacgaggggctgagatcaattgaaggagtggttagttgtttgactgttgaagccaaattttgccacttgatgactgatgtagtggacaaaataaagatcgaagtaaaaggtgaaaataattaagaccctttcgactgcgagaagacgactgtataggacagtgagtatagtaaatattaaacaagttgattctgtctgagttaggacagatcaggcatctttggccctcaccgaaaaaactctgggcaattttttttcattctccgccattatgggaggatagaagtttgagtttcagagagcacagaaaggcccactataatgaattccgcaaagtcaaagagctgcaacaaaaggcttctctggaggatggaagtgatgaggataatcatgctgaggttgccaacggggagaagaaaaatgactcatcttctccaacgaatggtacgtgaaggagaccaacactgagaagaaaaaatgtctcttccaatcaatgcttcctacacgatcaacagataaaacccactccagtttcatcaacctttgtgtatggcggggatggaaacaacagaaggatttactgtatttattgtgtcttttgtgtgtaaaatatcttttctttttccacctggtatgtacatctgaacttgcatgattcgtgaagtctcttgtaatatgccaaattagattttttttggcaagcaacaaacattctggttataagagtgatgatttcgaagatataccactccaaacgtggcatttaagtaattaaggttgcatgattggatggatcaaatcaacaaaatattcatgctttt

SEQ ID NO: 73109 - DNA, 232 bp, Glycine max
  Clone ID: PAT_MRT3847_37033C.1
gagaattaagtattcactgtatattaaggggaagcttttgccaagttgtggtcttcaaatttatgtttactcttcctattggcagaataggtgctatttaagagtaaaccaaaggataagcagagggagtccctataaccaaagatggacagcatagccctggatagccagataaaccactctttgtattaagaaatgtttctttcctagtggttgaagggtgggtaactgg

SEQ ID NO: 73110 - DNA, 139 bp, Glycine max
  Clone ID: PAT_MRT3847_37034C.1
gtgtcttgaggcgttttttttttttttttttgcagaaggatcatgttatttaaatggaccctacagtaagatgtcggataggaaaagataaaccaaataactaccaatagatgcattcacaagacaccgtatataaaaa

SEQ ID NO: 73111 - DNA, 363 bp, Glycine max
  unsure (1)..(363): unsure at all n locations
  Clone ID: PAT_MRT3847_37035C.1
gaaagatgaaaaaagaattcttttgtggaaaaagaaaaaggaaagataaaaaagcatagtttaggagttatagtaaagggaaattaaagtcgctggaaatcgaattgaaaatgttgttcgtgtttgaaaggttatgacattccatgtgggtggaaagtccttccggtgattgcagccgtgcatctggatccttcactttttgacctttcttaacacttcaatccatggagatggcaggtcaattctacttataactatagacagcacgcgttgcataattattattgtgcatccttttcttttctcctcttcttcttcttcttttcttaaagccaatgcttagtatnaaatactatatatcta

SEQ ID NO: 73112 - DNA, 299 bp, Glycine max
  Clone ID: PAT_MRT3847_37036C.1
agggagagaaattcctgcaggagaaaaataactggttaccaacgctctcgggtaccgcgtgatataataacccggagtgctgactttgtggcacacttgtctctttgaagaaaaagagatacactctacctctaccaaaaggaacagcggcaaacctagcggtggcgatatgactcattgtaaacaatcaccccatttgaagacaaaacctagccacacccccgtaaaggggttgctctggtgagaactggtttcagacggaggcgaaccataggtatttgcctcgaggggtctaatct

SEQ ID NO: 73113 - DNA, 268 bp, Glycine max
  Clone ID: PAT_MRT3847_37037C.1
tactactcatggtcctcacgtttgtgcgcttgaaaaaatgactctggcacgtatgaccataatagttggtgctgtgctatatgttactctgatcacaggtaaaatgcctaatatttactacgatctgatgagaatggggcgagatactagagctcaacaagtatgagtgactagtgaagtacagtaatatttatgatataatctaatgagagctgtagctatcagtgctactgaaggtctaatgagaggaatgaaagtgactgtcaca

SEQ ID NO: 73114 - DNA, 230 bp, Glycine max
  Clone ID: PAT_MRT3847_37038C.1
aaaacacataaactcactttgcacaaagattgcattgggaggagaaacagcattgtttggggctggttatcgatacaggtgtgaaccttcatcacacccttatctagatgaacaagagtcatgatatcattcgaacatccgatatgcatatactgaaaaacttacacttttattttcttggatatggcgagtattgctatagaatccgcggctggggtctcatatatata

SEQ ID NO: 73115 - DNA, 269 bp, Glycine max
  Clone ID: PAT_MRT3847_37039C.1
ctttgaatctagttttcagtgatcagaagcagcagttatttgagtgtatgaatggaatgatgatcactgtgctataatgtactgaaaccaccatattacagaaatatttactacatattttccatctgtagtttctcagaagggctatggattagtttgaactgtcaaatccttgcatacttctgtgacacccctgcccattgtctgtctttaattaaccaaggtgttaggcgtgactgtcacaactgtcatgttgtccagtaactaga

SEQ ID NO: 73116 - DNA, 184 bp, Glycine max
  Clone ID: PAT_MRT3847_3703C.1
tctgcctctccctcccttcctcaggcatcagagcggagacttcagggagaccagagcccagcttgccaggcactgagctagaagccctgccatggcacccctgagaccccttctcatactggccctgctggcatgggttgctctggctgaccaagagtcatgcaaggtgcgctgcactgagggc

SEQ ID NO: 73117 - DNA, 343 bp, Glycine max
  Clone ID: PAT_MRT3847_37040C.1
gattgtgtgaccattgcagaaaaattcttcgtatgttggcacccttttgggggggggagcacatatatgaggtgagaatcactcctcagccattgctatttaagaggactgacaaacacagggatttcatgaagacttcgcaagggataagatgaaccattggtacaatattttgtatgttattgtgaatagctatatatgcctcattcggtgccctttacatcgacaaaatggcttatgctatgagtagactagatatggaatccgggctctctgaagatggagacgccattcaagaagattctagtagccgagaaactaaaaggccattcaaaaatttaga

SEQ ID NO: 73118 - DNA, 369 bp, Glycine max
  Clone ID: PAT_MRT3847_37041C.1
tgtttaagcggacagaccataatcttctgtatcccttagtaagagggactgatacaaagttgttatttacattgtgcgactcctgtggatggaccaatctacaagataaatgacctatacctacagacaacatctgtcgctgaaaataaagctttcgttgccccatgaaggatcaactttggcctaagaacgcgatttatgcaaacttttaaggggcggctaaagacggatacttagttatcactatacgtaatacctactatgtatagtgaggacgtgatagtcattagcatcacctaactgagagttatagtctttaatatgcacctataacctgacactggaggtgaatccataatctgtgactta

SEQ ID NO: 73119 - DNA, 405 bp, Glycine max
  Clone ID: PAT_MRT3847_37042C.1
tacggctgcgaggaaaacaacagaagggggttggctgctgctctgctctctcctgtagggtgatcatatctccattcccattccctctctctcagtggccaaaaatcttaagctatggaaaagccttacccaaccgagagcgctgattaccagaaggccgttgagaaggcgaagaagaagctcataggcttcatcgctgataagacatgcgctcctctaatgctccattaggcatggcactctgctggaacttacgacacgagctccaacaccggtggtcccttcggaaccataaagcacccctccggactcggtcacggctctaacaacgggcttgacatcgatgttaggcttttggagccactcaaagctggctttcctattttgagcctccccgatttctac

SEQ ID NO: 73120 - DNA, 155 bp, Glycine max
  Clone ID: PAT_MRT3847_37043C.1
caaaatcttgaaccttaaacgagtgtaaagccacattagttcaattaattcacctatacttgtctttgttgtctcttttctgagtaaaaaaaacaagtataggtgaattaattgaactaatgtggctttacactcgtttaaggttcaagattttg

SEQ ID NO: 73121 - DNA, 588 bp, Glycine max
  Clone ID: PAT_MRT3847_37044C.1
ccacgcgtccgagccttttgttgttagcagaccccctcaagtctcaactcaaatcactaaccatgacataacgttcatccctcatcctcacagttgcattgcactggcactcaaggtaatgatgcatatggattcagatatttaagcagcacccttttcttttccatcacttgcctcgttctatgcattcccttacagtggggcttccctgctacaccacctccttctctctttgcattctgatatctatatttgctttttatgacgccattaagaaccacaccactttgcgttacagaggtatatatgtttttatgcttataaataatgtgacccttcccttgtagtagtggacctctaagccgcccccattgtcctattatccacacatgcatttaatttccagtttccttctgcaacactcttctttcccttcttcctttttttggttatgatgagtagaccctgaccccaattgttatcacttcagtgcgcgcaagtgcaaggttattattgagagaacaaggtaaaaaaaacagaggggtgtaattaaatattattaatcgttgcggatgggcgtgaaatgag

SEQ ID NO: 73122 - DNA, 439 bp, Glycine max
  unsure (1)..(439): unsure at all n locations
  Clone ID: PAT_MRT3847_37045C.1
cttggaacctttgggctgatttatgtgcttgcatggtcgtgagaagatgatagaagggagaccataggagtatttcatagggtatgtcgcgacggcccgattgctatagacgcgcttcggccgctgcatatggagtactggggggccagggtaccctaggagaccctactcccttaaggctaatcgagacggggcttcacggctactatagtctgattggagagggcggcatgttaacccggccatacttagagtacttacttgttgttcgccagcgtatgaccgctatatgaccagacatacgataggcggacgtagcccgtggactatccatcattcgtgggctagtcccgctcagcgtccgggcaggcactcgtggaccatacggagcggccnccttgtacactctatttacctacgacattgattcaggtaggcg

SEQ ID NO: 73123 - DNA, 826 bp, Glycine max
  Clone ID: PAT_MRT3847_37046C.1
tcttgcatgcctgcaggttctctttgttgctggaaatttaattttttcatctgggtatgctttttagcaatgttaggtgaagtgggtattgtccaaaaaaaataattgagaaagtgtttggttagctatatgaggtagaaataaacagtcggttggttgaagagatggaaaaataaacaatttatgcactgaaaatgtaagatgtcattcaatcacaatgtaataacccaatcgtgtagctcagttggcaatacatgctgagtttgtgggggatcgaacctccccgccgaatacactcttgtagagaggcgaggaactttaagtgtgacctagaccgaggattagtcccatagtcaacccaaaggattgaagcttgtggggatacctcggagtcccaccggggaaccaaaggccctaattacagtggttgaaccaaaaaaatcacaatgtaaaatgtcattaaatcacactgccatgattaactaccttagtgtgaaactgctttaattttaatacactgatagtgtaaataaaatgtactgattggttgaaagtgtgaaactgcttggttaaaagtttacattgaccaatggcgattaaactcaaaaaaataatttaattttaatacactgatagtgtaaataaaatgttttttacaccttcattaagtagttgatttctgagtttggtatagttgttaacggttaattactctgaaacctatatatgataatttcagattgattgatattgtaaaaaatatttacactgacaatttatgtaaactgaactaaagaaaataaaattttagtggaatgcatttata

SEQ ID NO: 73124 - DNA, 561 bp, Glycine max
  Clone ID: PAT_MRT3847_37047C.1
ttttttggaaagaaaaaaatagttgattttaatactaacttcaaggtatcgtccagtacatggaagtcaccaatagagattccaaaaaacatcctcagtaagatcctaaacaggaactagtgacaatgtagttactttcatgtttatacagattattgaacacaaatcaaatggttgagaagaaaagacagtagcaactgtcaactctcgagttaaaactttgataaccaaacagcaaatttaactttctatacaagctgccgtacaacatgcattcagacattaattatatctaacacccacgggatgggaccaaagaggaaaaaactctgctttcgtccttcgatgatacaatttactgttcatttccaaaacgaaaattagcgtctcaataagcgaactatccacttcctaatgctgcaactagtggagccgccagctatggtgtttcaacaagtgtgttacttcctaatgctacttcatttcctactgctgcaattttatcctcctatgccagaataagatacaatcttcagcagtgctatagtgtccctccttgca

SEQ ID NO: 73125 - DNA, 331 bp, Glycine max
  Clone ID: PAT_MRT3847_37048C.1
cccacgcgtccgaggaggagcgggacttcctgcggtgccagctggacaagttcatgtcctctgcccgcctggacgcagacgaccactgccgggggaagcccgggcctcggcgggccgagggggacggccgaggggggaccgtgggcgaggcctcagaccccgagtcagctgcctcctacctcagcggagcatctgaagaaggcagcaccgtggagaggaagaggcagaagcagaaaggaggcccaggccggcagcgcttcgggaagcccaaggcccgttagaggcagcggttgaaggacgcatatggggtcctctgccgatacaagaagat

SEQ ID NO: 73126 - DNA, 443 bp, Glycine max
  Clone ID: PAT_MRT3847_37049C.1
ctgacatggctttctgttctccaaaattcctcagcctcctcctcctactctctgccatacccatcggaatcatcgtcactctagagcgagccaaacccgccacccacgtctaccactaccacagtaacggctggttccgagaatgcgccaagtgggattctcataaccgccgcttcattgtttccttcttcgaaggtggtcttggtcaggttttgctgccggagaaggattatgagtcatcgccgccgttggaggaagtcacggtggtcaaagagacccacttggccggaaatgcctccttgggcatcgccattgacgcacctagaaatcgagtcctcgtcgttaacgctgacgtgatcggtaatcgatacggcgcgcttgcagcatatgatctctccacctggaatcgcctctttttacccaacttagcgctcccagtgatg

SEQ ID NO: 73127 - DNA, 462 bp, Glycine max
  Clone ID: PAT_MRT3847_3704C.1
tggaacctttgggctgatttatgtgcttgccgtgagaagattatagaagggggagcgaacagttccaacgttgttgttaagattattgttgattggtcgatcctgcataatcgttcgaagctccttgttacttaaactcttggtcctaaagttaataatgttgttctctcttttggtaaacgtggagctcttacttttcataagactagtattcttattaatcgtgtcattactaaagcccgaagagagagctacggatgtaggaaattggacatcatctatcaacacacgagcagtaccaccaacaccaagaacaaaactgagggcgacgagggtcttatccacacgtttttctttctccgcacggagacccgcaccgggaaaatcccaaaacgcgccgtgccgccaacctctcccacgaagcatttacagccacactcaatcccaaaaccggccttcttc

SEQ ID NO: 73128 - DNA, 183 bp, Glycine max
  Clone ID: PAT_MRT3847_37050C.1
agaatgttggctaatgagcaaatgagttgctatttgggtcagaaactacattacattcttctgttgcacatagaaatgtaatgtagtttttgacccaaatagcaagtcattagttcattagccaacattttgtgcaaaatatttttggttttggggattcctccttcaattcaaatgcacaca

SEQ ID NO: 73129 - DNA, 1276 bp, Glycine max
  Clone ID: PAT_MRT3847_37051C.1
accaaacgaaactctttctcactgacatggctttctgttctccaaaattcctcagcctcctcctcctactctctgccatacccatcggaatcatcgtcactctagagcgagccaaacccgcctgccatacccatcggaatcatcgtcactttggagcgagccaaacccgccacccacgtctaccactaccacagttccggctggttccgagaatgcgccaagtgggattctcatcaccgccgcttcattgtttccttcttcgaaggtggtcttggtcaggttaagctgccggagaaggattccgagtcgtcctcgtcatcgccgccgttggaggaagtcacggtggtcagagatgcacacttggccggaaatgcgtcattgggcatcgccattgacccacccagaaatcgagtcctcgttgttaacgctgacgtcatcggtaatcgatacggtgcgcttgcagcatacgatctctccacctggaatcgcctctttttaacccaacttagctctccaagtgatgagaaatctttcgcggatgatgttgcagtggacgcagaaggcaatgcctatgtcacagatataaaaggcaacaaaatctggaaagttggggtggaagggaagcttatatcaatcattagaaacccgttgtttagtgcaaaagagtggtataagaacttggttgggctaaatgggatagtttaccacccagatgggttcttgattgtgattcacactttcagcggcaacttgttcaagattgatttaacaaaaggagaggaagtgaagataataaagttaaagggagggactctttcttttggagatggtttagaactgttgtctcctactaagcttgtagttgctgggaatccttctgggagattagtggagagctctgatgggtggaacacagcttctgttgtgggaacattctcagggccaaagcatcgcttggcctcagcagcaactgtgaaggaagggaaggtgtatttgaaccatatggttggaattggataccccaaaaagaagcatgcaattgttgaagcagttttttaactcatactttttctagaaatgtaaacagtagggaattgggcatgtggggatcatacatttacaggacgttttgttgaaatttggtgtaccttcgcttatttatgtttggttttgttgcattacttgtcctcgatgaatctcaaccaaaacataagaggctcgagtaagtaaattaccctgttgtcttagctctaaaaaaaaaaaaaaagggcggccg

SEQ ID NO: 73130 - DNA, 1273 bp, Glycine max
  Clone ID: PAT_MRT3847_37052C.1
cctgacgctactttgcttgcacatgaaaagaccatgcatcgtataagcagagatgtttggtcacttggctataccccagttacgggagatgaagacattgacattggtggtcagagattgagagttatttttgcaccgggacatacagatggtcatatggcactgcttcatgcaaatactcattccttgatagtaggtgatcactgtgtgggtcagggaagtgccaccttggacataaaagctggtggaaatatgtctgaatacttccaaaccacgtacaaatttttggagctttcaccacatgctttaataccaatgcatgggagagttaatgtctggccaaagcagatgctgtgtggatacctaaagaatcgtaggagtagagaagctaatattgtgaaggcaattgaaggtggagcaaaatctttgtttgacattatagtatatgtatattctgatgttgaccgccgtgcctggattgctgcatcatcaaatgtgaggctccatgtggatcatctagcccaacaacacaagttaccaaaggatttctctctagaaacttacaaatccagtttggatacatttgctgagagtgtgggtaaactataagcatgaagagctgcactggctggcttactgactgcctatcagttcattgcatctttttgagaaaatgtgtagcctatcctccaagttcattgttagcattgaaatggccctagataacgggaacactatatataacccttgtataataatctgaggagaattacttgtgagattggctgtttttctttcgtggaactgacagaacataccgcatctacctttaggatttttcaatccagaagttcaaaaatacctgtgggctgcattttctatctcgatggatatgggcttacggtagtggcagtttatcacatcaaatagggaaatctccatttcttgttgccggtgttcttgctggcattgctggcattgctgtattgtactgtcaacgaaagttcactaaatagacaggtgtacctctgtggaggagttatattctatttggtgatcgccatgtggaatttcttaatgacaacttgtatgcgaactagagtctaaattgtgagctttgatgtaacatgctatgatattactggaggatcacttggatactttagaggcctttgaaacgttgtcagatggtttgccatcctattaccgaagagggagtttaatattatgtttggtgcaatttttagtttgtattataaatagtattaaccat

SEQ ID NO: 73131 - DNA, 2793 bp, Glycine max
  Clone ID: PAT_MRT3847_37053C.1
catagtagtgttggtgggttgcaaagatgcttgggggtcttctccataggggtcataagataaaagggacagtggtgttgatgcgcaagaatgtgttggacgtgaatagcgtaaccagcgttgggggaattattggtcaagccaacggaaaagggaaacttggaaaggctacctttttggaaggtatcattacttcattgccaactttgggagcaggccaatctgcattcaaaattaattttgaatgggatgatgggagtggaattcctggagcattttatatcaagaattttatgcaaactgagtttttccttgtgagtttgactcttgaagacattccaaaccatggaagcatccactttgtttgcaattcgtggatttacaatgccaaactcttcaaaagtgaccgcattttctttgccaaccagacatatcttccaagtgagacaccagctccactagtcaaatatagagaagaagagttgcataatttaagaggagatggaactggagaacgcaaagagtgggaaaggatctatgattatgatgtctacaatgatttaggtgatccggataaaggtgaaaatcatgcccgtcctgttcttggaggaaatgacacctttccttatcctcgtagggggagaactggtagaaaaccaacaaggaaagatcctaatagtgagagtaggagcaatgatgtttatcttccaagagatgaggcttttggacacttgaagtcatctgactttcttacttatggactaaaatccgtatctcaaaatgttcttccattattgcaatctgcttttgatttgaatttcacaccccgtgagtttgatagctttgatgaagttcatggactctattcaggcggaattaagctgccaacagatataatcagcaagattagtccactacccgtgcttaaggaaatcttccgaactgatggtgaacaggcccttaagtttcctcctcctaaagtaattcaagtgagtaagtctgcatggatgactgatgaagaatttgcaagagaaatgcttgctggtgtaaatccaaacttgattcgttgtcttaaggagttccctccacgaagcaagctagatagccaagtctatggtgatcatactagtcaaataaccaaagaacacctagagcccaacttagaagggctcactgtagatgaggcaattcaaaacaagagattgttcctactagatcatcatgacccaatcatgccatatttgaggcgaataaatgcaacctccacaaaggcttatgctaccagaaccatccttttcctgaaaaatgacggaactttaagaccacttgccatagagttgagtttgccacatcctcagggagatcaatctggtgcttttagtcaagtttttctgcctgcagatgaaggtgttgaaagttctatttggctgctagcaaaggcttatgtagttgtgaatgactcgtgctatcatcaacttgtcagccattggttaaacactcatgcagttgttgagccattcatcatagcaacaaacaggcatctcagtgttgttcaccctatttataaactccttcaccctcactatcgtgacaccatgaacataaatggccttgctcggttatcactggtcaacgacggtggcgttatagaacaaacatttttgtggggaaggtattctgtggaaatgtctgctgtagtttacaaggattgggtttttacagatcaagcattgcctgctgatcttataaaaagaggaatggcaattgaggatccatcgtgccctcatggcattcgccttgtgatagaggactacccttatgctgttgatggacttgagatatgggatgctatcaagacatgggtccatgaatacgttttcttgtactacaaatcagatgacacacttagagaagatcctgaactccaagcctgctggaaagaactcgtagaggtgggtcatggagacaagaaaaatgagccatggtggcctaagatgcaaactcgtgaagagctagttgaagcttgcgctatcatcatatggactgcttcagcacttcatgcagctgttaattttggacagtatccctatggaggtttaatcttaaaccgtccaactcttagtaggcgattcatgcctgagaaaggttctgctgagtatgaggagctgaggaagaatccccagaaggcttacttgaagactattacaccaaagtttcagacccttattgacctttctgttatagaaatcttgtcaaggcatgcatctgatgaggtgtaccttggggagagggacaatccaaattggacatctgatacaagagcgttagaggcttttaaaaggtttggaaataaactggcacaaattgagaataaactctcagagagaaacaacgatgagaaactgagaaaccgttgtggaccagttcaaatgccttatactctgcttttgccttctagtaaggaaggattaactttcagaggaattcccaacagtatctctatctgaagaggtttgtggttccttaagttttgtggctttgaataaaagatagaagagaaggaatctgaatttcttcatccaacctgcacatggtaatctagtgtgtttgagtgctttcatgtttggctttaataaaataaaagcagttgttttgtaaaatgttcagaatcaataaaagcatttactgctttgctttgtgcgctaaaaaaaaaaaaaaaaaaaaaaaaaaaaaaaaaaaaaaaaaaaaaaaaaaaaaaaaaaaaaaaaaaaaaaaaaaaaaaaaaaaaaaaaa

SEQ ID NO: 73132 - DNA, 373 bp, Glycine max
  Clone ID: PAT_MRT3847_37054C.1
atctcgggtcgacccacgcgtccgtacggctgcgagaagacgacagaagggaggattctgatgtggcacacaatgcaactttctcctatacatatgacgatcaggcatggagagcagaatttggagcaatatatcaggagcattactaattgactgttggtattattagcatttgataaatttccttttggatcaaactccaaacaatttgtctggcatatcctacttgggtcaaagggcatcccttaatgccattattctttttgtgtatttctagaaattcattatatttttttcgttgctgtgataatccaacagttgttatgaaaaaaaaaaaaaaaaaaaaaaaaaaaaaagcggccgctctagagga

SEQ ID NO: 73133 - DNA, 1027 bp, Glycine max
  Clone ID: PAT_MRT3847_37055C.1
gagaatttgcaagagaaatgcttgctggtgtaaatccaaacttgattcgttgtcttaaggttgagttttctttgcatgtcaagtttgtgattgatatccttgattggcatgatgacccaatggaggaggattttatatatttccttataatttattattgcaggagttccctccacgaagcaagctagatagccaagtctatggtgatcatactagtcaaataaccaaagaacacctagagcccaacttagaagggctcactgtagatgaggcaattcaaaacaagagattgttcctactagatcatcatgacccaatcatgccatatttgaggctaataaatgcaacctccacaaaggcttatgctaccagaaccatccttttcctgaaaaatgacggaactttaaggccacttgccatagagttgagtttgccacatcctcagggagatcaatgtggtgcttttagtcaagtttttctgcctgcagatgaaggtgttgaaagttctatttggctgctagcaaaggcttatgtagttgtgaatgactcgtgctatcatcaacttgtcagccattgttgttgagccattcatcatagcaacaaacaggcatctcagtgttgttcaccctatttataaactccttcaccctcactatcgtgacaccatgaacataaatggccttgctcggttatcactggtcaacgacggtggcgttatagaacaaacatttttgtggggaaggtattctgtggaaatgtctgctgtagtttacaaggattgggtttttacagatcaagcattgcctgctgatcttataaaaaggtaaatcatatatcttacaataggaaacatgaaactcaatttaatttatagttaacaaaaaattgaagacacttttgatgttttataattaatgtcatgtgatatagaggaatggcaattgaggatccatcgtgccctcatggcattcggcttgtgattgaggactacccttatgctgttgatggacttggagaatggggatgc

SEQ ID NO: 73134 - DNA, 2940 bp, Glycine max
  Clone ID: PAT_MRT3847_37056C.1
tttagaaggaaatattgaatgaaaagaaaaaagagaaagtaattatgatctgtttgtttgaaaaaaaaaaaaaaaaagatcatacatagtagtgttggtgggttgcaaagatgcttgggggtcttctccataggggtcataagataaaagggacagtggtgttgatgcgcaagaatgtgttggacgtgaatagcgtaaccagcgttgggggaattattggtcaaggtctcgacttagttggctcaacactcgatactcttactgccttcttgggccgatccgtgtctctccagcttattagtgctaccaaagctgatgccaacggaaaagggaaacttggaaaggctacctttttggaaggtatcattacttcattgccaactttgggagcaggccaatctgcattcaaaattaattttgaatgggatgatgggagtggaattcctggagcattttatatcaagaattttatgcaaactgagtttttccttgtgagtttgactcttgaagacattccaaaccatggaagcatccactttgtttgcaattcgtggatttacaatgccaaactcttcaaaagtgaccgcattttctttgccaaccagacatatcttccaagtgagacaccagctccactagtcaaatatagagaagaagagttgcataatttaagaggagatggaactggagaacgcaaagagtgggaaaggatctatgattatgatgtctacaatgatttaggtgatccggataaaggtgaaaatcatgcccgtcctgttcttggaggaaatgacacctttccttatcctcgtagggggagaactggtagaaaaccaacaaggaaagatcctaatagtgagagtaggagcaatgatgtttatcttccaagagatgaggcttttggacacttgaagtcatctgactttcttacttatggactaaaatccgtatctcaaaatgttcttccattattgcaatctgcttttgatttgaatttcacaccccgtgagtttgatagctttgatgaagttcatggactctattcaggcggaattaagctgccaacagatataatcagcaagattagtccactacccgtgcttaaggaaatcttccgaactgatggtgaacaggcccttaagtttcctcctcctaaagtaattcaagtgagtaagtctgcatggatgactgatgaagaatttgcaagagaaatgcttgctggtgtaaatccaaacttgattcgttgtcttaaggatttccctccacgaagcaagctagatagccaagtctatggtgatcatactagtcaaataaccaaagaacacctagagcccaacttagaagggctcactgtagatgaggcaattcaaaacaagagattgttcctactagatcatcatgacccaatcatgccatatttgaggcgaataaatgcaacctccacaaaggcttatgctaccagaaccatccttttcctgaaaaatgacggaactttaaggccacttgccatagagttgagtttgccacatcctcagggagatcaatctggtgcttttagtcaagtttttctgcctgcagatgaaggtgttgaaagttctatttggctgctagcaaaggcttatgtagttgtgaatgactcgtgctatcatcaacttgtcagccattggttaaacactcatgcagttgttgagccattcatcatagcaacaaacaggcatctcagtgttgttcaccctatttataaactccttcaccctcactatcgtgacaccatgaacataaatggccttgctcggttatcactggtcaacgacggtggcgttatagaacaaacatttttgtggggaaggtattctgtggaaatgtctgctgtagtttacaaggattgggtttttacagatcaagcattgcctgctgatcttataaaaagaggaatggcaattgaggatccatcgtgccctcatggcattcgccttgtgatagaggactacccttatgctgttgatggacttgagatatgggatgctatcaagacatgggtccatgaatacgttttcttgtactacaaatcagatgacacacttagagaagatcctgaactccaagcctgctggaaagaactcgtagaggtgggtcatggagacaagaaaaatgagccatggtggcctaagatgcaaactcgtgaagagctagttgaagcttgcgctatcatcatatggactgcttcagcacttcatgcagctgttaattttggacagtatccctatggaggtttaatcttaaaccgtccaactcttagtaggcgattcatgcctgagaaaggttctgctgagtatgaggagctgaggaagaatccccagaaggcttacttgaagactattacaccaaagtttcagacccttattgacctttctgttatagaaatcttgtcaaggcatgcatctgatgaggtgtaccttggggagagggacaatccaaattggacatctgatacaagagcattagaggcttttaaaaggtttggaaataaactggcacaaattgagaataaactctcagagagaaacaacgatgagaaactgagaaaccgttgtggaccagttcaaatgccttatactctgcttttgccttctagtaaggaaggattaactttcagaggaattcccaacagtatctctatctgaagaggtttgtggttccttaagttttgtggctttgaataaaagatagaagagaaggaatctgaatttcttcatccaacctgcacatggtaatctagtgtgtttgagtgctttcatgtttggctttaataaaataaaagcagttgttttgtaaaatgttcagaatcaataaaagcatttactgctttgctttgtgcgcttaaaaaaaaaaacacaaaaaaaaaaaacaaaagaaaaaaaaaaaaaaaaaataataaaa

SEQ ID NO: 73135 - DNA, 323 bp, Glycine max
  Clone ID: PAT_MRT3847_37057C.1
catactctcaagtccaacctacccctttttgttctcccaccaatttcaccgtcttcttgctcgatcatgtgtcacttcaagggcaagtaccatgatgagcttattgccaatgctgcttacattggcactcctggaaagggtattctcgctgttgatgagtcaacagggacaattggcaagcgtttggccagcatcagtgttgagaatgttgaatccaactggctgtgctcttagggagctgcttttcaccgttcccggtgctcttaaatatctaattggccgtcattctgtttgaggaaacttctttctatagcacatcctga

SEQ ID NO: 73136 - DNA, 189 bp, Glycine max
  Clone ID: PAT_MRT3847_37058C.1
gtgggggacacaaaaaactactcttaagtacaaagagcccaggacctccttttcattttacaccagtaagcatttaatcttgaacatacccagtgaaaactggaggtaacataacctctatcctattaggacccacacgaactttttttgtggtgggggcgctataaccaaccatgcaccatccctttt

SEQ ID NO: 73137 - DNA, 236 bp, Glycine max
  Clone ID: PAT_MRT3847_37059C.1
ggcgagagacttacttgcgacattcaacgctgcataagctgcgggcaaaaccgagggggaaggctaattgtgggggaaacacaacaaatcaaaactcaatccatccgaaaacgtagctccgcattcaccttcatctgcgggagccgatttaccggaaggtgcgacacccgcttgggagaccattccccgatgcagatctatggtgggggggattgatcgacgctgatgcacgtagc

SEQ ID NO: 73138 - DNA, 1129 bp, Glycine max
  Clone ID: PAT_MRT3847_3705C.1
ggctcgagagggtctacatagagcaagtgggaggagagacaagacaatagagagagatcaaagggcaaaatgagaaatacttgaactctcaacttcactgcccactcttgcccagaaccccataaaacatacataaggggcactgaggcaattgatgctttgccttttctattttctagtaactttgactcactaccattgtgtttctgcttgaggagatcactgtcttcaaccacagtaaccaagccaagagacacactttatcttccttcatgggaatatgagaatgaaactaaattcaccgtgccaccactcatatcaatttggtaggtagggcttgtgtgtggttgagaaagaagctttacttgtaaaaggagtgagaaagatgaccactagagaatagagagactcaacaatatagtcataggctagtctgttgtggaatcatgtaactagcaatctcttttgttcaaacatggatagttacgaagctacaagagttgtgttttcaaggatccaaaacttggaccctgagaatgcttccaaaatcatgggtttacttctgcttcaagaccatggtgagaaagaattgattagattagcatttggtccagaagcacttgttcactctgtgattctcaaagcccgcaaggagttgggtttacctttcaactctgcgcacacaacctccactcttacttctgcttcaccatacctttctaagcaaaacttaaacacttcttcaaggctcagtggcaccaatatccctcctgctctcactatccctaacccttcttcatggcctaccatgtctgagcttcaaactcctgatgatttgatgagtcccaaccatttagttgttggctcttctactacttcattgtccttacccttttatgcaaacggaggctcagatccaattgatgagttccaacttcaagaccagcttgctttcctgaatgatggttctccaactagtactgctctttcccacaagaacaacccagatatgttttaccctagtaactcagacttgtcttcaagcctactactgctgctgaccctaccctttttccttcctatggttggggaggggctcttcatcgtaagagttggtcagtcaatgatg

SEQ ID NO: 73139 - DNA, 294 bp, Glycine max
  unsure (1)..(294): unsure at all n locations
  Clone ID: PAT_MRT3847_37060C.1
cagagtaaatttactacacatttataaatagtatttcttcataacaagctactcaggcatattaagtaaaggatgaaatgaatggaaactatatccttagcattacaagaaactcctaagccaattgcattgccatcaactaagatcagattgcatcttcgtctttttcaacagagctctaatgccgngatcagnactggaaacttaactcgccaataatggaataaagacatacattaaacaaaaatattgctttcaacatagatatttgtggatattaacaaattcatttta

SEQ ID NO: 73140 - DNA, 729 bp, Glycine max
  Clone ID: PAT_MRT3847_37061C.1
accgcgcggtgggggctttcgtgagtcactgcgggtggaactcggtggtggaagggttgatttcgggggtggcgatgctgacgtggccgatgggtgcggatcagtatacaaacgcttctcctccccgaacctcagttcccgaacccgaagcaaaacgacaacccggaagacccaaacggcgttgtttcgttcccaaatctcccaaattccccattctacccctggtggcagatcacgcacttattccatgacaccgagagaggaggtcccgaatggaagtttcacagagagaacatgcttctcaacattgattcctggggcgtcgttatcaacacattcaccgagttagaacaagtttacttaaaccacttgaagaaagaattgggacacgaaagagtctttgcggtgggcccggttctgccgattcaaaccggttcgatttcaacaaaaccggaagaacgaggcgggaacagcaccgtttcgcgacatgacatcatggaatggctcgacgcacgtgacaaaggttccgttgtttacgtgtgtttcgggagccgtacgtttctaacgagttcacaaatggaggtgttgacacgtgcgttggaaataagtggggtgaactttgttttgtccgttagggttcctgaaaaaggacaccttgcgaatgagcacggtacggtgccgcgttggttttcagatagggtgaaaggaatgggatttgtgattgaagga

SEQ ID NO: 73141 - DNA, 201 bp, Glycine max
  Clone ID: PAT_MRT3847_37062C.1
agattccgcataacctgaatccccgttctgatggggctcataaacaactactaagttgcttgccaaatactatttgaatgatttcacaagtcaacctaaaccacttgactgtaccagcgccagtatttcttgaatgatccctcgaccaaaatgggacctaactgcggatcggggaacacccattctctttaaagaggtgtt

SEQ ID NO: 73142 - DNA, 571 bp, Glycine max
  Clone ID: PAT_MRT3847_37063C.1
acatgtgaacaacatgactaaatttaccaaaccaagcacgaggagattgcttcaacccatagagagatcgatgaagcttacacacaaggccatactccccctgagcaacaaacccaggtggttgctccatataaatatcctcctcaagatcaccgtggagaaaggcattcttaatatcaagctgatggaggggccagtgacaaatagcagccatagcaagaaacagacgaacagtggtgagtttggcgacaggagagaaagtatcacagtaatcaatgccatatacctgtgtgtagcctttagctaccaaacgagccttaagccgatcaacctcaccagtgggcccaactttaacagtgtagacccacctacaacccacaggggtcttaccagggggaagaggaacaagctcccaagtaccattattttcaagggcctgcatttcatcaatcatagcctgtctccagccaggatgatcaagtgcctcacggacagtggaaggaatggcaagggaagactatgaacaaatatatgaactgtatgaaggagacatactgtgatagcttatgaa

SEQ ID NO: 73143 - DNA, 552 bp, Glycine max
  Clone ID: PAT_MRT3847_37064C.1
caacgttccagtagctgctcctcagtttctccaaacccaaactttcacgacaggtgcgtttggttttactttaaactattcaatattcatctgatcctctagcttcattcattcattcattcatcttcgttcagatcatgatctgtgccttgcaccatggaaaaattgaattagcttaatttcactgaatttatgcatgattaacgggaatctaatgttgattcttttttatggccagatttcgtttgaaattttgtttgttttattttgttctgtttttggtttgcttgattggctttaatttattgagatgtaaaaaaagtgttcacaaggaagaggcaattcagctacgtgtacggaggaattcattcttggatatttatgattaaaaataaattttggattttgtactgctatgacagagatttgcatgttttagcatattaggatgtgtagcattgatgcgttccctgtttggcgtcttttgtgcttcgatgggccttggataggaatagggtattagtgtttgttcgctaattaattggctgaatc

SEQ ID NO: 73144 - DNA, 124 bp, Glycine max
  Clone ID: PAT_MRT3847_37065C.1
cgagctcgcctttggcatcagttaccgtcgcactttgtgtggcgtttgttaacatagctactgtctgcaaagtccaagtacactcacaacaacattgcatcgggtcactgtccagaacactaat

SEQ ID NO: 73145 - DNA, 427 bp, Glycine max
  unsure (1)..(427): unsure at all n locations
  Clone ID: PAT_MRT3847_37066C.1
tnnatttttttttttatacaggacaagatacaatgggggaattaaatagcttataaacacgttcaatgacaacaagaagttcaatcctatgcatttactcccaaataaaataccccacttgatatatcaaagaaatgttgaacccaggagaccacatccccactccctcccctctttctttatcaaaatgtaaaactaaaacacaaatcaaaaacttgaatgattgaagatttttattacaatcttcacaaacttttccttctggcatctatcttcttcttgaacgcctgagcttttgattgtccaccttccttctttggaggtgcagaagcagcagatatgactgtagcaggctatgaaccattaacagtcgttgcctgttcctgaatatttcctcttgctagggtggttgcaagcactggcactt

SEQ ID NO: 73146 - DNA, 512 bp, Glycine max
  Clone ID: PAT_MRT3847_37067C.1
attatactctctgttgctaattttggttagcaactcggccttcacactgacataccggattacacttacaccaatctctcacttgccctcctattctgcttctctactccaccttcctgaatgcaatggacggaacatatgcctgcgccctctgctataactgcctactaccatggccacagacgatcaagacaaggttgaggaagatgctgccgttgatgatacgtgaaatcctacagctattgtagcatagacacagtagagatcaaatcagatggagaaatggagcacgaattaatacaggcactgcaagcattctattatgagggcaaggctattatgtcacatgaggaatgtgatgatcttaaggactaactgatcgctgatgggagcaccgttgtgatgctgagtcctgaggagcaaaaatgtctggaagcgtctatgggacatgtgtctggaaaaccaatctcgagcgacagatagcttgatcagttgaaacttaggctatagat

SEQ ID NO: 73147 - DNA, 300 bp, Glycine max
  unsure (1)..(300): unsure at all n locations
  Clone ID: PAT_MRT3847_37068C.1
tatttcaatctggcaatattattaatcaataattatgtacacatgacgggaatnaaacaaaggtaccttgccccaatataaagagtctttaaataacatctatgtcgaaatgtgtttgacaattctattgaacactgaatgtttcgcacttacaaacgaacaatgctccatcttcaatcgcgagaagaaagcactgaggatccccaccattcaatcccttttttgtttcattattagaacattaatggaaatatatttgcaaaacggtaactcttttttccaacaaaaaaacaaaattaa

SEQ ID NO: 73148 - DNA, 437 bp, Glycine max
  Clone ID: PAT_MRT3847_37069C.1
gcgccaataccgatcctgatggccggggggggattcttctcataccggagtgtcgctatccgctgtattccacctgtcctctggctacgtctgagatgtgttcaccatctactacctaagaggacctataactgttgaacgactgagggttatcggatctttcactctgcaggaggcttacagtgagcatataattatgcaaccctgtacaagagagatgcagggtcgtaactccgtttgaaaggattaataccacattttagtacgagacatggtaattgacaccactaaccagatgcaaaagtcacacatgatcgacccacaccaacttgctcactttgatgaaacttctcacgacgactttatcggcaaatgatctcttactgctcttggacagagctagacccaaacaagcccttattatgggacccttgcac

SEQ ID NO: 73149 - DNA, 648 bp, Glycine max
  unsure (1)..(648): unsure at all n locations
  Clone ID: PAT_MRT3847_3706C.1
ctgatgctccacaanagacactccaaattcttgacattgtattaagagagctatcatctaagaggttttgcccaattgggaggtccttcttttcacctgatattagaacaccacaacggcttggagagggtttggaatcatggtgtggattttaccaaagcataaggcctactcagatgggtctttccctcaatattgatatggcttctgctgcgttcattgaacctcttccagttgtggaatatgttgaccagctattaggaaaagatatcctgtcgaggcaattgtccgacgctgatcgcattaaaattaagaaagtccttagaggtgttaaagttgaagtaacccacagagggagtgttagaagaaagtatcgagtttctggtttgacttctcaaccaaccagagaacttgtgtttcccgttgatgagaattcaactatgaagtccgtagttgaatacttccaagagatgtatggtttcacaattaaatattctcaccttccttgccttcaagtaggaaatcaaaagaaagcaaattatttacctatggaggcctgcaaaattgttgagggacaacgatatacaaaaagggtgaatgagaagcanatcactgctctctttgaagttacttgtcaaagacctcgcg

SEQ ID NO: 73150 - DNA, 235 bp, Glycine max
  unsure (1)..(235): unsure at all n locations
  Clone ID: PAT_MRT3847_37070C.1
acagattgggtcatttattttgaattgtatgggtggaccactaaccaaccttaaacaaacaaataggggcgctatgtccagtcatatagcaataaacgaaaatacatgagctgtgaagatctcctccaaggtgcgacacaacttattttnnctatatatatatttcctcagcaaaccaaaatcattttatacctatatattggatacctgcttatcatgcaaaaaaaaactctaa

SEQ ID NO: 73151 - DNA, 358 bp, Glycine max
  Clone ID: PAT_MRT3847_37071C.1
ctaaggtgatccatacgatccttgttaaagttccacgtctcacatgcagtactgtgcctggggggattgcttatgacggtctctacttggaatcgagagatagcacatgtacctttgatagggaagctgaaccctacagctatgacatacagattacatatgaaggcctttacactactatgctagcagttaaagttgcaatagcaacttgatgaaacctcatgccataacttgaaactagagtcatgtacatattcacctatgatagattcctttattcgtgttcgagattttagccacgcatttgtttatcaccaggagatgatcatgagtatgctagtcaatgatttgaattatt

SEQ ID NO: 73152 - DNA, 272 bp, Glycine max
  Clone ID: PAT_MRT3847_37072C.1
tttcatctcttaaagcctatatcactcgctttggatcacgtgaagtactacgtggacttgccaacagaaatggaaacacatggttgtgaaggtaactggccaagactactaggagatggcagtggtgctctaaggcctggagtactaacatcattagcatgtgtcactgtggctggaaaaaccacattgatggatgtgctagcacagacgagaaaactggtggctttattgaagaagcatcagaatatgtgctacccaaaaaaccatgcaac

SEQ ID NO: 73153 - DNA, 250 bp, Glycine max
  Clone ID: PAT_MRT3847_37073C.1
agagagacagagagagagagatagtgacttatatatagatcccgacagggctggagcttttgtcgctgtcggtaaagtgcctcccttcctgaatggttaatcgactggcctgcactttcgggtcctcactgcggatgtatcagttgttgacctcactgtcccgctcgataagcctgcttcctatggcctaatcaagtctgctatcactgatgcttccataggcacattgtaagttgtttctggttacact

SEQ ID NO: 73154 - DNA, 176 bp, Glycine max
  unsure (1)..(176): unsure at all n locations
  Clone ID: PAT_MRT3847_37074C.1
gctcgagtacggctttgagaagatgacagaaggggggacatcgaagcaaaaaatgataacccaaagtgcttctctcctctgtactttttctctctcttgctatccttttggctagtgtgcatgctgcaagtgtanatccaagaagcgcagtgccaagctaccatgtttcaacattc

SEQ ID NO: 73155 - DNA, 1071 bp, Glycine max
  Clone ID: PAT_MRT3847_37075C.1
acgaggaaacatcccttagaaaaaaataaaggttctctctcctttaataccctaacgttcccaagtttcagacttcaaggcagttcgcacaatgtcccatctaaacggcgcgtactacggcccctccgttccgccgccgaaatcctaccaccgcccctcccgcggcggccgcgacggctgctgctgcggctgcctgagctgcttctgcggctgcatcttcgactgcatcctgggcctcatctgcaagatcctcaccacaatcctcatcatcgtagcaatactcggctttctcttctggttcatcgtgcgccccaacgtgctcaaattccacgttaccgacgcgtccctcacgcgcttcgactacaccaccaacaacactctccactacgacctcgccctcaacgtctcgatccgcaacccgaaccgcagggtcggcgtctactacgaccacatcgaagcgcacgcgctgtaccaggatgttttgttcgggaaccagacattagggccgttcttccagcaccacaagaacaccaccttcgtgaatccccttttcaagggccagcgcgtgacgccactcgccgggaaccaggtcgaggtgtttgacaaggagaagggttcgggtgtttacaccatcgatttgaagctctttatggtggttcggttcaagttcttgctgttcaagagtgcgagcgtgaagcccaagattcggtgtgcgttgcacgtgccgctgaaatcgcgtaacgcaacaacaactatctcccccgatgctgcgtttcaacccacagagtgcggttgggattacgggaaaaaatggtggatccattagattaaaattccaccggtttttttttcccttagtatttcttgcgaaatttcttgttttgttctggctttattttaggtagtgtatattttcttgatgacattggttccctgactgaaacgtagccattctcctaggtggatcgatattacaaaaatattttttttttatatagccttatattcacttttgatacattttgatgtctattcgtattgttgaaattttatttttgtaaaacctcgtgc

SEQ ID NO: 73156 - DNA, 165 bp, Glycine max
  unsure (1)..(165): unsure at all n locations
  Clone ID: PAT_MRT3847_37076C.1
anngggctcngtctcacgcacgcgtacgtaagctcggaattcggctcgagnncaaatgggancnctgaaatcnattactcnnntngtagtganaaaagannaganaatgaaaatggatgctcgntgcaagtgtttggtatcgtttgtgttnngctttggtnttgg

SEQ ID NO: 73157 - DNA, 303 bp, Glycine max
  Clone ID: PAT_MRT3847_37077C.1
gttccaagaggcaggggcattgcagtttagttatatataaaagtgaaataatgaaatctgtgcatacatagaagaacatgaaagaaaggtatacatagatacatatatgaacaaaataattgtttggaacccaatctaaactttgaaatccagtaatgggaaaagagtagagatgaaatgaattaattaaaggtccaagcatagagcaacaaaaagaagccggtggcattggtcccaaaaaactttgtggatgaagaagaagaggtcctcccacacttactagtctactctgtccattgcaag

SEQ ID NO: 73158 - DNA, 335 bp, Glycine max
  Clone ID: PAT_MRT3847_37078C.1
ggggggtgaaaccccaaccttttgttccacagccattcctgtttctgggctaccttcttaccattcccctgggccacccatcttaacatctttttgaccctcgttccctcctcctttctttttctgacgttgggcctactttcaaggtttcaccctcggcgatctctcctttctggctaaacgcaatttgatagaggcaaccctcctcactgtttactatccccacatctcttccttcccccttccttactgcagccattacctgccttgtaacgcccccttcctttatactcctcaccctaattttttctttgccttccctttttggcccccca

SEQ ID NO: 73159 - DNA, 1064 bp, Glycine max
  unsure (1)..(1064): unsure at all n locations
  Clone ID: PAT_MRT3847_37079C.1
gggagaagcattcaaaattcaaaagtttattttaaagtgcttttcttagacaattctcttctccagtctctggcgcaatcaatataacaatgggttttcatttacctagtatcagaagggcattatttgctgcaaatcaagtatcttcaaaaacagtggacgggccaaagggatatcttgcagcctatgttggagataaaatgaagcgctttgtgatccctgtatcaaacttgaatcaaccttcattccaagaattgttgagtcaagctgaggaagagtttggatatgatcatcccatgggtggcctcacaattccttgcagcgaagatgtcttccaacatataacttcttgcttgaatggactgtaaatctcaccctgtaggagactgacatagattagtggagacattttgtacaataggcattgtctcgacttgtaaagatttccctgtgttgagaaataggaaaaagaaagcccctcagaatggcaaaatccccaacattattttttttttttttttataatgacaatgaattcaactactcaaatttcctgtccagcaaatagaaatcaatggctttccgcatatcaggcattaattagaggagcatggttttcttcaaccccaaaacagcctccaagggggttgaagtgccaaaaggctatcttgcagtatatgttggagataagataaagcgggtttgtggattccagtatcatacttgaaccaatctttatttcatgaattattaagtcaagcagaagaacaatttggatatgatcatccaacaggcggtctcacaattacatgtcaggaggatgagttcctaaatgccacttcttgcttgaatgagttgtaaatcaagctaatggagactgagattatagattagatgaggcaaatttgtacagagggcacttttattgtaaagaatcttcattttgttctcttttataactccactgaaagttcaaacctgttgcgtgaatgagattgcaacacaagacattgtttaaacacttcttttgcttttgccaaatcnaaatgcatgaattntaatat

SEQ ID NO: 73160 - DNA, 123 bp, Glycine max
  Clone ID: PAT_MRT3847_3707C.1
ataacttcaatcctgccacttgctacgacagataatgtccaacacaacattcaagcgcatccaacacggagaaaaactgtaaggaaaaagacgggctccaacaggacaactaagtctttatag

SEQ ID NO: 73161 - DNA, 1994 bp, Glycine max
  Clone ID: PAT_MRT3847_37080C.1
gaaatattttacttgcaaaaattgcagagggtgtttcccttcttccaatgtggaaagagtggggcttttatgtctatcttgcgtggaatcaaggaaatctgaaaaaagttctattcatgctgttggcaaaagaatcaggtcccctcggccagtattattctcccgttcatgttcatgttgtgcttctgaatctgaactatgtatcactcctcaaactaagaaacagtggaagacaagaacaaagtcatcaaaactgtcggtaaaattgaagactgcaccaattacttcaaagtgtttatctccacaaaataaaagtcagtggaggatctctaaaaggtatcaacgattacataaattaatttttgaagaggatggattgcctaatggagctgaagtagcttattatgcacgtggacagaaattgcttgagggtatcaaaacatgctctggaattgtctgtcgatgctgcaacactgagatcagcccctcacaatttgaggtccatgcaggctgggcttctcgcaggaaaccttatgcattcatctacacgtcaaatggggtgtcactccatgagttagcgatatttctctcaaaagatcacaaatgcactacaaagcagaatgattatgtatgtgttgtttgttgggatggtggaaacctgttgctttgtgatggatgtcctagggcatttcataaagaatgtgcatctgtatcaagtattcctcggggtgagtggtactgtcaaatttgtcaacacacattcctcagagaaaggcctgtgttacacaatgccgatgctgtggcagctggaagggtagaaggtgttgatcctattgagcagattgccaagagatgcattcgcattgtaaaagacataggagctgagatgggtggatgtgttttgtgcaggagttctgacttcagcagatcaggatttggtcctcgcacaattataatttgtgatcagtgtgaaaaggaatatcatgtgggctgcttgagggatcataagatggcatatttaaaggagttgccagaaggggattggttttgttgcaatgattgcacaagaatacattctactttggagaatctcctgattagggtggctgagagacttcctgaatctcttttggatgttataaagaagaagcaagtgggaagatgtttagaaccccttaatgaaattgatgtacgatggaaacttcttaatggaaaaattgcatctcctgaaactaggccattgcttttggaggcagtgtccatgtttcatgaatgctttgatcctatagttgatccagctgccggacgtgaccttattcctgccatggtttatggaaggaatttgcagactcaggattttggaggaatgtattgtgcattattgattgtcaattcatctgtggtatccgcgggcatggttcgaattttcggtagagatattgccgaacttcctttagttgcaacaagatataagaaccgtggaaagggctacttccaaacacttttcgcgtgcattgagaggctgctggcttttttgaatgtgaaaaatcttgtgctaccagctgctgaagaagcagcatctatatggacagaaaaattcgggtttagcaagatgaaacccaaccagcttaccaactacagaatgaactgccatcaaatcatggcattcaaagggacaaatatgcttcataaaacggtgcctcaatgtcgggtcatcaatactcaattgtgagaaatttgtatacaaaaaagtgaatcgtgaaaggggaaaaccctagctttcttgtcgccatctttttttcattcaacctagtctgtacatgtatcgactttaggttatttgtagccaatcctgagccgcctatacttgatatttgtttgacgtttataatgtcattttcctattttaagttttggttagtcttgagcatcctcgagttcttgatcttggaccttgtgctttgctgcggtataatataatgctgttttatata

SEQ ID NO: 73162 - DNA, 625 bp, Glycine max
  Clone ID: PAT_MRT3847_37081C.1
tttggaggaaatgtattgtgcattattgattgccaattcatctgtggtatccgcgggcatggttcgaatttttggtagaaatattgctgaactccctttagttgcaacaagatataagaaccgtggaaagggctacttccaaacacttttcgcatgcattgagaggctgctggcttttttgaatgtgaaaaatcttgtgctaccagctgctgaagaagcagaatcaatatggacagaaaaattcgggtttagcaagatgaaacttgaccagctccccaactatagaatgaactgccatcaaatcatggcattcaaagggacaaacatgcttcataaaacggtgcctcgatgtcgggtcaccaattctcaagcatgagaaatctgtatactagaaaatcaatcgtgaaaggggaaaaccctagctttctcgttgcttacatgtccatgtggggtccacttgtgtgcattgttgacatgttgacctgacggcttcaatgaattaataaattacttggtccttatattttgccaaaattttgtgttttagttcttatacccggaaactctaaactctgtatttgtctttgttgtgaatggtcaagtaattgttaacttttagtgcttt

SEQ ID NO: 73163 - DNA, 559 bp, Glycine max
  Clone ID: PAT_MRT3847_37082C.1
ttccttctccttctctctctctctcaacacaacacacaccacaaaagaaactacagtgtctgtctctctccctctcactctcacctcgaaaaaatggcggacgacttcatcgtctgtattgaccggatcattgcctccacgccctgttttggatcagtggatggaagacaatgtgatggtgttggtgttgacccattaataatccccgttcctgaaaatggtggagaagggtgctcctcctcctcctcgtcttcatcttcaaacaaggatgatgatgatgatgatgttgttgttgttgttgttgagtgcagaatatgccaggaagaagatctagcacaagccatggaggctccttgttcctgtaatggcactctcaagtttgctcataggaagtgtatccaaagatggtgcaataagaaaggaaatacaatatgtgaaatctgtaatcaggcattttcaccgaattattctcttccaccggtcagaagcaatgcaattatggcgattgatataaggcaagaatgggggcatgatgctgatctccatgtggctctagctt

SEQ ID NO: 73164 - DNA, 410 bp, Glycine max
  Clone ID: PAT_MRT3847_37083C.1
gaagtcatttattctttcactgcagcaaaattctcccaatatggtgggaatcattgtcttgggtgaaattggtgggggctttcccacaccacccaaggcaccattttcatcagcatagtcatgaagtttatcaaggactgcaggggaatagatggaaatggtggtggttagcactcacctggactatttggaagcatagaaatgacattatcttctccaatgctactttcaacgctcacaaagtaatggatgacgcagtgtttctaatttggacatggtttagacacttagaaaatgatttcacttcccattacaatcagtggtcttcaaatctcaaagaaggttttcttcggacatgaagataggaatctaggattcactcctgtacttttctctttttgtggtttctt

SEQ ID NO: 73165 - DNA, 354 bp, Glycine max
  Clone ID: PAT_MRT3847_37084C.1
ggaatatgcggaattaacacattaccttcatatcctgtcaagaccaagcctaatcgtgctattcctactcccccaggtcctgcaagatgtaattagtccactcactgttcacaaggagaaacatgttgatgtgccaagcgctttctcggaatatgctttacttggaaatgctgcgggttaactcctgccgtgcgctgtaaagacaagcgccactgttgcccccaagattatccgatttgcgatacatgaagaggtcaatgttctaagagtactgcgactgggacgtccacaattactgctgagaaccaagatgtttgccacacgtcaagaggttggaaatctcacgtgaacatt

SEQ ID NO: 73166 - DNA, 315 bp, Glycine max
  Clone ID: PAT_MRT3847_37085C.1
tagccctgcggccgccctttttttttttttttttttttttttttttttttttcttttttattggggtttttaggttccccatgatattaattaacaatagaaacacttgaacctattcctaatcttaaaaaatcttaatcacaactcatccctatcaaaaaccacgattccatccaaaaatgggcgggtacaaaatgtatgccaaacgaaaaaagtcccttcacttgcaaataccaatagggggcatgcaaaataactgatacgaattcttaaaaggtcaaaaggtgtattcgattgtgctccccatttaatcca

SEQ ID NO: 73167 - DNA, 339 bp, Glycine max
  unsure (1)..(339): unsure at all n locations
  Clone ID: PAT_MRT3847_37086C.1
gcgngaaaatgaccacttgctagactggaacacttatagaggcatattttacccacatacatacccgtgaaaaaaagactatgaatcggttaaaaaatattaacatatcatcatttacatctttgatgcgaaaagactcatacttgatgccactggaatatcttcttatgagagcgtggctcatgatactgcgaatgttaaaggttaaaagcatttaaatatgcctgttaaccacaatggaaaaatctctgtttatgctgaataaaactataaacacagaatatagtcacgtgtgatgatgcacaatatcacatgtgggaccacacacgtgttggtatt

SEQ ID NO: 73168 - DNA, 374 bp, Glycine max
  Clone ID: PAT_MRT3847_37087C.1
ttttttttttttttttttttttttttttttttttttttttttttttttttgtttttggtttttttttttttttttttcaaccacaaactgctaaacagaaaattcgttgctgtttttctttggaaacaataccaaacaaaagaaaacgacgtcaatgctggaaatgaactccctaaagacgcgcagtacagccgcgttctttgcagaatttatagacactgttgtgtcaataaccccggctgtggtagtgcatcacaaaacagcacggaaataacaaagtttattgagttaaattcacattttacatatttagttggagatcacagaaaggggctattcatgttctaaagaaaaaagtgccttattctttggag

SEQ ID NO: 73169 - DNA, 355 bp, Glycine max
  Clone ID: PAT_MRT3847_37088C.1
aattaataaatttttgaacaaaggaaaagctaaaaaaggaccccctcaaagggggaccacaaaaaagggaaaaaggcaaaaagggcaaaagggggaaagtaacaaaagggccccaagaaaaggggtctcttaagatggaaaaatttgaaaaaactgaaaaaggaacaaaaaaaggaaagacccctccgggggtgaaaattgaggctttgaaaaatggggaaactggggaaaaccgtaaaaaaaaccctctccttaaccaccgttagttggctgaatcatatgcgcaactgactaaaaaaaaacttgaaaaaaatcctaaattaccccaaggttttgaaaaaaaagaaaaacccaa

SEQ ID NO: 73170 - DNA, 1573 bp, Glycine max
  Clone ID: PAT_MRT3847_37089C.1
tgatagctcgttcaggttacctcgttctgcgttctccttcaacacaaccgcgaaaaccttaactcagagctcgttcaccataccacccaaatcaattgtccaaaatcgcggctcaaaccgaacattcgaacttgaatcaggaattttggggcaaggttgctagtgttggcaggattcaggagtaactatagttcaaacctaatagtagaagaaaaggaacttcagctggttttatttgatagagaaaccactgttacagaaatatggaagaggaagaggtgaatcgatgccagattcaggaatggtatccaaagttcaaatctgtatccttcaagaccttaattcatcaacttcctgaatcatttattcagtaccttcttgatgactcagggcccttcctgttgcctgattctgtcttaaatgaagatgcattacccaatagaattcataacccagatgaggaagaagattttcaggtgtctgagggatctggtgatgaagcagaagcttctgcaccaccttcttttccagaacttgaattgaaaattaaggacttcattgagtcccttgggggtgcagtcttccctaagctgaattggagtgccccgaaagattcagcttggataagcacctctggtacaatcttcaacttcagtcccagtgttctttcatttttatttcgagcatctgactcatcggtccatgatttgtgccatgcttatgattcgtgccaggataaatcttcaactagaccccagaatttctttcttgctctccgtaaatggtatccatcccttcagccagacatggaatttcgatgttttgtacggaatcagaaattaattggaatttctcaacgggaggttaccactttttatcctgttttgcttgaaaagaagaatgatctcctttttctgatacaggcatttttcatcaatcatgtgagggctaaatttgagtcagaaaactacacatttgatgtttacattacaaaggatgacagagttaagattgtggatttcaacccttggggtgcatttacattgtcattgttgtttacatgggatgaattggaccatattcatagtgaaggaaatgatgtggagttcagaattgtggaagatcgttgtgctgttaggccaggccttaaaacagcagtcccatttgactacttggataccagcccggggagtggttgggatcaatttctaagaaatgcagatgaagagttaagacgacaatctacaggagctggtgcatgataatcagatgtttttttttattatttatttttaatttcatttcgagagttttgacaaacaaggtgaagacacatctttgaaaacattaccccgtagaggatgcagttttccttttagtcgtagtctttatggtttataagtttttatattggacttctagttgccattgtaagttgtatccaaatatcaggcctcggataatttaatgctgaaacatcagaggcacatggagagctgaagtggcaattgtctatgatgaaaccaaattatcttcccctttaaattttacatatggagaaaatatatcatgt

SEQ ID NO: 73171 - DNA, 496 bp, Glycine max
  Clone ID: PAT_MRT3847_3708C.1
aaaaccccccaaaaatttttttatttgggggggcccccctctttattaaaaaaccctcgggggaagtgccctttccttaattattttatttaattttttcccccgggagtcacaactttgggattttacaaaaaacactgggcccccccccccagaggattctttttaggcggggaaaccccgggccccccttcagtaacaagggctccctttttcattcctgggggccttcccccccccagggattaaagaaaattacccggtttaagaccccgggccgcaagggcctttttcttcccagggccctttctccccccccccccgaggggaaaaaacccaaaatcttgcccctaaaaatctttggcccatttaaaaaccctcccgggtaaaaccccttcgggtcctttcccccccttgggccccctatgaatggcccaagccttcccataaaaaaagggcctggcgggaatttcgcacccccctaacccgccttttt

SEQ ID NO: 73172 - DNA, 181 bp, Glycine max
  Clone ID: PAT_MRT3847_37090C.1
atgactggggccctggggttttcttattggttattggtggcgggcacttgcgatcttctgatctgctttgggatcttttgggggatgtcactggggggcgttttgcgtgctctgctcgggaccgcctcttcgtggtgtgggtcctaagctgctatgcgctgctgtgctctgtttctgctgc

SEQ ID NO: 73173 - DNA, 683 bp, Glycine max
  unsure (1)..(683): unsure at all n locations
  Clone ID: PAT_MRT3847_37091C.1
acgcgtntcgccacgcgcgcgaataaacaaaaacaaacacaaccaaacccagagcccattcgatttggatccgatgggtgatatagtgaaacaaatattggcgaagccgatccagctggcggaccaagtaaccaaagccgccgacgaagccagctccttcaagcaggaatgcggcgagctgaaggcgaagacggagaagctggcggcgctgctgcgtcaggcggctcgtgcgagttccgatctctacgagcgtcccacgcgccgcatcatcgacgaaacagaacacgtcctcgacaaggccctcgccttggccctcaagtgccgcggcaacgccctcatgaagcgcgtcttcaccctcaaccccggcgccgcgttccgcaaggtctccttgctcctcgagaactccatcggcgacgtctcctggctcctccgggtctccgccggagacggcggcggagactacatcggcgggctccctccgatagcgacgaacgagccgatcctctgcttcatctgggagcagatcgccgtcctccacacgggtaccttggaggaccgctccgacgccgccgcgcagctggtctccctggccagcaacagcgaccgctacgggaagctcataatcgaagaaggcgggtgggcccactcctgaagcttctgaaggaaggaaaagccgaagggca

SEQ ID NO: 73174 - DNA, 481 bp, Glycine max
  Clone ID: PAT_MRT3847_37092C.1
ttatgcactgatattctgaccacttttttttaagaagatgaatggagaaccaaatattgttaatagaagtgcattaaaatttttgtttaagcttttaatgtgtcttttaaaattacatggagggaaataaagagaataggctatatttttttaaaaaaaaatgatattctacatcgatcatgtaattaaacaatgtagaaagtgactatacaacatcagttatagaaaaaaatcaataaaatcaatgtagaaaacacactttctacatctattttgatcaaaactaatattgtaagtactatactatatcagttctaacattggttttgatagaaccaatattatatggtacttacaacatcaagttttctagaattgatatcatttttttttttgtctatctgctattgtactacatcagttttgaagagaaccgatattgcataatgaatttcattaaaaatgatctacttttaacaac

SEQ ID NO: 73175 - DNA, 665 bp, Glycine max
  Clone ID: PAT_MRT3847_37093C.1
aatactcaaaatcggtatctaatataaatactatatctattatctagaagagaatatagctttcgctgtatcactgagagacagcaaggatagctatttgactgacgcttcgtcatctctataagcattgcataggccaatacatatctctacaatgactagctgcatgcagtatctacactgtactacactgtcaaaaagctcctgcagcaaaagacttgctctcatttctagcaaatggagtaaaccccactaatcctaacctcacggacagtgcagaaaatattcttgcattgcatgcatgactctattgcccaacttatagtgagcggaacagtgtacgactgatgccgcacttggctctgttcatgcccaataaataatcactgatgcgcacatcgaggagtctaaacaatcactgctgaaaacaataaaggcagcagctatgtgacaaatgctagtgacgagttgaggccagattgataaataccctaccatgactcgtgagcagctattatgaaggcataattactatctattgcactcattgagtaatgaataaatcttagctcactataaaacctgttactatgagacaacttcctgatactaatgctgctccaaaataagtgacttatatagtaattggatatgagtctcaacat

SEQ ID NO: 73176 - DNA, 386 bp, Glycine max
  Clone ID: PAT_MRT3847_37094C.1
gagcacacaacgtagctgtgacacaggcccaactcattaacaaacaaacaaacctactttcctaatcttaagttgtattcattgggcagtgtcatgcattttttctccaaaaccacttttttttcttttttgtcttttttcattcagtgtcaccatttgagttgtgatctcctcctgttttctcgacctgtctgttcaaattcacccaaggagctggaacaaactctgctcttttctctttcatagcaaggagggcctgggaaagagtgaatcacctaaagggatcgatgccgaaactactcgagctaaatggtgagcatgcacggaggatctaggagttcggaaatattcacctatatctgaattccaagatgagaagccttaaa

SEQ ID NO: 73177 - DNA, 400 bp, Glycine max
  Clone ID: PAT_MRT3847_37095C.1
catggaacatttttttttatctcaaacaaaatgggaacacatcttctagttgttgctccattaaacattaacttagctgaaagaattttaaatgttgaaacaactttaattcttttgtcacaattatatgtcaacaataatactttgttcaattgaaaatgaaaccctaggcatagcatagttaacatcattaagaaccatcttgctagactctaaaactgaccaccttaagcggtggtaattggtcaccttaaataatttctatgacagttcaaatttatctttaaattccatcaattttctctttttcctttttggtttagtggtccaatgtaataatgaaacaacaattcttccccttttgatcttctgttgtcgggatacaatctttttattccac

SEQ ID NO: 73178 - DNA, 337 bp, Glycine max
  Clone ID: PAT_MRT3847_37096C.1
cctcgtgccgacaaccactatgccctccatcccatttctttccccgccaccttcagcctcaagcccttaaaatacccttcccttcatttcttcattctatgacttggtggtgtctctgcaaaattgcatgcatgcaacagatatggcttgattccttcccgcatttgtgagagcattgtatggtgttatatatcatacaatctttgttgtttggtgtgatgaaaaacagtgtattttgtttgttttcagtttatgagtttcttgctattgcttgtactttttcttatattatatagattgtgtactgattacacaattatatatacaaaaaaaaaaa

SEQ ID NO: 73179 - DNA, 133 bp, Glycine max
  Clone ID: PAT_MRT3847_37097C.1
agcacgcatgaaccctgctgagacattaggaccagctgtcgtgagctcaagctgcaccggccactgtatgtactgtgcctaacctctcatctgcagtagtaatgctgcgctaatctacgaggttgatttcata

SEQ ID NO: 73180 - DNA, 278 bp, Glycine max
  Clone ID: PAT_MRT3847_37098C.1
attgcaaccaaactggacaaatgttagctggattgctcaagtggccacaaggaacctttgcctccaaggttacattggacacaggtgaacaaaaagctactgatgagcgagaagttgatggtggaattgaaaccatctgccttgatctgccagcagtgatcaccacggatttaagacttaaccagccaagatatgcaactttgcccaacataatgaaggcaaaatccaaagttattaagaaagtcgccgctgaagaccttggcgtagatattagatca

SEQ ID NO: 73181 - DNA, 243 bp, Glycine max
  unsure (1)..(243): unsure at all n locations
  Clone ID: PAT_MRT3847_37099C.1
tttttgaaggaagcgcagccacagtgcggcttacggctgatctattcatctgcgatggtataacatatgcgccacaccgtccaccctaccgagccaccgatcctctcccgtgacctgacctgacctgacctgacctaatccgaccttntcttttgcctaaccgaacgcctgaagaaatgcagcangaacgattgcaaccatggatattgactaatgacgtctactccttcatcgtcatatcct

SEQ ID NO: 73182 - DNA, 252 bp, Glycine max
  Clone ID: PAT_MRT3847_3709C.1
accactcgtccggcaatatgtgagggccgttctagctatatacgaaattctagattaataatggaatagggtaatcattggatttagttggaggggttcatatatttatggaatcgattactatactagtaataaatcgtacaaaaaataaatatatacataatatatatatattaagaacaaacacaaattatatgtgattagtcgcggaatttaaaataaaaaatgaaagctatacaaataataagatac

SEQ ID NO: 73183 - DNA, 224 bp, Glycine max
  Clone ID: PAT_MRT3847_370C.1
cctggttggacaaaggctttttgcatttgaagacaggcgaaagatgatcaatatcggtcgactgactcagtatttaaaggagggggaaagctgatgatagcgatagtcccaaatagcctaagtgacatgactgaattcattgatccagaggctactggtgaaacgtggatgactctattttcttgacattgtggagacacggcagacgtttttattacttcttt

SEQ ID NO: 73184 - DNA, 250 bp, Glycine max
  Clone ID: PAT_MRT3847_37100C.1
tttttgacagaaaagtgatttatagttctcatatgtatacatacattcagaatggacagactaacattacgaagaatatatcctctaaatacaacaaagtattacaacgagcggaggatacatctaacggtggccataaggacaaaacgatactttgaatataacactagcacgagcaaataggacccgtgcaagataatttatactaaggctatcaccattgtgtagagtgcataaatcatgtcttgaa

SEQ ID NO: 73185 - DNA, 415 bp, Glycine max
  Clone ID: PAT_MRT3847_37101C.1
gtgtgcataatttttgggcacaacacattattagcaggaccaccctctaccaagctagggcgttattacattttttttttgtcacattgaactcccatgctagaagttacatggcctcattgggcacattgcttggaaaaaccaaaacctcattgctgctaccctttgacctcttggaagcagcagacctttaattccctggtgggttccaacggagccttcttgcaacccgggggtggcaaagaacccaacgctcacccattgggggaagattcctctccaagttaactgggtcacagaggatccaacttgtttcctttgaggggtgcgtcctagaagctaccaagaggcccggggcggcattatacgtaacgagaatctccgcctttgtcctgggcacacccgcactatgccc

SEQ ID NO: 73186 - DNA, 1610 bp, Glycine max
  Clone ID: PAT_MRT3847_37102C.1
gagaaaaggaacatattagaaccagcaggtgcacttgcactagctggagctgaggcatactgcaagcatcatggggtccaggggaaagatattgtagtaataaccagtggagcaaacatgaattttgataaacttcgggttgtaactgaactcgctaacgttggccgtaaacaagaggctgtgctggcaactgttttgccagaggagccgggcagtttcaaacagttttgtgaattggtggggcagatgaacatcacagaattcaaatacagatataactccaatgagaaggctgttgtcctttacagtgttgggattcacacagtctccgaattaagagcaatgcaggagaggatggaatcttctcagctcaaaacttacaatctcacagaaagtgacttggtgaaagaccacttgcgttacttgatgggaggccgatcaaacattcagaatgaggttctctgtcgtttcacctttccagaaagacctggtgctttgatgaaatttttggaccccttcagtccacgttggaatatcagtttattccattaccgaggggagggtgaaactggagcaaatgtgctagttggaatacaggtacccaaaagtgagatggatgagttccacgatcgtgccaacaaacttggatatgattataaagtggtgaataatgatgatgacttccagcttctaatgcactgatgatggttttaggcacttgccattattgtgtattttagtcaacaagtttgccatatttaatatttccacggtcgtttctaaaagttggatggggaaaaaaggtggaaaggaagtggccttcagacatgtcattagttgattagaggaacaactagttctttttacctaatgcggcgtcttattacattttttataatctgtaatttatgtttttttgttgttgttaacattggaatcttataatgttgttgcctggtcttttgtgtctgtaatataagtgtcttcaaaaggttgtttgctaaatttcagcagcctgaggattgtggtgccgcgtttagaatgttgcaaaacttgaatgatagtcttgctttcgcagtagaataataaccacgaaggaacagtaaagaagtcaaaatagacttcagcactttgggcttgtaccacaggctcaacatatggtattaatgaagcatagcccaatcttcctttgcttccagcaacatggaaaccaacaatttgtttgtgatttccgaccttagcaaccaccagagatccacaatcattaggaattgtgcaggcatcatattcgatgcttacatcttgtttcctgacatagttcccttcagttatgtgaattggttgccgatgtactcgacaatttattggagcccattctggataatattgtcccgtaacagtgtccaatttacaggaaagcaattcagcagaaaaattatttggcaaggttttctcactgtcccagcagaaaaggtcccaagcagaatgtgggatgtcctccaaagttggatttgtatacaacccgatttcactgttatcaaacatttgaaatttatcaggatcgtacacatgccaatagcttatctcagaagtgacaatttggactcaac

SEQ ID NO: 73187 - DNA, 304 bp, Glycine max
  unsure (1)..(304): unsure at all n locations
  Clone ID: PAT_MRT3847_37103C.1
nncgcatgcacgcgtacgtaagctcggaattcggctcgaggtgaagtgagagaccgaccatggtggctcgagtgtggtcgctaatgaggttcctcatcaagggaagtgtggccggaggagcagtctaccttgtttatgaccaggagctgctggggcctagtgactagagcgaggctgtcctgcggaaggccgaggaagttgtgccaccagcaatgtaccacttctgccaatctgtgtgccagcagacgggtctggagatgtcacagcttcccagcccctccaaagattaactttccgaatttcc

SEQ ID NO: 73188 - DNA, 325 bp, Glycine max
  unsure (1)..(325): unsure at all n locations
  Clone ID: PAT_MRT3847_37104C.1
gcagcgaagagcggaggaccctctagcgggggcgccccccaaaatctcntttcctccacgagacttcattactttgagtggttttttaaaaatttttggggttttccccccctatagaaagaccgggtataaaaacaataaagcgcggggccccggcggccccaaaccaaaaaacaacagaactatcggggggtgggacaactaaagaaacccccccaccgggaaagggaaccccctccaaaaaataaaaaccagtcaaacaaacaaagggggggggggcttaaaggaaggcccaaaaaaaaacggggatgggaataaaagggtt

SEQ ID NO: 73189 - DNA, 597 bp, Glycine max
  Clone ID: PAT_MRT3847_37105C.1
ggccaagccttctctctctgataaaagcaagtttaaaagcattatggatgaaaggatagagggtcagtattcaaccaaggcagcattgaaagcaacacagcttactctaaaatgccttgaacgtgaccttaaaaaacgtcctcatatgaaagatgttctcgagacattggaatgcataaaagctatcaaggttacgaggaaggaaggcaaaaaacgttgttctaagtttgcaactaccaacaatgtacaatagccaaatttatcatccttatgttcagcacctaatgcttggtaaattactttgcattattgtaacacgaggcaccagataatatatcattttttttcaaagttattttgttagttgcaggggaaattttgatacagctctgtaattcttttttcctactttggttgaatatagtcacattattgggggggttgtgcaagggtaatgaggttagatgcttgtacacaaagttatccaaactcctcccgaccatatatttagggaaagtttggtaagatcattatattgttattctccaatttttttttacaatgaataaagttagcatgtaaaatattatgcaacct

SEQ ID NO: 73190 - DNA, 382 bp, Glycine max
  Clone ID: PAT_MRT3847_37106C.1
aaacaaaccaatgcattcttctatcttcatgccttccctatcactctttctcagctgaaataatgaaatcctctctctttatctaattaatcctcctttgtcatcgaaagtggctgcggctatggctgctagcaatcttggacatcaattgagtgctcacaacaccgtgagaccctttgagaaaaccactctcttgaacgccctctctatatctgatgctactaaaccatggtacatgtctcacattacactgattatcatcttcatcttcaggattaacatggaccccacgagcaacaccagagatcggtactgaggaggacggacatcatggacaggctgataccattccaactccgagggatattatggatcaagactc

SEQ ID NO: 73191 - DNA, 346 bp, Glycine max
  Clone ID: PAT_MRT3847_37107C.1
ttaaatatgccactgccatgatgcccattgatgaataaactctatgtacggttgctcaacacatgggtgaacaatgggttgattgattagacgaggaggattccttttaggatactaatgcaagtgcagcacttaatggtgatgccggttaggactatatggcatgaattgctattgacacctctgtaggttatactcatgtgctaatacacaaaaatggtgaaaaagggataacgagactattgtgtaatgatgatgattagatatcattggttccaggaaccagtgcataagatgctctcctccaggtcacagatggactggtgaaaagtggagatacattgac

SEQ ID NO: 73192 - DNA, 275 bp, Glycine max
  Clone ID: PAT_MRT3847_37108C.1
cgacaagtggcatccgaaaaagtagttgctgctgcgggcctgaagagcccgcatcatccccggttttaatcctctcattattttttcccgcccgccgatactctgaaacagttctttatgtgaaaagcgtcaggacaatcttgaaaccgcagcaatgaatgcattactgtttctgactgtgccgacacgcgtcgttttcgggataccggttcgggatccaggcgtgcgggatgccagggcagtagaggaaaaaaaagaaaaactcaaaaagaaaa

SEQ ID NO: 73193 - DNA, 484 bp, Glycine max
  unsure (1)..(484): unsure at all n locations
  Clone ID: PAT_MRT3847_37109C.1
tactgatactaaaagtactaatatatacaacaatcacaagagccataaaccctttaccacccaaaccaaaccccctcctcaccaaccttaccaattacctaataaacatactcctcctcaagcaccttaaaagcctccaccaagcccaaaacatatccacaaccatgacacaatcactaaaaagccatttaagaatattaancagcactacacacttagaaagaaattagaaagaaaccaatttaanataacttatctctacactaagaattcaactaacctacagtatacctacaagtccatgtcaaagagaaagcttatgaacagagctgacaacaatgacataaagaaagagattcagatcatgcagcatttaagtagacagtccaacattagtaagttcaagaacacttttgagaataaacgatcaattcatgtatgtgtggagctagttgctaatagtgaacgttgtaaacaaattata

SEQ ID NO: 73194 - DNA, 265 bp, Glycine max
  Clone ID: PAT_MRT3847_3710C.1
agacggccacatcaagttaaaaagggggcttgttaacagcagatcaggctagtgtggaattgctattgagccatattatccccttaagaatggttccaatcctcctattcctggaccatcgcccccttcacctgagaagcctccaaatgtctgtgacagctactacagctgagtttatgtcactacttgatgctgtttatgcgattccttattagcttggtttgagaggggatgatatccgcttgatggtgcttcttgtagtgat

SEQ ID NO: 73195 - DNA, 272 bp, Glycine max
  Clone ID: PAT_MRT3847_37110C.1
ggaagcgacagtccagatgtgtgtcgaagaaaatggtgtgactcacagaggggaactgctttggcacaaagcaggctcccaagccatgatagtgtagtctacaatttcgcagtaaccggaggttgtcacagcagagatgatcaatgttgtgggcttacaggacatggagacatacatgtcacaactggggtaaatggatatcgaagatcggatcttgtgctcttacctcactcgcagtcatagtatgcatttttgcatcctcagctgggtta

SEQ ID NO: 73196 - DNA, 608 bp, Glycine max
  Clone ID: PAT_MRT3847_37111C.1
ccacgcgtccgggaaaggaaaccatcagcacagacaagagaagctgaacttgagaatgaaaagctgcatactgaaatttctagtttgaaggataaattggaacagaaagctgcaattgaagaacaaattttcaccattgatggtaaaatcagaaaattacaagacttagttggtgatgccttgtcagtacctgaaacagaaaatctggtttcttgtagtgcaaatattgattccttggaagaattgctgagaaagcttatagaaaatcatgcaaagctttcattaatgaaacctgcatatggggttgtaggtgatggactccattctcaaaaggaggatgctacacttctcgaggaaagaagtatggatgtgcatgataaggaggcggcagatattgacatatataaaagagatctggaggagtcttcaaatgaattgatgcatgtgaaggaggagagaaatagatctttggaaaagcaaatatctttatcaggtgaagttgaagctctgacaaaaagaattgaggaattgcaagggcttcttaatcaggaggagcagaaatcaggttcttttagagaggagttagcaagtgaagttgaaactctgac

SEQ ID NO: 73197 - DNA, 782 bp, Glycine max
  Clone ID: PAT_MRT3847_37112C.1
cctcgtgccgcacgagggtcaaactgatgagcatatatctagacaacccagtaaaatactggaacttcgcgaggcactaagtcggataaggtttcttgaaaaggaaaatgcagaacaagataaagagattaaaaagtgcaaagagtatatatctgaaattgtgttgcatgctgaagcccaagcattgcagtaccaacagaagtacaagtgcctggagtccatgttccatgaagtcaaaacagaagtgtcaaattcaacgtcaatggtatcagcatcagagaaaattgagaaaagttcagtaaggacaagaggttcaagctcaccattcagatgcatttcaaatattgttcagcagatgaatcaggagaaagatcaagaactgttagtgtcaaggctccgtgtggaagaactagaagcacttgcagctagccggcaaaaggaggtatgcatgctacaaacaaggctggctgctactgaaagcatgactcatgatgtcattcgggaccttcttggtgtcaaattggacattaccgactatgcaaatttgatagacgaaaaccaaattgtgaaattagtggaggaggctcatcatcatagagaagagttcattgcgaaggaaaaagagaatctcgatttaagactgcagataaatgatctcattgaagaaagagaatgctgcatatcggaactgaaaaccaaagaggcagatatacttgccactcatatagcaatgcagcaactgcaagagcgagatcaattgctttctgcacaaaatgaaatgt

SEQ ID NO: 73198 - DNA, 2050 bp, Glycine max
  Clone ID: PAT_MRT3847_37113C.1
gtcgaatctttatccctcggatacagtggccaattgtgttgctgcggtagtcactgtgtacatacagatacagagataaataattaattttaattttagacccttcttcttcttcttctaactgaaaccgcagccacccatactcagaaaagagtacaacggtgacttctgcgagggctttttcccctcttgaaacagcttcactgaaagagtttctgttgttgggtggcaatggaagttttgcgaccaaaacttccttctttcaaatttccaattgccacttatggctttcccccttctgaaacagcttcactttcttaaagagtttctgtagttggggtggctagcaatggaagttttgctgccaaaacttccttctttcaaatttccaagtgccacttattgctgctcgatcactagtaggagctcttcatatgtcagatttgggttccgtcgtgtatctgtttgtgcatcaactgtcaatgaaacagtagctgaacctacagttggttcctcttctttgggtcactccacgcgaccccatttccctatacttcaccaggaagtaaatggctcaaaacttgtttacttagacaatgcagcaacttctcagaagcccaccactgtgttgaaggcattgcaaaactattatgaagcttacaattcaaatgtgcatcggggcatacatttcttgagtgcaaaggccacagatgagtatgaatcggctagaaggaaagttgcgtcttttataaatgccactgattccagagagattatattcacaaaaaatgcttctgaagctatcaatcttgttgcctattcttgggggctgtcaaacttaaaaccagatgatgagatcatacttacagttgctgaacatcacagtgcgattgttccttggcaaatagtagctcaaaaaacaggggctgttttgaattttgtggatctaaaccaagatgaaattccagacatagacaagttgaaagaaatgctctcaaggaagaccaaaatagttgttgtccatcatgtttcaaacgtgcttgcttctgtccttcctattcaagatattgcacaatgggcacatgatgttggagcaaaagttcttgtagatgcttgccagagtgttccacacatgatgattgatgtccagagccttaatgttgattttcttgtggcttcttctcacaagatgtgtggccctacaggcattggattcttatacggtaaaatagacctcttgtcttccatgcctccatttttgggtggtggtgaaatgatttctgatgtatatcttgatcattcaacttatgccgaacctccatccagatttgaagctggaacaccagctattggggaagcaattggtttaggagcagccattgattacttatctgggattggtatgcaaactatacatgattatgaggtggagctcggtagatatctgtatgagaggcttctttcagtcccaaatattcgcatctatgggccagcaccttcagaaaaagtcgaacgagctgccctttgctctttcaatgttgagaatttgcaccctactgatcttgcaacacttctggatcaacagcatggagtggctatcagatcaggtcaccactgtgcccaacccctccatcgctatttaggtgtcagctcaagtgcacgggctagtctctatttttataacacaaaggaggatgtagacaactttatccatgccctcaatgacacagtcagctttttcaattcattgatgtaactgaaatgtatttttatgtatattatattttgtttatacacgaatgagagggcttgctttggtaggacaaactgcatcaatgaaatgttcttgaatttcattcctcctgttcatatcattggctggtaataggcatccactaatagcagtattgcaacctatctacctcctgaatttttgtgtaaagaaaatgctcaaaacgcattaaaatcttttccctcttgatgttggaaggtgaatgttgtatccacttttacttttgacaggaataacataatgcatatttttgtgctt

SEQ ID NO: 73199 - DNA, 410 bp, Glycine max
  Clone ID: PAT_MRT3847_37114C.1
agacaacgatgaatccaaagatgaagagctaaagcagcacttggctaatcctacactatcaaacgggaaaagaggaggtattcttcaagtcttggaaatgtgtattgagggacttctatttattgtaagccataagtcactatgctcataggatgttaggcaatcactgatttttgatgataaaaatactgaagcgatcctctgccacaaaccagcagaatgaaaactcttctgttttacctctaggacttgtgcgtgaacaacattgactatattgcaagagattgttatttaccataccagagcttctagcaagagaaggacgattaccgatacgcctacacttgttgatcaattcccccacccccccggcttgccttcccaagctgactgtgctgttcttatcattg

SEQ ID NO: 73200 - DNA, 2435 bp, Glycine max
  unsure (1)..(2435): unsure at all n locations
  Clone ID: PAT_MRT3847_37115C.1
ggacaaggaaagggaaaagagaaagagagagaaacttcgaggaaacgaccttcaccgttcatcaacctcaattgaacaacaacatcatcatcatcaaaacatcccattcttattcttagcatttctcaatcactgccacactgatactactgacacgcccaccttccatcttattgctcttcaactcccactactgcctctctctctctctctctcagccccttcaaggataacgaatttatgggtggatcaatttcaaaacggaggcgttctaggcaacgttcggcctcaaattttcttcctcggtatcaacaacctcatttcccacaaagccaagataatgggtctgtggggcattatgggtattcatctcagagctatagtggtggtcgtgctccagaacaagtaaagagcttggataggaagtatttaaggataggtgatgattataagagcttgaagcaggtaactgatgctctggcaaaagctggcctagagtcttcaaatctcattgttgggattgattttacgaagagcaatgagtggacaggtggaaggtcatttcaaaggagatgcctgcatcacattggtcatgaacaaaatccatatgaacaagctatatctatcattgggaaaacattgtcttcctttgatgaggataacttaattccctgttttggttttggagatgcatcaacacatgaccaggaagtttttagtttctatccggatgagagattttgtcgtggatttgaagaagtgttggaacggtacagggagttggtccctcaattaaagcttgcaggaccaacatcatttgccccagtcattgagatggcaatcaccatagttgagcaaagtggaggccaataccatgtgttagtgattatagctgatgggcaggtgacgagaagtgttgacactgagcatgggcagttgagtgcacaagaaaagaaaactgtagaagctattgtgaaagctagtgaatatcccttgtcaatcatattagttggagttggagatgggccgtgggatatgatgaaacaatttgatgataacatccctgcccgagcatttgataatttccagttcgtgaatttcacagaaataatgtcaaagaacatggatcggtccagaaaggaaacggagtttgcactcgctgccttgatggaaataccctcccagtacaaggcaacactagagcttaatatattgggtgcttgtagagggaaagatatagaccggattcctctcccaccgcctctatatggtgcagcatctttcaattcccccaaaacttcccgtcaatatagttctcgtcccagtgcaccatctagcagacatgatgttagcacaaaccctcctgcaacttctgcttctgataatcaggtttgtcccatttgcctcaccgatcctaaggatatggccttcggttgcgggcatcagacatgctgtgattgcggacaagatcttgagttatgccccatttgcaggagtaccattgatactagaataaaactttattagatgacctcttaaaacttgtccatgacttttcatgttgaggtatgaaactgggttttcgacaaattttcttggtgatgactggtgagggaggaggatggggggcaaaaagagcttcgcattgtacatatttatatttatttattcaagtctatgctttgagcgcattttatactagagttggatttttgcgttgttattatattaattttgtggcaattcatcaatataacattccatgcttaatatattgggtgcccgtagagggaaagatatagaccggactcctctaccaccgcctctatatggtgctgcatctttcaattcccccaaaacttcccgtcaaaacagttttcgtcccagtgcaccatctagcagacatgatgttagcacgaaccctcctgcaacttctgcttctgataatcaggtttgtcccatttgcctcacggatcctaaggatatggcctttggttgcgggcatcagacatgctgtgagtgcggacaagatcttgagttatgccccatttgcaggagtaccattgatactagaataaaactttattagatgatctcttgaaacttgtccatgacttttcatgatgaggtatgacaccgacgaatttctttgtgatgagggagggacgagagaatgaagggttgaaaagagtttcgcattgtacatattttttatttttgatatttatttattcaagtctatgctttgagcgcattttatactagagttggatttgtgttgttattatattaattttgtggcaagtcatcaatataatgttccatacttctaaaaaaaaaaaaaaaaaaaaaaaaaaaaaaaaaaaaaaaaaaaaaaaaaaaaaaaaaaaaaaaaaaaaaaaaaaaaaannnnanaaanaaaaaaaaaaaaaaaa

SEQ ID NO: 73201 - DNA, 363 bp, Glycine max
  Clone ID: PAT_MRT3847_37116C.1
ttaacttgaacacggagaaaaggattggtgagcttgaccaaacagcattggcatgccattcattcaatctgaaagctcatggtgttaaccgaacacttgatgtcctactgcagagcaacaacatacctgaatgggtaggaaaaagttagaaactcactcattgagaaacgtcgatacttatgtttatgaaaagtacaatcactgctacgctacccacatttccagcatggagcagtgtgatgaattaatcctgcctcactccactggaggtgcaacaccacttcccatgtgaattcaagcactactctgacctacagtccataggcactaccctacaacaacctgatctttcctcccctcttg

SEQ ID NO: 73202 - DNA, 165 bp, Glycine max
  Clone ID: PAT_MRT3847_37117C.1
gcagccttggtttttttttttttaattttgaaaagttggcacatttatttcaagtaaatgtacataactttttaagcttaaaggactatattgcatttatgtaacaagctacgtctgggattcgggaatacctttttttggcccaagttccctttcttggagaaa

SEQ ID NO: 73203 - DNA, 178 bp, Glycine max
  Clone ID: PAT_MRT3847_37118C.1
atcttacacatagttattcgggggtgctgttttattaatgaatgctcacaaccataaacccccttcattattattaaaccactatttaaaagccatggttgtccaatttatgtttggaaataggctcgtaaaacctctatattgggaaggaaacatattcactttttcatcccttgat

SEQ ID NO: 73204 - DNA, 281 bp, Glycine max
  Clone ID: PAT_MRT3847_37119C.1
cggctcgagctggagctgacgctggcccggctcactaagtcagagctggatgacgaggaggtcgtgcttgtgtgcgacaaggtcattgaggaggctgacttggacggtgacggcaagctgggctttgctgacttcgaggacatgatgccaaggcccctgacttcctcagcactttccacatccggatctgaggacactgccgaggctgtaggggcctagaagtccaccatcctgccctgcagtcacatgggtgtggcctccaagctccccaggaaagcagt

SEQ ID NO: 73205 - DNA, 240 bp, Glycine max
  Clone ID: PAT_MRT3847_3711C.1
gaaaagaaacccgcaatttatattcatttccatggtacaggagacacgttcgtgcatggagacaagacataatggtgagcttcaattattattgagcatgcttaacattacgggagcgggaataagaccaaggtgcatgagcatgtgcatgatgaaaaatgcaattcaagcgatcttgatgaatccaaagacgtttattggaacgagcgccttttggagacgggtgcacttatgctacaa

SEQ ID NO: 73206 - DNA, 492 bp, Glycine max
  Clone ID: PAT_MRT3847_37120C.1
ttgtcgccgttgtgagctcgagactgatatcctcataatgcgactctagatctgaaattttctttaaaatagggactgatctgaatgaaaccaaacggcctaatcagtcatgctaagtaagcggtaaggatatatgaaagagagagagacaccgaatgaaagatggaatagacagttgcaaagaggatcatagatgagcaaaagactggaccccctcttgcgcgaaatcacaacagtagactggatataacatcgacaagaaagagtagaaatttgttgcctctaagaccttgttaatatagactcgtatccagccttaaaacacacacgtagcgtgatggaagacgagaatggtttaaaaatagagagcatgcttgcctagccacataaaatgagaacatggttagcctgggatatgacccttgggtaaccacatctcttagggagtgcttcatggcttttacacgacacctatcaagattacccattaac

SEQ ID NO: 73207 - DNA, 183 bp, Glycine max
  Clone ID: PAT_MRT3847_37121C.1
gataaggcccccttcggtatcgcggccgatttgaagatacacgagtatgagaaaaccatggtggcttacaataagaaattggaggggaagaactcagaggaacgactgtctgacatagtcaagtctgaagtcaatgacgatgatgaacatgaggagtaggatgatgatgatgacgacgagtga

SEQ ID NO: 73208 - DNA, 419 bp, Glycine max
  Clone ID: PAT_MRT3847_37122C.1
cggggacaaggacccatgaaaatatttcaaatattaactaattctgcaaaaattttggaacattttaaaaaaacctaaactttttaattctttttacattttaatgaaacttattaaaattccggctgacttttcctttaccactgttccttttgaaaaaaaacacccccaaacccaaaatttggaaaaaaggattaactgaataagggtgtccttcccccaaaggttaaggcctttttcactgaaaccaggttttaatttccacggcaaaaatttgttttatttttagcatcttcctaaaattcctcccaaccttaaaagttttcctgaacccaattacaagctccctatttttaggaacaaccttttactccctcataaaaaacattttctgactttataaaaatttttttgacaaa

SEQ ID NO: 73209 - DNA, 459 bp, Glycine max
  Clone ID: PAT_MRT3847_37123C.1
acgagctttccccactaacaaaaaactaacaattaacaactaacatttgccgataaaaaaaagaaaaagaaaaagggagggtttgggtttgacgaaattgtggacctctgttctacttatgtatgataatatgaattttgcacatttttatctctgaagtgccctatacggttgtaccataataccattataattacaccatccaacttattccttgttttttgaagtctccatgtttgtcttttatttgtttattatgattttcttctatgacctctttaactcatggtttgaactttaaatttgaaattctaggtgttaataaactgaatgatgtacctaaatggagattttcaaacactacttgatattttattttgaataaaaagaactacccatgaagacttcatggagactaaagaatatggagaaagaactcggtaaatataagaatataat

SEQ ID NO: 73210 - DNA, 288 bp, Glycine max
  Clone ID: PAT_MRT3847_37124C.1
ttttttttttttttttttttttggcttaaacaatacttaatgttttttatttaagtttatttatttggtgtttaaacattttttacatcacacaaagaggggtaaagagcgttcacagtaattcaataccgtacacacatttacaccacaagtttggggggctggggaaacagaaattagcatacaaaataggtgcaccgaaggagggataaagaaatgatttgcaaaaaccaaaagaagcctttatgatactgcggatatcaaacctaaaggggagtctcccctttc

SEQ ID NO: 73211 - DNA, 130 bp, Glycine max
  Clone ID: PAT_MRT3847_37125C.1
ccttaaatgatgccaccgggttccactgtaccccgctgaaccggtttccgaattggctttttgcccaaatttctttccaagcccaaaaaagtggaggttctcggcttttccctaaaaaaatcccctgacc

SEQ ID NO: 73212 - DNA, 430 bp, Glycine max
  Clone ID: PAT_MRT3847_37126C.1
gcctggttcgatatctacactatctgctctcacgactgcgaattttggaatcctgcttgcacaaaagcgatgactatgtcatttaatccaaacccgggtgctgatgcatggagcttggaatctctgaagcgtgccggatttgattgagagatcacttgtgtcactggatggactgtcaccccaatgcaggatgttcaggttacaattgagtggcttatttcctctcaggaatgagttcccaggacctattgcgctttgaatccacaaaatccttttgggtaaaaaagggggatgggaaaactgactttcccccagggcaccttcccgaagtgttaaaagaacgcctctttttattgggggaggagctggtgccaaaatgctattcttatgatatgccaaaagctgttctttcaagtggaaaaattttgtt

SEQ ID NO: 73213 - DNA, 527 bp, Glycine max
  Clone ID: PAT_MRT3847_37127C.1
acactatctaatattattatagttattaggaaaaaaataccctttttttgacacattgggatcaggacatggttttttacaaaaattttacgttagccattgggcacaaatagcaagaccctgaattggtgcatgaagtttaagccccgaattgggacattggcctcctatgatgcaatcatttatgtaggctggccgatgcttaaatatgaccttgactccttcatattcaggacctcctctaatctctagttctggacgaatacttccttactaaattgagggctaaatgggggggatagcccaaaaccaatgtcttaaaagtaatggattggtctaaagtcaaaaaatgtttgtattttcaaagcctatgaccctgcaagggcttggcccattttttggccatgtaagggtcatgaaaatcccagttttaaacgctggaactcctgccaattatattcattggttcctcagcaacttctggcaccctacctttatgggctccaatacctacaacagtttcccct

SEQ ID NO: 73214 - DNA, 469 bp, Glycine max
  Clone ID: PAT_MRT3847_37128C.1
ggccgcttttttttttttttttttttttttttttttttattatttaatttttgcaattggatgaataaaattgggggttggggctgaaacctatgccttttcagctgcaccaatttatttcatttttagggtttggtgaactatatatattttcgtcaaaatgaatgaaagggacttttgacattcttttcaaatacgtgagaaagcttatctcagggttcctgttgaaccaaattctgacttatcaaggttgattccttgtggcgtcaccgtgacttatcttccatctctggaagtggcgtctctctccgtcaacatttctgtatcaaacgttctgccccgtaaggttcacgtcagaaggggatacagaaggggtgtggggagcaggagttatttagatgaaacttgagagagggaacaggtctgtgtattctgttaaatagagatattaaaagtaaggaggggtcat

SEQ ID NO: 73215 - DNA, 315 bp, Glycine max
  Clone ID: PAT_MRT3847_37129C.1
agaacatatgagtttgatgatcagaatcattagcacaagtatgatgaactatgtctagaccataatggcctcttcagtgctggtatctgtggatctcaatcctgtccctttcactgttgcgaactcctcatttacaggccttaccgcgctcgtaaggaactcgtcttcagtcagagttgtgggcattggttgcaagaagatcacaactgataattcttaaggaattaatggtggtatggctttgcaggaaggagttgctgcaactggcaagaatagaaatgaaactggcgtttactagtttgtcaaccttaactg

SEQ ID NO: 73216 - DNA, 247 bp, Glycine max
  unsure (1)..(247): unsure at all n locations
  Clone ID: PAT_MRT3847_3712C.1
ctaattttngaggctttgatgaagaaagtngtgggggtntganggtgaatngtggtgctggagtaagtgggtacccnggngcctncnaatgcnngggattnnttctccggtngcggagaagnanatgggtgtgataanngtggtggacgggggatctccacatgtttgtgtggagttcgagtncttcgccggtntcggaaggtggnatncatgtcttcanaggtggtantggggattatgggagtna

SEQ ID NO: 73217 - DNA, 484 bp, Glycine max
  Clone ID: PAT_MRT3847_37130C.1
tacggctgcgagaagacgacagaagggggtgtgtgaagcaaacggttaaaggattgtgtttgtgtctgttggctatagctatgcactaaagttgtgattttgaaggactaatacaacctaaattataagggttggtttctgggggtttctgagaattcatatttgaataggtgaagattttgaaaatggttgtgagaaaaagcatggggcgggcaaagtcactgcttttgctgctcatggtgcttatattttcctttgccacttataattgggtagctatgatcatgaaccttaagacagatgggtcgcaatcttttaatataaaaattatgaggtcaggagagactaattcaaagtttcatgttgccttgacggcaaccgaatctccttacagtcaatggcaatgtctgattatgcactattggtataaaaaagtgaacgacatgcctggatcagacatgggcaagctcacacgtattttgca

SEQ ID NO: 73218 - DNA, 602 bp, Glycine max
  Clone ID: PAT_MRT3847_37131C.1
aaagtccattcccaactagtcaatagtcatataaagacatacacataagaaaaatagttaatggtagtgaggtagagagggaaacagaaacaaataaaacaaagcaactttggcaagtaaagagagcttgttatcatggtagttgccaccatggcatggcgtcacaaggcggtgccaagggctgaagtcctcggcatcctcgcctttgacgccggaaaaaccatgtgccacctaatctccctctaccactccctctccgacaaagaaataaccaagcttcgcaaagaggtgatcaactccaaaggggtaacatacttgaattctcaacatgagtgcttccttctcaaccttgccgccgcagagcgccttgaggagcttgacacggccgcagacactgtctcacggttcggccggaaatgctccgaccccagcctcagccgcttcgacctcgtctacgccgacctcaagctaggcctcatcgacctccgcaagcttagttacggtgctcgaaacaccccaaagatcatctccaaaatggaaaagtttgtttcttctaccagaagtctttattttgccatggaatacatggcgggactcgaggc

SEQ ID NO: 73219 - DNA, 412 bp, Glycine max
  Clone ID: PAT_MRT3847_37132C.1
tggtggttgtggtgctggttgtgcgcggaggctgtggtggtggttgtggaggctgtggaggagggtgtggaaattggttggagagtagtggctgtggtggttgtgggggaggttgatttggctatcatataattagtaaatgtgttttgggattaacttctcacataggtgggaatcaataattaccatttatgcattctacatgtttttagcgaattaccacatgctactatcttcgcttcatattaatatttactaccatggaatttttcttttacccttcctttaaaagatcattgaagattaccatgaagtactattcatcatacgcttcaactcatcacaaattaccagtgtatccttatactattcttgtttgtacatacttctgactccttagatattgtgcaac

SEQ ID NO: 73220 - DNA, 473 bp, Glycine max
  Clone ID: PAT_MRT3847_37133C.1
ccacgcgtccgcccggagagcctgcggtggaacgtgcaggcggagctggtgcactgccggtgggcgatgctcggcgcggcgggcatcttcatcccggagtttctgaccaagatcggcgtcctcaacacacccttctggtacaccgccggcgagcagcagtacttcaccgacaccaccaccctcttcatcatcgagctcatcctcatcggctgggccgagggccgccgctgggctgacatcatcaagcccggaagcgtcaacaccgaccccatcttccccagcaacaagctcaccggcaccgacgtcgggtaccctggtggcctctggtttgacccgctcggctggggcagcggctcgccggagaagatcaaggagctgcgcaccaaggagatcaagaacggacgcctcgccatgctcgccagtatgggcgcctggttccaagccgagtacaccggcaccggccccatcgacaa

SEQ ID NO: 73221 - DNA, 758 bp, Glycine max
  Clone ID: PAT_MRT3847_37134C.1
cggcatgtaaaccacgataagataaattgtttctcttctctgcaaaaaggcgtgtcctattgaaaacatattttggggaaaaaaagtataagaagattgaaatcaaattgagccctaaagatctctcgtcggacgcggagagtttcactttcacccttcggttctcgatgtcagcgtttgacaatgttgttggtgggaaattgaagttgaagggaaaagcactggatgtggctggtggagtgaagaagaagaaaaagaagaacaagagaaatcaggaacaacttctgcaagtcgccgaagatgaagtttcagcaggtggaaatacagaacaggccaaagatcctaatgatggagatataaatgatgtgagtgaattaagcgggaaagggaagacagcccattatgatgatcatcttacaccggcggagaggcgatacatagagcagagggagcaacttgatgttcacagattggctaagatttctaataaatctcaccgtgatagaattcaggatttcaaccaatatcttgcaaacatgagcgagcattatgatattcctaaagttggtcctggatgattcaatgaaggccaatccttatcatttgtatttgttcgttaatactactattaatgccgtgtgcccgcacaatggttattgtcactgcttattgatactttgttttggattcatatgatagatatatttggtttctctccctgtggatggagaagtatgccttcaaaaaaaaaaagaaaa

SEQ ID NO: 73222 - DNA, 320 bp, Glycine max
  Clone ID: PAT_MRT3847_37135C.1
ttcttttttactttaaaccttttgacacagagcaacgacttcttccacatgaaaagctctatctttactgggcaagagccttaactctctccaccttactttctgatctttggaggggtacaaacaaacctacctaattccataatcttcgatagcatttgcttcttctatgaggggatcttggaccctcactggctatgcagttccatttcattattagtaaactgtcataaactgcaccctttcaatgatcgggaccgattattggtgaaaaatagctgatgcctgaaatacacctcatttcttgaacaaaactaatc

SEQ ID NO: 73223 - DNA, 215 bp, Glycine max
  Clone ID: PAT_MRT3847_37136C.1
atttgtcgctgacgcactctacagctctgtctgatatagcccctgatcgtgtatcgaggtgaagcacttgtactcgatgctgagcgcaactgtacattccctagcttgttgttccttccttactctactagtctatgatggggatcacggtgcaggtctacgactgcttcgaataccatattccatctcttgggtgacattaccgatcttgcgaa

SEQ ID NO: 73224 - DNA, 355 bp, Glycine max
  Clone ID: PAT_MRT3847_37137C.1
gccacgcgtacgcaaactggtactggtgctcatttgtttgaccaaggactcaacattggggttggctgtcatttgagaaaactagctgctgcatttaagcatactgaggaaaaagtatgctgatttattgctagtagagaagatttaatctcttgggcgcaatcaaatgctactgcagctgctacataaatgatggtcaaaaatgctcacgtgacattcactctggtacgttatggataatgatactcgacaagatatttatgacttgaaatgtcaagatgtgagagtgttgaaaccacatatgggatgaataaacgtacctcggagtgagcacattctgaaatgtaatattttt

SEQ ID NO: 73225 - DNA, 357 bp, Glycine max
  Clone ID: PAT_MRT3847_37138C.1
ttgaacagactgaaagcccttcatactatttatgtcttcactacgatcaaggaattaaggagagaggtgtctttcagggagtgcatgacatattccatggttcacctgacaggttgcggtgtccagatgaaccaaggttaaacaacattggattcatagggaaaaacttggatgctaacgacttggaatatgggattcaaggcccgtttactctgatactaagaatttcactacagggctttacttttatctctttcgtccatatgatacacgttgaagatatacgagtgtgcctatcttccatgtagaactctattctgatcgactggatttttagtggcaaaaacgttccatttc

SEQ ID NO: 73226 - DNA, 1421 bp, Glycine max
  Clone ID: PAT_MRT3847_37139C.1
cttccagcccgtactctcccatggtgccccccgccccgccacctcccggctgatggccctcttccaagtgcctactcaaagtgatccatgggaattcagcattttggatttcaggagtgacaaatcattcaaacaacaagaatcttcaacaagggaatcaaatgcacatactttctccgaagccccaatctctgctggccctccttctctcaatgcttgggtccttgatagaggaagcttgagccacaacagaaacaacgggacaaatggccttagtgagcacaggttgcagcccattgaggaaatagcttcttcatccttggccagtatttccatcaataaagctgagaattcagtcacaagttcaatggttgagtcttcaaacttccattactcctcttctgctacatattcccttccagtaccttctgctccattacttcctgataatgctgcatggtttactgatgcacaatctagtttatcttctccattatttcctgacaactcagtaccaaaaagtggttatccagattggagttctacttatggaccacatggatatgatcctagatttcctgttctatcaagtggatacacaccacctggcagaatgacttcttcggaatggctgcgttggtacagagaaaattacaaacctgaaaggactaacaattacatgcagcccactcatttgaatagtcctggtcctggtaatcatgtgaacgttccctatcatgatacttacaggtttggtcaatttgatagatggagcaaccctttgccatctaaccagtacacatatatggagtccccagggcccccaccattgcagccaggttttttgtctgcttttggtgagcacaaaggaagtgtctacaacaattttcaaagaccaaccccttatgggtgtggtgtagtgacagacccgaggaatgagccacagtctctattagagtgtctgaaggagaaggaatggcgactccagccggatcctaatgtcagagggcctacattcatgggaaattagaaattctatctgaaacttttttttttacttttgtgcactttggttccataacaagcatcaaaacaggaaagacgtgtgcatatatgcatagagatgtttcggtcatttcttgaatgaattgaggaactccaaagaaagtggatgaagtatcctccattccagtttttatctcatggaaatctgcacttcttttcttaatcatctgttctaggatatgcatgtaaaatatgtatagttagaagaggaaatcgtcattcttagaagtggacacatgatttctgaaaacaaggttactagccatgtttgctgatatatacgagattatctacggtgagatataaattgtaaagacatatatgatgccagaattatggttgagtatgttatatcc

SEQ ID NO: 73227 - DNA, 1212 bp, Glycine max
  Clone ID: PAT_MRT3847_3713C.1
gaattcgagctcggtacccggggatcctctagagtcgacctgcaggtgctagtatgctctgcaaccattggactgttctgtcaattagtgttatgaaatatagtgtaacctttatttagatatgatatgactacttcatacgcttcttttatttataaaattccctgttgcattgcttttctttgtgaaatatacaatggtagtagatttgaaatgtatgcattaatatctacggaagattgacattagttgctagttacttgccaattggggaattataagccaggtttggtgtttcttttgaaaggcactatggcttgcatcctaatggttcagcaatgtttatagtggatgtcaatgagccttcatctgatccctttccctgggacatcaataaagactccttgtcagtggatatcaaacatgtttttacaggagagggtatttcaaatggatatgggttcagataccctggatcaaagcccggttccctctttgtatttcaaaatggtgtccttgcctttgtttggaaggacactagggctgtcttgactttgcagagacttgacttgcaagatcttttgaagaaaggagaaagaataccttctctgcctcccatcaacaatttttcatatttgaccaagtcctactcaaatgtgtttacaggctttcctggtgcttccacttggtcgccttcaccaaggtaaagacaacactggtatattttttgttttggcactacatggattttgtgccctatttcctatcataacagtttaacaagaggatcataaacttcttggcggctgttgtttattgctggagttgcattgctgttggttgtcacacaatacactttttgttgttggtttcttgttactgcccttttaagatcaaagatcaaagataaagtaatattagctatttttgtagtaaagtattagcttctctgctacagttgtatacgcagttgcttgttacacaaatattaaaaactaatatacatcaaaagatcatcctaataaagttttgatctacatttgatataaattgcatgatagatgcccttgtgccccagacaggatacatattatgaacttaatagcacataaaatcacagactgtcgcatgtagacactttttgtcactacccatctaaaaccttcacattaatacaaattaaggcaaaatatatttttttcgctcccttac

SEQ ID NO: 73228 - DNA, 331 bp, Glycine max
  Clone ID: PAT_MRT3847_37140C.1
agatctcgagagtgacacggtatatactgatcgtgacaccgctcctgctcctcatctgagcttgctgcaggcttactcaccgaactactagtgggaactctttacacctccgtcgaaaagatctggatgtgctggtgaaagtgtcgatgtcactatgcgtcgagatgagagagctgaacttgtcaggtcccttttatccggcaaatgtactatacatgagagtctgatcggctcattctctgaagctgctgactgtgagtttacgaccttagcgtgcataccaggtgtgatcacatctcgtggatctatgattgagtggaaggatctacct

SEQ ID NO: 73229 - DNA, 434 bp, Glycine max
  Clone ID: PAT_MRT3847_37141C.1
ttcagaaataggttgtctagcctccgagcccgttacgcatgccatagcacttagatcgggagagtctctgacgctgtaagaactttaatgcgtccgagccattactgaaatgaagagagctctctgcgccggacagagcctgctggagttaactctttggaacttgttaggatatgtgcaggtgcttatcatattcgttatcagaacaacgagacgaaatacacggcgaaagaatctgtgtcaccaatcactgggaattcgcttgcgaattgcagaccaagagctattatgaccaagagctaagagttggacaccgagttcgggtgctggacttacatcagtaattatagtactaacatatgtatgatggggaacatcgtgaggaagatcagggacgagcttgcgcaatacagagtccgaggaacggcaaagtg

SEQ ID NO: 73230 - DNA, 374 bp, Glycine max
  Clone ID: PAT_MRT3847_37142C.1
gaaaatcatatgatgttggaaaaatttcagccaccaaagggttggggggttggccggaacggtggaactcgatggagccaggagaccttcagctgccattgaaggataggtcctcccttcacccatggccccttcctgaggttgccaaaagggcatagggaatcaccccaagggactggtggcggtcaaaaagtggttgagaaaaaaaggctggccctttggttagaatggacctgcggttaagggcggattattggccctttgaccccaccactgtcttggcgggaaagcctaaggagaaaaaaaattcccttagggaactcacgggcaagcttttccaggatttcagcattcgggtccttgcgcgaaaaatt

SEQ ID NO: 73231 - DNA, 394 bp, Glycine max
  unsure (1)..(394): unsure at all n locations
  Clone ID: PAT_MRT3847_37143C.1
attganggaccgaccgacgcatacgtccactcatcctcccacacgtccttccacttttctattccaataatacaacagggggtgtgagctcattacaagcagggtcacacgtattcaccacataaatttacgccaaataaaattccctacacggatgacttatgaccaactttcatgataaacaatttcttttttctaatcaataatcattaatattattgtcgacaccccactaactcacatactcaataccaacacctatatccatcttacctcttctactacaaacgacctttataagcctaacttcaaacctatcacttttgatacgactatccaaaacaataagtatctcatcccaaatcaccatgactatctcatttactatcttatg

SEQ ID NO: 73232 - DNA, 2280 bp, Glycine max
  Clone ID: PAT_MRT3847_37144C.1
atttgattgcatctcttgggattcaccaggcatcgatcttatatcaaccacaaatactctcgaaatagccaaaaagtgaatataactacatggacaatggttggaaaatgggaaggagtaaaagatggtagagcctaaacaatgatattatatttaaaaccggatttgccaatgcaatcagatggcgcaacttgtgcaccaggttgaactgaacccgtaagctgcgttttaagctacttccattaactacccgaagcaaaactgcagcaaaagtatactaaaaataattactattacatacaagcataacgtgcaagcagagtgataaatactttgtacatacattacagggaatctgcttccccaagaataaagcaagccagacagaaatgtaataccacttaaccaaactccccaagagcattagcaatttagcacaggcacctgcacatataagttaagaaccatctaacccttcaaaggtcatgttctcacatctttgagtgcacccactttttcaagctcaccgaccaaatccttaagcgatggaaccttagtagccaaggtcctgtataatctagaatatcgtgcccgagtgccatcagcagtccttgctagagcaagcaagcttagagcctcgggtagttcattaaatacttgtttcatttcctccaagctcatattttccaaaacggagggtctaggggcaaccctcacaatttcactaccttttggttcctgaactcgtgcgtcggctttaatgactagttcggaattagagtttgcaccacattttattataaatggtgaggacgagcctgtattaaattggagtacattccactgtgcaacgtcagtttcagatccagagcccagatctgttgatggcttgcgaccatgagaaatatcttgaatggggtcatcttcttcaggaattgactcaaccaagtagtgagcatctgcaatgtgcctctgagcacatggatgatcaatttcaagaagcgaaggcatctgctctgttaattcattcagagaagtaagcatcgtttttttcttacttttgctcaagatgttcacggaagaaagccttattatatccttgatttgctttaatatgctatcaagtgaaataagagatgctaatcgtgcatcttcagctgcagtagaaggattttgaataggggaaccaccattttctaatgtcaataaagctatatcacttttcatttgttgcaaaatctttcttcttttatgatcaactgattctagagctgagcgtagcttcgctacttgtgctgcatcttcagcctcctctgtcgccaaggtaccagcaatatcctttaagtgttgtagttgagaagtatagacacgttttgaatattcaaagaaaagctggccaagggcatcagtgtggggaggcagagcagcaccaagtccggccatccaaccatccataattgcagtggaaagaagttccaactgaccagtagacccccccgatgcatcttctcctgttaaagatagaaactcaaaattctctgcaagccaggatctaatttgacgctgcagctcacccgctggtgtatgtacaaagagtgcagcaagagccctgttcccaattgcaaaacttttggcctcctcagtaatttccctgagctttccaccagttacttgctgtctccaaatgtcctcatcaataccacgtatcttcaacacaacagatgaaaatttggatttcttttctggctttagattcactttaaatccctggatctgctcatcaacatattgcatggaagatcttccaggactgcttgctcggctggaacttctactgggtccagtgttggccttttcaagaaagcactcaactggcaataccttaatggattgcaactctggtgatctagcaagcaaagatcttatatacaagattctaacacgggaaacaagcatggtatccattactcgcctaggttccattttacgaataaatgaaaaaacagcatctctaatttcagcaagtatttcatgttcgctgcagagaccagctttgatgacagcagccagaaccagcatcagaagcttgtctgcaccatcagaaatggcagcaagtccttcatattgatcaggattaaagtcattcagggcagcagtaagatattccccagcaggggtagtcttaactttctcggaaccagatttaactaaagcaacagtgccatcattcttatctatcatcaaagatgaagaaagaacctccctcgtgccgaattcctg

SEQ ID NO: 73233 - DNA, 425 bp, Glycine max
  Clone ID: PAT_MRT3847_37145C.1
ggattttcatgagtgttttttctaaaatgaaattctgtacagttttgttgtatctgaaacaaatggatgtgtttgtgtgatgcctttcctgttatgcacaactcatgcttctcacctgcattttctggccagaacctgtgcgacccagttcccttgttttgcccctgttgctttattgctctgctttcttgctcactgcccagcaggttctgaactgttctattacattcctttatgactctttttgtatacaagaccgaactacaggacagatgattggcacaagatatgtggcacatgggtctttattacttccactcaccaaccgctgttgcttgtacctccatagagtctctaagtcgccttcatcgttgtttcggtaattctagtttgaataaattgaaggctatagtccttggtctttc

SEQ ID NO: 73234 - DNA, 106 bp, Glycine max
  Clone ID: PAT_MRT3847_37146C.1
aatgcgcctcgtgagcaaataagagcaaatttatatatccccaccgcaaccattaattttgaacattttacagaattatacatgtctgaaatactagcctacagca

SEQ ID NO: 73235 - DNA, 233 bp, Glycine max
  Clone ID: PAT_MRT3847_37147C.1
tgtgatttcagtgatttatcgctgtgcacttgatctcatcatcatgcgcagctttaaacgaagaagatgccgatcctaaacatcgccgtcagaatgcctgaacaggcgactcaccccgacacgttgaaggcagctcttgcttaattcatctcaaccttcatcttcatgttcttctgctcacgcttcggcatcgcctacaacaagctcacccacaacaagtctgacacccctgc

SEQ ID NO: 73236 - DNA, 331 bp, Glycine max
  Clone ID: PAT_MRT3847_37148C.1
acatcagtaatacaggtacttccttagaagcatggccaacatcaacgatggcacgttatcacaagcacgaagataatgatggtcgcaacgttgaccagtccggcaacatttagacacgatccgacgaatacggcaacccatgtacatgctgctggtgtaacctatgtgaccaccatgactgctgctggtggttacaatgattagcttcctaggcaacaggagactaccaatgcctacggctatagacactgggagacagcattcaaggcgtggctacaatggagacacgaatccgcatcatcaggtgactgatggctatgctgatgaccac

SEQ ID NO: 73237 - DNA, 388 bp, Glycine max
  Clone ID: PAT_MRT3847_37149C.1
attaaaatacttaaaccaacagtgcgggaaaaaataggccaaaaaagcaaagataaaatacaaacagaagaaacttgctacaaaagccgaggattgaagaacccgtaaaagcagggaaagtcaaagccgggggtaacgggcaaggccacattggaccaagcaaaaaacagcaagagaaaaaacggaaaggaaagggaaaaggggaaggaaagccagggaaatgggaaaagaggacatcggggaacggcatggcgaggaaacagggagagagtcagctgaatggggagcagggaggagggggcaaaggaggtagtgggtaccgggcccattggaaacccgaaatgcggatggccaaaaccatgaaatggggagccagggggctaggggg

SEQ ID NO: 73238 - DNA, 278 bp, Glycine max
  Clone ID: PAT_MRT3847_3714C.1
tgtcgagttgttatgcattcccgttctgtgtgcatatgggctcgctcctggtatctcaggttctcgtcttctgggcacgaatcctcagtcgatttcacagttaactgtttggaatctggtggcagcagtgagagcatcattggatttggagtctagcaatcagaggttgtggcgatttcctatcgatcttctcggtggtggactattagtgggcttgactggcgattggatcgcacttatagctgggtgtcgagcgacgagcttgttgagagttgctg

SEQ ID NO: 73239 - DNA, 439 bp, Glycine max
  Clone ID: PAT_MRT3847_37150C.1
tgtaggagtgccgcctgcttggggggggggggggggggcaaatattgcttagagctattggggaggagaaaagaacgggaaaaaaggcgtgtacttgattaataaaagcgaagttggacgaacggggcggggcggggaaaggggcggccgacctgcacataaaatagaatggatgaaccaggatagagcctagggggggttgtgattggcaaggaaaagcggtagcttgagaatggctgtaggggtgggcaaaagcgtgaggggagaatggagtgttttgtggaaaagatatgtaggggtgattattacttgggtgactaccaccactacgcgttgtcgtagtacatgccagagtgttagatgcctataggttatcttgatgccggtcactggtctttgccaatccaattaaaggcgtaacccttgcggcgtgggtggg

SEQ ID NO: 73240 - DNA, 412 bp, Glycine max
  Clone ID: PAT_MRT3847_37151C.1
ctgtgcggcgctcaggcggcggttgggagtgaggtcagatcaggattggaaggatcccaccgtacctgcagaggatgatttttgctgccaagcagctcaaggatggtaggagcctcactgactacatgatccagaaggaatcgacccttcaccttgtcctccgtctccgtaggggggtgttaagatcgttgtggaatgtggtatgtgttcccatcagattatgaagaactttgatgtttattgtgtctggaataatgtcccttgattataagtctcggtgttgaggtgaactctacttgtgtgcctttaataatagtactctgatatcccaactactgttgtaatgagtgtgagaaatatgaaatgataaattggagaaatataaatatgaactgcccctagggtgcgtact

SEQ ID NO: 73241 - DNA, 419 bp, Glycine max
  Clone ID: PAT_MRT3847_37152C.1
aataaaacaaaacaagacaaaacttatcagccctctccatgtacatctgaacccatcccattattctgcatctttctaatcttattctgatttagaaaaaagcaaacctgcttttctctctttgttgacattctagatgatttggaccctgtcctacttggcctgtctgaaagttgtcttaagtttcctctgttccaactctgaaccctgctcagaatgcagcttcctgccaggtcatgcgtttctaacagtctctgcctacagcaacttgtctgaggcctgaagcaacaacttggaaatttctttgaagagagaaaattataaatcaataggtacattcagatcaaaaggaagtgaggaatctgcaaaggaaaagccatttgaaccttttaatatgaacttccaaaacctaataaaaa

SEQ ID NO: 73242 - DNA, 476 bp, Glycine max
  Clone ID: PAT_MRT3847_37153C.1
cctattctagccaccacattatccaataagtttccaaaatagtattttctttctcttcagctaacattgtgagaaggatcactggtagaatggctatgttaacgagatttttgggttgcatttgcttgatcttgattttaagtgcaggaagtgaggcacggcctttgaacccaacaattgtaagggacgtccttggaaccttgaagtggacaccaatacaaccaattgcagaagaaggtggacagcgtggtacacaaagattgagtccaggaggacctgatgctcatcatcattaacttgtatatatatataagccaacgatgatgaacatcaaatcctccagtttaccaagtttatataaaattctaatgtatactactgtcattgtctttcttgtcttttatcttcttctttttctttatcattcgcatgacatgtatggagaatttatgagaataaattttgtaattgatcaa

SEQ ID NO: 73243 - DNA, 444 bp, Glycine max
  Clone ID: PAT_MRT3847_37154C.1
gactcgctaactagtcggaggacaaccttaagtgttgagctttataattgtttgattttctccgctatgtgtgcagtggtggttgtagcacttcctcttccggcggaagctggggaccatggctgccgctgtgacctgcaccccataaagatgagcccgtggattacaacccagaccccaggcgctaaacctcacaatgcttgctgcaccaagctgaacctgcaaaaagcatgcttatgtggctacctgacaaacgcttgcttgtagctctatgttaactatgcaacgccccataaccgcagttgctgtgggattccctttccaacttgataattaatcacagccttcttatgactaaagtgtgggatatatatatatatatagatgaacagcttaatttatacacactctgatcctacaaagcatcttgacacaagcattcaa

SEQ ID NO: 73244 - DNA, 126 bp, Glycine max
  Clone ID: PAT_MRT3847_37155C.1
ggctacccgatgacaatttaccgctgaaggtttccaatgtcacattgggtcacttgggtacccttgctagaatacgactgatgcttactaccatgcaaacatacaaccacggctatactcttacat

SEQ ID NO: 73245 - DNA, 930 bp, Glycine max
  Clone ID: PAT_MRT3847_37156C.1
taaaattatgcttcttgccttggtcacaaattgtttagcagagataatatatgaaagattcaagtagcattttacccttcgtgggactggctatagatcataaactgaagttgaggtgtatttcttctggttgtgacatgagttttataatattcctaattttacattgaaagcttatatgttctgccttggcagatggccttcgagcatatgctattaaattatgttcctaattttctgttaatgaatgaattagtagttgttgcttgatgagctctgtttgtgagtttgaatggtcatgtctaaaacattaccaagtattgtacatgttttgttacttcattgtgaatggtttcctgcaatgtagcatttaataccctgtgatcaagcttctttaccaaacctctttactgtttattttgcttaaccattcattcttacatcaaattgtctttgtttgaagagtgaaaccgtgcagcgcctgaaggggcaaagagatgcctacgtcttacaatcacggcaactgcagcaggaactggacattctgaaaagaagaaatcgtagaggcgattcaggcttttccttcacttttgccgtgtttgtgggtctcattggattattgtgtggtttgcttttaaaactttcattgtcttcaccacctacagaatgatttcacactgatcaaaacctttgcatgcagacccttccgtgctattaagtgtaaagaattattttctattgaatgggatttttattcattttgctcacttccacggttatgaccagggtccctcaacccaatcagtcctaggggcaattagaatagactggcatactggaaaaagttcattgtgatttatgcatggagagttatattatttcattataaaccagatttccttaaaatcatttacgtaaccatatagaatg

SEQ ID NO: 73246 - DNA, 387 bp, Glycine max
  Clone ID: PAT_MRT3847_37157C.1
tcgattatgccaactgctgccatttcaatggggatagattaagctggagatcttgtgctagaagttaagaagacgacttgtccctacattaaaagaaccgtctatctgatgatagcagttgggaagttggctgatgacaccatcgatagtgagggcttaccacacaagctggtgccgtgtggagagattcaagtgcaagatgcttagcaagtctaacacgaggaagtgtttacagaatggtctactcacgtgcgacctgcaacaactctgttgactgaggggggtccatatctgtttgctatggtgcatgaaacttcagtgtctaccataccacaggatgacgacatcgctgctaagcagacgaccataaacactacgtgtgcatat

SEQ ID NO: 73247 - DNA, 266 bp, Glycine max
  Clone ID: PAT_MRT3847_37158C.1
gccacgattgctctgtaagatttcttgccgacatggtatatcgatcgcgcgggcgggtcttccatgacaaaaacatttcttccatgggatctgaattgctgaaacggagacatcgtgagtcggacaactttaccgtcgtcgctcgggaacttgctaagcgcatggctatagcttacactaagggctaggcatttctctacgttcttatcgatgaagagctcataaatctattggttgtatcatatgacaaggtccgagaatacgat

SEQ ID NO: 73248 - DNA, 1714 bp, Glycine max
  Clone ID: PAT_MRT3847_37159C.1
gactccaaccgagtccccgcgaccgacattcgactcgattattcggggcacaatcgcttctccctcctgatctagactttccaacttgcgatgaaaaccacagttccgtttggtcgaaatcgcacgcggtttgaccctccttcaccttcacctagatgtggtttcatcacttggtggttactcaccacaccactgtgatgcgtgcctatgaacgttccttttagcctcgctttcatttacccttttccagatacaggggacacttcctcgtttgtctcctgaggtctggctacagtttctttctgctggactggttcggcgggtcgcgctagcgcggcctgaaattataatggcacctttgcaagaagtagttcgagtcaagaatgaagttgtacgtttagagcgcgaatcggtctttcccatgctgcagcctagcctcatccagacccaggctttgcttatagggtcaatgtttgactgacctctggtcagtggaatcggtaaccttctacagttctctgatcgggtcattcgacagtaagttaaagtggttttatggtcatttctctttttgatggcgcagggtacacctgatagtcaagtttttcaggggagccagaaacaaatcaaaagaagaacgaggaatatatgtgaagcatttcaaaaacattccaatggccgatatggaaatagttcttccagaaaagaaaaaccctggattaactccaatggattgggtcaagtttcttggatcagctgtagttggtctggttgctgtagttagttcacttgaaatgccttcagctgattggtgggtcatcattgctgttgtctccacagtaattggttatattgctaagacttacttcacgttccaacaaaacatggctcagtaccaaaatttgattacgcagtcaatgtatgacaaacaacttgacagtggaaagggtacgcttcttcatttgtgtgatgatgtcattcaacaggaagtcaaagaggttataatttcattctttattctgatggaacagggcaaagctacaagacaggatcttgatcaatggtgtgaggaactaatcaaagaagagtttgatgaggaatgtaattttgatgtggatgatgctgttgagaaattagagaaattaggaattgttactcgggattctgttggtcgatatcaatgtgtcgggctaaaacgggcaaatgaaatcattggcaccaccactgaagagcttgtccttaaggcaaaacagggaagcatgacttcttgatggtgttttcaaaacgtgcttatctgtctcatgtacatgtagtgttggttgataatgacaatcctgaaattgcctaaggttagaattttcctttacacaatcctagattgatgtcccatctcttagatggaagttagtttctgctttctgtatacagtcttctgtatttttcatgtaagtctatgtcaatgtgttctctatattttattctttttttcagtagtttgtgttaataaaacctagtccctgattctatagcacactctattacaatgcttggactagttcattattttcaagcttttacgtgtaattgtgtaattaccactgaatgttgtgttacctcaacattgattaaatgttgaatcagttgtgggtcagcatggccaagacaggtgttcttcactcataaaaaaaaaaaaaaactcgagactagttctctc

SEQ ID NO: 73249 - DNA, 236 bp, Glycine max
  Clone ID: PAT_MRT3847_3715C.1
actaaaactttattaactttttttattcacacaacaaactcccaacgtggccggtttttttaacttcttgccgacacaactcatctattcaaatccaatattcattcactacatttaaacatatataatatagcttctcatcctccctctcttaaacatttcgatcagcaacactatataatcaacatatactcactctctatccaccctttacctctctcccatatctcatcttt

SEQ ID NO: 73250 - DNA, 212 bp, Glycine max
  Clone ID: PAT_MRT3847_37160C.1
ctcactggtgtctacctctgtgagatctgcttgatcggactgttcgccatctccactgccaacaacatccaggctgtcggtcccctgattatcgaggccatcatgctcgctctcacagttctgttcaccttgagcttgaacagggcccttgcccacgaggaggctcggcttggctataccgaccctttggcaatcaacggtcaccacgagga

SEQ ID NO: 73251 - DNA, 4224 bp, Glycine max
  Clone ID: PAT_MRT3847_37161C.1
cctttgcgttcgcccacgcgtccgtccaattccaattctcgatttaccaccaaaaacagccacccgaggtttcaatttcgctaagaaacaaagagaggttctatctcttctctgcgacgacgccgtttctctcgcttgaggtaaagacctttttgttcaagcatgggagatagcgaagcggtggttacggaagcatctgctgctgaggcatatgcttcggctggttatgctgagaccgggtcgaatcctgctcccgaggcaggtgctactgttgatcaatctgctggagaagctgctcaggccagttcaacttatggttatggttattctaatgttggtgacgtgaattcgtatgctggggatccgaattccatcctacagcaagctcaattcagtgcaactggtgagtccaagccagctggtggagcggctgattctaacgaggcctctgctggggttggaagcacagctgctgactctactatggtatctgactacaattcatctgtaaatggtggtgttgccggtgcagtgacaaatacttctggacttgaaaacgggaatgcgttggagaatgctgatgggtcggctgatgagaaacagcaagcagatggttatgctgccttgtctgctgaagaagatcgactgtggaatatagtgagagctaattctttagatttcactgcctggacttccttgattgaagagacagagaaggcagcagaggacaatattttgaagattcgaagagtctatgatgcttttctagcagaatttcccttgtgctatggttattggaagaaatatgctgaccatgaggcacgccttggctctattgataaagttgtcgaagtctacgagcgtgcggttcaaggggttacatattcagtggacatgtggttgcattattgcatatttgctataaccacatatggggatccagacactgttcgtaggctttttgaacgaggattagcttatgttggaacagattatctttcttttcccctctgggataaatacattgaatatgagtatatgcagcaggactgggcccgccttgccgtgatctacaccagaatattagagaacccaaatcaacaattagatcggtatttcagcagtttgtggacttctccgggtcctcttgcccgaaatctcactcctcggcttgaggaataggcactgggaaaaatggaagatgccttctctttgtatgaacatgccattgctattgagaaaggaaaagaacattcacaaacattgccgatgttgtttgctcaatattctcgatttgtatatttggcttctgggaatgcagagaaggcaaggcagattctagttgaggggcttgagaatgttttgttgtcaaagccactacttgaggctttattgcattttgaggctattcaacctttgccaaagcgtgttggtgtcgactttttggagtcatgggttgtcaaattcataatgcctaactcagagagtgctggtgtagcaagtccaacagagcgtgaggaactttctagtatttttctggagtttttaaatctctttggtgatgttcaatctatcaagagagctgaagataggcatgccaaattgtttttgcctcacagaagcatgtcagagttgaaaaaacgtcatgctgaggatttcttagtttcggacaaaacaaaagtgccaagatcgtattctgctcagtcacctgcgcaatctgcgatgggtgcatatccaaatgcgcagaaccagtggactaattatggagttcaacctcaaacttggcctccagttactcaagctcaagggcaacaatggactgctggctacacccagcaggcttcctacggggcttatgctggatatgggagcaactatgtaaattcgcaattgcctacatcagttccacaaagtactgcatacggagcctatcctcctgcatgtccggcacagccggcggttcctcaacataagtaagctctaccttttgcagcaccagcccctccacggcttcgttacgcggtttcttgagcctgtaacccaagttattattgagctgacctgacaaaatgatttggccactgttctcggtctccggtaagagacttcccttgatattattggtaatttgacgattctaggggctctcgggcataggtgttgtggaaactttcaagttatactactgaagacagaaaatcattttgactaattcgcaattgtattttagctattttgatgtacattttttctgtaatttgctggttgcttcctttgtatgaacaggccattgccattgagaaagggaaagaacattcacaaacattgccgatgttgtttgctcaatattctcgatttgtatatttggcttctgggaatgcagagaaggcaaggcagattctagttgaggggcttgagaatgttttgttgtcaaagccactacttgaggctatattgcattttgaggctattcaacccttgccaaagcgcgttgatattgactttctggagtcatgggttgtcaaattcataatgcctaactcagagagtcctggtgtagcaagtgcaacagagcgtgaggaactttctagtatttttctggagtttttaaatctctttggtgatgttcaatctatcaagagggctgaagataggcatgccaaattgtttttgccacacagaagcatgtcagagttgaaaaaacgtcatgctgaggatttcttagcttcagacaaaacaaaagcgccgagatcttattctgctcaatcacctgcccaatctgggatgggtgcatatccaaatgcacagaaccagtggtctaattatggagttcaacctcaaacttggcctccagttacacaagcacaagggcaacaatggactgctggctacacccaacaggcttcctacggggcttatgctggatatgggggcaactatgcgaattctcaattgcctacatcagttccacaaagtactgcatacggagcctatcctcctgcatatcctgcacagccggcggttcctcaacaaaactatgcacaacctgtggctgcagcccctgcacagcaacctgctgcggttcctcaagcttattacgggagttattattgagctgacaaaatgagatggccactgttttcccttcctgtaatgtttttttttttccttcatattataggtaatttgatgatattagggaatctggagtataggtgtagtgtaaactttcaagttatactactgaagatagaaaatcattttgactaattcgcaattgtattttagctattttgatctatactatttgtccacggcaatattgttttggtgctgtgccaacattgtgcacgctattgaattaccaaactacacagtgatactgcctgaagaatcagattttcagctcagactctacaatgaatcatcatggatctcagcccgagtttcaggaacttccttcgagcagtcctacaagcttggattttccaggttgtatcaatatattcacggtgccaattctaactcttcaaaaatcgcattcactgctccagtcctaacgagtgtcccctcgtcaccccccggggatggctacatcgtaagaatgttcgtatcgactcactttcaagggaagcccccgcaacccaatcctgaactgaagttgcgcatagagaagtggaaaactcagtgcattgcagttagaaagttcactgggtatgccaaggatgacaacatcaacaaagaaattgaagctcttgtaacaaccctaaacaagaactcggcaacaatacaagacacgagcttctataccattgctaagtacaatgcttcttctcataataccgctgatcgcttaaatgaagtgtggattaaagtgtcaggagtcaggactgaatattgctaacggttgtttccatcggttaagtgcatgcagtatcctgttttagtgtcattgtgcttggagtggcttgtttcagtggtgttatgtgtgaaatgtgttgttttcgttgtgggtccaatgtaaataatgctagctcccgcttggaatatgcatgtatgacttgaatacgcattgctattaatagtaaataaatatagactttaaatatgtttttcatatttatactataattttttttgcattgttatctattgatttgattttattcactaaaataaactgtttcttactatattgtttctaacatagtttcataataaaag

SEQ ID NO: 73252 - DNA, 333 bp, Glycine max
  Clone ID: PAT_MRT3847_37162C.1
agcatactcttgccaaatgcccatttatgacctgtgttaagttaattgaaaagtacatctggggaattgatcttttaaaaatggtattctaatatcatggtaacattttagaagttgtgagtgatttttgtgtattgcacatttttgtctataggtataattggtgacacaattgaacaacttaatattagtaaaccatattattatgatttgcacaaaaaaaaaaaaaaaaaaaaaaaaaaaaaggcgccgcactatagctctacccggataattcgccgtcctgcggctcactttcctattgatctattaactgcgttatgtatagctgtc

SEQ ID NO: 73253 - DNA, 463 bp, Glycine max
  Clone ID: PAT_MRT3847_37163C.1
ctaccgcgctttcttttcaaccaggttccttctcttctctctcacaaatctgattccttttccctattatttttcacttcttctatgttctctattttttttattccctttatctctgatttcccgatccctttgcgttagggtttttcgctcgcttctttttcaattagtgatttagctttacctttgattgatattgggattggattctgtatttctctagcacgattgtttcgctttctccgcgtggatttactagatcgcagtgctttttgatggaccagaatgtttccgtttacacttttcaatgcgatcttttgatcatctatcattcgaatttgcgttaggtttttcgctctctctctcttatcaattgcctcaccgaaattactgatttagctatacctttgattgatatattggattgatttctttattttttcaaaacaactctctagcacga

SEQ ID NO: 73254 - DNA, 612 bp, Glycine max
  Clone ID: PAT_MRT3847_37164C.1
cagtcacctgcgcaatctgcgatgggtgcatatccaaatgcgcagaaccagtggactaattatggagttcaacctcaaacttggcctccagttactcaagctcaagggcaacaatggactgctggctacacccagcaggcttcctacggggcttatgctggatatgggagcaactatgtaaattcgcaattgcctacatcagttccacaaagtactgcatacggagcctatcctcctgcatatcctgcacagccggcggttcctcaacaaaactatgcacaacctgttgcagcagcagcccctgcacagcaaccttttgcggttcctcaagcctattacgggagttattattgagctgacctgacaaaatgagatggccactgttttcgcttcctgtaatttttttccttgatattataggtaatttgatgatattagggaatctggagcataggtgtagtgtaaactttcaagttatactactgaagatagaaaatcattttgactaattcgcaattgtattttagctattttgatgtacattttttctgtaattttcttttcaccggttaatgcatgcctgttttttaatgtggaactaagtaaatatgg

SEQ ID NO: 73255 - DNA, 307 bp, Glycine max
  Clone ID: PAT_MRT3847_37165C.1
accacgcgtccgataaattgaagattgagagaagatactatacagaagagggatgggcgtgtcgaaggaacaggttgaattattcttgaaggccacactgatcccttatgaccttgaagtggttgatgtatctggtgggtgcggtgcaagagttgtggccgagttcgtatccgatcaggttgacggtaacagggtatttgagaggcatataatggatggtgctgccttacaggaggttgtgatacttgttcatgctgtctttattacgatagctgtgtacactggttatgtttaaacagacatgctt

SEQ ID NO: 73256 - DNA, 341 bp, Glycine max
  Clone ID: PAT_MRT3847_37166C.1
gttccaagatataaaatctctcttttacaagagatttgtgctagaatcaaagggcaacacacacaatcaaggaaaagtgaaagggaaaatttcagaaacttttttattgagtcagaactttcgcactcatgctggagtgctgaaactatcccagagcaccattgaacttctttttcgttttttccctcattctattgatgttttgaagcctgagaccagtttgatatatggggaaggtccagtggttcttgaatgtggaagtaggaaaaatgcaattgtaactatttttggcaacagtggacatgtggctggaaaaattgttggctttggtgctgagcaag

SEQ ID NO: 73257 - DNA, 949 bp, Glycine max
  Clone ID: PAT_MRT3847_37167C.1
cttcaatcttggattctaacttcatgaaccttgtcaaaagtctagaggcagatattagagaacagattgtggaggtttatagccgtccaaaaatgaaggtggcagtagtgccagcagaattagagcagaggagtggtgaaagtgatgctgagtatataaagcgcgtccgggtttttgttgagaaacagtgctctgagatacaggatcttgttcttcgaaatgcttctatggctgaggacctggctaagacaggtagtactttgcagcctgagcaaagagtgagtgggggctcagatagagtcccaattgagacactgcatagagatctccaagaagcatctcaaagattggagatgcttaaggcagaaaaggctaaagttgaatctgaggcgataatgtatcggaatttagctggaaagacagaagctgatctaaggagtctgtctgatgcctacaatagtctggagcaatctaacttgctactggagaatgaggtgaaagcactgaagagagaagggcactcaacattcccagatgtggatgcaataaaagctgaagcaagggaagaagcacagaaggagagtgagggtgagctgaatgatctgcttgtttgccttgggcaagaacaaagcaaggtagaaagacttagtgctagattgttggagttgggagaggatgttgacatactgcttgaaggcattggtgatgatgctggggctgctgaagatggtgaagatgaggaagatgatgaataatagattttttgtctctacctcactttttacattttatgttgaattgtacagtctaacacgaattatggtgaatggatcagtgcttgtattccttggttggattttaaattatgatccttgaggagctgttgctggttttattttattttgcaatattcagggtgaataaattatctctacattttctttaaaaa

SEQ ID NO: 73258 - DNA, 288 bp, Glycine max
  unsure (1)..(288): unsure at all n locations
  Clone ID: PAT_MRT3847_37168C.1
nngcnctngacgctncctcgtgtncggcgnnnnggnncntnngnnnnnncntnnnngnnngnnnggngnnnncgnnngtngcgnnnttncnngcgnnngncctcgngtggntgnnnnggngtnnncgtnngntgngccntntagncngnctggnnnaantntncnncgnncctngnaggncntngttcngtccntctanacntnntnntcngcaaaggagtngngttccgtatngtnctcggcggnaactctnaggtgnangnatccctcnttgggccatcccgtggg

SEQ ID NO: 73259 - DNA, 438 bp, Glycine max
  Clone ID: PAT_MRT3847_37169C.1
tttgaacaacacaaaatgactttaccaaaattcttaattcaccaatactaaaaaaaggatataaacccagccgctaatgttaatcctcagtaaggaaactccaccaacaaaattcaaacgcagcccctcactctcactccccatgccgactcccgtggtattcttacgccaatgcctaactcccgacgccgcgcgcgccctcgacgaggccgtctacgtcgtccgccgacgtagccacgcccaaaccacgtcgctccacgccgtatacggcctactctccctcccatcctcacccctcctccgcgacacctgctcccgagccataaactgcgcgtattccccacgcctccagttcaaggtcctggacctatgcctctccgtatccctggaccgcgccccctcctcccacaaacactcctccgtcgaccacgaccctcc

SEQ ID NO: 73260 - DNA, 297 bp, Glycine max
  unsure (1)..(297): unsure at all n locations
  Clone ID: PAT_MRT3847_3716C.1
cccgaccgaacggttccacaagacgtcagaaggggctttatgatcttgctcttgattagtaacatgagttattctgatctttattcaagatacttccttgtganntaacctccatctcacctatggcaacaaacatattaatcgactccctatacaccatcccatactacatcatcacatcaacaaagaatgttgatggtattgtaacatctgccttactataatattactacaacactttcaatttcagacaccactgtatgtatctttgttgtctttcaccatataggcacattt

SEQ ID NO: 73261 - DNA, 258 bp, Glycine max
  Clone ID: PAT_MRT3847_37170C.1
cccacgcgtccgattttcttgctgaaacctggttaagtgcgtatcaatataacgggctgatcatgcaaagatgggatatgggtgcactcattaccaggagaagatgcaagatacgtgctaactgctgacttggagatctactcatagccgtactgtcataacgacactgtcagctcgtagaataatcgctttggtcgacactagctcgttcgccaatatgttaaacatgtaagtctgttcagtttgtgacacttagca

SEQ ID NO: 73262 - DNA, 246 bp, Glycine max
  unsure (1)..(246): unsure at all n locations
  Clone ID: PAT_MRT3847_37171C.1
attcgacgatactagaaacgcgcagcgcaagcatcagcatagcttgctcagatgaaagtcttggcaacgacgctcataggcaagaaaagtacacgagaagtaggaagcgcagagactattgcagatgtcaaggacaagctaaagagcagnggaggaatgaccccgggatagcaaagtctgatatgggcggggaagcagcttgaggactgacgcatgcgtgatgactagatgattcagctggagagt

SEQ ID NO: 73263 - DNA, 291 bp, Glycine max
  Clone ID: PAT_MRT3847_37172C.1
agagtggcgctatataaccggacctaagaagctaacaatctaaagggatcgctctaattcatcactcgctgccatacacatataggaagatgactcatagtcagaaatatttgtacactggagtacctgaagggagcgatgccgaagagataggataccacgcacatgttaaatacgagcatatatcaggcctttccctaaaaggggctacacgtgcataactagacaaaaataacggtctcttcaaagcgaatgtgtaaggcacatgccaggtcagacctataccttatg

SEQ ID NO: 73264 - DNA, 352 bp, Glycine max
  Clone ID: PAT_MRT3847_37173C.1
tgcggctgcaaaagaacgacaaaggggcttcattagaattattttttttatctactgatattacacacacttgtgagtgttctaattaatgccgggttgctcctgaattctatcgatacatatactttttcaacaaattcatccattgtctccaatgctcttcaaaagcggcatgcttattaataaacgctaactcgagtagcacactaacctctaagctaatacaacacattagacctttacgtctctctttgaaaaaacaaaatctattagctatagattgccatctaatctgctgcgcttctacatatagaaaacctactatcacataaatcttaaccaaataagaaat

SEQ ID NO: 73265 - DNA, 325 bp, Glycine max
  Clone ID: PAT_MRT3847_37174C.1
gattttagcggttcaaatcacaacttcggctcttccgactcctatagcacgtttcgtcgcaatcatgaacattgtcaagatcgggatcacctgctttggaagtattgactgtatgattgacacactcacactggttacgcaacgatgtagagctcatgacagtaatgcagcctttcgataacaccgtttacatgacatacatgttggttaacgtcaatgttcacagccagtggtcacatcaagaggtcaccgttaaggacgaaaatacccatcgtcttcggtgacaaggcactcactgtttttggacacagctatcctgaagaga

SEQ ID NO: 73266 - DNA, 595 bp, Glycine max
  Clone ID: PAT_MRT3847_37175C.1
ggaaatttggccgatgtgattcttaaagttggtctctttgagaggtattttatccttgttttagaaaaatacacatacggcagtgtaagaatatattgaaaatttaagattatagtaatccctaaagatttcaaatatttgatttatcaattcatttcatcctagactagtgagaaattttggttttttttttaattgtggattaatcagatcagaaattgcttggagggatgcaaagtatgctcaaatatatgagtatcttcgggatgagtatgaagttgcccaacgctttggaaacctggatttcaaattgaaattcgttgaggtatttgagcttgagcccctccataagtattagtcatttcatctaaacaatgcatttgaaatattcgtttgaatctgagcccatctgaactcaataatgcgtgcttaattttatgaacagttcttctgctagatgcacaccattttcccctacatatttaacttagtagttgaggttgaggttgttcagtatcttcaaatgatgttgtccaattaaggcttatttcatcgatttggttgtttgcagcacaatattcatttcctccaagaa

SEQ ID NO: 73267 - DNA, 320 bp, Glycine max
  Clone ID: PAT_MRT3847_37176C.1
gccacgcgtccggctgcagcgccagacctagctcatggtacaggagctgcacgggctgaggactgcatgtaccgtgtaccacgcactgtagtcattcatgaccttatttcgcgacatgcgcaggcttatggacggatggaggtggtatgacgaagaccatctaggtcgcgaagcttatccaggggatgtcatgacactaagcttcacgctttcggaatacgagccggatctacagagagtgaattatgctgaaggatgctgactgcttgaccgataagtgaaacgtcatcgggaagaggattacctaatatgcctactaa

SEQ ID NO: 73268 - DNA, 392 bp, Glycine max
  Clone ID: PAT_MRT3847_37177C.1
cattcaggaagtacaaaactgctcttatggtttgttgaacacctactcatacaatgatggtttaaacgatttgggagagagacacactaatacactgtgtgaaaaatattaaccagatcatgacggtactatttaaaaatacccataccatgtgtgccaatctagaatatgctctgttgaattcatctgaaaccggaatataatgtgttcattacatcaagtgcttggggagcgagcttaagatctgaatctccatttctatcaagacaagctacagtgcatcaacttacaataaacctgggttgttactgggccacattcaacatacgtagcaactgcgttctcccatgggcatccatattctgcgttgtagaacatcttttcatagacca

SEQ ID NO: 73269 - DNA, 172 bp, Glycine max
  Clone ID: PAT_MRT3847_37178C.1
ggagagaactagtcttgagattttttttactgcttaattttagctaaactctttttccctctaattttatatgcgaagatgcactttttgatagttggccattgctgcagcttttgctcgtgaccagaaacagtatgatgtgatgctaataactcactcagcacacgagagc

SEQ ID NO: 73270 - DNA, 274 bp, Glycine max
  Clone ID: PAT_MRT3847_37179C.1
aacaataagaaaaattgctaacaacacacttttgaatataagaaaaattgttaacaacacacttttaaatatattttttcttattggttaaaatttcttgaaaattatagaaaataataaatcataaatcatgcatatttaattactttctttcataattttataatttttaataaattttaatcatggataaaaaaatgtgttattagcatttctcctaaaataatcagttcccttccattctcccaagttccaaccggaaaagcagataaac

SEQ ID NO: 73271 - DNA, 393 bp, Glycine max
  Clone ID: PAT_MRT3847_3717C.1
ccaacaaactatcccatgttatataccaagaactttacagtaacatcccaaaacacaaacatttccttacactgaaatattcaatttatggagacatgaaccataatgggtttaaacctgccaacatggttaacaatgccaatctgttttcagtaataatcatgtcattggggtctgtaactttgcattccctttattgggcaggctccgtcaggcaaacaactggatcattttacgttcaagtcacttagattcaggttgacctgaattacttgtgaatgatgtcctaaatggagaccatagctcaacatagcaggaatgatgccctgactgagtgtccgtaatcagagatattttatgaccctgaagaagatttctgaacccagacttgct

SEQ ID NO: 73272 - DNA, 258 bp, Glycine max
  Clone ID: PAT_MRT3847_37180C.1
actcataacctctccacacttgatggtccacataccactgttactacagcttgccaggtctccaataacatattgcacaacttcaccccgaattccacagaccctgccatctacactctattcttaaccaaaatacactcactatgtcctaataaccgaaaccacccaaaactactgccattatgatcggtttaccaaaccaaatttgatatatcatactatacaaatttgaggaattctacacaaattctacacatc

SEQ ID NO: 73273 - DNA, 120 bp, Glycine max
  Clone ID: PAT_MRT3847_37181C.1
ctcatactgagtccgaggagaagatattattacagtcagacagcttctgcctagagcactcttcatcatatcattccaaacagagctctttagtttcatccagcatcaattgctttctca

SEQ ID NO: 73274 - DNA, 181 bp, Glycine max
  unsure (1)..(181): unsure at all n locations
  Clone ID: PAT_MRT3847_37182C.1
tttttcttntctttttttttttttgntacctttgttttttcttctttaaactcgaaatacatccatttataaaatgttatgcagaaacccggggggggctcattgattttcgcccccaaagaaactctggcgcctgtgattaagggtccatgtcaaatcagtgacgaatggcaaanagaac

SEQ ID NO: 73275 - DNA, 319 bp, Glycine max
  Clone ID: PAT_MRT3847_37183C.1
gaaattaaaaagcacatatcttcagagtgatacttcacaccttgcccaacatcaaactaataaaaaatttctcgaaagattctcccgtcgctcacgtatgccaaatccaatacgccttatttgcttctgacactaaacattcacaatggcactttgtctcctcattcactgggggatcattgttacacgtccacaagctcaccctgctgcaccaatattttcagcgctcacttcaaaggagttcaagcaatgccgtaacgacctttccattgacatttattaaagccccgcttttcatttaagggcacaactgcttatt

SEQ ID NO: 73276 - DNA, 370 bp, Glycine max
  Clone ID: PAT_MRT3847_37184C.1
ggcccttaagctcaacacatgaaaggccacctgggagctcttctagtacaagttttcctcataatacttggagaaatgattctacaatttcatctgtgaaccattcatcagatgttttgtatcctcctacttcagttgctactcactgtcccaggaagaccattcgttacccaacatcaactgctcatcctcatcctcattctcgttctccatacgcttcagtttcccccattatcaaaccaccctctgccatagatagtggttgtagaaacttatttaaagtcactgacagagtgaaatttgatgatatgagtgccagagtgcatcatccatgcaccaattccaggaaaagaccctcaactagttttgt

SEQ ID NO: 73277 - DNA, 457 bp, Glycine max
  unsure (1)..(457): unsure at all n locations
  Clone ID: PAT_MRT3847_37185C.1
tttttatagattgaagaacgaaattttattgctaaaatgaaaaggcgcaactggaattgcataacaaaaaaggggctaagaaaagcctaaaactaacaaccaatctnggatagagaagaccagagagcgagagagcgagagagactaaaactaaaaacgaataatcgaagagagagcctaaactagaaccttggtgctgcaatatagtttctcagccccaaagctcacaaatctgttataaatccaggcccataagtaaattaaatgcacatctggataagagaagacaagacctagattaaataatatctagatgagaaagtcaaatctcgataagatcagataagatctagattgaataatatctcgatgagaaatgcaaatctagataagacaagatctagattaaagaatatctagatgagatcaaatctaaagaatctctccataagataaa

SEQ ID NO: 73278 - DNA, 286 bp, Glycine max
  Clone ID: PAT_MRT3847_37186C.1
gactcgcagttgtattgttgagcaagggtttctctgtctgcttcgttcactttctctcgtttcaatcgaaaccaaaacaaacgcatgggcagaaaattcttcgtcggtggcaactggaaatgcaatgggaccactgaggaggtgaagaagattgttactactttgaatgaggctaaagtccctggagaagatgtcgtacaagttgttgcgagccctacttttgtgttccttactgctgtaaaaagcttgctgcgccctgatttacatgtttcggcacataactgtt

SEQ ID NO: 73279 - DNA, 539 bp, Glycine max
  Clone ID: PAT_MRT3847_37187C.1
cgacatattgcagaatcaatcaagggtttcgtggcttcctgcgcatctattcattctctctgctttcaattacaagcaccaaaattccgacgaatcagtcatcttccgaaacctcgcagtagctgtgaagccgaaaaattgataccctcgatgtcagtaggactagcccttggttgaagaggcttagcatgatggattcaaactcaccgtttctgcctcattgcaattctgatacaaaaaatgcatttcgcaagccttctggtgatgcagctaataggaattatcggcgtcggtcacctgttgaaggatcaccctcacctgatgctagtcctaggcatggacatagctcaagtccaaatctagtgagagaaaattctgcaagagtctctcaccattctaggaagtatgatgacagggaacaagaccaacagtatggaagaaatcactatggcagaagcagtgactctcttagacattctgatagacagtcattcaagagttcctatggtcactctcggcatgataagtatgcaaatgaa

SEQ ID NO: 73280 - DNA, 255 bp, Glycine max
  Clone ID: PAT_MRT3847_37188C.1
atattaatttactgaacagtgacaagttaaaaccaacatactaaatgtacaatgtatgatatccacctaaatggttaaaagaatgacttctgtaacaatcccagttgcataggtaacttatgtgacatgatgcaacggattgatgtattaacagattagtgtggagctgtggacccttctttaacgtgttgctaccatatggctgtaattgttggtgtttcaccattttcttgagctgttgtgatactaagattc

SEQ ID NO: 73281 - DNA, 331 bp, Glycine max
  Clone ID: PAT_MRT3847_37189C.1
ttttaataaagattaactttatatatttgatagagcgaaagagaggtatatatatagagaaaaaaagttatcaaagccggggaaatgggcgctctccatcaaggcgagggcgaccactttcaatcacttcctcccctgcttgagcactatcctcacatctgcagtagccattgagatctggtgctttaacctacattcgatacagtgttcggtgtgactaacacctcacgacccacccccaggttatgcgcttgggagtccagacaacaatgagcggtctcaaataaatcagattcaaaggttccaaatcgacttcttcatgaactggggc

SEQ ID NO: 73282 - DNA, 516 bp, Glycine max
  unsure (1)..(516): unsure at all n locations
  Clone ID: PAT_MRT3847_3718C.1
acgcgtccgccaatctcatgttcttgtgtggatggcatccgaaggtccatgtcaaccatttacactgttcatgcagctgatacacttgcttccatatcagaaggctatggtggattggttagtgctgaacaaatcaagattgtgaacgccatcaatgccaccaaccctttgacatatagaggcacccttgttattccactgccatgcacgtgttttgacaatgtgaataatgggggaaatgctatttatatgtcatatgtggtgcagagaagggagagcctgnggagcatagcaaccaagtttggtacaactgtttcggacttggaaactgtaaatggctttggggaagctacggtagatccaggagacattctatctattcccattgcagcatgttcatcagcaaccttgaattggtacgatgagagtatgatagtcccaaatggctcatatacattaactgccaccaactgcatcaaatgcacttgtgaaccaacggatatcacgttgcaatgt

SEQ ID NO: 73283 - DNA, 1912 bp, Glycine max
  Clone ID: PAT_MRT3847_37190C.1
cccgatttcttctctttttattttaaggcgcaacgctattcttcactcaaacgaactgaaacgacatatcgcagaatcaagggtttcgtttcttccttcgcacctattcattcttctatctgcttgcaattattaagcgccaaaataatcccaatgaatcggtcatcttccgtttcaaatttccgaaacctcacagtagctgtgtaattacaggcttagcatgatggattcaaacttaccatttctgcctcctagcaattccgatacaaaaaactcatttcgcaagccttctggtgatgcagctaataggaattatcagcatcggtcacctgttgacagatcaccctctcctgatgcttctaggcatggacatagctcaagtccaaatccagtgagagaaaattctgcaagagtctctcaccattcaaggaagtatgatgacagggaacacgaccaacagtatggaagaaatcactatggcagaagcagtgactctcttagacattctgatagacagtcattcaaaagttcctttggtcactctcggtatgacaagtatgcaaatgaagatagatatcgggagaggctgttgtctcgttctggacatgagtcaagggatgatcatgtgagagaagagagtgatagcaggccaaaaaactaccagtgcagtgtggacaagtattcacatgacaaatatgacaggtctgatcatagaagcaaagaaaaacgtagagatacatactcggagcatcagaaatataaagatatggattcttcatatgaaaaatctgcatctagcaagaggcatgcactgtatgatgaagtggagagggaggggcattcaagggactgggatggtcaaaatgaaagaagagattcccgccgaagttcaggggactacagaagtgaccaaagagatgagtcaggtccacaaagagactgtggtaaatctagtttaaaagaagcttataagagtgaacagaaggagtcaaatgatcaaaaccttccatgggaagagaaaagaaaacatgatgatactgagactgggaagggcaaagactggaaaactagaaaagcaggcgagcagtgtgctattgaagacaaagaatcttctggaaagaaactaaagttgtttgatcctgacaaggatgacaattatagaaaagatgatgaaagtaagacttcaagttcaaacctttctcacaagagcaaggaagatttatgggctgtcaagtccagtggctttgatggtgacaatgatctagatgcggcgaaaattgcagccatgagagctgctgaattggttaataggaacttagttgggcctggatgcttgactactgaccaaaagaagaaactgttgtggggtggcaaaaagagtacacctactgaagagtctggccatcgatgggataccgggatgttttctgatcgtgagaggcaagagaaattcaacaaactcatgggtatgagaggcgaagcaaaggtggagcagaattccaacaaccaaagcagtaacgaaattctccgtgctgagaagcagaaggaacttcagatggatctagagaaacaatacactgcaggccttcgacgaagagatggccgtacagttggcttagggctttaaccattctccggaaaatttacatcctttgacatttatgtgttaattatcaccccatgtttagggaggagctttttgcttgtttgctgtggacatgcttgggagtttatgaatcttatgttagggacatcaccacttggcatctgtttggagttcctgattttgacagggcgtgttatttctatggaatttcttatcgtgattgtatctaaatttgtttttcatatgcaactggtttagataatttggtatttggttttcttaaaaaaaaaaaaaaaaattctaaaa

SEQ ID NO: 73284 - DNA, 157 bp, Glycine max
  Clone ID: PAT_MRT3847_37191C.1
cgacacagtcgcaagatggataacgatgagccctacggcgatgcaatgatgataaaggcataacctactgcgtttcatcagggaagggactatttgggtatcaatacgtctggttcatctacctgtcctagaatattggacccttttctcccttgtc

SEQ ID NO: 73285 - DNA, 661 bp, Glycine max
  Clone ID: PAT_MRT3847_37192C.1
tacggctgcgagagacgacagaagggcctacatatatcccatccaatcacctccacattctcaccaatcctaccttctgaggagttgttgtggcttgtgcattggtaagtaattgtggaccaatatccctcaaagaatcatacaaatatcacattagtattattgattgagtaagtgagagaaggaaataagaagaaccaagagagaatcttgtgatggagtgatttggtttgacttcaacaacgcctcttacattaaccaaattcccaacgtcacccaatgccttgcggttcctaccatacaacaatgtcgcccattttaataaaggtgatagattgcttttgtttcaaaaactcaaatttacattcacaatgctcacctcaaagaccaaattcaccctatgtgcaatctacacacgaaggtcgcaaatcgatgaaagaaattgagggatttgtgatccacacacaatgatgagcaacttccttctccttagataaaaatgacgtctacgttgagaaaaataattaaaaaagataaataggaaaaaagttttgatatttattgacatccaattgactaatgaattaacttatatgcacaatgaggttcggatatatttgaacttaatttcaggctaaaaaataacaatttttaattttgc

SEQ ID NO: 73286 - DNA, 188 bp, Glycine max
  Clone ID: PAT_MRT3847_37193C.1
aaaagcatcatgggggctgcctttataaaatctcacaaaaagcacgccaaccattaaccggcgttttacacactacaaacttcttaaaaataacctcccacataataacctttcaattcaatcccacaaggccaaacttaatctaccatttcataaaaacctggtctcaattaacaatcgcaaattac

SEQ ID NO: 73287 - DNA, 184 bp, Glycine max
  Clone ID: PAT_MRT3847_37194C.1
ctttctttctcttctcattctctcacttcatctcatatcctacattttttccgtatcatcgttagttgtgatcaaatctctctttctctctctctctaactctcaccaatcttcaacgttacagttagtctcattgccaagtctaacccctttgcacggaaaatgtctctgctatctcacgggg

SEQ ID NO: 73288 - DNA, 2842 bp, Glycine max
  unsure (1)..(2842): unsure at all n locations
  Clone ID: PAT_MRT3847_37195C.1
ccacgcgtccgtatttcctctctctctctctctctctctctctgaacaagagccagcagccgttagggaaatcaagcacagctcaatcattgaatcttagcataaacacatacagaagaaggaaaagtggcaccctgggaggagctgatattgtaggagggtttggaagaaaaagaattttgttttgagatatatatacatatatgtgcaagtgcataggaaattaacacaaaaagatgacatggtgcaatgactctgatgaggatagggttattgaatcaacgacgccaacaataactattactcctaacactgatggcataaagctcaccgaagaaattagaaccataacatgcccctcgtgcggccataacattgaattcgcggtgaaagataagggtggaatccatgacttgccggggttaccagctggagtgaagtttgacccaaatgaccaagaaatattagaacatttggaggcaaaagtggcgtctgatgcatgcaagcttcatccccttattgacgagttcataccaacgcttgaaggcgaaaatgggatctgttatacacacccagaaaagctaccaggtgcttcatgttttacttaatttattttattttaattattttttgtctaattaattagtatagtttcgtgttttagaatacttattgcatatacacatcattgaattctcatttattgggagacacgtcttgatgtgcacgataccgcatgcatgaaattaattgttttagcaatgaaatgattttttttttctttgaaaaggatctctaatcataaggcggttcaaatttgaaaatgacagcagaacattttatgcactctataaaatgagatctcaaaaattaacttatgagaaaatgtttttggtttaaaattaaattttcttcatatttttagagatactaaagattttaatatgagctctcacttctaattattatgaaaattggtgataaatatgaacgctcatcttgacgcttaaaaatggttgcatcaaacacaagatcagtaagtaacacggggtacagattctaggcagagagcaaagaaaactttccggcaaataatccttgtctgtgttattcttaatatatgttcaaaggtagatacaaatagttgaatcatggatttgatttatataattaacttcttggtaaactaaatatggtgcaagtatgttcttaagtttgcaatgactaccaaactcatcaaaatcgcatcttatcttccattaaccatgtaggaagagaaatgtaagtgtcatcccttaattttcagcaatatttttttatattttatgtcatatttcaacatgataccaaatagaggattgtcgtcggctaattgtatcaacaaaagaaaaatgaggttgctgcctttttactcttaatggggagctttctcaatttcttactcgattcaacttttacaaatatacattcattttctcttatatttcatttgcatcacattttctttaattttatctctttttttactaaaatatctttttttttattttttttgttctccttctcttttcttatatatatatatatatatatatatatatatatatatatatatatatatatatatatatatatatatatatatatatatattagcaaagatggacagatccgccacttctttcacaggccctcaaaagcatacacgactggaacaaggaaaagaagaaaggttcacactgatgatgaaggaattgaaacaagatggcacaaaacgggaaaaactagagcagtttttgcagcagcggtggtgcagtaaaaggttttaagaaaatactagtactctacaccaactatggaaggcaaaagaagcctgagaaaacttattgggtgatgcatcaataccatcttggcagtactgaagaagagaaagatggagaattagttgtttcaaaggtcttctatcagacacaacctagacaatgtggcaatcccattataataaaggattcatacgaaaaaatgttgaatgatggaagtggccaagacaacattaatatatcattaatacctaaaactactgcaactcttttggattgctacactgctccttacatagattatgatcacgtccatgtgagtcataacagggaaagttcctcacaactaattattcccagctcggttgttcaagttgatggctcttatattcgcttaacaatggatgcaaagaaagcaagatttgaaagtaacactgggaagagattctaggcagagcagcaatgacaaagacttgcatataaatgttctccatattgtttcctttactaattgatcagtacgtaacattatttatatgtgggattagaatgaaggaatttcaagggttggaaaaataagttggcttccttattaagatcaatatggtgcaggcatggtggacttaatttcccataattgaccctggttgaagttgagagacaagcaagttaggtatatatatttgcggtactgtagtttgattttaattttagggtacatgtatattcgtaaaatgtgcttatagatattacaatagtagcagggatatcgtttattgactactcttcagaactatagtcagtctatatactgtattttgtctagaattgaattttgcaccccctcaatcctgaaaaaaatgctgagatgtttcattattattatattatgcgtgtcagctacttaatttgctgggaagtttgtcccttgtagttttcccccctgttttctttgaaaggtcgattgtaaaataaggtgaagaacagtagattttttttannnatggttctaaattgcggtt

SEQ ID NO: 73289 - DNA, 302 bp, Glycine max
  Clone ID: PAT_MRT3847_37196C.1
gggaaacaagcctcccacttaaacttgatttattaaaaaatgggcattggatattatgggttcggaaaacaaattactttttacaagatttgtttcaactcaaaatcgatcccccttagttttactaggggctttctttattccattaagcaaacaatttaattaaaattgcccttaaaatgaactgaaaaaaattgcaaaactggtgcgggttaatcaaatcacccacctggatttttttacaaaactgggggcaaaaatttttttaaaaacgaaacccaaatggttttggcccttttttt

SEQ ID NO: 73290 - DNA, 1708 bp, Glycine max
  Clone ID: PAT_MRT3847_37197C.1
ctctctctctctgaacaagacccagccagcagttagggaaatcaagcacagctcaatcattgaatcttagcataaacacatacagaagaaggaaaagtggcaccctggtacgattaaattctctctctttctgcaaatagagaagttgattcagaagaaacgagtccccaaagagacaaagctactagctctacctttcttcaccccttttcatctctatatatttttttttttttttgtattttattagggaggagctgatattgtaggagggtttggaagaaaaagaattttgttttgagatatatatacatatatgtgcaagtgcataggaaattaacacaaaaagatgacatggtgcaatgactctgatgaggatagggttattgaatcaatgacgccaacaataactattactcctaacactgatggcataaagctcaccgaagaaattagaaccataacatgcccctcgtgcggccataacattgatttcgtgaaatattagggtggaatccatgacttgccggggttaccagctggagtgaagtttgacccaaatgaccaagaaatattagaacatttggaggcaaaagtggcgtctgatgcatgcaagcttcatccccttattgacgagttcataccaacgcttgaaggcgaaaatgggatctgttatacacacccagaaaagctaccaggtgttagcaaagatggacagatccgccacttctttcacaggccctcaaaagcatacacaactggaacgaggaaaagaagaaaagttcacactgatgatgaaggaagtgaaacaagatggcacaaaacgggaaaaactagagcagtttttgcagctggtggtgcagtaaaaggttttaagaaaatactagtactctacaccaactatggaaggcaaaagaagcctgagaaaacttactgggtgatgcatcaataccatcttggcaatactgaagaagagaaagatggagaactagttgtttcaaaagtcttctaccaaacacaacctagacaatgtgttaatcccattatcataaaggacccgtacgaaaaaatgttgaatggtggaagtgtccaagacagcacaaatacatcaataactaaaactactgcaactcttttggattgctacaatgctccttacatagattatgatcatgcccatgcgagtcataatagggaaagttcctcacaactaataattcccagctcggttgttcaggttgatggctcttatattcgctcaacaatggatgcaaagaaagcaagatttgaaagtaacactgggaagagcttctaggtagacaagcagtgacaatgatttacagcatgtcctccatattgtttccattactaattgagtaatagtatttatatgtgaaattagactgaaggaattccaagggttggaaaaatataggtttttccttgaattattgagatcaatatggcgcaggcatgatggactttcccataattgaccctggttgaagttgagagacaagcaagaaggtatatatatttgcggtactgtagtttgattttaattttagggtacatgtatattcgtaaaatgtgtttatactttatagatattacaatacgtggtagggttatcgtttattgacaactcttcagaactatgtcagtctatatattatgttttgtctagaattgaacttttcaccccctc

SEQ ID NO: 73291 - DNA, 593 bp, Glycine max
  Clone ID: PAT_MRT3847_37198C.1
ctgcttggggggggggggggggccaaaaacggatgcaggcttacacctgtggtaggagcggataaccgagataagtgatcccgggtattaccaaaaacaaaagagacaataatatgcaggcttggggttaggattggccgaaaagcggacacatgcggataggaggaagccaaacaggtggccaatgggggcagcgacacctagttgtgaaccgtaggtggttcatgcaaaagctgcctgccggaccggggccaacccctaggggagtatggctgactaggataataatacgccatagacggccgtgagtgctgctagtggtggcaatatatagtacattaagcgcgagctatggtataatggtatgtgtgagctaacaggttggtactatgccagttaagacggttaaataggggttgctatattagaggggttaactagagaaacgaacatgggccttataggtgcagacagacaaattatgcggtgggggtttatatagcagggtgacaataacaatgttagactgcgaacatagtacaggtatgcaaaataagctggttagaatagatgtgccacatagcgaggtagac

SEQ ID NO: 73292 - DNA, 302 bp, Glycine max
  Clone ID: PAT_MRT3847_37199C.1
ggtactactgtacgtgcgagcatactaacggaaagaggcatgcaacttcatttgcacatgtgatccgtgacataagttgggtctacacgaagtcgttatcactatccttccattttgtgctgctcgagtcactttatgtcctactcagagaggcaacccagcgtagtgtctagcgcacatgttggagtacagtgcgatgtagttcgcctatactcattgacacgtggaccaatgcggatcagggttacgtatgagaagcaggcttgtgctgacgcagcatggatcaacaaagacgatccttt

SEQ ID NO: 73293 - DNA, 449 bp, Glycine max
  Clone ID: PAT_MRT3847_3719C.1
ctcttgggcttcaagttcttgttgcattttagtgtcatcattctttcgcttcctttgaagccttgataattcctctacgtggataaccctcccgtcagatggcattagagggctgtcaatcagagttattgggtgagccccattatgaatgtcagctgttacatcaacaaatgggttctttcgcggaatgccatcattttctcctgaagcagatggcaaaagatgattctgcctaccttgccgagacaaaagatttagaccacgtgaatgaccttgaattccgtatccataaggtgcagattcattcccattgaggaaagatcgtccactagataataaagtcctagaatgtggaatgccatcaagggaactatagtggatagagggggcaactctctcatatgtctcatttctaacagatggcttctctggaataaattggtattcgt

SEQ ID NO: 73294 - DNA, 616 bp, Glycine max
  Clone ID: PAT_MRT3847_371C.1
cctcacccaaatgggggaagaagcagttaacattgcatctgctgctgcacttgctcctgatgatataatattgcctcaggtttgcctacaatagcacctggtcatgcatgttcattagccagacacttcaaattcccttatgcttctattaaaattcaactcctttttatttatttattattattattattgtggatctctaatgacaaaacagaaaaattgaaagtccaaaatatttcagcttcatgtagcctaactttttcttcactgataaatgagcaaaatgaaaagaaaaataatgtagcaatatattctccaaaacactgttccaaactggcacaaacttttttttacagatctggcacggacttaatgagaagaaaacagaaaattttgtgactcttctcttttaatgagctcaacttatgattatgtaattttctataaaccttaatcaattatacaaaatgtgctacaaagaacatgtcactagggagaaattattacataatttaaaacacggtcatgagtcttttttttttttcggaaggaatggttggctaatttttatatgatacataaactgagttttacaacttatcaaattatgtgtcat

SEQ ID NO: 73295 - DNA, 431 bp, Glycine max
  unsure (1)..(431): unsure at all n locations
  Clone ID: PAT_MRT3847_37200C.1
accaagcgttcgcccacacgtacagacacgcgttcgctacgctttctatagacaggagataggtgcttctacgaccatcaccttctccagctcactattgttatctgatacttgcaggacacaggacggaatgatcctgctaattgcttgttggaagtcccaagaaaaggtctcacaaaacgtgctacagctgaccttgccggttccttgaaaataatttctgcagctaagcctactatcgcagccaatctatctcatgcacgaagtattacatgccaacttgccagtgccggggagaacgctattacttcacgcatgatgtgaatgaaaaagggtcaaatctaatgatgatgagaggagtgacncacaaggactttgaccctgaaagatattcatgatgatgggacgaggatgctgcactaataccggga

SEQ ID NO: 73296 - DNA, 1585 bp, Glycine max
  unsure (1)..(1585): unsure at all n locations
  Clone ID: PAT_MRT3847_37201C.1
ggctcgagcacgccagcgttgtttcgccatggcgacgcatccgcaaactccaacctcgtcgaacgcgttctcgttcatctccaagggctggcgcgaggttcgcgactcggccgacgcggatctccgtctgatgcgggaccgagcgaactcgttcaaggacctagcgacttcgtttgatcgcgagctcgagaacttcttcaattccgccacgccgncgttctccgtgccggcgatgcgctctccgacgcccaaggagatcgagttcgtcaagagtctgcgccccaagctgtcggagattcggcgcgcgtactcgtaccccgacttcagtaagaaggttctggagaagtggcgccctaggccgcagattagaccttccttgattgtatttgtgacactctcaacggaggaggcaggggattgtggattttgaaaagaggagaaggaggaggttgaggcgtccggaggagtggaagggcgagggtgagggtgaatctagggattgggaaccgattcgagtcttgaagactcggctcaaggagtttgagaaacgtggttcttcttttgatgctttcaagaacagtgaattcgtcgagaaattcaagtctagcttgaaatcaatgtgcaaggaacctctggagtcaaaggaagtgccaccattggacgtacctgaacttctggcctacattgtaaaacagtctggtccatttttggaccatcttggagtgaaaagagacatatgtgacaagatagtagaaagcttgtatagcaaatgcaaaaaccatcaactattgcattccctctctggggaagaatcttctgttctagggaatggaaacataaatgatgaattggatttacgaatagcaagtgtccttcagagcacagggcaccggtatgaaggtggattctggacagaccatgcaaagcatgatccattggacaatgaaagacatgttgcaatagtgacaactgctagtcttccttggatgacgggaacagctgtaaacccactatttcgagctgcatatttatcacaatctgcaaagcagaaagttactctgttggttccatggctttgtaaatcagatcaagaactggtttatcccagcaatctcacttttacttcaccagaagaacaagaagcttatatacgtagctggcttgaggaaaggattggttttaaggcagacttcaaaatttctttttatcccgggaagttttcggaagcaaggcggagtataatacctgctggagatacttctcaatttataccatccagggatgctgacattgctatcctggaagaaccagaacatttgaattggtatcatcatggaaagcgttggacggacaaattcaaccatgttgttggtattgtccacacaaattatttagaatatatcaagagggagaaaaatggggcactccaggcattcctggtgaaacacataaacaactgggttacaagagcatactgccacaagggtcttcgtctctcagctgctactcangattaccaaagtctgtaattgcaaatgtcattgtgtgaatcccaaattcttgaaaattggagaaaagattgctg

SEQ ID NO: 73297 - DNA, 563 bp, Glycine max
  unsure (1)..(563): unsure at all n locations
  Clone ID: PAT_MRT3847_37202C.1
tacggctgcgagaagacgacagaaggggaccaacacatccacgaactaataatctctgtgccacctgcagacattctactcacaaaagccaactctctccaccatctgaaacatgcagcgtcaaagtcacatttcggttgcaatttcactaatatgcatcctgttttgttccacattaactagtgctcttgatgaacctgagtatggttacaatgaaaaaagtgcaaatgggccctaacattggggtgatctgaaagaagaatgggcagcctgtaaaatagggcaaattcaatctcctattgatttgtccactaatggagtggaagtgatccccaagttaggggggctaaagtactggaactataagcctcaacatgctactgtctccaacaggggtcatgatgttgcggtcatttgggaaggggatgctggctcaatagaaataaatggaacacctttcttcctccaacaagcccattggcactggcctgccgaactaccatcnacggccgcaggtatgactgggagntgcacatggttcatgttagcccacagcctgatgg

SEQ ID NO: 73298 - DNA, 733 bp, Glycine max
  unsure (1)..(733): unsure at all n locations
  Clone ID: PAT_MRT3847_37203C.1
ccacgcgtccggngctcctacaccacacgtccgcatcattctggaaaggttgttcgggtttcgccatggcaacgcatccgcaaactccaacctcatcgaacgcgttctcgttcatctcgaaaggttggcgcgaggttcgtgactcggcggacgcggatctccgtctgatgcgggaccgagcgaactcgttcaaggacctagcgacgtcgtttgaccgtgagctcgagaacttcttcaattccgccacgccgccgttctccgtgcctgcgatgcgctctccgccgcccaaggagatcgagttcgtcaagagccttcgccccaagctgtcggagattcggagggcgtactcgtcccccgacttcagcaagaaggttctggagaagtggcgccctaggacgcagattcgaatcaacctttccgcgattaagaacgcgattgtgtcggcggaggaggaggaggaggggattgtggattttgaaaagaggagaaggaggaggttgagtttctgggaggagtggaagggcgagggtgagggtgaatctagggattgggaaccgattcgagtcttgaagactcggctcaaggagtttgagaaacgtgttcttcttttgatgctttcaggaacagtgaattcgtcgagaaagtcaagtctagcttgaaatcaatgtgcaaggaacctcctggagtcaaaggaagtgccaccattgggacgtacctgaacttctggcctaca

SEQ ID NO: 73299 - DNA, 418 bp, Glycine max
  Clone ID: PAT_MRT3847_37204C.1
gttgcagcacggtttagtgtaccgtgagcacatcaggtaacctggatactatgaggggcgctgcgggaccatggggaagctgcctatgtttggctgcactgcatgcttatgaggtgtggtaggagcttcaagaggctaagactgcataccccaatggcttgatccgtatcattggatatgacaacggtcgtcaagtgcagggcataagattcatcgtctacaagtccccaggcttttaagtcattggaaaatttgcaacgcatgtgtagccaccccactttgattgttgtacttaaactacattaccatacgatcatgctttatgagatgctatcatactggatgttcggtttatgttcttggactataatggctattaatggatgagcactcttgtatcccatactatgaaaaacat

SEQ ID NO: 73300 - DNA, 432 bp, Glycine max
  Clone ID: PAT_MRT3847_37205C.1
gtggaagcttcatgcacaatttcacatgttttgtcttgtcactaaagatgagggtgtcatgtgaaccaatggtttgttatatttggttcttttgaatatgacacccttcttcaataatttgagtttaaaactgaagatctatcagcctatgtattatttgattattttgcaagaggttataggttcaaatcttgtgtcattattgtaacaccctctcccaaaacaaaaagatattttgtatatagtatctggattagtgctgttaattaattgcatgtgtgttgaatatctcaaggctaataaggagcgttatacatacagttcaacaaagacaaagctactgctacatatggagtgctgcctgctgccaatgtccctccaccttatgcccttgcatcaatttcagccttgcagtttgaccactttggacac

SEQ ID NO: 73301 - DNA, 302 bp, Glycine max
  Clone ID: PAT_MRT3847_37206C.1
tggacagatggattgatgagcactcacatgccatgctacttcagctcgatcagcaaaggtgtggcaaccattatggcctcgtactcgacttggaatggactaagaaatccatgctcagcaggatcgtattactggcttcctgaataagactctccatttctcgggctttgtcaattcagaatttgagggtcttgagaagatcacctctccaactcgtgcatgtaacactgagtcacttgagcccggagtttctgcaggcattgacatgttcatggtttcaaagcattacacacaactcatag

SEQ ID NO: 73302 - DNA, 476 bp, Glycine max
  Clone ID: PAT_MRT3847_37207C.1
aaagcaacaaaaaacccaaaacccaacttaaaaacaaacgggaacaaacacaaacatatattttaatttaaaaaaaaaaacgggtatagggaaataggggggggcactgggaatttattaaaaaccaactaaaaactactctaactacaaacattaaatttctcaacccccattcaccaaaactgggccttttttccacctttcacgggaaaggccattaaactggccgggtccaccaaaaaaaccaccttgctccgccgccccgacccattttccggggggggggaggttttctttaggagcgagggggggaaattggggcacgaggaatgcaacaagagccacgggtcaatgcccctcacggggaaaccggggttgcatttaggcaacattcaaaccttggcccctttctcgaactcgccgaggcatagggggcactccgccgccggaatagggttttcgcctccgggggggcc

SEQ ID NO: 73303 - DNA, 121 bp, Glycine max
  Clone ID: PAT_MRT3847_37208C.1
ggctaaacagcttttgatttgttgcaaacatgcaaagcaacatggatctaaactgtaccggctttggcctgtgctaatagtaagaacagttgtacaattttacacatggctcatttcaaac

SEQ ID NO: 73304 - DNA, 260 bp, Glycine max
  Clone ID: PAT_MRT3847_37209C.1
aaacaggaaaaggggcatcacataaatacagagcacccaaggggaaataccaaggtgcgcaaactataaaaacccgttacggccgatcgtcccacactggcacttccgagcagaactctaccaaagacgatcccattacaggaatagaaatggaccccctgttcaattttgactggcaagcacaaatctactccactgaaggaatagccggatgcaccaaaaaaagcacacaacaccaccaaaacctcccccgacaccca

SEQ ID NO: 73305 - DNA, 1158 bp, Glycine max
  Clone ID: PAT_MRT3847_3720C.1
tgccagcctagttccaatacttttggcagcgaagtatcgtccacatggggtatataaggatgcacgtagtattttggtgatacataatatagcacaccagggagtggaacctgcaattacatatagcaatttggggctacctccagaatggtatggagcactgggatgggtgttccctacgtgggcaaggacacatgctcttgacacgggagaagctgtcaactttctaaaaggtgctgttgttacatctgaccggattgttacagtaagcaagggctattcctgggagataacgactagtgaaggtggatgtggtctacatgatttattaagcagtcgaaaaagtattctcagtgggatcacaaatggaattgatgtcactgaatgggacccgtcatgtgataaacatattgcttccaactattctgctgatgacctttcggggaaggccgaatgcaagatttcgttgcagaaggaattgggtcttccagtgaggcctgattgtccaatgattggattcattggaagactggactaccagaaaggtattgacctgattcggttggcaatgccagagctcatggaagctgatgttcagtttgttatgctaggttcaggaaaccctatttatgaagactggatgagagcaacagaatcagcttataaagataaatttcggggttgggtgggattcaatgttccaatatctcataaaataactgcaggctgtgatatactgttaatgccatctgcatttgagccctgcggactgaatcagttgtatgcaatgagatatggaactatacctgtagttcatgaaactggggggctaagagatactgttcataattataatccctatactgaagaaagcaaagctgaaagcactgggtggacattttctccactgacaaaggatagcatgttagcggctctaagatatgccattcaaacatataatgaacacaagccttcttgggaggggttgatgataagaggcatgacaagagattacacatgggtaaatgctgccactcagtacgagcaagtcattgagtgggcattcaccgaccctccctattgctgaaagctgaaatgaagtttgcataaaagatgatctacgcaagattttctttcaatatactcaggctgcttaag

SEQ ID NO: 73306 - DNA, 404 bp, Glycine max
  Clone ID: PAT_MRT3847_37210C.1
cacacggacaaggactaaattttgtgttttcatctttaagggagacatttattaacaaattacacattggggaacaaaagtgactatttaaccatggtaattttaataaactattttttgagtaaataaaaggccttattcttaaatttggtttaggcctctcaagaccttgagattccctggccattgtgccaacaatttctatggtgtaagttttggttttggaaggctgccaaattattaatgtggaattggctgtatactataacaaaggggtttttgtattcaatcttatcagttgtttagcttagggagtagtctaatttggacttgataggaattggttgggtgttcttgacagtttccttacatctagaacatttggtggtttttaagtcattttt

SEQ ID NO: 73307 - DNA, 581 bp, Glycine max
  Clone ID: PAT_MRT3847_37211C.1
tcgacccacgcgtccgcaatttttatcaacgggataaaattaaaatatcttagaaaaatatacatcccatttcgggtggaagaagagaggaataggaaggaaaaaaaggttgggggagaaagtgatagatgtaataagaacccaagaaaatgaagtaaaaatgtgataaaagataaaataaatgtatgtttataattacagtttaataggtacacaatgtgagtgtaatttttttttcatcaccaactagatatgatctctaagatagtcattacaaatattaataatatgttgtttataattaaatgataatataaaaatattttacactatgtaaatatttatcttattttctcttataataatttaaatatatattttattattaatttgggaagagaatttctaattcaaaagattcttcagtatcttgaatttgtgatagtttctaaaagcgttaatcttcaccagaactaatcaaaagatcaagacttttttttttggtgctaatcaagagtagacttgtaaagtaatgtaaatgataagaaagcagagaaaagtacaaaattaagagaatacag

SEQ ID NO: 73308 - DNA, 426 bp, Glycine max
  Clone ID: PAT_MRT3847_37212C.1
gaactggttaaggaaacccttttattaagaccttaaatcacaggcttcaagattattccattccccacactttttagaaaggcttattactattaactattaaagctttggccaaaagaaaataccctgtggggcaattttttattcagctttaacttaagtattttcaatggccgccaaaataatctttggcaccattttggattaaccctggaagggcaccaccagggggggcagcttccatgggtttaattttttaatttcttacaccttggtggtccgggttttaataggcggaaaggggccctcaaggggctgttctaccaaaggaaacagggtggttagaccaagcagaatccaattcaacagtttgggctgtgctacatgcaacactggctcctccagaaccagtgagcctagctgagt

SEQ ID NO: 73309 - DNA, 352 bp, Glycine max
  Clone ID: PAT_MRT3847_37213C.1
aggaaaaggtttggggatcccccctaaaattgggagtaaacttcaaggtttaaagctaaaattcaaaacttttaaaggttaagaacggactggcttagctctgggaatcagaactaaaaaatttttggccggggccttataccaagactattggtctaaccattgccttattgggcccaactaaaaccccgcctccaaaactcattggtcaaactcgggggggtctcccgggtttttccccttgaaaacttttgtagggctcaacagggggacgggagttagctccagcatacactggtttcgcaccaagctccttcttaatttttaagagctgggttttttttacaagacc

SEQ ID NO: 73310 - DNA, 199 bp, Glycine max
  Clone ID: PAT_MRT3847_37214C.1
gttgctcgaactcaacaaacgcgtttgcattttcctagccggagttacactacggaggggtcattaacgaaaacaaagtcaccttacattccgtgttgcaaagcttagaacaaaccgactgatttagttacagggacatgacggatccctcggcggaacacacagaaaccatccaaatgatcattgtgggaaacattaa

SEQ ID NO: 73311 - DNA, 279 bp, Glycine max
  Clone ID: PAT_MRT3847_37215C.1
gcagcattcacaataaagcagcccttccctcaatgtcagccagatttgcatcccacataaatgcttcctcacattatggaaatgtactttttctatcaacagagtagaatgaaactccaggcttctaattaatcttggctgacatttgatttcatacccaagttaaaggcaagaagcggtggagcttcccccatgtacatgaccacaggcaaatctctccattaatgtcaaattgcatctgtgcatcttattgtcactgccacatgtcagtcattaatg

SEQ ID NO: 73312 - DNA, 271 bp, Glycine max
  Clone ID: PAT_MRT3847_37216C.1
cggctgcgagaagacgacagaagggatagctctaatggtgcagcggacttgacatcatcagaacaaaaacctcgaaaaaaaaaagtgattatttctcatgaaaacatttccaataactcatttagtaatgtctaataataataataacgatgataagtcattaccacaataataacggtggggcagtatgagtcaaatttaaggttttgtatcgcttgtccctgcgcattatgttatttgaaacacaaacttatcatatggccctccaagt

SEQ ID NO: 73313 - DNA, 269 bp, Glycine max
  Clone ID: PAT_MRT3847_37217C.1
ccccccaaaaggaaaatggcttcccctaaattttttttggaaattttttttccaaaatctggcaccaaaaaatttgaaaaaacctttggggggggggaattttttgcctcccaaaaaagggcccccaacaattttttccgggcgggcggggagggattttctcaggattggaaaaatctgggttcaggggggatgggggtaacccccttttgggcgggttttttggaaaggggggtcccttttggacggaacaattggggccctgtttt

SEQ ID NO: 73314 - DNA, 694 bp, Glycine max
  unsure (1)..(694): unsure at all n locations
  Clone ID: PAT_MRT3847_37218C.1
tttttccnangaaaaattaacaccaaaagggtggctatatagggggaattggggtatattttaacaacctaatgggaacttgggggttaaataaaatattttttaccaaccccaatatcaacaaccaccataaccggagggttgatctcctatgacaagaaccctgggaaccccggcaccgaccatcatagaccccttttttgaaaaagctatgaaagggctatattttcacatttggggtaacagccctaaaaaggaccggccttaaacccttaactgggtagagcacattttaaaaccctttaagaaccctatgggaggctgaaccgggcatttaaggaggcccccctaccgattgggggggaactgggaggggaagaattactggggcaacttttaaaggatttcaccccacaggctgagggccgggccaaaaaaaaaggcccaaaaaaacggtctttttctggtgggataaccccgggaaagggtgacccgggtaaaccaattggtcacccctccctcaattctcccaagggcactattaaaggcccggngnnacccactggaaacaccccacactttggaagaaccggcgataaaggggntaaattttaaagggaatgnnnnccaaaaactctagnnnnnntaaaggnagtgggannntaatagaccccaaaggaggantatattattt

SEQ ID NO: 73315 - DNA, 661 bp, Glycine max
  Clone ID: PAT_MRT3847_37219C.1
acgtgatccagtgaggcgcatttcaaccaatcatggtgttttttccgaccaaaagagaaggcaatgaataaattaatgaactcaaactaaaacaccaaggaaaaaaaaacacaaaatataaaacacaaaacacaaacaaagagagagaaagaacaaagactgttttgtttctctaagttgttgttgcagttagcttcccgagcaccgtgtggtcgggtattgtattgtattgagagagtgatttgtaggttctttctgatcactgtggtgcgtccattgaagaggaaacatcaaacatgggttggattccctgttctggatattctggcactaagaacaaggttgagaagatggaagttcaggatagtctcgttggtcagatcaaagccaccccaggaaagttgaaaaggaattcatccacgaaatccaaagatacatctaaaaatgggaaccctgatcacattgcagcacagacatttgcgttccgtgagttggcaactgcaactagaaattttagaaatgattgtcttttgggagagggaggctttggtagagtatacaaagggcgtttggaaagtattaatcaggttgttgcgattaagcaacttgaccgaaatggactgcaagggaatagggaattccttgttgaagtgttgatgtt

SEQ ID NO: 73316 - DNA, 325 bp, Glycine max
  Clone ID: PAT_MRT3847_3721C.1
aaaaatattggactctttattcacaaggaaagctatacaaaaaatgtttttatgagacaagacccggaaacaatcttttatattcgaaaaaaaaggtgaaaaaacctggatataccacggtatccgagtaacctatttggcttatctggattcaagaactgcccaattgcccaccccccacgaacttcaaataagaggggtgggcgatgtaattcttaagcttccacaaaccccctgcatgtttttccccaaggggacactacaattttttggatctaagaaaaaaaaaactttgggccgttaagggaaaaaacaaagctgggcc

SEQ ID NO: 73317 - DNA, 373 bp, Glycine max
  unsure (1)..(373): unsure at all n locations
  Clone ID: PAT_MRT3847_37220C.1
ccatgaggagcggatggacaaagaagctaacaggggcactccgggaaagggtaatctggctgctgaagagacaaccgggacaatgggcaagcgtatgggcaggagcagcggagagaatgaggaagccaacaggcgagcgcttagggtgttgananacacagcgcccggagcaccgaaagatgtcagtggcgccagccacagggaggaagctcggcaccagagcaaagctgcaggggagccccataggggaagtcatgaaggaggctggagtgccgccgggcagcagggggacaagggcacaggggagcgtgctggaactaagggagaaaccgcggcacaggggcaagaggggcatgggcagcggggcagcaag

SEQ ID NO: 73318 - DNA, 432 bp, Glycine max
  Clone ID: PAT_MRT3847_37221C.1
aaaactgtaatgaatttctttttattattcccgtttccttaattgactaaccatctaatgctctaccctattcacagaaataaataaaccgcatggaaagcccctccacaaatgtctcagtacgtaaaatcatgaattaaaacaaaaacaaataccccaaatccaaaaaaaaaaagaaaaaagaatgtggtgtaattgtacaacaactagaacctaattaacctagccaatcaacatcgagccagctcttctgggatccgtgacattgatcttccaatgcatatctggcaaccctaatttcccagcctttctcctttcccagttcaactccattcttcgttgcctcgttaacctacacagcttttgcaagttctcgtccatagcatcgtgcaccttccaccaccgtcgatgtgccacgtcgctcgcgtacac

SEQ ID NO: 73319 - DNA, 636 bp, Glycine max
  Clone ID: PAT_MRT3847_37222C.1
aaaatcatccttcactcttttaatcaacgttgcagagacattctttgtcttttacactaaaaccaaaactacggaggatggacactatacagacacatctcgccttcggattttaagtgtcgtgtcttatgcatgagcatgactattcaatacttgtctgacaaagatagttcaaaaaatataaaccctttttttttaagtgttagtgatttcatcctagattaaacattgacctttagccatgaaattatttacatcccacttctatttcttatttcagtggaggatatatccatgcggaactgttcagctggaatggagacgaacatgtcttttagttcttttggaacatcaatatcgtcaagaaccttgaaagcaccatcaacattccgaccacccacaaggaaagtgcatcctgtttctttacaaccaacaagtatcttcagcatcttgttgtagtcaccatcgtagtattcagggttaataagcctcactgccgtgtcggccccaattacaaaagcactgcctgggaaaagttcagccttcttataaaaataaggctgattggatataattaccgtctttccaactttttcaaattgcttgatgcgatctttgatctgagacactgataat

SEQ ID NO: 73320 - DNA, 456 bp, Glycine max
  Clone ID: PAT_MRT3847_37223C.1
ggccgccctttttttttttttttaaaaagggttaaacctagaattttaaattcccaactttctttaattattcctggaccccttattaacctatggaccacgggtttttccttttggttttattccattagaatggaatttaaaataacctcttaagtcccaaaattctccttggttttaaaaccttgggggattcttaaaccctctttcctttccttttccttgggtaaaaatggattaaaccaccagcaaaatggctgcagtggcccctttccttgctgaggcattcaaaaccttaattcctaactgttgcggggggggaaccaaacttaatcctaacacagcctttggctgaggaaaatggggaagggggtgccaaggaaattgacccaaacctctaattacctttactaccaaatggttaatctggaataacagggtttgaagccctgctag

SEQ ID NO: 73321 - DNA, 553 bp, Glycine max
  Clone ID: PAT_MRT3847_37224C.1
aaatcatccttcactcttttaatcaacgttgcagagacattctttgtcttttacactaaaaccaaaactacggaggatggacactatacagacacatctcgccttcggattttaagtgtcgtgtcttatgcatgagcatgactattcaatacttgtctgacaaagatagttcaaaaaatataaacccttttttttttaagtgttagtgatttcatcctagattaaacattgacctttagccatgaaattatttacatcccacttctatttcttatttcagtggaggatatatccatgcggaactgttcagctggaatggagacgaacatgtcttttagttcttttggaacatcaatatcgtcaagaacctgccatcgaaccacaaaatggcctcactaacactgaacttggaaacgaatatcacaattagaaacgctctttgcttatgcagtaataccttgaaagcaccatcaacattccgaccacccacaaggaaagtgcatcctgtttctttacaaccaacaagtatcttcagcatcttgttgctcgagcc

SEQ ID NO: 73322 - DNA, 267 bp, Glycine max
  Clone ID: PAT_MRT3847_37225C.1
cggggtgccggcctttcttttttcttttacactgtgcgtaagttggaaagctcattgccctgacggtaaacggacgatcgacgactccgctactaacggggaaatcaaccccggcgtctttacattttccctactagaagacatcccgtcgtcgcataccgcgggacaagccttagcattacatgccctgaagacgctcgtgctttctttttaccggagactgaaggacaacatcgcagcgcgcctcaagtgccctcacccaccgga

SEQ ID NO: 73323 - DNA, 193 bp, Glycine max
  Clone ID: PAT_MRT3847_37226C.1
ccaaaaaccgatgatgtatatacaccttttagcctttatccctggccgagacagctacatgtgccggtactattaaaccctgtctttcactgcactcatagcattaacaaaccaagtaacccacactgaaatgaacaaccaacagcaatgattctttgaccttaaccgaaccttcttcttcaccaccaccacc

SEQ ID NO: 73324 - DNA, 281 bp, Glycine max
  Clone ID: PAT_MRT3847_37227C.1
cccgcagacggaaactcaacaacagacccaacaaggtaacaataaacgcaaaaagggcaaccccgggggtaaaaaaacaagaatccgggaccccgagggaaagcttaaaaaagggggaaaaaaaaaaaggcaccaggggcagggacaaaggcgcccaaggcccgaaccattatcagtaaagacccaaccttggtggaaaacaaaccatcaagcattgaaaacgaaaataatacaaattaaactggaccacgttggggatatgaaaacccaactcaggccct

SEQ ID NO: 73325 - DNA, 353 bp, Glycine max
  Clone ID: PAT_MRT3847_37228C.1
ctcccacaccttcactcaatccccacaaggtttttccatttaatattattaaggttcaattcagatatctcttaaagctcttctggaaataaattctataccaatgcttcaattacaagaaccatctctataaaaattctctctccattatttttaatttttcagatctagtctttctctttaacttatttattaaccctttccattgttattgagatcattaatctaaaaaaactccacattgtgtatcaaatttgaatcaaaattaacacacacaatttaaaaactctaaatcttctcattaatatttaacttaatacacttactaaatctacatatcctcttaaactttc

SEQ ID NO: 73326 - DNA, 2464 bp, Glycine max
  Clone ID: PAT_MRT3847_37229C.1
aaaacccaggttttggtccggaattcccggctcgacccacgcgtccgcctgcgtttcactcggccaccccgcactgctgcctcactctctcactctctcaggagtatataatctgagcgatgtcagatctcgaggctcccttgcgccctaagaggaagaagggagtgtataatctgagcgatgtcagatcttgaggctcccttgcgccctaagaggaagaaggtttgggtggactatttcgttcagtttcgatggatccttgttatttttgtggtccttcccatctccttcaccatttatttccttacataccttggggatgtaagatctgagtggaagtcctataagacgcgtcagaaggaacatgatgagaatgtgaagaaggttatcaaacgtctcaaacagaggaatccatcaaaagatggtcttgtctgtaccgctcgtaagccctggattgctgttgggatgcggaacgttgactataagagagcccgtcattttgaagttgatttgtctgctttccggaatgtacttgagatcgacaaagaacggatgattgcaagagttgagcccctagtcaacatgggtcagatcagcagggtgactgtacccatgaatctttcccttgctgtagttgcagagcttgatgatctaactgtcggtggtctcattaacggctatggtatagaaggaagctcccacaaatatggtttgttcgctgatactgttgtggcctatgaaattattttggctgatggcactcttgtgagagccaccaaggacaatgagtactctgatctatactatgccattccgtggtctcagggaacactcggccttcttgttgctgctgagatcaggcttatacccgttaaggagtacatgaagctaacctataaacctgttgttggcaccctgcaagatcttgctcaggcatattgtgattcttttgctcccagagatggagaccaggataatgaggagaaggttccagactttgttgaaggaatgatttatacaccaacagaaggtgtgatgatgacaggaagatatgcttcaaaggaagaggccaagaagaaggggaataagatcaatagtgtaggatggtggtttaaaccatggttctatcagcatgcacagacggcactgaagaaaggagagtttgtagaatacattcctaccagagaatattatcacaggcacacgagatgcttgtactgggagggaaagcttatcctcccatttgctgatcaattttggtttaggtatctgtttggctggttgatgccacccaaggtttctctcctcaaggcaactcaaggtgatgctataagaaactattaccatgaaatgcatgtcatccaggacatgcttgttcctttgtacaaggtgggagatgctttagaatgggttcaccgtgagatggaggtataccccatttggctctgcccacacaaattgttcaagctgcctgtcaaaactatgatttaccccgagccaggattcgaactacaccgcaggcaaggagacacccaaactgctcaaatgtacacagatgttggagtttattatgcaccaggtcctgttcttaggggtgaggtatttgatggggcagaagcagtgcgtaaaatggagaactggttgattgaaaatcatggttttcagccacagtatgctgtgtcagagctgtccgagaaaaacttctggaggatgtttgatgctggtttatatgagcatactaggaggaagtatggagctgttgggacctttatgagtgtatactacaaatcaaagaagggcaggaaaactgagaaggaggtacaagaagcagagcaagcgcaccttgaaactgcatatgcagaagttgatcaaccagtagactgattttggattttgattcatctcatggtagtagaattttattgcatctcgtttcccacatatgcaggagttgatcaacgggtagactgattttgaattttgattcatcatatgatagaattttattgcatattcattccgtatttatcgttttgccttttgtaattttggatctctggcttcggatagcctcagttgctgatactcttttgctgtttccaatgtctttaatgaattatgtggacttaacttttcaagtgctcaagactgaaatggctgtgtgctcgagtgtatctttaattcttaggtacaaataaaatgcatctgcagacgtgcaacgtcctaatcaaaatcctttcacgggatgttgcacgtacatatatatatgatgcattgtgtatcccagtgacctggtcctaccacatttggatccttgaaaatttacctggcttgtaatctactctttggtttggattattaaattcagtccgaaaattacttgaaattctactcgtcaaaaatatggttgacatgaatgtgaaacaagttcgattaattcaaaaaaaaaaaaaaaaaactcgac

SEQ ID NO: 73327 - DNA, 262 bp, Glycine max
  Clone ID: PAT_MRT3847_3722C.1
attcaaaggttgggttttatttgaaataaaagggggggcaagccaagagaggatacaccaaagggggcatacaaagccaaaaaactaaagtgtaattgtttctagttccaaatacaattatattgccccaaaaaggattcttttcaaaaaaaaatcccggggcaaagccattcatcgaatcaaaattggggaaggccccccctttcactcccctttaaataggaagaaaccaatgattttcatccacgaaagtacccccttg

SEQ ID NO: 73328 - DNA, 357 bp, Glycine max
  Clone ID: PAT_MRT3847_37230C.1
cgcacgcgtgcgtgcaactattcccggatcacgaatctccataccttagatatgtacgtggatgcggatatatactattataacgcatgtcgctcaggattataaataaatatatactgatatagctgcagagcgaggactcttattagattcttcatttgcactgattaacgatggatatatagagagagagaatcagatgctgattcagatgaagtcacttatcttatctatatacagtctctgacatactggtttgtcaaagacatacattcatttgaagctaaagctgcggcttagttatggatatggactgatgatcgatccgtatttcacacacgttggcgtcaacggatg

SEQ ID NO: 73329 - DNA, 798 bp, Glycine max
  Clone ID: PAT_MRT3847_37231C.1
gtttaacctatttgtataaagattgcttctgatttgatatatgttactccaagaggaattcgtgaccttttattatataccaaggaaaagtacaataatccattgatttacatcactgaaaatggtaaataacaattgtttatacacatttaatttccatttatgaaataacatatgttatacatgattttcaatttccccaatctattgaaaagaatgtgtattctaacttatggcttacatattctttacttaatttattggtataaatgagtataatgaaccaacatattcacttgaggaatctcttatggatatcttcagaattgattatcattatcgtcatctcttttatcttcaatctgcaattaagaatgtcgtaaatgtgattggatattatgtgtggtctttgttcgacaattttgagtggagttcaggctatacatcacgttttggaatgatttttgtggattacaaaaataatttgaagagatatgagaagctctctgcacagtggttcaaaaattttctcaagaaagaaacaagactttatagctctactaaataatattatgaaattcttttatccaatggttatattttgtaaataattatttgatttttttatattcttttattctaaagaggccctattagacttagagggtaaatagttattttattattcttttattctaaagaggtcccattggacttagaggtgaaacaaagatgtagatcgatctgttgacaattgctactactttggtaataagaatgaaaaagtcttttagttgc

SEQ ID NO: 73330 - DNA, 225 bp, Glycine max
  Clone ID: PAT_MRT3847_37232C.1
ttttctttttttgggaatgactggcaaatcaatgagaatacagaagagcggttgtcctggtacgtgtaaaaatattcactaaattgttatttgaatgttcattaacatccagtgtatattgaaatttttgcacataatttatatgcggctaggtggaccgtccattaagtttgaccattcatgctccatcttagtaaatacccaattagggtgcccttagaaaaa

SEQ ID NO: 73331 - DNA, 645 bp, Glycine max
  Clone ID: PAT_MRT3847_37233C.1
atccttccctactttcccgagtatattgaattgaaaactcttcccgcaactcaaattgaaaaagaaaaaggaaaaaacataaccccattgctttgttttccattattggtgccaaagtttcaagctttttgtgcttcctctgcttccccagggtaagaatctgctttccctttcgagtttacagcgatttgattctggcccctttgtgattttatcctaatcagagaacttttctctactgggtggtttgattataggtttgaaggggggaacattggaaattatccaatcagatctgcagagggtacagggggtgatcgctttatggttcctttattagggcaaaagtatatatctgtttttaagcccattgatgaagagccaatggctgtgaataaccctaggggtttacctttctcagaagacggtgaaggcttaaagaagggaacaacagttggtcagggagcattcagggaagttgcagcttatattttggatcacccaatgagtggtcgccgatcattatttggtgatgagaagggttttgccggggttcccccgacagttatggttaagtgcttgcataaaggatttaaccatcccggggagttgactactaagattggctcttgcaaatgttcatag

SEQ ID NO: 73332 - DNA, 2792 bp, Glycine max
  Clone ID: PAT_MRT3847_37234C.1
tgtgcatgtcatataccgattctgtcatcaatctcataataagacttctttcttcctttcggtcagattgaacaaaaacatatcaacccttccctactttctcgagtattgaattgaaaactctccccacaactcaaattgaaaaggaagacaaaaaaaaaaccccattgctttgttttccattattggtgccaaagtttcaaactttctctgcttcctctgctcctccagggtaagaactgctttccctttcgagtttacagtgatttgattcttgccccttttgtggtttgatccaaatcaaaggacgtttctctactggtgctttgattctaagttttggtggggggaaatgatgggaaattagggcctgggtctggaatttttcatcatttctatcgaaaaattgtaccttgttgtgcatattttgttaaaaagtttcgattttgagcttgtttggtcatctgggtaggtgtctgtgtcatctcacacccaggcagctgtaattgtaacataatcccatggctgtcttgtgaaaaattgtagaaattagggcttaggtcaaagcctcaagcttttctttgtattttacattcccttaatcaacattgaaaaatgtcgtctgctggtgaaaccactacttatccctggttctactggacttattctcgctccccatactgatacaaaaactattgactacattaatgggactggagtgctgaagatcatatagcccctctattatgtatatttatcggatctgccagttgaatctccccgcactctaacgattctgagaatgtttttatcgaaaagggtgaagagaggattgaccccttttgccatcgaaagcctgatgtgcagggaatccttgaacatggaatctattatagattgaaaagtgctagcatcactggatgctgttcttcctgtcccatgtgaagctacatggctggatactgtttcccaatgcctggacttgctcctcgatgatttaatttgcatggatggaaactggcagttgaatgcgcgctcgagccgaatcggctcgagaaggagaagcgctttgctgatcctgaacagcaggaagttgtgtgtaacggggagctgcttgaggatcagacgcttattgatggtatctgcagtaaatataacgatgcagtgattcatctttttgttagggtgaaatatgcagaagttaggacgggacaagatgagttgtccgttgtggcaaaggagttgaaagatacaaaagattatgatgttagtgaaactaattgtaggaaaaaatatgatgttagtaaagaagatacaggaagggagtatggagtcgttgagccaattgtgccgaggaaggctattgatagggatcttcttttggagccggttattgttaacaaaaaaattgaattagcttctgaggtttggaatatgataaactctacatatgaagggctagacagtggaaattatccaatcagatctgcagagggtacagggggtgcttactttatgcttgattcaaccgggcaaaagtacatatctgtttttaagcccattgatgaagagccaatggctgtgaataaccctagaggtttacctttctctgaagatggtgaaggcttaaagaagggtacaacagttggtcagggagcattcagggaagttgcagcttatattttggatcatccaatgagtggccgccgatcattatttggtgatgagaagggatttgctggggttcccccgactgttatggttaagtgcttgcataaaggatttaaccatcctggagacttgactgctaagattggctccttgcaaatgttcatggagaataatggaagctgcgaggatatcggacctggggctttcccagtgaaggaagtgcataaaatttcagtactggacatgcgactcgcaaacgcagatagacatgctgggaatattttgattggcaaagaggaggaaaatgaccaggctgttttgattccaattgatcatggatactgcttgcccacaagttttgaggattgtacctttgaatggctttattggcctcaagctcgccagccatactctccagagatcattgactatataaagtcactggatgctgatgaagatattgcccttttgaagtttcatggatggaatctgccagttgaatgcgcgcgcactcttcaaatctcaaccatgcttctgaagaaaggagtgaagagagggatgaccccctttgccattggaagccttatgtgcagggaatccttgaacaaggagtctgtgattgagggaattgtaaaggcagctctggattctgttcttccttgcacaagtgaagccacatttctggatactgtttccgaaatcatggaccagcaccttgatgagatcacgggttccatttcttaatttaagttaatttctgtcatagaagatggtatataaatgtctgtataatcgtgttcccagtacatatttatagctcaaatggttgtttttacattatttcacagtaatgacttcctaggtcttgactttagtgttttctagcatttcacaaattctttcattaagttacctttacctttaactctgtaattgaagacaaaaaccttttataccttttgaattatagcttgatgtttcaagtgtttaaaaatttgaattgtagtttaaccattcttgtcccgtagtgaagtttgtcttgtttcaaccattcttgttaggagtgtgaaaatggaaatgtggataattgaagtggtttttacagtatgtggatacaatat

SEQ ID NO: 73333 - DNA, 404 bp, Glycine max
  Clone ID: PAT_MRT3847_37235C.1
gttttcatttatttgttaacattgttcatactaaaattattattttagttgattatgccacatcacccaccatttgatgaatgatgagtaacaagaaagaccaaaaataaaaaaaattatcaaaatgactcttattatgttttaaagaaggaataaaaatcaaacgagatcatttttaaatggactaaaatgttaactttgattttattttctaacatttagcaatattctaggaaaggtaaagatttaaaccaacatgttgatcaattaatataaagctattttgggctaaccaaaagtctcaaatatgtctttaaagaatgcatttgtattaaaaacttaatagggagaatgttgtcatccttataattcttctcaactctaatttagaccaagcgatcttt

SEQ ID NO: 73334 - DNA, 1471 bp, Glycine max
  Clone ID: PAT_MRT3847_37236C.1
cgcccacgcgtccgtacggctgcgagaagacgacagaaggggaatcgcaatggcaccggaatcagaggctccccctaacttctggggccacaccccggaagaagaatactacacctcccaaggcgttcgcaacaccaagtcccacttcgaaacccccaacggcaaaatcttcacccagtccttcctccctctcaacctccaaccccaccaagtcaaagccaccgtctttatgacccacggctacggctccgacaccggctggctcttccagaaaatctgcatcaacttcgccacctggggctacgccgtcttcgccgccgacctcctcggccacggccgctccgacggtctccagtgctacctcggcgacatggacaaaatcgccgccacctccctctccttcttcctccacgtccgcaatagccacccctacaaaaacctcccggcattcctcttcggcgagtccatgggaggactcgccacgctcctcatgtacttcaaatcggaaccggacacgtggacgggcctgatgttctccgcgccactcttcgtgattcccgaggacatgaaacccagcagggtacatttgttcatgtacggtctcttgttcggtctcgccgacacgtgggcggccatgccggataacaaaatggtcggaaaggccatcagggatcccgagaagttgaaggtcatagcgtcgaacccgaggcgctacacgggcccacccagggtggggaccatgcgggagctgcttagggtgacacagtatgtacaggataatttctccaaggtaacgacgccgtttttcactgctcacggaacttctgacggcgttacctgcccttcctcgtccaagctgctgtatgagaagggttccagtgaggataagacgttgaagctctacgatggaatgtatcactctttgattcagggagagcccgatgagtctgcgaatctcgtgttgggggacatgagagagtggattgatgagagggttcgacggtatggacctaacaaaaattcccagtgaaacaaaccattactaaattcctattttggttccacattgcatattttgtgtctatcaaaactttattaaagttgttatgtgaagacggaagagtatccttcttctatcatatttggatttcaatcaaaaatgacatttaatcaatccagttatcggtttcgatgcatgattaactttagtcctaatctctcaggatatagtagtaataaattcctcatagtccaggtttcaaagtttatattagtcgaaaaattatgtgaaacctaaggaagtttacaaaaatcagatagagagagatatttcaaaatatgtgtttgtttcggctaaatcggtaaatgcatataaaaacgtaacgaggatgccttagaaatcccaataaagtagatcaatgatactttttaatgaattttttttttattttccttccccaatcagggtttt

SEQ ID NO: 73335 - DNA, 633 bp, Glycine max
  Clone ID: PAT_MRT3847_37237C.1
ttcttgaggtctctgcttcactggctcctgctgggacatatctctctaaatttgctgcaggggctgaaagtggcaaggaaactcgtaaccaggttagtgcttccaaagctgatgttagtcttcaaggtgatggtcctcctcaagctgttcaacaacctgcggttcctattgagtccggaggacttcctgatggtggtgtcccaccacaatcctcagctcaggcttcagccatgcccccatcacagctgcaggaaccaacttctagccaacctcttgatcttagtatatttggagtaccaaatgcttctgattcaggaaagcctccacaaactggttctccaccatcttctgtacgacctggacaggttccccgagaagctgctgcttctgtatgtttcaagactggacttgctcaccttgagttaaatcatctttcagatgctttgtcttgctttgatgaatcttttcttgcattagctaaagaacaatctcgtggaagtgacatacaagctcaagcagcaatctgtgctcaatacaagataacggtcactcttcttcaggaaattggacgtttgcaaaaagttcatggtccaagtgcaattagtgcaaaagatgagatggctagactttcac

SEQ ID NO: 73336 - DNA, 344 bp, Glycine max
  Clone ID: PAT_MRT3847_37238C.1
cgggcttcttcttggtgctgggcctagtatgagcgtatgaaactgcagcctactgtcaccagcaagagctatttagggctttgaaaatgactggctatgctgcactcatgccaggcaagtgtcacaatagtatactcgcaactgctcatggcctgatccttggctcttggtaagcctcagacgctcattgtgcttgagaaatccacctgttaacacgccttgagctaaattacttctattccatgatgcgaactaccagatactggactgtcgccgctgtattactagccgtttaataactctgggcgacatggcaaattgatcatagcaagagctccttcata

SEQ ID NO: 73337 - DNA, 457 bp, Glycine max
  Clone ID: PAT_MRT3847_37239C.1
ttgcttatccaggcggtctcgttggcaatacactgggtcgttggagcaactgcttgctggctaatgagtgggaatggacctgccgccctctgcgacatcagaagttaattgcctgaatgggggcacatggagacggtctatgacaggtgcatctgaatctacaaaagctggaccacatggcgttggggttgcatttagaatacatagcatgagctacatttacccatcatggctcactggtgacataaatattggcggaatgcaaagtcctattcaagatctgggctgattttacggcgggagatacaaattgtggactaaacacgagaaaaatcttgctttgacggacgatgaaatgatgggcgtgattaaaaatagaggcaatcctgctgatggtcttgcccagcgagctcatgaatttgtacaacatggtgcgcacgaaagactcaagggtcaa

SEQ ID NO: 73338 - DNA, 353 bp, Glycine max
  Clone ID: PAT_MRT3847_3723C.1
gatcgcgatgtaactcacccatattgtctcgtcagaaccaaactgtgggaaagttgtaatgggaactgaaaaaactttgctgcggagaaaactatgcatacctaagctaacacaagtgcgtcaacctgttacaaggctgaacaatgcaccacaacatgatctacacttaaactaccaccaccgacaccttgtgcatgagagtgtcacctgttaaagcacaattagagggggctgctatgggtgtgcccgctgagaacgatggctgcaaatgtggaccaaactggtcctgcaaccccttcacttgcaagtgatgttgtaggacaccaatcttcaaccagagattgcccttaatt

SEQ ID NO: 73339 - DNA, 228 bp, Glycine max
  Clone ID: PAT_MRT3847_37240C.1
cagtaagtaattctttgattcagaaaccttttttgttaagcctgtggaatggaataaagttgatgctactatttaaccaaggcatcaagatttgatttttgctttgcttttttaggtgtcatactttggtcttgcaattttgtaagtatgtataagaattatttactgtaagttgtgtgtcaatgtggaccgcacctcatgctatttgtaatatggaaaagggaatca

SEQ ID NO: 73340 - DNA, 404 bp, Glycine max
  Clone ID: PAT_MRT3847_37241C.1
ggcggccttttttttgggggttttttttttaagattaacaaaaaaaattttcttcaaattaaatttaacaaacttggcccaaatattaccccagtctgcttgtaaccaagccaaattaaattaaaattaatctggaaaatttttagcattggaagctaagaaaggtcttacttttggggccctaaaccttgggcttggtcaagggtaaacaaccagcaggcccaaaaggaaacgcaagggatcacgttcaatgccagggatgggaaaatttaataggctaaaataaatgcggttttatattataggactgaccaacccacaccccaatccatatatggtaaattccattaaataaggtcctttaatttatatttcatcaagaatttgaagttttgaaaaatgac

SEQ ID NO: 73341 - DNA, 149 bp, Glycine max
  Clone ID: PAT_MRT3847_37242C.1
gttaatttcccgaagccgcaccaaaaaaccgcaaggggacggtattgaaaagtgattacgggaatggaacaacgaggcatgccgacgaggagtgcgatgagaaaggggcaagaaaaggaccctctgtgcaagccagagcatgcgcagat

SEQ ID NO: 73342 - DNA, 627 bp, Glycine max
  Clone ID: PAT_MRT3847_37243C.1
cctcgcgtccgcccacgcgtccgcccacgcgtccgtccaccctcgagccgacgcggctcggaaagaagaaagggctatacttcaacttcaacggtcggttaattcaaaacttatcaacggtcaccaaattcaaatttgaaggatcccattcccatccctcgccacggttcgaagcactctgaaattttctctttgccacggaaccagctctctctctctctctagaaattccttcttgattgccaagcctccatctttcacatggatccgactcaatcgaacgacgttcagcaatacccacaaaccctaatctcagagcctaaagattctccaatgcacgacgccaacgagtccttgttcgattcgatggtttgcgactccagttcaagactggtcccaactgggcttacgagatctgacaacgcagaagaggagtgtttcatgtttgtaaatgcgggaggggatgcttttagtgaagcagctggtggaataacgttcctgggtgacacctattttgatggtggcaacgttatgcgtaccaatgagcaaatagtggagggtggagactacccatttatctaccaatcagctcggttgggaagcttttgttataggtttgctaatctt

SEQ ID NO: 73343 - DNA, 613 bp, Glycine max
  unsure (1)..(613): unsure at all n locations
  Clone ID: PAT_MRT3847_37244C.1
ttatacttcttatatatgggtcatcttattgttttgatgtgccctccctttccttgaataattttgtcctttgtatttccctttttgggttcacactttatttttttagccttaaattttgggaaagcaacttttttccttggtgggccggcaaaacaagttcttccccaaaagttttttattcccggattggcccagggggggttcctatggggccccccccggctcttgctgggggtagcctaatttgggtacaaatatttttttcctccccccaggaggaaaatttccttttccccntttgggcccccanaaaggggggcccccccgggggggcccccccccttttttttttggggggggggcccccaaccccgtcccccctttttaaattttgccccgcccccttttttggctcttcccccccggggttttttctcgggccggttttttttgggggcccctctttttttttttgggggggcttttttacaccggggggcggggggaaaaccccggggcccccccctttttgggtgggggggggcctcccccttttttctgggggggggtttataaggaggcccccggggcccccccctcggttcgcccc

SEQ ID NO: 73344 - DNA, 493 bp, Glycine max
  Clone ID: PAT_MRT3847_37245C.1
cttttgcgtgagactctcttatactctctctgttgtgtttctctctccaccactccttcttatcactctcttcctcataatattgagatctctctcagttagttccctttgtgaaagcacatacatataaagtcttctcctttgtttggccgacaaatctatccaaagggagagataccccattacccaccctattctctcaagataagagctttttccccccctttctgtctctattttccatgtattatgaggcggcataaagggtcgtttatcgtgactgtgaagatcactttttgagcgtgttgctgtggattcgggttttcctatttgctatcgagaataagagaggaagaacaaacatgactggaagtaatgaagtcaacctcagtgaatctaagagtgttgttccactcaacacttgggtgcttatctccaatttcaagctggcttacaatctactaaagcgtgccgacggaacgttcaatcgaga

SEQ ID NO: 73345 - DNA, 565 bp, Glycine max
  Clone ID: PAT_MRT3847_37246C.1
cccacgcgtacgccgagaagggcggcctgaacatcaacaacaaccgcggagagaacttttactacttataccagcagatcctggcccactacaacctccaccgtatggccaactacctgcccgagatgaacgacttcgactggaacatgcccatctggtacgggtacaacccggaccttaagtaccacagcggcaaggccttccccgcccgccccgagaactccgagctgaccaccctcaagtgctacaccgttgaggatgttaagatgatcgagaagcgcatcaaggacgccatcgactccggctacgtgattggcaaggacggccacgtcatctccatcatgaaccacattcacggcatcaacatcctgggaaacatcatggagggtaactacgacgccgtcaactgccgttactacggatgctacaccaccatgcttcacaacctggtagccctcatcgtcgaccccaccaacgagcacggtgttgccccccgggtcatcggccactacgagaccgccctccgggaacccggcttctactacatgcagaagcacatcaacgg

SEQ ID NO: 73346 - DNA, 376 bp, Glycine max
  Clone ID: PAT_MRT3847_37247C.1
gggtcgcttggagacaacataggattgaaagaagagttcatcaccaatgtgtgtggtttggccttccaagctcacatgtcaccggagaatctctaccatttccatgagattgagattttttccgaaatttatcatgttttcagcttttcagggtcttggaacccccatgaatggcttgttaataacaaaccttttggggaaacaaagatagatcatgccctgtttccttcacttagaagtattggtaatgatgaagctgctttggtgaatgaaggcttcgcaaagagattcgaccacatattgaaaactagctccattaaatctgaggtgaataaagctatggttgatggaaagcaagtagtgtttacagggcact

SEQ ID NO: 73347 - DNA, 306 bp, Glycine max
  Clone ID: PAT_MRT3847_37248C.1
cagaggtttgatatgcaagagttgctcagagcctctgctgagattttgggtagtggttgcttcagctcttcttacaaggctgctttgttgaatggcccaacaatagtggtgaagaggttcaagcagatgaacaatgtcgggaaggaagagtttcaagagcacatgagaaggatagggaggttgacccatcctaacttgcttcctcctgtcgcttactattatagaaaggaggagaagctcgtcgtcacagactacgttcagaatggtagcttggctgttcgccttcatggacaccaatccattgga

SEQ ID NO: 73348 - DNA, 1382 bp, Glycine max
  Clone ID: PAT_MRT3847_37249C.1
aattcggctcgaggcttcagtacttgctacctttctataaaggtagagagaagagaggacccttctcttgcatagttcaagtgagtgagagtgccaaaaaatgggaagggctccttgttgttccaaagtggggttgcacaaaggtccatggactcctaaagaagatgcattgcttaccaagtatatccaagctcatggagaaggccaatggaaatcactacccaaaaaagcagggcttcttagatgtggaaaaagttgtagattgagatggatgaactatctgagaccagacataaagagagggaacatagcaccagaagaagatgatcttataatcagaatgcattcacttttgggaaacagatggtccctcatagcaggaaggttaccagggagaacagacaatgaaataaagaactactggaacacccatctaagcaaaaagctgaaaattcaaggaacagaagacacagacacacacaaacaagttcaaattacaatgggtagatcaccttgttgtaacaaaaatggcctcaagaaaggaccatggacaccagaagaagatgatcttataatcagaatgcattcacttttgggaaacagatggtccctcatagcaggaaggttaccagggagaacagacaatgaaataaagaactactggaacacccatctaagcaaaaagctgaaaattcaaggaacagaagacacagacacacacaaaatgttagagaatcctcaagaagaggctgcaagtgatggtggcaacaacaacaaaaagaagaagaagaagaagaacggtggcaaaaagaacaagcagaagaacaaaggcaaagaaaatgatgagccgccaaagacacaagtttacctaccaaaaccaattagagtgaaggcaatgtatttacaaagaacggatagtaacaccttcacctttgattccaattcagctagtggatcaacaagccaagagaaggaggaaagccccgtgacaaaagaatcaaacgtggttagtgaagttggtaatgtgggagaagaaagtgatggttttggcttcttcagtgaggaccatgacttagtcaacgtctcagatattgaatgccactcttattttcccacagatcatggcaacctacagcaattgtatgaagaatatttccagctcttgaacatggaccatggccaattcgaactgaattcatttgcagaatctttattagattaaaagaatatcaacaaagatttgttcagttcatgaagatcacattgcttacatataaactttgttgatagatcatatgtaaatatatctgtaaatgatctctgagttatgagatcttttttgtctttaataaatatcgccatctaactcaaaaaaaaaaaaa

SEQ ID NO: 73349 - DNA, 672 bp, Glycine max
  Clone ID: PAT_MRT3847_3724C.1
cttctatatctatttctactcattagcgaatctgcaagtaacagaatcgacacacagcatgaggtcgctacgacagcagaccagctacgtgtactctgacgaagatggcccactaggaagaacgttacaaccaaatgtggacagttcatgcgcaacgagtagtgggggtctacaccagccccaccagctctcggcgtgaggaccgctgccccctctcagagtactacataaccgacaactactcactttttgacccgtgacctctccttccctacattgagtcgaaggattactcacgacttaacgactagcactctgtcgtcctctcagagacacactacagattgcattgcaagaacctgctcactcataccttggtcagctctctcaggatactaaactgcgagctcttaccctccagctccgacccattatgcccaggcatctacttgtggataaaaggatactagcagcgctatctcgactagttgaatgtaaagaacaaaataattgccgcttgtgaggatacgcatgttggtcttacagatgccgtccattaaatcgctatcatgcggatcttcagccatactcaccccatcagactggagcatgatcacaagttctacatcttctacctagctaatcctccaccactgtgataacttccgtgac

SEQ ID NO: 73350 - DNA, 509 bp, Glycine max
  Clone ID: PAT_MRT3847_37250C.1
acttggaaatgtgagatataaacttgatgaagtaaccaggccccaaaattgtttacaacaatcaaaacttctcttacaatgaccgagttaacattttgtcaactataccttggaagcaaagacaacagtagccatgccacatgatactggaccttcgttaatcgttaagaaaataccgagttaacaaacccaaatctggactgctagtagcaactgttgatgcaatctgagtatcttctgtgattttatagccattgaaagaaaagtaaaatctaccacagtcagatccagaggtcacgcttagattacatcactagcaggcttgctccactgatatttagcacaatcacatggaccttactcagagaccacatattccagtcccagctgaagaatggggataatatttgttctgaaagaacttccctaattgaacgagatcatattcagtatgttgattcattctttatttagacaaaaactccttctcaaccagactgaatgtcagc

SEQ ID NO: 73351 - DNA, 465 bp, Glycine max
  Clone ID: PAT_MRT3847_37251C.1
gaacaaagggcggaagaatggactgtggatcggtagctttggtatataatcactatcactcccactctatgatacccatctttcaccatgggattcagaagcgagggaaatgtgagcatcgtacattctacgcttcaataactatagattggtgtatgcaagagcttgacctaacatggcaatgtgacactgccaagccactttctgaggaatccttgttgaccccttaaaggttcaaactgcccctcttagggtaactcacactacctttcgaagtgttcgtgtttattatgccacaaccccttgaaagctggggggcatatactactacaggcgactcacctcggaatgagagggatccgaacatggcccatacgtataactgcactagggacgaggacttaaaagaattaatgcgtatctacctatgcccacacgatgcatattttgttcgggagcctttgg

SEQ ID NO: 73352 - DNA, 296 bp, Glycine max
  Clone ID: PAT_MRT3847_37252C.1
acccacgcatgcggtggacgagcgagcgagcagttacaaagagaggatctgggacttcaaaggcaagggatggcgcggtagtaatcacagacgtcttgcgatccttgcagagtcataagtgtgacaatacaacttcgtcatagacacactctcacttactcacagctgaactcgagtagtgcttcacacgtcttgaaagcgcattcgcagaagaataaaaggcttccttagaaacgaccaagttcgcgctgcgctggttcaagaacttaggacatctaacattggctagcaacgat

SEQ ID NO: 73353 - DNA, 876 bp, Glycine max
  Clone ID: PAT_MRT3847_37253C.1
ggctcgatctctttctcttctcaccggctggtcaccggcttctctcattctccgaccgtccccacccccttcattcccgattcgttcgtcttcgctgcttcgcgtcaacacttttcttctcttctaggtcatttatgatttcgatcttttcctttaatttctcctccatttgttttgatttgatttgaatttccacggttaagttaaggtagtgttcgggaagatgtcgagtcacggtggttcttctttaaggaacggttccttgtccaatagccccacgcgggccaagaagaaagcctttggctctgagcattcaacgcctgactttattgctcgtaaaacctttacctcaccgcgcaccatgggagagagaactgtgaaatcattgcggctttcaaaggcattgacagttcctgaaacaacaaccgtctatgaagcttgccgtaggatggctgctcgcaaagttgatgctctattactaactgattctaatgctttgctctggggaatcctcacacacaaggatatagcagcaagagttattgccaaagagattaatcttgaagagacaccagtttccaaagttatgactaggaatccggtatttgtcctttctgaaactctagctgcagaagccctccaaaagatggtgcaagggctgctgagaaaggataagcaattgcagcagctgttgaaggagttgaaaaacactggggaacatcagactccaatacatcattcattgagtctcttcggtagcaaatatttaagctgtcattgtctacgatcattcctgagaattcaaagtagacttgtaacagtatcaccaacagattccattctgacaacaagaaagaaaatggttgaatttcgtgc

SEQ ID NO: 73354 - DNA, 374 bp, Glycine max
  Clone ID: PAT_MRT3847_37254C.1
attttttttttttttttttttttttttttttttttttttttctttttatttttttgggtacttttgggacctaaatatactaaaaacccgaccactaaaattacaatcaaaaataagccccaacccctaaccaacgcaccacatccagtaccccgggtgctacccacaaaccaacaaaacaaagggtactctaaaaaaaaagcccgaggaaaaaaaaaaataacaataataaatcaatcctaaaaaaccaaacacacccagcattgaaaaaagcaacaacaaagaacccccctccaagaacgggaaaggttaaaacaaatgcacaatattgaaaataaaaggctaaaaaaaatgggggtcccccacaagagagg

SEQ ID NO: 73355 - DNA, 528 bp, Glycine max
  Clone ID: PAT_MRT3847_37255C.1
gtccactacaatcgtcccacccttggaggcatagataagactatggtttcatctcaggaaaaggatcatagagttgatgtgaggagactttcttaccaagaattagatatctttagaaaacgttgggaaaaggcagttgaggaggataaatgttgggtagatccatttcaatagccagtgcaggaattggagtggtaaacgaagttctatgtaaattttgtataaaaaataacatgtcatttatgtaaagagaagaagtgcttgatcatggtcatgacagagaaagcttagaggatctcaaggacaacatgactcctggaataaagttgtcttaaataagctgggtgcatttagtggaattttttccatctttattggatcagctttgaaggtaaataaaaggggttagagggtagttagaaacctctgtaaatcagctagactcttcgcgttgttcttcttgagtaaacatcatactgtcaacttttttttgaattttgaattgagaaaattaattgatgtcaaaaa

SEQ ID NO: 73356 - DNA, 323 bp, Glycine max
  Clone ID: PAT_MRT3847_37256C.1
ggcgagggaggattgcttttcaccatgatgagacaagcaccgtattgtgtggcgcctgtactataatggcccttacagagcttctatatgaagaactggcagatgctggttgaagagctatacgtggctcataaactacatttagaaccggaggcgcctatccgggacttacgaactcgtatttcatgtaccgacattgagtcgcttatgccgatagttaccagtacggactacatccacgcctgtcatctgtgctcgcagctgactctgaaagctatgctttccgttcaatgccataacctggatatccggatgattgccct

SEQ ID NO: 73357 - DNA, 1296 bp, Glycine max
  Clone ID: PAT_MRT3847_37257C.1
cgatcagagcctctgatgcagttgttttaatcagagaaatgggcatcaagtgtttgactgtgactgctctgcaacagcaccgagcccaatccattctcgagcatttggaaggagaggattggatgtctgaactggctaggcttgaggttggcctatgtgtcacttctctctcttattgttatcgccttgcgctttcaacattttcttgttggtatcacaactggaattggttcgtagagttcctttgaattcttcgtatatctaactaacagtatatacagccgtgtgattcgttagcgctcattatatcataaatgagttgtactaactactaagtgagcatatatgcatgcgtacaacaaacatgatgcactctccttccaagcaatactttctcttttagctaagtctagttcattgatcctcgttgccgagttactttaaaagaagtggaagaatattgtttcttggagtataaaacccgaacaatatatgcatatattagcggcgtgcttgtagttacgaacggaattgttatctatctgttctttctattcccaaaaaaacaacctgatcgagccgaatcggttggggctccggcccgattcctggcttcctcccccccccgtgaaacctcacctcccttcaattcctctatatgcataactaactttcaaatcgcaaagcaattacagtaataatatccagataattacaaaaaccctaatcaacaaatacctatggtgtgaaccacgctttttttttttacaaattacaattttttacaaattacaactcctcgcgtatcctgtccacgaatctatcacgatttacaaccaccaaaacaatcacaagaaaaaaatttacagaacaaacggaagaaaaaaataaaatctaattgccccaaattgaaattggcggatcaatagatcgatcgacaaacctaggaaattggaattctacaacaaatcgaagaaggaatgatataaaggacgaaaaggttggcccagaaaactgtgaggagtattttcccgggaaaataaaaccatgtttctttcggaaaagggtagatcgaggaagagtggttatcgtaatttgcaagagagagaaaaatagagggaaaatttgtcaggaagaaaaagaaaaaggaaaaagaatcgggagagaaagaggaagttgggaaatggaatccctaaccctagatttggtagaatcagaagaaaatggctcttttgctcaacaaactctgcaccccaaactatcgggatctcgcagccttatcttctcgcagccgta

SEQ ID NO: 73358 - DNA, 733 bp, Glycine max
  unsure (1)..(733): unsure at all n locations
  Clone ID: PAT_MRT3847_37258C.1
gttttgcagtttgttaacttcactgacataatgaccaagaaatcaagcccctcagaaaaagaaactgcttttgctctggctgctcttatggagatacctttccaatataaagcagccattgaacttgaactacttgggttggttccttatacacaaggcttatgtttcattagatgaaaagtaaaagcatatgcaataaactttgtgtctatttgggggacaaatttcttgaaagcaatgtggtttccttcaggtgattatttgttacaattttctgtttgatgataatttttttccttgcttttttgccaaaagtcgtgcaacagggagatcaaataaaatagttccaagacctcctccagctccatattcccggcttgtgccaccagctcgcgttctgagcaatatgccaactttcatggatgatgagagaaaccaaatggtatatatatatgattgaaagttagactgattcattatattctcctttatcacttcctaaaaagtcaaattgtgtaaaaagaacaagtaacttattttgtggtacacccttgtagtttgaacactttcataacttactccttaaacttttttatgtcactaaacctatgaattntgagttaatttagttatggttttaggcttattaaccacaaaatgagaattcagaaacttagcanttataggtactattactctatgattagtgctctagtagagttattgctgaaac

SEQ ID NO: 73359 - DNA, 150 bp, Glycine max
  unsure (1)..(150): unsure at all n locations
  Clone ID: PAT_MRT3847_37259C.1
ttttcatattttatttgtgttttgggccgntttgggaaagcaagccaaggtataaacttactttggacaggggttttacacatccggtgtttatacttttgcaaagggtgctcactttactggcttccaggtttttgaaatataacatga

SEQ ID NO: 73360 - DNA, 255 bp, Glycine max
  unsure (1)..(255): unsure at all n locations
  Clone ID: PAT_MRT3847_3725C.1
attagtgagctcatggattgaaccattacaagaggaggctgaacttggctatgagattgattatatttctagatatattgacgagggtggcctaactggggagcgtaaggnctgggtgcctcgaagaggtaaacacctctagatcctgatgctcatggatttatatattcaaacccaatggagacctccttcaaacaaagatgcctggaggagttgaagttgcacaataaaaagcttctgaagaccttgcagaat

SEQ ID NO: 73361 - DNA, 419 bp, Glycine max
  Clone ID: PAT_MRT3847_37260C.1
ccacgcctccggtcttgactctctttgcacagcttaactttgaatgtggctccaagctatgctacttccatactttctccctttttagttagccatgattgaccgtcgcctttcttggctttaatatggagactgaggaccgattcatacaccatgctcacagaccaaagtatgactgctttcttttcgatttagatgacgctgtgtatgccctcagagctgcacttgcaaaaccatgtgtccaaaatagtaaagactacactgggtgagaagctcggcatacaccctagcaaaagtgatgacttgtccaacctggtttacaaagaagcatggaacagctatcgctgttctaagggcaattggatatgacctcccctatgatgaatattacagccatcgcgcatggaagatcaccttat

SEQ ID NO: 73362 - DNA, 1416 bp, Glycine max
  Clone ID: PAT_MRT3847_37261C.1
ggctcgagaaaagagaatgtcaaaccttctctttttacttacagaatcttaatagactcaaagggccagtccaatgatattgctggaatggagcaagtgtttgagacaatgaaggaagaaggctttgaaccagacatccaaatacaggcactcttggctaggcattacacctcatctgggcttaaagaaaaagctgaagctatgttgaaggagatggaaggtgaaaacttgaaagagaatcagtgggtatgtgcaactttgctccgcctttatgcaaacctgggaaaggctgatgaagtggagagaatttggaaggtctgtgaatcaaaacctcgagttgatgactgcctggctgcagttgaagcttggggaaagttagataaaattgaagaagctgaggcagtttttgagatggcgtcaaagaaatggaaacttaattccaagaactactcaattcttctgaagatttatgcaaataataaaatgctagcgaagggtaaggatcttatcaagcgaatggcagatagtgggctgaggataggcccattgacatggaatgcacttgtgaaactgtatatccaagctggggaagttgagaaggcagactctgttttgcagaaggcaatccaacagagtcagctgcagccaatgtttaccacctatttggatattttagagcagtatgcaaagaggggtgacgtccataactcggagaagattttccttaaaatgagacaagctggttatacgtctcgaataagtcagttcaaagttctaatgcaggcatatgtaaacgccgaggttccagcgtatgggatcagagagaggatgaaagctgataacctatttcccaacaaaacattggctaaccagttgtttctagttgatgcatttaggaaaaatccagtttccgatttgcttgattgaggcatattcagtattctgcaagggttgtttctactttctctttccatgcaactattattattagttagttgaattgtagattgcacatttaggttgaataaatgttttgtctaggttatacgtcccgaataagtcagttccaagttctaatacaggcatatgtaaacgccaaggttccagcgtatggaatcagagagaggattaaagctgataacctatttcccaacaaaacgttggctaaccagttggctctagttgatgcatttaggaaaaatgcagtttccgatttgcttgattgaggcatatttagtattctgcaagggttgtttcctacgctttccatgcaactattattattagttgaatagtagattgcacatttagtttgaatgaatgttgtcttgcactgctatctataagttagatacacttttgccttttaagcgcattatattaatgcttaaatactgcttttatgattttaaaacc

SEQ ID NO: 73363 - DNA, 498 bp, Glycine max
  Clone ID: PAT_MRT3847_37262C.1
tgcattttcatattagttagagagattgggaactgttaaaattcaaaaggtaaagtggttaaaactagagccgatttatttttgtgattaaaattattgccaatttatttttctgtgtaaaattagtactaatttaatttttcttttatctttatatttttttacattcttttattaaaaataattatcttatgggagtaatacttatttttttatgggaaaaaataattacttgacatattaagtaaaaaacaaaattactttgtgggggcaattgcccccactgtggatctgccagagagtatagtcaattaaaataggaagaaaactattgatgaaatcatcatttcattgtgctgaagtttccaggatgcatagctgtgaaagcctagtcatagtactttctttattttctatttttccttgaaaaaaggacttagtagatggtgcttattgttccatgcaacatgtatggttgaatctacttgttactcaaaa

SEQ ID NO: 73364 - DNA, 288 bp, Glycine max
  unsure (1)..(288): unsure at all n locations
  Clone ID: PAT_MRT3847_37263C.1
gtcgcatgcacgcgtacgtnagctcggaattcggctcgagcttgagcagggagtgtgctgtgggccgagcaggggctgcaggggagtgggagtgcagattgaaaaatgcagaccaccaatgcactgctcatttctccagttctgatccgctcctgtaccaggggtctaatcaggcctgtgtctgcctccctcctgtttagaccagaggctccatctaaaaagccttcctgctgcagctcnnctctccaggtggccagacgggaattccagaccagtgttatttcccgg

SEQ ID NO: 73365 - DNA, 184 bp, Glycine max
  Clone ID: PAT_MRT3847_37264C.1
cgtacactttctatcacatactcaaatatattaagtcccgaatctaagcatatagttatttcatataaaaacagtatcaatttctacaaaatcctttgtctaataatcttaaatatggagtttttaatcctttcaacttgacatagggttaaaatttcacctactttcctaataatttaaccac

SEQ ID NO: 73366 - DNA, 490 bp, Glycine max
  unsure (1)..(490): unsure at all n locations
  Clone ID: PAT_MRT3847_37265C.1
gtacgtatgctgggatcctctagagcggccgtttttntttttttttttttttttttttttttaattaagttgattttctacgtgaaataaatatgttggataatcaaacttttcaattgaattaagctttctagcttaacaaaattgttggtgagcttgaatcataagtcaaaccatgagctaaataaattcttattaagtcaagttggttcaattcaactcaacttattttcaaacttagttatgttggtttagagtgtgttttgtgaattctacacataatcagtcacaaattttaaaaataaattcacaaatagcatcaaagtttaggtcaacacgatatcgagaaactaatgcatagtagatgccatgtgtgattctgcatcagctttcgcgatttaacgactacttattacttatgctaaatgcgaaattttttgtagtgatactctcaattggagaatattcttcggataattattattattat

SEQ ID NO: 73367 - DNA, 315 bp, Glycine max
  Clone ID: PAT_MRT3847_37266C.1
catcatgtgctgtgcagttatacatacttaataagcccatgctcagtgtgtatactaaggaagcaaaccatacagtgagctatgcaggacaaaaatcccactaaagaaaaaggcacttgagttttaatagccatatcaccttgctcccagagcttctggcttctaactccatggaacatctattcgcgagatctcagtgtggctttttttcacccttacgacacacttctggactgtgaactatactaatcaataagtaagagtgtagaacccactagctctcacatggctgcttggcatacctgtgactctaac

SEQ ID NO: 73368 - DNA, 921 bp, Glycine max
  Clone ID: PAT_MRT3847_37267C.1
tttttttttttttttttttttttttttttttttttttttttttttttttggacaaacaaccctccctacttttcattctttataatacatcccaactaactgtatatacgtacaaggaaaagaattaattcattgttcgatagttaagcagagcataaagctagcggaacacaggagtaagcacaggagtaaattaacaggctcccactagctagcatactaaggtaaggttaacagaaagcataacggaaacttgaaatataatccacattcaactatcaattttgtaatgttggtccctcaagttatcacaaatgcattagatgacctaaatgtaacctttgcgagttgtcacaccagctgcatcaagatcacactggtttctatgttgagtgtatctcttcctctcattctgcttccttcagttcaaatactaattgtcattggagcgagaatgacgtctccgtgatctgcgaaaaccactttcacctttcaagtggccaattgtactaacaaaatcatcatcaatctcatctagcctatactcgccatactctacagatgctacagaaccttcatcagaatttgaagtatcagaacttaaatggcgattaaccctactttgatcgccaactcttgtccttcttcggtttctagaacttctaaagttattgaaggcatgatacaaaatacaagaggtccaccagttaccttcatctccagggaagtcctcaaactcatctgcactgtcatcatccccatattcaatcacataatctcccaagaccactccccgtggaatttctgaatgaatagtgctcaaaacatctatgatctcagatgactgctgaaaatttttccaatcaagctgtcggacaggatcaattttcgatggacaagcatgagggtgttccctcgtgc

SEQ ID NO: 73369 - DNA, 487 bp, Glycine max
  unsure (1)..(487): unsure at all n locations
  Clone ID: PAT_MRT3847_37268C.1
ccacagccttaaacaccaccctccccccttcctagggagacacatcaccattatttcgattcttcaacactcaaaaaacattctttttagacattttttcaaggaatccaaattttattttcattgttcttagccaaataatgttaataaacagagaattatgcttctcttaattgaaacaaaaaattngtttaatgatattttataacaccgggataaaatgaaatttagaaaggtaataaaaaatttgatatctactattttttttattggtaataatcccccctttaatttatatatttgggttacttcaatgtaaaccaggccgccaaactgccctatccgaatcacctgcactattaatcaaaaggtgactcattaagtcaacaaaatttcatgatttaaaaatgaaaacaagaacccccgaaaaaatgaaaatagaattattcacttttgctttaccttgttgggaatcaatttttaaaaa

SEQ ID NO: 73370 - DNA, 2355 bp, Glycine max
  Clone ID: PAT_MRT3847_37269C.1
gatctaggctcgagctcactgttagtagcagcaatggcgaagggtgaagacgctttgattcgaaagaagaataaaaagcttcgaaagaagaacagcagcggctcttcctctgtctccgccaaggttgccgccgttatcgccgccaagaagcgccgcaaggccggtaaacgccgcatgtgccaggggatgtgctttagtctacctactctggatgatcccttcaatgatcgaggtgggaaagaggaaaccaaaacaaagggtcctaaaaagaaatcccattcaaaaccaaaagacaagatggatcatcttaatgggaagagtgcagatggaaagaaaggcgcagttggtgggaggaaaattgcaagggaattgaatgatttacaaagggaaaatgagtctgtcacagccagcaataatcttactcataaatgtatcattaactcagaaaggaaaaatattgatatgactgagatggctcatctttgcggtaccaaacagcgtgattgtgacatttcagagttcccttctaagtttattttttggtgtttgagttccattgaaaatgcattgcgacatggtgatgcctacactgatggagagggtaactctttctttttgaatccatggggattagaatttttgaagtgttattctacagggaaagatctgatagaaaccagtggaacctctgctactgctgagcaaattgcatggatggtttctggtgcagctgatacttttgtcagaaaagagaaagaagggttgtcctttcccgggccttttcttttattccttgtaccctcccaagaaaaatctacccaggttcgaacagtttgcaagcctttaaaatctgttggaatacatacagtgagtattcatccaggtgcttccttagatcatcagattcaaggtctgaaaacttgtgagcctgagtttcttgtttctactcctgagaggctattggagcttgtttctacgaaggcaattgatatttctggggtatccatgctggttattgatgggcttaatactatctgtagtgctggccacgctgatacagtaaaatccatcaagaattgtatttctggcaatccccgtgttgtgattttcaatgattgtgtcagccacatgtcgatcccaatggttcgatatcttctgacaggatcaatttgtagagtctctctcaataattcaattaacagcctaagttcgtacattatccaatctgttgaagtgtgtacgtcagaagaagataaagttgttatgagcatcgaagccctggatcaatttcagagcaacagtacacagaattcaaacatgctatatattttaagcaaagatgtcaagtgccataaattggtcaagactctcaaatccaagggttattccgtttcacttgattctgatgcagcaaatattaatgatagggtggattcagaccgcagagcagcggtttctttgattgatttggtgcaaatctctactacggatatagggacgtatgatgtggtagtcctacctagttttgtaccctcaattgacacttacgtgcatattttgacaaagatggctcgcacaagtgtcaatggtgtattgcacagtttcttaacaaaaagagatacagaacttgctgcaccgttgattgcggttcttgaacaatgcggtcaggaagtgcctcagacccttcaggatctgaatcatacatcgaacatgttggaagattgaatgttgaaggtgcttagtcatcaatttttttatgttcattccgtctctgcggctcatgatatcaaaagatcaattccttttactttggaatttgggctgggagctgagtggtagggattgtaggtttcctatgcttggaatttggaaaccttcacgttaagaatcccattaagaaattttttgcaatattatctctgcttctgtttcaagactgtattttactgtaatcgaatgagcttctttgtcgcaacatcattttgttgcttttgtagcagcatagaaacaaacatttaattctttagatactatcttttattaaaattaagattttattttagtaccttacctattccgcacctaagctctcatcactaagcatggctaccaaaatattacccacacttgaactgtttgcatgccttatgcctcttatgaagcacatacctcaagtataccactctgccaaacctcacttcttattaggctagaagggggacctggctgctcctacatgattggaaacttgtacgaactcggaccctggcgcatcaccgaatcactcacccttcaacgcaaccttggagcttggaataaagactttggccttctttttcttgatagtcccattgg

SEQ ID NO: 73371 - DNA, 535 bp, Glycine max
  Clone ID: PAT_MRT3847_3726C.1
tttccaagcagtgaggttgaaaggggatggttagagtaagcaaagaggctctgcaaaaagcagccaaaaccctatccgaaatcctcgtgtgccctctctctaagcagcctttgaggtattgtgaggaatcaaattccttaatcagcgatgctattggcgttgccttccccataaaaaatgggataccatgcttggttccaagagatgggaagatacttgaggaagaagatgcctcaaaacctgataatgataccaatttatctgcagtaaatgaagagaatcaaggaagaagtggcctaagatgaagtgtaagatgtttcgacttcaatttctatgatcaattgtctgttagcctaggtcgtggtggaatgttgtgtgagtaagatgttaccctgtttacactttggtgaagaaacattttctttttctttattttcctacaatggaaaaattctggacaaataaatctctcaattttccccttccctttattgtttgaatagagttgatttgtatctaaaagagttctctctct

SEQ ID NO: 73372 - DNA, 764 bp, Glycine max
  Clone ID: PAT_MRT3847_37270C.1
ctgagctaagggtaaggcctaaaacatgtggaaaagggtttgtaccatgtaaaaggcgcatggcagagagagagagcgggtactcatcaatatgttacgaggagagggaagagcaaggtattaagctttccttgtagtaccctcttattggcttttcttcaaagcagcttcccttttacaggtataatgttcctgtttctgttgctggatgaccatgtatttctttttaatcctgggtcagagatcatgattgtctttcaacttattggggtcagagattaattccgccagtggttagtggttatttgcggtctaagaaaattttgtacatggtggaaattgaacacaaattttctcactaaatagatcattttcactcctgtgagtggaatggaactttacatcgccaagcctttcgcagctggataaccatgtatgtgaagaaagataagggaaagataagggagctgaaattttttatatttctaccgcattgttaattctccacaagcctgtgtatttacctatgagtttcaagattttgggagaaaaactacccagtgaattatcccaccttttatatttcttcaagcctaggctttttgtatttcttcagattctttctcccaccctccactccggatatatccagtgcctttttttctttttaattctaactgtctttcaagtgtaagtagcatacttatgtatcgcttattagtgtaattgttcatatttatcaaatggagcaaattattatactc

SEQ ID NO: 73373 - DNA, 295 bp, Glycine max
  Clone ID: PAT_MRT3847_37271C.1
ctttaacttggggtgcgacattttagacagataactatgaggacaatactggatcagggctcgctttccgaccacaggactgtctaagctattacctattcagaggctgattatatgaccatatgtatatacaccattgatcgttctgtatgtggatgtatgactgctgtgattggaaactacttccgcgacgctggtttatctggactatcgattatcaagaagtgctcgatagccattggcatgctttctgactcctggaatgaacatatgtcttgctggagaggctaatgat

SEQ ID NO: 73374 - DNA, 799 bp, Glycine max
  Clone ID: PAT_MRT3847_37272C.1
cttcgtttttttttttactaactaacaaggatgattaaaaaaaaagttgccaatcagctttttattgataaaacaaaatttccaagtatcagaacaaaacctactatataatagagaataaacaaatcccgaatgcacttattatattggcaaaaaacaaaatgatttaatgaccaaaattctaggcaatgaagttataaactattaacaatatgagttgtccaaagctttggccaaacactcagatcattgtagagacaatagtctttttttccttccttccgttatttatttcataactcttaatattgttattcaacgaactgcacaaatggactgttggttgtactttttgattttcctcctcttagtcaactatatcaatattgttttgccatctccattctttttttcagtaactcctaatttctcttgctcatcgctatcacactgtcttattcttttcttcattttttctcaatttttccgctttctcttcacgaccctccctttttgcccatacataatgtttatgacagcactgtctttggtaatttcatcagaacaactttccaagatctcaatttttccttcaccatccttagactcatatcaatattttccttgacagatttcactagaaaactgagcaatatctgccttgctatctcggacttctcagattcagaaatactgttttttgttgaaatcaaggggagctccacaaaattttcatctagcttgtttttttctggcatgccttcgtccggctcgagcggctcgaggttctagatcgcga

SEQ ID NO: 73375 - DNA, 169 bp, Glycine max
  Clone ID: PAT_MRT3847_37273C.1
tgccaatggggatgattgcctgctttgtgccacggacaataccccacagtggctgaacgcgcccatgggcccgaaaacgctctgcaactctcgtggtgggctcgtccagactggactgctggtgccacatgacacgaccgccgcaaggccaaccttagttctgacaaaa

SEQ ID NO: 73376 - DNA, 183 bp, Glycine max
  Clone ID: PAT_MRT3847_37274C.1
cgcacgcgtccgtacagccgtcagtagagcagcgaaagggaaagcaaccggggcaattaaacgctcacgcatttgccacttagcctgaaactcaagaagactcacttgattcgtcacagacattatgtcgatgatcagtcacatgtctgaagtcggaggtcacgactccgctcatggcgcagc

SEQ ID NO: 73377 - DNA, 315 bp, Glycine max
  Clone ID: PAT_MRT3847_37275C.1
cgccgcgtacgttttctcggaagtcgccgggagctcttaacctaggtatacacagctcttgacatattttgtattttctggaggattcctctttcttgctaacagagccacattttgggttgcttggtggctataccatcattgctcctttatccaccttcgcgtagtgtaaaactccgacgagtggctccgactaagcgaagtacaaaaccggcggtgttttccgccttgcgccgacgccagctttctattatacaaaggcctcggctgcgcattctgccctgctgcaaatcgttttggagctgaatgaagttt

SEQ ID NO: 73378 - DNA, 1450 bp, Glycine max
  Clone ID: PAT_MRT3847_37276C.1
cctaaacaagagaaaagtgatctacgtgtgattgatgatgcacgcactgctgatcggttgcttaattggatcaacaagcaattaggcagttcatttggcctggatgatcagaaatttcaaaatgagcttctttcatccaatgtatcagaccctgggcagattgcaagagctatctatgatgtcgaagaggcaacttctacagcttttgacatcatcttagagcacaagatgataaaaccgggaactcgtgcttcacttataaagtttcttcagcttttagcagctcatcatccttctaggagatgccggaagggtactgctgaatttcttgtgagctttgatgacttgtacccaacagattttgggtcaactaataagcaggaagatgataagagttcagttaggaacctaaagatttgtggaaaagatgtgcctcgaggatactggatgttttgtcgtggcagtaagaatgaaaccagaggctttagttgtggtttatgggttcttctgcattcactctctgtgaggattgatgatggagagagccagtttacatttaatgcaatatgtgattttgttcacaacttcttcatctgtgaggaatgccgacaacatttctacaagatgtgttcaagcgtttctagtcctttcaacaaagcccgtgactttgctctctggttgtggagttcccataacaaggtaaacgaaagattgatgaaagaagaagcatccctaggcactgctgaccccaaattcccaaagacaatttggccaccgaagcagctttgctcttcctgttacctaagtgttgaccagaggaacaacaaaattgaatggaaccaagatgaggtctttaagttcttggctgattactacagtaaaacactagcgtctctgtacaaggacaagagtattgtcggaaatgacggaagtgaaggagctgttgaagatttaatagtagcaactaatgcaattgtggtgcctgtgggagctgctttggctattgctgttgctagctgtgcttttggagcacttgcttgctactggcgttcgcagcaaaagagtcggaagcctagaagaacgtggaagtaggaattggagacaagtacacttcaaggcatgaggtgcatagcagctttcataggcaaccaattattatggtctcactccaaagagccttgccaaagttcctttttgaatctatcctgaatagaaaaatgtacagaatacaattcttgatttggagaccattactgatctgtgctattttctttcacttttttggcgttgagttcgcatctactatacagcctaggaatttgggggaaaggaggacatggcatgtaacatttttgttttgtaatttgggattattttttcaatatcaaagtaactgtataagctaaaagatttttatttgatgggtctcaatggttcggttgagttttct

SEQ ID NO: 73379 - DNA, 733 bp, Glycine max
  Clone ID: PAT_MRT3847_37277C.1
aaaaaataatcccaaattataaaacaaaaatgttacatgccatgtcctcctttcaacaaagcccgtgactttgctctctggttgtggagttcccataacaaggtaaacgaaagattgatgaaagaagaagcatccctaggcactgctgaccccaaattcccaaagacaatttggccaccgaagcagctttgctcttcctgttacctaagtgttgaccagaggaacaacataattgaatggaaccaagatgaagtctttaagttcttggctgattactacagtaaaacactagcgtctctgtacaaggacaagagtattgtcggaaatgacggaagtgaaggagctgttgaagatttaatagtagcaactaatgcaattgtggtgcctgtgggagctgctttggctattgctgttgctagctgtgcttttggagcacttgcttgctactggcgttcgcagcaaaagagtcggaagtattttcaccacctacactctctaaagaacatttgataattaggagggcctagaagaacgtggaagtaggaattggagacaagtacacttcaaggcatgaggtgcatagcagctttcataggcaaccaattattatggtctcactccaaagagccttgccaaagttcctttttgaatctatcctgaatagaaaaatgtacagaatacaattcttgatttggagaccattactgatctgtgctattttctttcacttttt

SEQ ID NO: 73380 - DNA, 397 bp, Glycine max
  Clone ID: PAT_MRT3847_37278C.1
gatcgagataactagaaacagcttgataaaactgaaggtccttgatgatcttcgttgctgcaagaatgattgcatggcaatcccatgcctaccatatgttccctgtacagaatgaacactgtcatatggtgcccgaactccttcggcaagatccgcaagttgtacgttagatccaaaagcacacaacatgttttgctttgataccatcactgccgagctcgtgcaaacatcaaaggcatgcatacatgacgaactgcttatatcagtcttcccatcagcttaccaacatgcttacttttataccacagacctatgagtgcatcccaaggacacattggagctcaaagtagaatgcaccgttctctctaatgtcccatactacaaaatacatggttat

SEQ ID NO: 73381 - DNA, 897 bp, Glycine max
  Clone ID: PAT_MRT3847_37279C.1
ggctcgagcagattggagagccacacaaatcaaagcttgccacaagctctgtccctctctctcttgtgctctgcttccctcaaaatcaaaccttgataatatgcaaatatcctaatccaaaaatcaacaagagcaagcattacccaatggaggctgaaaggcccccacttccacaacacaactctcacactaagcccctctctcgcctcaacgaatacgtagccaaaaccagagttggcaaatggttcaagctctcccaacgcaactccaccttcaccaccgagctccgtgccggcaccgccaccttcctcaccatggcctacatcctcgccgtcaacgcctccatcctctccgactccggcggcacctgctccgtctccgattgcgtccctctctgctccgacccatccacccctctctccgcctgctcaggcccatccctccgcgtcatccagcccgacgtctcatgcaaattcagcccagttaacccgggctacgcggcctgcctcgaaaacacgcgcaaggacttaatcgtggccactatagcctcctccctcattggctgcttcatcatgggcaccttcgcgaacctccctttgggcctcgccccgggcatgggctctaacgcgtattttgcttacaccgtcgtgggcttccacggctccggcaacgtctcctaccaaagcgccctcgccgcagtcttcatcgaaggaacaatcttcctcctcgtctcggcaatcgggcttcgcgccaagctcgccaaactcgtccccaagcccgtgagaataagctcctcggccggaatcgggtttttcttagccctcatcgggcttcaaaacaaccaaggtatcgggctcatcgggtacagcccatccaccttagtcaccctcggcgcct

SEQ ID NO: 73382 - DNA, 336 bp, Glycine max
  Clone ID: PAT_MRT3847_3727C.1
aaggggaaacaggatgaatacgaggtcagacacacccaacccggagcagtcattaaggatggtaggcaatcccttggaggttctttcatcttacaaccttggcgagcaaggcgtactcagataaggaactcggcctttggtcaacccataataacaacagcatatatgaagggtgggaggccatcttatatgaaaaatatcaaaaatattttggtaaaaaaactatggctatgataccaccctcgcccagctatgaatatctgagggcgtgaccttgatcgctaataaagcagctcagttgcttaacctcccccataaaaaaaaaactggggggcc

SEQ ID NO: 73383 - DNA, 112 bp, Glycine max
  Clone ID: PAT_MRT3847_37280C.1
aagtcctatcatctttgctatctttctaggtcgcgcctataccattttatacctgccttcactcaccgcacagtttgtgctcgagactgatgatgatccttttcaaaacggt

SEQ ID NO: 73384 - DNA, 461 bp, Glycine max
  Clone ID: PAT_MRT3847_37281C.1
gcttactctcattcattgttaagtgttaactcactgtgctaacttctgagtgaaatgacaaaaaaagactaaacttgtgtttctccaacacccctgcctctccgatcgcacaaccacgtccaaactcaccctcgccgcccacgacgacaccaatcacaaccccaacaacaaccacgccaccaatcaccgctgtcaccggagcaagacgcagcgctgctgctccgtgggggcctccgccgcttacggcacctgctctgatttcccggtggccatgggcatcgactccagcaggagctcttcggcaacaaaaatccgaattggtcgagcgagagattgtgagagagggttgagcaaaagtctcagggaagggttgagcaatgagtgatttcaacttctctccttttatcataaattagaatttttaaattttaagttagagtgtaattggatagaaaatttta

SEQ ID NO: 73385 - DNA, 115 bp, Glycine max
  Clone ID: PAT_MRT3847_37282C.1
ggaattcagctcgagtggatgtatggtcatggatctgtggagtccccaactcggtggatgggaccgcgtcccactcgacacccatgaagtgcgaagtcgcgagtgagaagaacga

SEQ ID NO: 73386 - DNA, 738 bp, Glycine max
  Clone ID: PAT_MRT3847_37283C.1
cccggaggaccggccggaattctgttctcccacgcggctgacttgcatgtgttgttgttccttctgatcggtgttttatctcagcctaaccagctcttctatgatggattcttgggaagcaacatcatgtcccttagaggagtagcagaaatagagtcaaatgggatactgaaactcacagatgattcaagtagagtagtgggtcaagctttttatccaactggtttaaggttcaagaactctagtgatggtaaagctttctccttttcttcttcttttgctttgattatattccctgagtatgaaaagttaggagggcatggtcttgcttttacaattgcataattcgggacgaggaaggctcatccaagccaatatcttggtattcttgactcaagtaacatagggaacttctccaaccacctctttgctgttgagtttgacacagcaaaggattttgagtttggggacattgatgacaaccatgttggaattgacatcaatagcttggcctccaatgcctctgcatctgcaggttactacactggggatgatgattcaagcaaacagaatctcaccctccaaagtagggtacctattctagcttgggttgattatgatgctgctaaaagtgtggtccatgtcacgatttctgcatcttctaccaaacccaaaaggccactcttgtcctatcatgtggatctttcaccaatccttaaggaatccatgtatgttggg

SEQ ID NO: 73387 - DNA, 484 bp, Glycine max
  Clone ID: PAT_MRT3847_37284C.1
ctaaactgtcttctgccttttcaagaccaaaacaaggaaactaaaaatggatcaatcccagaatgcgagccatcaagctggccaagccatgggacaagctcgggagaaggcaagcaacatgatgaacagtgcaggcaatgctgctcaaaatgtcaaagaatcctgccaagagactggccagcaaatgcagcaaaaggcacaaggggctgctgatgctgccaagaatgcagttggggctaacaaatgaatctagttgactggatatccctcaaagtggctatttatgtctttcaatttttggtttttgggctttatttatgcattgatatgcttttgcttttggcattttttcccttttcatcagacggattaatgtgactggttgtgtaccagccacttgagggccttgtttgttactagtagtatatgttattgaaaatctattttcacattatcaataaaaattacacgtttccatgaaaaa

SEQ ID NO: 73388 - DNA, 291 bp, Glycine max
  unsure (1)..(291): unsure at all n locations
  Clone ID: PAT_MRT3847_37285C.1
ccaaaacgccctgnantcgtaccgatgnatggaagttnntnttaangcggacacatggcattagatngggangctccatcatccctgagcaccggagtggaaatncatntngacatttattggtntggttgatnngatttcttaagactnngcntnnncttatngtnncntcctgagactgattatgccttatntnntatgggttcaaactttccaaatngattttggaagcnaaggattangatcttggatttgtaggtttacattgntatcantacatgtnatgcttct

SEQ ID NO: 73389 - DNA, 183 bp, Glycine max
  Clone ID: PAT_MRT3847_37286C.1
actagctcgagccgaatcgtctcgtggtggatttctgctgcttcatctactactaggtccaatcgttctctactctatgtttttgtacttgaggtgcatggggtggatacttcatagtaactgggggtggaattgaggactatgatgatggaaagttagaagactgtagggttgttagaatca

SEQ ID NO: 73390 - DNA, 163 bp, Glycine max
  Clone ID: PAT_MRT3847_37287C.1
gttctatctagcatgaagcactaattctgataggatgataaaaccttcaaatcagatataaactggtgctggttcacactctagagaagagcttaatgaaaaggacaagcaggagaaacccagaatgagtgctgccacattgctacatagaataggacctcaa

SEQ ID NO: 73391 - DNA, 956 bp, Glycine max
  Clone ID: PAT_MRT3847_37288C.1
tcagattcccacagaagaagagctccaagacatgataaacgaggtcgataattcggctcgagcggctcgagaatttgttgagtttttgaacttaatggccaagaaaatgaaggaaactgatgcagaggaagatctcaaagaggctttcaaggtgtttgacaaggatcaaaatggctacatttcagcaagtgaggtatatgtataaacttttattctttctattcactttttattgtaactttctttctctgacggcaatgaccaatcaaagtattcatgagatttctgacaaagtaaggttccttcaaacttgaacaaaaagcaagtagggtcaagatgttgcagagtgcaaactagattacaactcttgaatcttcccttttgtatttttttaatactttttctataaatggtgcgtttacttttctgcctacgtaatagaggctgcatatgcaatttttcttataaaattcctacttcaagtttcagccaatcttactcaaatttcttccttgaactagtgatgtgtatatttgtcaagatgatgatgattattggatgaaaatttaaaccaacaaatttattgttcgaattcgtttttgtgccccactctcatttactcccaagaaattaataagtcttccaattaatgtttgttgtatttaacttgtacacatgatgtgaatgaccaatgtattagagtgacatctcagccacccatttcatgttcaaacttcaacccataattattctttcagttttagtttagtattccttatgttttacaattaattagagtaaatttattcaagaaccgttgaaattagactcttttttgaaagattaatgtatgctacaatttattctttctcttgtgaacatggtattgctacaatttatttatatcattcagaaaaaaaaaaaaaagcacaagaattaaacaaaaaaaaaaaaaa

SEQ ID NO: 73392 - DNA, 358 bp, Glycine max
  Clone ID: PAT_MRT3847_37289C.1
gcgaatgatatccagacgaggatatacaaatgagggggggcgtcattgagtaccaggggaaagcatccaagcacttaatgagtaccgctttcatctgggtaatacactcgggtctaagcaggaacaacaagagaaatggaaagcagaccatggcgacaaaaagaaaaccagcctcccctgagttaacacgcaagcagaggagaggagagcattggttgaagccaagcgcgcagaacaaattcgcaaggcaaaggaaagagctgctaaagaccgagcagctggaagctctacaaagaaggcctctggctgcttttgaaggctgatgccttaatacgttgttctgcttgtgtgcctgatg

SEQ ID NO: 73393 - DNA, 843 bp, Glycine max
  Clone ID: PAT_MRT3847_3728C.1
gaaaaagaagcaggtgccggagtggatgaacagttctctgtggtccaccccctccgaccctcctgcttctgtttctgttagagaagaacccccgacaatcccaaccaatcagaatgcctctcctcctctttcttcttcttcatccgtttcttctcctactgctactgccgatgacatctcccggcatgctcttttttttgttcagttgttggccgagttgtctaggaaggtgatagacatgcgcgagttgaggagagtcgtcgcttctcaaggaatatctgatgctggtgctttgcgccccacgctctggaagcttttgcttggatatcttccgcccgatcgttccctttggtcctctgaattagccaaaaagaggtcccagtacaaaaatttcaaagacgacctcctcacgaatccttcagaaatcacgaggaggatgtacaactccaactctgctgctcttggtatcgatgatgcaaaatctcatactcagactaggctcttgctttctagatcacgtatcactcatcaggaccaccctttgagtcttgtcaagaccagcatatggaatcagttcttccaggacacagagatcatagaccagattgaccgagatgtcaatcgtactcatccagatatacacttcttctctggtgattctctttttgcaaaatctaatcaggaggctttaaagaccatattaattgtttttgcaaagttgaactcgggtataagatattttcaagggatgaatgaagtattggctcctctcttctatgtggtcaaaaatgaccctgacgaggaaaatgaaacctttgctgaagcaaacacattcttttggtt

SEQ ID NO: 73394 - DNA, 106 bp, Glycine max
  Clone ID: PAT_MRT3847_37290C.1
tcttcatctgtacataataacataacacccatactagaaagccagcaaccttttaaagttttggcttatatccttcggagagtactaaagtgaggtgctgattatt

SEQ ID NO: 73395 - DNA, 490 bp, Glycine max
  Clone ID: PAT_MRT3847_37291C.1
tcctcctcttttctatttcccttttctcattatcctctcttctctttctctctctctctctctctcttatcccttgacatgtcttctgccggcggcgacagcggcggcagcgctacttccggcgagcctcgccaatacttctgccaccagtgcaaccgcaccgtctcaatttccccttctccctcctccgatctcctctgccccacttgcaacggcggcttcctcgaagaactcgaaatcccaatccccgaccctaaccctcctaatccttttttctccgacttccccctcggcggcgccgccaccattcccctcgtcctccccggcgctgccacctcccctcccttcggcgatctctcagccctcttcggcgaccgatccgacgctgccgcctccgatgccttcaaccccctcgtcttcctccagaactacttccaaaccctaagagccggcgggggcggcaaccgccaactcctgatcgagtacttct

SEQ ID NO: 73396 - DNA, 461 bp, Glycine max
  Clone ID: PAT_MRT3847_37292C.1
agtcatcgtgttgaaaagggggcagagaaaacaacgattttcataactttttctgcaaacactcttatttgctgaagaactaaattttaattatgttagtcaaattaatgtgcgttgttagatataatattatataattcaatggttatgatgattaacttgtcaccgtttgtatattttttttataattaatattttattaaattgacaatattattttcctgttttaggagtgttcttgtttcgatcggaggtacatggtgaccttcgacaaatgtttcacctctccggcacggacaaccccatcatcggcaccttctccaattttttttattctaacctttcccttcaccttttttctttcttcaaaattctgcatattatcacaactagatcttgtggcgtgcatagtaggatcagaggtgtggagatctcgcaagtggcaactagatctaccaccc

SEQ ID NO: 73397 - DNA, 2879 bp, Glycine max
  unsure (1)..(2879): unsure at all n locations
  Clone ID: PAT_MRT3847_37293C.1
gtttcgctcaagcacaaactctatcgtggttaccgtagagagagaaaaacaagagagagaaagtgagggtgagagtaggagtgggagtgagtgagaagaagaagaagaaaccatgaacaaaagaaccacgttgcttattcgaaccctcttgttcctcttcgtcctcaactccctctatctctccctctacttcacccacaaaccctcttcttcttctccttcagaagaaaaagaaaaatcagaactcgaaccagacacatacctaacacccttttcacacgaacctcactcttcaaagccatggcctattctcccttcctacctcccctggaccacttctgcgcgatcccactcctgcgaggcctacttcgggaacggcttcacgcggcgccgcgacgccctcctttcccgcggcggcgcggggtggttccggtgccaccacaacgacgcgctccggagctcggtgtgcgagggcgggaggctgcgcatggagccggagaaaatcacgatggcgaagggtggcgaggatttggcggcggttatggggcgcacggaggacgaggagatgcccgtgtttcaaaacggtgcgtttcaggttgacgggggtgaaggtcgccggtggaccggaaggttctggttgaccaagagtttttggatgagtatgtgccaagggngagggattgatagacacaccatggcgggatttgatcgccaagattcggatcgtgagagggaaggattttcaatgtgatgagtggattgaggaacctgcacttctggtgacacgttttgagtatgctaatctttttcacactgttacagactggtacagtgcttatgtttcttctagagtcactggtctgcctaatcgaccacatttgatctttgttgacggccacagcaaggctcctcttgaagagacatgggaagcttggtgatctttaattttctgattcacatctcatatgtgtcttgcaatgttttacctttaattgcagccagtttggttactaccatgtgattcaaagatgctgatatcttgttggagcagaaatggcttttctgcccatccccgtcttggcggtacagttctaccacgcccttgtagcggccgagtcgtcgccgtctcactgaggtcctgggctcctgattataaagggtgtaaaattaaccttgtcaatggattgttcgcacacatgtctatgaaggatcaggtgcgagccattcaagatgcatcggtcatcattggcgcccatggtgccggtcttactcatatagtatctgctttgcctaaaactgtgattctggagatcattagcagctatttcagacgacctcattttgcatatatttcgcggtggaaagggttagagtatcatgcaatcaaccttgctggatcacatgcggatactggaaccgtgatcaaagaactggttgacataatgaaaagccttggatgttgagtgttttgggcttggaagtgttgatatctgagctcgagtagtggaatggaaggtgatttttaatttgccttattctcaagcgtcagatatgctaagagcttcagtggttcagtttgttttcatcatgctattctctcacccttgggatatgagacggcaatgtttagagggctttcagaacatatagattgttatggagctcctgcacaagaactattgcaaaaccctaatgaccacaaaaccgcgcgcctttctgagtttggagaaatggtcagagcagcttttgggctacctttaaatgtaaaccatgatggaaaaccactcgctggacataatgtcctctttgttcgtcgcgaagattatttagctcatccacgtcacagtggaaaacttgaatcacgactaagtaacgagcaagaagtcttcgactcgttgaagagctgggcatccaattataaagggtgtaaaattaaccttgtcaacggattgtttgctcacatgtctatgaaggatcaggttcaagccattcatgatgcatcggtcatcattggtgcccacggtgctggtcttactcatatagtatctgcattgcctaaaactgtgattctggagatcattagcagctattacagacgaccacattttgcttatatttcgcggtggaaaggattagagtatcatgcaatcaaccttgctggatcacatgctgatcctggagccgtgatcaaagaactggcgaacataatgaaaagccttggatgttgagtgttttggggttgaaactgctgatatctgagcttgagtggtggaatggaaggtgatctgtaattttctgattcacatctcatacgtggcttgcaatgttttttcctttcattgcggccagttttgttactacgaaggtgcttgaaagttgctgatatcttgttggagcagaaatagcataactcttctaaactgaatttaacttgacaattctacaatacccttgaagatgcagaatcagaaccatgagagaaaggtccatttgtcttggtttatattgcatgctggattgttagtacatggcacagtatgtgacatcttgcagtggattttgtttccttcactttctccttgctagtacctggcacacagtatacagaagaggggtctcaattttaccccgctttgttgtacaataggctttttcacgagctcatattttctgtgtattttcgatacggattctatgttaattgttgaggtaatccgtatagattgaatttgtacttgcattaagcttttgcctgatataattttcagtgaacttgtttgtctgaagtatttaatgcatacagtattaaatcatttaagacaaataatttgacatttttaggcacgagaaaatataataaaataataatattaatatca

SEQ ID NO: 73398 - DNA, 197 bp, Glycine max
  Clone ID: PAT_MRT3847_37294C.1
cgtccgttttctcgtaattctactcgagctttcaggctgtgaatgaacctacagatgctcactgttctgttttggattatgtctacacgaccaaaactttgtggcttgtgtttcaataaacatgcgacgagccaaatatcttgcaacgactattaatgaattgcgactgtttgggaagtaacctctctaaagatttt

SEQ ID NO: 73399 - DNA, 207 bp, Glycine max
  Clone ID: PAT_MRT3847_37295C.1
aggcgcacgaggggggaccaaggaagaccaaaccgaacccggcggagaaaaaacatagcccaaaagtggggggaaaaaaaactgggcggaatattggtaaaagcgacttcccggagagaaaaagatgtccagaaaaaatagcacacacagtaaaagaccgaaaataaaaaggtaaagcccggggggcctatatagaggggggaaaca

SEQ ID NO: 73400 - DNA, 439 bp, Glycine max
  Clone ID: PAT_MRT3847_37296C.1
gggaaacaaacgggagaaacataaaggggaaaaaaaagttccctccacccaaacttattttaaaggggggtaacaaacccataaaaaaaaaaattttttttaaaaaggggggggaaaacccaacccccaccatcacaaaaaaatcagccccagttaaaacccccccccgaaaacccaaccccaagggcaaaggggaccccttcggggggggggagccagggggggccccccccccccctagcggggggccaaaaaaaaaaacccccgggggggcgggggggaacccctcctgggccgggatcttccccttcacatgggaaagggggggggagccccccccccgggggggaaaagcccaacccggaaggggctggacgaaaatcggcttccccccccgaaaacccaccaccaaggggagaggggcccccttcgggggggg

SEQ ID NO: 73401 - DNA, 199 bp, Glycine max
  Clone ID: PAT_MRT3847_37297C.1
atgccagctggcaagaatctagaagtaagacatcacagaaccgcagataagacccacacaagaccgacaaaatgggcacagccgataaggctcacatcattttgcggagagctcggacgtgccaagcacagctagtagaccagcactgggcacaaagatctaccaggccagcaggcctcgacaagagcaccatcgataa

SEQ ID NO: 73402 - DNA, 729 bp, Glycine max
  Clone ID: PAT_MRT3847_37298C.1
ctctgagttcaaagccggagctagcgtttacgattattatgcaaccactccaagggactttgttgatcatgcagattttgaagatctacatgtaaagaagctttacatgaggcttcaagcacttgaggctgatagggaatcaatgaggcaggcaatcatttcaatgcgcactgataaagcacagcttgttttgttgaaggaaatagctcaagaattgtgcaaagagatgtcacagcagaaaaaaatgacagcgagatcctttattagcagcttttcattctttacagtttttaagtggattgcttcaattgttttctggagaaagaaagctcatcaaatcaagtatatgtttgggctaccatctgacagtgggggcttgctaatgctgcttgacaagggaccccatgtaaggtcatggagatatcttcaaagtacacaagtgggagattagttctccaatttttctttttttcttttttatcaatggggaaacatctccaattattgttttagcttaaagggtaagctcatatgtgggagtggggagcaccaactgagtctgaatcacactaatttttttcctttctcttttcctttagatttttctcgccaaaaaggtggcgttttgtgcaatggtcttttatttcttttgtatgaaattaaatgtaatttgttggttgactgatgaaaacttggatatgacaatatatttcagcaatctacccgagt

SEQ ID NO: 73403 - DNA, 434 bp, Glycine max
  Clone ID: PAT_MRT3847_37299C.1
ttggttcaagggtcttcgacccgacggggtggcaagaattgcggtttccgattttatcggcggcgctgccgtgtcggaaaattgcttgcatgagttgagttaccggctgagggactgggaagggaagggtaacggtgtgatctatttcggggagagggtggtgccgtcagaggaacgttcgaatgctgccgtgaaaccggtgaagggaatgacggtgagtaaggattccggtgattataagtctaatgaagttgcgtgtcccgtgtctgtggaactaccctaacgttatttgaatatttgtattttcctattattattttatttgacgaatattggcaaaggcggtgtggtaagtcaagtgaatggagaaaggtgaaaggtgtaaggtgcaagtgtcatgtactttgagagaaatctagtgttgcacatgaact

SEQ ID NO: 73404 - DNA, 609 bp, Glycine max
  unsure (1)..(609): unsure at all n locations
  Clone ID: PAT_MRT3847_3729C.1
ggganngttcngttaatgatggagnngcagangncgagaagcggaagacatggagaggtggttggagattgggtgagatcgagttgaaatcaaagatgctcgaacatgcacaagcaaacgcataggcatgtgtggaagcggatcagagacagggaagctgggaaattgcgtgcaaaccatttcgcgaaccgcataaaatccaatcgcatttcgcaactccagttgtccaatcacaaagacattgtctcacctcacaaaggcgccatcaactcccttcaggttgattcgacagagggaagatatttgctatccgctgcctccgatgcctcggtagcagtgtacgacgtccaacgacccaccgtttacgaagcaggcggcggcggcggcggcggcatatcgaaacacagctccatatttgtcgtagacaagcagcatcatcaaggccataaatatgcggtgtccacagctattggtgatcccattgacactggctagttcgtcactggctcttacgatcatcacattaatgtctgggataccaattccactcaggtggcggtgaatttcataatgcctgtatatgctcatagggctgccatgagcagtgtg

SEQ ID NO: 73405 - DNA, 470 bp, Glycine max
  Clone ID: PAT_MRT3847_372C.1
attaacatatctagtaacatatatttattaaaatttaaactaaatgattaataatacattaaaaatttaaaataatataaaaattattggtataaattataaatgtgacattaatacttgtgtaagatacccacaataagctaactttgtataaaaagtggatgcttgcttgctttatcttgctgtgtgttttcctaaaaagcttgtgcaaagcttttctagcaacaaccttgactactttaactggatgtcgctctgctagggttcccctagcaagcagccaacgtcatgaccaatcgcaacatcgttttcccatggacctttcttcttgacccttcgtcacccacaatccccgttccttcaaaactccaatcgcaaaaagcctcttttgctaaaatcctcagcaattcatgcgacattgtgattagtaagctaccaaagccttacctcaagggcgatactttctccat

SEQ ID NO: 73406 - DNA, 286 bp, Glycine max
  Clone ID: PAT_MRT3847_37300C.1
agacctatgacgcacgctgcccgcagactcgaaactccgaattgagggcgagagctgtttcatttattattaaacaacctactatgcaaatttctggaattgacccataattggtggagacgttgtgcagaatgacttggatcgtatcctacttaatcaacacttttattccgattattcagacataaatgcccattttaaaacaccgtatatcatactatttattctgggctccaacattattattcaatccatatttggtttgtgtgcgacccatgattacaat

SEQ ID NO: 73407 - DNA, 341 bp, Glycine max
  Clone ID: PAT_MRT3847_37301C.1
tcggtatctaatagcatgtggagccaaactggacaattcatggacttcgaatcagtttgtgaacaatataggacttcttgctttgcagagaaaaattgtacgcaactgttcagctcaaaacccaagcactctcggatatcattggtggctgtctatgaaaaaatcgctcctggttccccatcttctactgtctacacccagaacaccaaccggggtatcatctgcgacaccataaagcaccattcgttgcgtcgggttgcacaaaccaaactcaggaggaactccaaaagcatcgtgataagtacacacccaaccctcggggcaatggcatcatgttcctc

SEQ ID NO: 73408 - DNA, 185 bp, Glycine max
  Clone ID: PAT_MRT3847_37302C.1
ccccaaaaacaaaaatgattggtttctggtttaccacgaacgcactattaactcaacacattaccacgacgctgaatttgtaaaaacaagtttgggcttattacagggcttgcccaaatagctacctatctattttttcttttgggtttttctaaaacccaattaacacggttcaaaacaccgaa

SEQ ID NO: 73409 - DNA, 245 bp, Glycine max
  unsure (1)..(245): unsure at all n locations
  Clone ID: PAT_MRT3847_37303C.1
atactgagtaaaggagacatggtccttcccgtggggctaatttgattaggccacgtcaaccataatgcaggatgaccactccatacgttatcagagtgtgttatatctttaacataaaaagccaggcttcgataaaacacttgcgaaatgggacaggcggaaactaaatgtgtacagaagttcagaacaagaaatccacttttaggatgacaggcacaatanccacctaatacgaaaattgggat

SEQ ID NO: 73410 - DNA, 331 bp, Glycine max
  Clone ID: PAT_MRT3847_37304C.1
ataataactacacatatttatatacaagagtctttataatacaaatttatacttatcttatacaaaaaccaaatctataattaatcctaaaatacacacttttaatagctctctaaaaacaatacaataactttatacaccaacacattccaaaataaatattattatcattaaacatattttaaaatacacatacaacaatttctttcccacactaattaaccacatattttcaatattaatatactccatacatcttacttagttgatcctaatataaattccctttcctttattttacatcctcaaaattaaaaaaaaatcctttctt

SEQ ID NO: 73411 - DNA, 558 bp, Glycine max
  Clone ID: PAT_MRT3847_37305C.1
ccacacacatccacaaaccgcaaatatggtcgtcaaggtcggtatcaacggtttcggccgcattggtcgcatcgtcttccgcaacgccgtcgagcaccaggacatcgacatcgtctccgtgaacgaccccttcattgagcccgagtacgccgcctacatgctcaagtacgactccacccacggtgtcttcaagggtgacatccaggtctccggcaagaacctcattgtcaacggcaaggagatcaccttctacaccgagcgtgaccccgccaacatcccctggtctgagaagggcgccgagtacgtcgttgagtccaccggtgtcttcaccaccaacgagaaggcttccctccacttgaagggtggtgccaagaaggtcatcatctccgctccctccgccgacgcccccatgttcgtcatgggcgtcaacgagaaggagtacaagtccgacatccccgtcctctccaacgcctcttgcaccaccaactggcttgctcccctcgccaaggtcatccacgacaagtacaccatcattgagggttcttatgaccaccattc

SEQ ID NO: 73412 - DNA, 527 bp, Glycine max
  Clone ID: PAT_MRT3847_37306C.1
cttatttctttatttcttactccttttctatttctgttattaagcttagaaagtttgaatcctaaatttactcatttgctcacttgtttccattcattctatttttctcaaccttattttcaatcattctaattcttgctaatttctttcctttctatgcagcacagtacttagtaagtatttctctttcacaaatgtttttctttttctgaaaacctacaataatctttctcgttagtgttcaaaaggataaaagagttcaatagatcgatacttacactagacaatctttgcaagattccatttgtctgcgcaaaatatgcctctagaagcatctccaattcctcaacgtcaagtttaggacaaaagaatttgtcatacttttctgaatttgattcatcactaaagacaaaaggaaccattgtgatttgtgagctcaagtcttatttgtcaaactatagctggttttaaatagacaaacattggtggtttttacttttttacctttgatcgttatcttcaaattc

SEQ ID NO: 73413 - DNA, 228 bp, Glycine max
  Clone ID: PAT_MRT3847_37307C.1
ctagggtgcagcttcgagaacacgacatctggggactcatctcttacacctattctctcttcatcctgttctatctgtgacgagcatcatggcctcaagagcagtgttactgttggccaagtgtatgcatcctgacatgggtgtggacattccctcatcactcatcccttttttccttaaaggtcttgtacagggtgacgcttgacatgctcgtttttggaactcacc

SEQ ID NO: 73414 - DNA, 296 bp, Glycine max
  Clone ID: PAT_MRT3847_37308C.1
ggagcaaaaccctaatccctatttttcttcctcagtagtgtcatttacgcttctcttcgctgcagcaactatgcctaaccctaaggtcttcttcgacatgaccatcggcggtcaatctgctggtcgcatcgtgatggagctctatgccgacgtcactccccgcaccgtcgagaatttccgcgcgctttgcaccggcgagaaaggcgtagggcggagctgcaagcctctccactacaatggctcgtccttccaacgcgtgatcccgagtttcatgtgtcatggttgcgacttcaccg

SEQ ID NO: 73415 - DNA, 188 bp, Glycine max
  unsure (1)..(188): unsure at all n locations
  Clone ID: PAT_MRT3847_37309C.1
aganggacgngtacgnaagcacggaattcggctcgagcacgagcnacgcgtagntnggancccccgcaacgacgtngtaccanggncgngtagnngnagtgccggntcnctatgcgaaaannaantnagggcnnctcggcgangannggantaatncatnacnctgnngntnnatnncanacaacaaa

SEQ ID NO: 73416 - DNA, 195 bp, Glycine max
  Clone ID: PAT_MRT3847_3730C.1
gtgacaacatcacaaccaccacgacaatatcatttaaggaagtcaaactacgacaacgatgacaccaccaaaaacaactcttccttccaaagccaaaatgacgacaacacatccacaatcgacaacaattaccacgaaaacaacacacccttccaaaccaacaacgactacatcaacctccccttctcacattgg

SEQ ID NO: 73417 - DNA, 321 bp, Glycine max
  Clone ID: PAT_MRT3847_37310C.1
tggattgggaaaatcgaaataaataattttcgttgtgctaatattaaactaaatagcccttcggaatttacaggtgttttaacagattaggggaggtataacattccagggtaggatgacctgcatttgacataatgtccggttacaacatacaccagtctgtgaactaaaagaacgggaaaaacttcggtagcaacgaccatggtgcggcaataactacatgcgaatcctagattgtaaacccatgtttgtcgctctgctttcttaacagggggggctctcccacgggcatacttgtatcatggacacagtctctcccgc

SEQ ID NO: 73418 - DNA, 1311 bp, Glycine max
  Clone ID: PAT_MRT3847_37311C.1
ttatttttatgcgctcctttggtaatgaccaggaggattttggtgcatggtaggtgatacaaacaggccattacagggaaaatttgcttctctcttttcttttgccccattcttgtatcagagaagaaacatgtggaagactggcaggctacggtccacggacatgcagcaggtacctgcctgactgttgcacgtacccgaacctttgttacggaccataaacagtttggtgcacgccctgcgacgcgaccggtcgatccgcgaaggcagttcattttgtaacattttacatgccactctggggtgcaattctgtataatggatttacatacttacaagtaatacgcatgctgaataatgcaacccgtatggcggttggtatgtcaggccaaacttttgtgtcagatacaagagataacatgagggctttgaatcgctggggatactatccactaattctgataggatcatggacttttggcaccattaaccgtattcatgatttttttgaacccaaccataagatcttttggctcacatttcttgatgttggaacggctgctcttatgggcctctttaactcaattgcttatggtctcaattcttctgttcgtagagcaatttgtgaaagactggacaagttctggcctgagagattaaacagatggctccctaacagtttaaagtacaagaacctacagcaagaaagtgaactagttttgttcaaaactgaagatcaataacagtgaatggacaaattgtgatcctccatgccaagtgacatttcttattctagtttactaagatgctgttttcatagacaacagaggatctgtaggcagcaaacattccaggctatttattgctccgctgtttcaattacgtgaatcgtgttattcacttgctgtattttatactgctgatgatccttctcaagcagataagaggatggaccatttcatgtggaatctgcttcagctaattgaagactacttgtgactgcaaagaagagtgcttttatcttttttcgcaaaaggctctacatctctccctgtgattcatctttttaataagtcttgacttagagcatcactgtatgccccccttgtatccagtcctaatttctgcaattcaatgttttattaaattttattagttgtatagtttagatgcatttccagattgttacacattgctaaacaacttttctcccaaatttgctgtgtgtatgtggtttttgagctataaaagtacttctagtttgaaaaaaaaaaaaaaaaaaagtaaaaaaaagggcggcctcttaatagt

SEQ ID NO: 73419 - DNA, 1040 bp, Glycine max
  Clone ID: PAT_MRT3847_37312C.1
ttcgtttgaatggtcaacaacattaccccttgtgttatttaccatctttcttggcttttttattttctaccactatttggtggttacaaataaagaccaaaacagggagttaaattcaaaaagttttcctcctaagaagaagaaagcacgcaagtcagtaaagaacaatatcaccgttgacaacagacaggataaacctatgtcatcggctgaggaggatatactaacacatatggagacaaacactgatacatatacacagatgcaagttgatggacgcagaattggtaaactgtttgtatcaaacaaagaaattgctaagggaagcaatggtaccattgtttttgaggggacatatgaaggccgagttgttgctgtcaaacgtcttgtcaaagcccatcatgatgtagcccataaagaaatccaaaatctcattgcatctgatagacatccaaacattgttcgatgggatgtagtttctggacttgttcatttgcaccacgcgtccgcccacgcgtccgcccacgcgtccgaaaatgttttgatattaaaagaaaaatcattatgtgcaaagctttctgatatgggaattagtaaacgccttcttgaggatatgtcttctttgggtcacactgttactggctgtggaagttcagggtggcaagcaccggagcaacttgttcaaggacgtcaaacacgagctgtggatttatttagtttaggttgcattctctttttctgcatgactggaggaagacatccatttggagaacgtcttgagcgggatttcaatattgtgaaaaatcaaaaggatcttttcttagtggagtttattcctgaagccgacgatcttatttcttgtttgttaaaccctaaccctgatctcagactaacagcgattgaagtattgcatcatcctcttttttggagctctgagatgagactttcatttcttcgtgatgtaagtgacagagtggaacttgaagacagagaaattgattctgatcttttgaaggctctagaaagcattgctccactgg

SEQ ID NO: 73420 - DNA, 348 bp, Glycine max
  Clone ID: PAT_MRT3847_37313C.1
atcaggctcactgagaaaacaatttttacttgcagagatttggacaacctggaagacgattatacaccagcgaccaaggtgacaacacgacccgcgcatttcattaggcggcatctgaatcgccttgacgatcaacagctccgccacgtacatgcgccggtacgcggcgaaagtaccccgcgcggcgtgacgctgatcccgggcgaccgaatcgggcctttagataacacggacggtggaacaagtgatggaggcgatgcacgccgccatgaacttcgagaagtacgaggtgcacggcgacaggaatgctgcgccggcagatgtgctggaatccaccacgaagaacaa

SEQ ID NO: 73421 - DNA, 241 bp, Glycine max
  unsure (1)..(241): unsure at all n locations
  Clone ID: PAT_MRT3847_37314C.1
tctcgagcgaatcggctcgggtattttcacatttgccccgactttgtctcttggagttccaggtcccaccatcacataagaactcctcttccccacatctaacacacccgnagttctctctctttctctttttctttttcattactcacgcaactcaactattgagagcttttctgcatggaatttgattcaagctttcaaggggccacaatacctttcaagccctttcccacctacgact

SEQ ID NO: 73422 - DNA, 397 bp, Glycine max
  Clone ID: PAT_MRT3847_37315C.1
gggggttggttttttttttttctccgaaaaaaaaaaaaagggccctggaaccgaaagaactccaaaaaattgggaaaacgggaggtacaagggaacccaaataatttttcccccctcttgcccaaaggttaaccggggtggggccccctttttggggaaaggggaaacatggcttccaaaaataaagggccaaaaaacagggggggggtttatttatattgccacccgcggaaaaagggctctaaatccccgaaagggatcggatttcttttgccaaagggggtttggccccgggccatggatccaagggggtgccctttgggggccctttggaacccactccccggtgtttctggacatccaagagggtgctgccctcaaaaaaaggggcgggggg

SEQ ID NO: 73423 - DNA, 683 bp, Glycine max
  Clone ID: PAT_MRT3847_37316C.1
ccagcgtccggttatatctatatctccaccaactttaaatgtagagcacggtgcaaaccgttgcttctcgtgaagcgctatcaggaattatggctccttctcaaggcgaacaattgaacttctgcgtacaccctcgaactctaaatcggctggaaatactacgatccacacatggtcatgcgtttcagtgtctcggggggcgtggcccacatccataggccgaagataaaaatctacatgcttggtgatgctcaccatgaagaacaggcgggaaatatacgactggactgtgatggatgagaaagccttgaagaagctaaacataaataagaagttggtgaacaaactaactaaaaagtaccatgcctttttagcttctgaagcagtcattaagcaaattcctattcttttgggtcctggtctcaacaaggcaggaaagttccctacacttgttgctgaccatgaaactcttgagtcaaaggttaacgagtccaaggtcatggttaaatttcaacttaagaaggtgctctgcatgggagtagctgtggcgaatgttaatatggaggaaaagcatatcttacaaaatggtcaactgagttttaaaaaacttgggtctttcttgaaaaagaactggcaaaatgtcaggtgctcgtatctgatgagttcaatggggaaatcttacc

SEQ ID NO: 73424 - DNA, 466 bp, Glycine max
  Clone ID: PAT_MRT3847_37317C.1
tgaaagtgcaacacagaacaaatgcctcacctattttcatcggacttctattaccttatccagctccacttcataaccaaaatacctcgaaccctctctctaatctactcctaaatccgtaaccacaaaacataatcacacaaattaaattattccaaatatcccatcacaaactactaactaaattacccatatcatttcacttgcacttatcctatccatatcagattcacttatcctttccatatctactcattattactatcctgctcatattaatgtccaccctattcataatcactactaccctatccataatgcttaatactgttatcattacttttactatatccatacatacaacttatgtttcaaaaagtactactataacactaacaaaactttttctgcacaaactcaatataatactcaccattaataccattcaattctacttaaatattac

SEQ ID NO: 73425 - DNA, 459 bp, Glycine max
  Clone ID: PAT_MRT3847_37318C.1
gctcacttggctggagccgaccttctgattgttgcgagaaatggtgcaaatgtactactccattctacgagctgggtccgcaaaaaaacaagttgcatctggagacggtgctcccactcggctggtacgcctgggttgctcaccgagcgctacccgctcagatggaaaacccttccccccgtggtgcaccgggtggatgcgtttcgggctttgccacgggacgtggccctgccccgggtctcaccgctctgagctggcgaacctgactatgatggcttgtagcgtctcctgccgtggtgatgcggttatttagccgagcagtcattcgtggcgcgatgttgagtccgtgactggtttctcatattgatgatacctccattgacgaacggcctaactcagagacaacatccaaaactgcatgctgtctacttgtactgatatgtgggtatggctgcgtag

SEQ ID NO: 73426 - DNA, 548 bp, Glycine max
  Clone ID: PAT_MRT3847_37319C.1
ccacgcgtccgcggacgcgtgggcggacgcgtgggcaaacacttgagtgagacaaagatgagaagctctaataataaccatgatgctcctccacctccacctctacttcaagacctgaaggtgatcatccacaatgcctccatgattttcccatccaaagagatcgagagaaagtcccttttcttgtcaaacattgacaaggtcctcagcttcgatgtggaaacggttcacttctttggtgcccacaaagattttcctcctcgtgttgtgaatgagaggctaaagaatgccctagaggatgcccttgtggtttatgacttcttgggtggaagattgaagctcaactttgacaccaaaagattggagatggattgtaattctgagggagctgggttcgtggtggcatccagcgagtacaatttggatcagataggagatttggattatccaaatccagcttttgcacaattggtacaaaagaataaggattttcttaaacacggtgatgtcccactctgtgttgcccaggtgacatccttcaagtgtgg

SEQ ID NO: 73427 - DNA, 439 bp, Glycine max
  unsure (1)..(439): unsure at all n locations
  Clone ID: PAT_MRT3847_3731C.1
acagccacttgaattttactgtggttttattatttttcacttcaaattctgacccaaacgaggactgtaaaattcgactgttgatcaatttacgtggaattgcttgaatttgtggtggatgactagggagcactctaattctgctgaattttgtatcagataacgctgcatttgttcaaaccttaatactatttacgtactcttaattttgtctcaagtcattcgttatttgtgcgcaatctgtttcaactacatttttcttctttgcaattttgcatattgatttaatgttttgtttctagagtctggacatccttaaactacaacacaaagggaataaacatgtgtttatgcctgataacctaaggtttaaggctgaatgtaaccataaaatntactgtgcgaactgttgtgcttactttgttatagtgttggacgc

SEQ ID NO: 73428 - DNA, 111 bp, Glycine max
  Clone ID: PAT_MRT3847_37320C.1
aaaataatcaaatgaaattttgtaatagcattcagttagcgtacgtatcaggataaagtgataaaaccaagtgtgtgggtgtaaatgataagaactgaaataagtgggtgc

SEQ ID NO: 73429 - DNA, 264 bp, Glycine max
  Clone ID: PAT_MRT3847_37321C.1
aaaaatcaaacataggtggtgtcaaatattatgttgaaaaatgtatggggtgacactgatttttaggcaaagcatttggataaagtttgacgtgctccaatgcgggtgggaggggtgcactaactaacaaggcctatacaatagtttgctctattgcgggcgaagctgtaggtatgaacgaatctaatgctactaggaggcttaattgttgcaagaactagaatcccaagtgggagagtccatcttacttcctcacaaattagt

SEQ ID NO: 73430 - DNA, 502 bp, Glycine max
  Clone ID: PAT_MRT3847_37322C.1
gaatgtataagtggcattgatcaaagcatctatttaggacatgcatatgaacttgtatgtttgctgatggatcagcagatacaaataaactacatacatgtatataaaacaatgaaattttctattagataaatggtggaaaataataaccattaaccctgaagattacttctacatataaaaggatttcatgctaggaggttaatgtggagaccatcgattgtctcccttcaccatcctgatcaatatgtggacacaaaatttcttgtttcagttttcaacacgttagtcaaagaagccttcatcttcaagccaaatatcgactaagaaatctaccatctctggtaagggtattggctcagcaaaaggttcgttagttgacagcagctcttcatatgatgttgaccagctaataattggatccttagctgttcttggtggatgttgagacttatcaccaacccattttgttctatcctcatgccaagcaattgcagcatga

SEQ ID NO: 73431 - DNA, 1118 bp, Glycine max
  Clone ID: PAT_MRT3847_37323C.1
tttctcacgccaaagttaattattaacttttcaattatgaatgtataagtggcattgatcaaagcatctatttaggacatgcatatgaacttgtatgtttgctgatggatcagcagatacaaataaactacatacatgtatataaaacaatgaaattttctattagataaatggtggaaaataataaccattaaccctgaagattacttctacatataaaaggatttcatgctaggaggttaatgtggagaccatcgattgtctcccttcaccatcctgatcaatatgtggacacctacaaaggctttaaaaatttcttgtttcagttgccatttaactaaaactttcaacaatttagtcaaagaagccttcatcttcaagccaaatatcgactaagaaatctaccatctctggtaagggtattggctcagcaaaaggttcgttagttgacagcagctcttcatatgatgttgaccagctaataattggatccttagctgttcttggtggatgttgagacttatcaccaacccattttgttctatcctcatgccaagcaattgcagcatgattaacaaaagtagaagtttgcttcacattttgctttccattggaatgagaacttctatgggccttttgggctttatctctggaacttcatctgcagattgtagaatgcttcaaagtgtgattccctttcgaatgggaattttcactttcagcacagaactccatcatatccaaattaaatgaccattccccacaataatttatacaataaatattaatgcttgtttccttctaaagactagaagtatctccaagcttccttacgattattgctacttgaatgtcacaggattcgaaaagaactgacgctcatctatcattgttgcctgatggtgcgttgagagacttatggtgctttgagtcacggtaggtggtgggtggtggctgagcaaagagattaattgcaactgaaacagaagcagagagatttcaaggtacgattttaaaacgtgggtctgagtcattacaagcattcacaaaaacatgtcattttctcagctctcaaccttttcattttctgcttgtggacgtgtgtatgtgtctgtggc

SEQ ID NO: 73432 - DNA, 437 bp, Glycine max
  Clone ID: PAT_MRT3847_37324C.1
tttttgatcacattagcaaaagactgggccctgttggaagatggacttaatacaatagtacttgggtggtggcatcatgtgacattttctcagctctaaaagttcacaacatgcatgcttagtgtcacaaactgtacagcaatttatggggggaaatgaccttcatgccataaaattgctaaacgatctttttcaccatcataacttgaacacatattagtatagaacatttttataaaaatcaataaagcaagattcaccatgtagctgctcatgcaatccctgttatcaatcgttcccgttcatctagcttcttgacctttacaatgcccaagagcacttgaaaaccaaagattgcacagaagatatatgctgcaatggcaggcacacgaattgagttgagatacaaaactgttgcaagaatgattaggctccca

SEQ ID NO: 73433 - DNA, 360 bp, Glycine max
  Clone ID: PAT_MRT3847_37325C.1
ataagcagagattcattaattcagaaaagccgaactttatacagaagcgaccgattgccatgcattaaaatatggaatatatgaagcgcccttgagcttaacacacccataatatgtccaaatcacttataactggctgactggctttgacctgaccactatattctaaggacggttgttgaacacaaactttcatagggctcgaaacccataacagacattatagataggtttttagtttcgcatgaatagatcatgattatccctaaataagggctgtatctggtagaagctggatctcccaacacctgatttggaagagcaggggttgcaggagcataacgggacacatgggcagac

SEQ ID NO: 73434 - DNA, 598 bp, Glycine max
  unsure (1)..(598): unsure at all n locations
  Clone ID: PAT_MRT3847_37326C.1
ggtccggaattcccggctcgacccacgcgtccggctacccttttggttgactcaggcctccttctcttatagtctctatacactgtttcttcctgttcagtgtagctccactctataatctatatgcacctcccactctctcacatcaccattcttcttccactctcctatcagtgtcgtccaacccctttatggctaaatgccccaaaacgacacccactcccaccaaaacggtgaagccaccgtcaccacctcctcctcctcccagcatcccgttctaaccctccagctccaagcaatgacctccaccaccacctccacctccaccgaccccctccccttctcctccgacgccggcgccctccgcgccatcaacaaacgcttcgagggcctcctgaccgtccgcacaaaggccatgaagggcaaaggagcctggtactgggcccacctggagcccattctggttccccaccccgacaccggcctccccaaatccgtgaaactcanatgctccctctgcgactccctcttcttctcctccaacccctcacgaaccgctttcgaacactntaaacgtggtacatgctccaacttcacc

SEQ ID NO: 73435 - DNA, 560 bp, Glycine max
  Clone ID: PAT_MRT3847_37327C.1
ccaaaaggaaacaataaaacatcatttgggaatgcatgtcaaaaataacccaattgtcctttttcagtaaatcatgtctcgattaggaaaaacatatttctaaaagcaaaatcttgaactaaaacaaaaataagacacctcgtccatcgaaacagtttagtgaaactagaaaaagtaaacaagacttatttttttttgtttccagctccaccagccttaattttccggaaaacatggaacatctcctctttttttttttttgcgcgcttatgggttccaagcttttttttggcaactttcagggcccttttattttttccaaccttgagcaactcagttattcgtttttaataaggggcaaagccggcaccctctcaaatgaggttcctcacaaagggcactcgcttgcttgttttccccttacaatctgaagggcggggaggcaactcctttttggtgacaacgggacctttgttcaatccaacaaacaaacccgtactaggatgttggggagccattcccctctttttctggtgggaggcttaaaaaaccctaacact

SEQ ID NO: 73436 - DNA, 477 bp, Glycine max
  Clone ID: PAT_MRT3847_37328C.1
acatctcccccagagaagcacacccgtgtgcccgtgtcaagtcccactcactctccaaaaataataaaacaatctgaccctagcccaatgcactcaccaaacaataacagaaccaccgcatctccaccctctcccctcaccctcccaccttcccagttgatggccgagcccaatataccccaacagcccgatcccaagaccgtgctagtccagaaaaccattgacaggcccaagccctggctcactggcgccactggatcccataaaaaccacggaaaacacgtcaccgtcaaagagagtgaatccaaggagaagggtattcacagaaagctttcgcagtctgaggagtctggtatgagagtcataaccattgcaggggaaaacagaggagcgtacatggaactcatccagtccccgaagaaacacgatccaaagtatcttcacaagaaaggaaattccaacatcaacgtggacggg

SEQ ID NO: 73437 - DNA, 154 bp, Glycine max
  Clone ID: PAT_MRT3847_37329C.1
agtaaaaaaaactgcagtggaacgaatttctggccacaatgccattgtgttactgttgcagcctcttttttttttttttttttggggataatgcagttattataaaaactccaagctataaataaccccgttaaatttaagcttgcattggcat

SEQ ID NO: 73438 - DNA, 418 bp, Glycine max
  Clone ID: PAT_MRT3847_3732C.1
ctcgcccttttttttttttttttttttttttttttttctacacattttttttctttgggtttggttcattttttttttcctttttttcctggagaaaaaaggggcggtcaaattttccctttttaaaaaaataccccggcccttaagggggtttccgcccccatcccacaaggggtctttaaaaaacccaaaactggtcccccctccccaaggaaaaaccttaaaggtccaaaaaaggggttttggccccccaacaagataccccctgggtttcaaaaaccctttttttccacccctttttttttttttgggccagaaccgtctatcgcactttatgaaaaaccctccgggtttaaggggaaaacccccttccttgagtaaaccccccaaaaaaaccttttggcaccccatcccaaaa

SEQ ID NO: 73439 - DNA, 575 bp, Glycine max
  unsure (1)..(575): unsure at all n locations
  Clone ID: PAT_MRT3847_37330C.1
gacccacgcgtcaggaagaatattactaatggctaaaatatttcctacatgtttctcggccaagatgctttttgatagtagtattgttttacagggttgttgacaagtatttgtttttaccaaatttttggccagagaaataaaatatggcgtgattagagtaaaatgatttaaaaaatgaataaagaaaataacttggattgagctttggtcttttgcaattctaaatatagttcatttctgatagttgaatgtggtatagatgactaggcgttagtcaaataattaaatatgtaaatatttaattttataaaaataagagatgttttaattgtcaataataaatattttatttaaagaatattaaaatttaaaaatattatataatgaagaaattaaagatgtagtttttaatatcgagaaaaaataacgaaaataaactatttgaagaagatatataatctatatgtttataggttgatataatctatgaaaaataagctgattgctcttttngaataatgnggattttcaaatttaaaattatttggaattaaattggataatttttttaa

SEQ ID NO: 73440 - DNA, 362 bp, Glycine max
  Clone ID: PAT_MRT3847_37331C.1
ttcagaggtgtactggtcaagaaaatatggactgtgcgagatagctctttattcattatcccttacacacatgctatatacattgggacgcatactcaaccgatcccttttaggtttatttgcttctttttcaatcataagacaaacctttttttttttgattacatgcccaatcgaaatttatgcgaggttttttttttaaagaaaagcggtcattttctttttgattcaaagtattaaatttcccccgaggctcccaaggggcttttcttttttcaccataattgtttgccactcattttccatcctgatttgaagacaaacaacatccttctttattttaataataaaacccatctttt

SEQ ID NO: 73441 - DNA, 234 bp, Glycine max
  Clone ID: PAT_MRT3847_37332C.1
ggttttttttttttttttttttttttttcaagaccatgacaagcccgaagagcatgcatgatcaggtttaggctaactagccacgatactgatgataaatttctgtcaatacaaatcaagatgagctcacacgaaattaataacaaaggccatgctcctcctcaatttattgcaggagcacatatatattaccataattacaaatagtgtaataaaagtacaatcaaattaaaa

SEQ ID NO: 73442 - DNA, 402 bp, Glycine max
  unsure (1)..(402): unsure at all n locations
  Clone ID: PAT_MRT3847_37333C.1
cggtcgaccacgcgtccgccacgcgtncggactgacacagaccctctatgagatagtgacctgaaggaaattatccaacgagaggggccagatgctctacctgaaagcaataagaccaccttaaagacggctacacgtttgagagaggatgatgttgctcatacagcctttacaccatacgtggaattgtgcccccattacaagtctgcttggatgatgcgcatcattctccagttatacaagctggcgaatgatgcgagagcgaggagagctaggctagatgggctggagatgtcttacaccgtgatcaagcatcggatgggagagcagtcctaccgactagcgtctcagtaacttgaggatccagcaaacaggcaagctgctttggttgctatattccag

SEQ ID NO: 73443 - DNA, 237 bp, Glycine max
  Clone ID: PAT_MRT3847_37334C.1
cggtgcttttctttcctgcagcctctcacacaacaggacagactatttgtgtagaggggggcttaacagtgactggtctctatataaatcagagaagctctaccaacacactatgtaacacactagtcttgacacatattctaccataagtgacaaataataaacaatgaccaaatcattagaatacgagctcggacccatatatatctgtgacatcttaaaaatttcaacgcaatc

SEQ ID NO: 73444 - DNA, 405 bp, Glycine max
  Clone ID: PAT_MRT3847_37335C.1
tagaaaacctaatcttacaattagaaacatataattgaataatgtagggatttgatcgttgaaagtgcgtctaagaaataaagccgtatagtctatttatttaacattttcaaacattttttcttttttccaatgctttcattgatattaccattcctcttttactaaattttattttatataatttcatattttttttttcatattattatattatttatttttattatttttttatattttttttttatttttattatttttttatttatattttattattattttttttttatttattttattatttataatttttttttttaatttattttaattttttttttatatattttttattttattttattttattttattaattttttatatttttttttttta

SEQ ID NO: 73445 - DNA, 2027 bp, Glycine max
  Clone ID: PAT_MRT3847_37336C.1
cccacgcgtcctccgttttccaatctcatttttgagttgtgccgcggacgaagagatgcctctccggcgtcgagtccctcttcctctgctcctcctcctcctcctcctctctcccgcagccacctccgccgtcgccttccgcaagaagcacaagatcccagggccgatcaaaaccatagtggtgatagtgatggagaatcgctccttcgaccacgtcctcggctggctcaaatcctcccgccccgacatcgatggcctcaccggcaccgaatccaaccccctctccatcttcccccgttcttccccaaacgtccccggctacgacgacggacactccatcgatccacaacctgctcaggcatcacaaaccatccgcgaactaaagtcttgctcaaacccaagtggaattaatccagcttgcatctcagctcaatggtgattatgtactccattcctatccaaacattggtaaaactatgacagtgaaagaagcaaacaggtacgccgaagacgcggtgaagaggttcctggaagctgcaaaggctgctcttaaagctggggctaatgagtcagccattgtcacaatgaggccttccctcacaagcagagttgctgagggagatcaccacaaactagtagaatcttactgattctttcactataccgctgtaaatatggtatatatttagcatattcaccataatgtttaggaaaaaaattacgagtgttcttagtaaaagtactttcagtttaagagcaatctcgaaagataattgatagttctacgactacatcttggagttcaagaagcacgccgagaaggggaagctttcgaactacgtggtggtggagcataggtacttatatgtggaggtttttccggcgaacgatgaccacccctcgcatgacgtggcggccgggcagatgttcgtgaaggaggtgtacgaggttttgaggaagagtccgcagtgggaggagatggcggtgctgattacttacgatgagcatggtgggttttatgatcatgtggcgacgccggtagaaggggtgcctaaccccgatgggatcgttgggccccacccttattactttcggtttgataggttgggggtgagggtgcccacgtttattatctcgccttggatcgacaagggtactgtgattcatgaagcagaggggccaacaccatattctcaatatgaacattcctctatccctgccacagtaaagaagcttttcaatttaaaatccaatttcttgacaaagagagatgcatgggctggtacctttgaaaagtacttttacattcgagatactccccgtgatgattgtccagaaactcttccggacatcaagatgctaaggcaacatggaccaagagaagactcaagtctttcagaattccaagtggagttaatccagcttgcatctcagctcaatggtgattatgtacggctctcttatccaaacattcgtataactatgacagtgaaagaagcaaacaggtacgcagaagatgcggtgaagagattcctggaagctgcaaaggctgctcttaaagctggggctaatgaatcagccattgtcacaatgaggccttccctcacaagcagagtcgctgatggagataaccacaaacttgtagaatcttactgattctttcacactataccgctgtaaatatggtatatatgtagcatattcactataatgtttaggaaaaaaatacaagtgttcttagtaaaagtattttcagttgaagaacaattagtcagataattgattaattttgttcaacatgaacaattttagtggctgattgttcttaaattgaaaagaattttaccagaaataaaataattttatttctggtaaattattcttcaaacagtgaaacttctataaatatttattgtatttcctaaatatttgacttctgatacaaaacaaatgtattacgtgtactgtgttgtcttttatgaaatgttgttcctagttaggaagaaaagtacaactttatttaattt

SEQ ID NO: 73446 - DNA, 777 bp, Glycine max
  Clone ID: PAT_MRT3847_37337C.1
gccccagtaaagaagcttttccatttaaaatccaatttcttgacaaagagaggatgcatgggctggtacctttgaaaagtacttttacattcgagatactcctcgtgatgattgtccagaaactctttcagacatcaagatgctaaggcaacatggaccaagagaagactcaagtctttcagaattccaagtggaattaatccagcttgcatctcagctcaatggtgattatgtactcaattcctatccaaacattggtaaaactatgacagtgaaagaagcaaacaggtacgccgaagacgcggtgaagaggttcctggaagctgcaaaggctgctcttaaagctggggctaatgagtcagccattgtcacaatgaggccttccctcacaagcagagttgctgagggagatcaccccaaactagtagaatcttactgattctttcactataccgctgtaaatatggtatatatttagcatattcaccataatgtttaggaaaaaaattacgagtgttcttagtaaaagtactttcagtttaagaacaatttagtcagataattgattaattttgttctacatgaacgatcagttattgatcaccattttagtggttgattgttcttaaattgaaaagaattttaccagtaatgattttatttatgataaattattcttaaaatagagaaacttctataaatatttattgtatttcctaaatatttgacttctgatacaaaacaatatgtattacgtgtactgtgttgtcttgtatg

SEQ ID NO: 73447 - DNA, 274 bp, Glycine max
  Clone ID: PAT_MRT3847_37338C.1
tggtgtgtggacaaacaacctattggaactcatactggatgaagggggaccactgaatgaagctgactatacatacaccccaacacatggcacttgctgatttcacaaaaccaaattagcggctactgcctctaattgctaggtgccataacctgatgaagaacaaaccgttcttatcctactacctaatggaccttatgtagaagctatcagtgcactctccatgcgcacatataaccgtggcgtcttatgcccttacctatgcaacaagcat

SEQ ID NO: 73448 - DNA, 318 bp, Glycine max
  Clone ID: PAT_MRT3847_37339C.1
actaatattaatgttttgacttgacgcggcgactgttactatatttctgacacaatattgactgtaatgcaaaaacaaattacgtctgctactttatagacaagaagctaaagggtgcaaactcttgttgaaatcccaataataagttaataaaatctagaacaacgggcaaatggactacctaaactgacgtgatataagggacaataattttttgcccacagaagcaaaggcttgataaatatacaggtccacgacatgaagacaagcttatgctccaggatcttgccccagggtttaccaaacattacgatcaaa

SEQ ID NO: 73449 - DNA, 362 bp, Glycine max
  unsure (1)..(362): unsure at all n locations
  Clone ID: PAT_MRT3847_3733C.1
gcatacctttcaagaaacaaacacttgtgcgaaaatgcccgcgaaattgggaggtgagagtcagggtacaaatgggagcccttctagcccatgaatgaagaattgtggttctgctctgctaaatgcccgttacttaaggggttcacagttaatggggtaggcttaattttaagttttttctgttttggttttggccttatcttttttcttcgtaatgttaataannnaaaaaattaatgaatgggttggtaacccaaatattcaatttttcattgaattttgaaaatttggccttggattaaccataatggatatttcttaaaattccaaattaatattattgtttattaattctnttaaaa

SEQ ID NO: 73450 - DNA, 530 bp, Glycine max
  Clone ID: PAT_MRT3847_37340C.1
aaaaaaaaaaaaaggggcgggggggaaaaaaaagggaggcaaaaaaaaaaacccagggggataaaacaacccggaaaaaaaaagaaagaaaaggggggaaaaaaacttataaaaataaaaagcctgggggcaggggggcttaaagttctttaacccggaccaaagggggaaaccccaaaaacggccccaaaagggggtacaaaaacaacccccccaaaaaaaaggcttaacaaaggggtttggggggagggggaaaacccatatccgggagggggggccccccccggaccccccaaaaaggcggccaaaaaagcgggggggagtccggcaacggccttttccttaaaaaaagcattgtttggaccctgggagttggcccccgcctttgggggaaaaagggccctttttggttgcccaaggggtaggggcctaaaaaaggcttcgaagaaaggcttgggggtgttaaaaacaaacctcagggagaaagcccggggaacaaaaacaaaagccatttgggggggggggggggc

SEQ ID NO: 73451 - DNA, 214 bp, Glycine max
  Clone ID: PAT_MRT3847_37341C.1
gttatgaatggcgaactgcctatgcaatagatcctatcctactaacacacgcacgcgaggtcctatttaatatttatagtcacctataatactctggcggggcgcaggcacacatccatgggactggtatgtctgtgtggcaacccacattaacttgctcgcatggcacacttgttcatgcagcctgtgtgatatataataagcgcggaccggc

SEQ ID NO: 73452 - DNA, 499 bp, Glycine max
  Clone ID: PAT_MRT3847_37342C.1
caagaaaataaaggcaatggtgaggtgatgggtggccatgcagccacaacttactcggcggccaagatttcggtgtggtgggacattgacaactgtcgtgttcccaaaggccacaacgccaattccatcgctcagaacataacctccgccctcgtcggcatcaactacgccggccccctctccatctccgcctatggtgacaccaaccgcatccctccccccgtccaacacgccctctccagcaccggcgtttccctcaaccacatccccaccggtgcgaatgatgctagcgacatgaagattcttgtggacatgctgctatgggccgtagacaatcccgcccccgctaactacttgctcatatccggcgacaccaacttctccaacgcccttcaccaactcagtttgcgaaagtacaacattctcctcgcccacccgccgcacgtttctccctccctcgccgccgccgccaaagtcgtctggctctggacaaccctct

SEQ ID NO: 73453 - DNA, 375 bp, Glycine max
  Clone ID: PAT_MRT3847_37343C.1
gcgtgtctctgtgacctcaacaaacttcctgtgcatgccggcgtttttctcttcaccctgtacttcgccacctggcagcaccactatgagtgtcgaccaaatctgtccgaaggccaatgatggtcaccgatttcgcgaggcccgtggggcgtgtccgagcggtgactagcgacgacgagtggggcccgtataatgaggacgacgcttacggctgatgagtggcgcgcgacgataaaccgaccgatacggaaacagagaagctgaagatggcttttgtggatccgttctatggcacggatcttggactgcaagcaccgtgcgatacgagagcagagatcgttgaactcatcactcacctagaggtcaagaacccta

SEQ ID NO: 73454 - DNA, 566 bp, Glycine max
  Clone ID: PAT_MRT3847_37344C.1
cccacgcgttcgattcgattgaatgcaattgaacaagtggccgaatatttgcgcagaactaaatttcagcaggccaaactcagcattgacatgttctcttttgacccccaaatccgacccgaaatcgttgcaaaaccattcgatgaaaaaagcattcaaacggaagatttcaccaaaggcgaagaatctatgccaatttcacttgtcaatgccatcgatgtctcgaaaatcgaccccaattttgtgtatcggccacggagaacagggataaagcgaatgcaaaacgacgagggcgccgaacaaagcatcgacccgtgcttctgttcgggctgttcctgcaccgacgactgtgcggacagcaaaacatgcgaatgccgtcgtttgaccgcagtggcacacgaacgactgagcaaatcactgcaaattcacaaagcatgcgtgaagggatacaatttcaggcggttggacgacaaaattatcagtggaatttacgagtgcaattcgctgtgcaaatgtttcaaatcgacctgttacaatcgcgtcgtgcagcaggacatcaaaatccc

SEQ ID NO: 73455 - DNA, 109 bp, Glycine max
  Clone ID: PAT_MRT3847_37345C.1
aattacaatctattttgatattcatggaactaaatgattaatcctgtacacaagagaaagccttgccttaaattcagccacaaatacagagaaaagtacaaggcaacaa

SEQ ID NO: 73456 - DNA, 632 bp, Glycine max
  unsure (1)..(632): unsure at all n locations
  Clone ID: PAT_MRT3847_37346C.1
annnnnnncnnatagcagaatttcaaacacttaacagaaatgaatcaagaatataaaaacttagggagcttaagaacttcttcagctccatgccgctgaaatttttatccttggcaaatttatggtacaaccaaaggtaataactaataacagtacatcaaagacaacaattaaaactaaaaagattccgcaagacggtggcagtaatttgcaccttgtaaagagaagtccattcgtttgttttgatttgaaggaattaattaaaactaaattttctttagctttggggatcttgattctgcctttggggatcttggttctgcttccggcattgttcgagaatattattgcatgcaacgaaggtcgatgtctttagaagaccctgattaattagtttgatcataaacattctccaattccaggctaacgagttggactgggcaaactcagcagaatgatattttgtgaaagcttcacaagcccaatttatgtgaccatctgccagcactctgccacgatgtttcttaataaatgcgttccacagagataggaactctttcacatggtctggcgcatcaagaatagcaagtctccttcgatcttcaatctcctgagcaccctcattcattctg

SEQ ID NO: 73457 - DNA, 159 bp, Glycine max
  Clone ID: PAT_MRT3847_37347C.1
cggcttcgttcgctttggagcctctgcgcggccgcttttttttttttttttttttagtatcttttacaatgaaacattgttcactttgtagattataattattacaatgacacatgccatccggaacagtcccttgaacataaaaccagcacacctata

SEQ ID NO: 73458 - DNA, 269 bp, Glycine max
  unsure (1)..(269): unsure at all n locations
  Clone ID: PAT_MRT3847_37348C.1
gntaatnntnatctgctgcgtagtncctnctataaggangcatggctaaatgcatggnagangatgatatgaattcagatgatgaaatggnngatgatcngcagctgaggaggactacnncgaagnaaacaagctnaannanaganacttnaacagatgaancaagctcattccctaccaagcgataacgtnaggcatctcggcccataaaacagtgcatcggntgcttgtgnaaatcaaagctctcagcnaaattaacagncttncat

SEQ ID NO: 73459 - DNA, 622 bp, Glycine max
  Clone ID: PAT_MRT3847_37349C.1
aaaaaatatattttacaaattaatttaaaattaatgatccatacagtaatttaagatttgccaattgatgagccttttccgaattaacagcttttccttttaagaattaacagcttttcggaaaggcaatattggaattccccatcttgtcattcttgtgccaccacaaagcaattgcccccgttttatcatccctttcggaagccatttttctttacggagtaagaaactcatgatacaagttactgggcccattcctcgtcaaagtatgaaatcccactcctacattataacaacctggtgagctaaactattttctccttctcaaaggatgaaagactttcatgagcattaataatatatcttgattctaatactgccacaaaggaacaatgactagggataatcaactcgtttatagctcttggtctcgatccctacaaatcaccggatttcagaaaaccaaattgccatcgctgattggttttagtcaaacctcgataacaatcataattatacaaaaaatgaccaggcgggtatcacgagccaaaatcacgccctagttaaactgaatttctactaaacaaaatcgtcaaacgggccaacatcggacccggggcaa

SEQ ID NO: 73460 - DNA, 427 bp, Glycine max
  Clone ID: PAT_MRT3847_3734C.1
tgctcaatggcaccatcctgatggatccctcattgtttcgactgatgaagtcaagagcatggaaaatttaaagctcaaacaggaaggtctttcagatagtcctattgctggcttaaaacttggcatcaggaagaatagtaatggtgtttgggaagtcagcaaacctgagaacacaaacacctcttctggtaataatagattgaatgaggattttgaaaatcatgaacatgttattattccaatgagcagcagtgacactggaagtggccgggatgaagatgatcctagcataaatcagggtggtggtgagcatattggttattctactaccaatgggattgaaatgaattctgtggttaacaataatatagattcagcttatggatatactgttaataacgcatctgctacgatgggtgatgcaaaa

SEQ ID NO: 73461 - DNA, 824 bp, Glycine max
  Clone ID: PAT_MRT3847_37350C.1
aaaataaaatcaatactcaaaataaaacgaacaaacaattgcaatctaattattctacaaattcatagtttccatgacccccttaagtcaagaaacacatccattcacttgacatttcccccccctacaacacagtataaatgaccctttggccatgaatcacataaatcttcataaacatcataataaatatttacaattgcaaaatacaaccatgcaagcataggactcctttggttatccacatgcttgcaagttcaaacaaggtcccaaagttgaaccatttcaaaagacaaacttgaactcttaacaacataagcagtagtcacattcatgtaccagaacatgtttgtctagaagttcatgttggaactctaggtgaattcatgccacggtgtggcgattgaacactggaagaaactatgatttgggttgaagaagaagtacaaagtttggaagatggtgaagaagcagaaaaaccatagtctgacccaaacggagaagaagcagaggtttgaaaccgacctgagtcgccgggaagtttcatgtatgagtaagaaggtgactcacaaagccatgaaccaataggcccttgtttctcattcttgtattgcattacagctttgtacacaaatggaattagaccctccattttaatgtgtgatgatgaggaaaaaacagaggaaaacagaggaaaaacagagaaagtgagattttaggggagttggtttggaatggagcaagtcccgcccgccgcctgggccggccggatttgggccagaatgatttcaaatattcaaataatccttgattggttccgtttt

SEQ ID NO: 73462 - DNA, 260 bp, Glycine max
  Clone ID: PAT_MRT3847_37351C.1
tcttgccattgtgtctgaaatacaaactgatggaaaccagactaaaaactttaggtggacagttgcaatggaccattggcttggaaagattcttgtagaccaagtgaggaaagggcttaaagtagataaagtttttctgacagaagcatataacacagctgtttcagccgtaaatgcaaaatttgggctgcatctaacaaaattcaatgttaaaaatcgacttaaaacttggaagaaacagtttgaacagttaaaggaaa

SEQ ID NO: 73463 - DNA, 473 bp, Glycine max
  Clone ID: PAT_MRT3847_37352C.1
acacagaattttagtcttttctcttattccttttttttttttttttttgggaacaattctcatagaatcatacttcaaatggcaataaaatctaggaaaaattttttctagaaaacggagaaaaataaaatcaatactcaaaataaaacgaacaaacaattgcaatctaattattctacaaattcacagtttccatgaaccccccattaggtcaagaaacacacccattcacttgacaccgcaccgcacccccccccccccatcatgacaaatatttacaattgcaaaatacaaccatgcaagcataggactcctttggttatccacatgcttgcaagttcaaacatggtcccaaactttaaccatttcaaaagacaaacttgaacactgaacaacacaagcagtaatcacattcttgtaccagaacatgttggtctaaaaagtcatgttggaacctctagggaatttcatgc

SEQ ID NO: 73464 - DNA, 324 bp, Glycine max
  Clone ID: PAT_MRT3847_37353C.1
aaaaacgcgaacaaaataccaaaagccgcctgtttttaaaaaacacgcggccacaaataaaccccgggaaaatcctgtggatcaatatgaaacaccaattgagtgtatttaccaaccaaagcataaaacaaaacgcggccacttatttaaaaactaacccggaaattacgaactctctcacacctttttaaaaatctaaaaaacccaggccaatgatttatctttaacaccttctcccttttcatttaaaaaacactcacatttgaactccattacagactgcgatgacctttttacatccaaaaacagaattgacaccccatt

SEQ ID NO: 73465 - DNA, 348 bp, Glycine max
  unsure (1)..(348): unsure at all n locations
  Clone ID: PAT_MRT3847_37354C.1
ccggggcggaanncctggggggaccggctaagccgccgaccagaaagcgnnctccgccgcgctggccctctcctccatcctcctctccgcccctctccccggcggcgccgacatctttgggctcaccccatgcaaggagtcgaagcagttcgcgaagcgggagaagcagcccccctccaaaanggttttgnngnngaagctntacgaggcgggcaaaaaaccccccctgggcaggggggcgagcgcccccaaaattaataggaggggcgacaactaagcgaaacaaggggcgctgtgcggcggcgaaggggagcccacccgaacgtgagcggagaccacagcacgggg

SEQ ID NO: 73466 - DNA, 419 bp, Glycine max
  unsure (1)..(419): unsure at all n locations
  Clone ID: PAT_MRT3847_37355C.1
aaccacacttctcttcttccattgtctcacgttatcagcatcaacacagtgtcacatccataagcggtgagcttctccctctctctctcaatcatccttttctttgcatcatgttcacattccatcaaaagggtctcacaaagttgtgattntttacccaccccgttcttgaactgaatcttataagcttgccatttgaccctgaaaccaaagaaaaataagattttgtgaaatacgagcttgtcccttccctgatctcttttttctctcaactagttttcaatgcagcaattctggatctgagaaccctttctggatctggttggaatagaagtgaaaattgtgttgcattgttaaattttttttgggtgaatgattggagttcaattttatttggattggtaatagctgatgtgact

SEQ ID NO: 73467 - DNA, 570 bp, Glycine max
  Clone ID: PAT_MRT3847_37356C.1
accagctgcaacatctacacttccgctaatcgaaattgatttctctgctacgtaaccaaaaaaatggaaatcgttccgattcccgccgattcctacaatctcggcttcatcggcgccggaaaaatggccgagtccattgccagaggcgccgtccgctccggcgtcttgccgccttctcgcattcgcaccgccgtccactccaaccccgcccgccgggacacattcgaatccttcggcgtcaccgctctcccctcaaacgacgacgtattcatgttccctctccttttttattttttttctcactgaaacaataacagacgcgacgccgattttactttctttttttcctcgctctcgaaggtcgctcgcgacagcaacgtcgtcgttttctcgggcaaacctcaactagtgaaagacgtggtgtgcaaattgacgccgcttctgacgaagaacaagcttttggtttcggtcgctgctggtaccaaattgaaagatcttcaggttatcgaatgcagcatattatttttccttactttttattcatgcattagggctgcttctggactacaa

SEQ ID NO: 73468 - DNA, 303 bp, Glycine max
  Clone ID: PAT_MRT3847_37357C.1
ttggtacgggtgcgaggggacgactgaaggggacattactctgctctacttccattccgtcgattcgacgtgtaaccgttgagcgcgttgcgatcatggcgaaagtcacttccagagacgtgcaagagatcgtggaaaaactctcctccgataaagccaaagctcgcgaagtcgttttcttttctcaaactcactgtctctattccttatcgagctcgttaatctgcgattttgaatggatattaaaaacctttgttgtacgtgctaatgatatgcatataacgatggataaattgacgtgat

SEQ ID NO: 73469 - DNA, 315 bp, Glycine max
  Clone ID: PAT_MRT3847_37358C.1
gctctgagcaggattatggaacccgtactgttatctcaagctggctgtgagtcggataagtgccgttctcaagagacatttttggaagaatttacgatagcggcaatgaactgcggccaaccccacttaatgagcaaccatgtcctctcttgctcaccggtgagaacacctctggatgggagttgcagttatataccatcatcccacacattggaattggacaaaattttcaactcaaccatggagactctgcccaaagaacggaatagaaaactttcaaaggagtatgtacgggtggcacttgacaccgcggct

SEQ ID NO: 73470 - DNA, 392 bp, Glycine max
  Clone ID: PAT_MRT3847_37359C.1
accggtccggattcccgggtcgacccacgcgtccgttcctctgtactttattatgggcaaatacatacatatatatatatatatatatatatatatatatatatatatatatattaatctccagatgtacatgatagttacattgtttttctttctctaaagaacaggtgtcctgcgtatgcttcgattgtgtattatgtgggccagtatctgattaatctagcctgtttttggtaaaaaaaaaaaaaaaaaaaaaaaaaaaaaaaaaaaaaaaaaaaaaaaaaaaaaaaaaaaaaaaaaaaaaaaaaaaaaaaaaaaaaaaaaaaaaaaaaaaaaaaaggggggggcccgttttaaaggatccaagtttacttacccgtgcttgcaacgta

SEQ ID NO: 73471 - DNA, 1126 bp, Glycine max
  Clone ID: PAT_MRT3847_3735C.1
gttgacctcatctacttcgatggaattcgcgtcttcttcatcatccttcccaaaatccaaatcccgatggacatacgatgtgttcatcaattttagcggagaagatctccgtaagaatttcatttctcatctctcttatgccctttcaaaagctggaatcaacactgtccttgacggccaacaaatggagctggaagaactaatgaaaccagaaaagtctcagatctcaatagttgttttctccaaaagttatactgaatctacttggtgtcttgatgagcttgcaaaaatcattgaaatccatgaaacttatggccaaagagttgtggtcgtattttacgaaattgacccatcccatgtacgtgatcaagaagtcttaaactctatgaaaaaaacccaggactaccgtgttcttgaaaaaccattctcaaagattgtccaaggttgcgcaaggtacccaatccattgggatctccacaatctacttttgataaatttgaaggactgtacaagccttagcaatctcccaagagagatatataaattgaaatctgtggaaactcttatcctatctggttgtttgaatattgacatattggaagaagatatagtgcagatggaatccttaacaactctaatttccgacaatactgctgtgaaacaagtgcccttttcaatagtaaactcaaaaagcattggatatatatccatatgtggatttaaaggattgtcacatgatgttttgcattctatcattctgtcttggatgcctacgacaatgaatcctctatctcatattcgtttgttttctggtacttcatcagtttccaagcatctgctgcataatgatttgggtgatctaccaccaatgcttagcagcatttcaaaccttcgaagctttttggtgcaatgtgacacagagttccagttagataaacaagtaaaggcaatgcatatcgtttatggtgttaattatacagaattagaaaattcaaagaattacttgaggtctgattttattggaattgacagataccaagtcttcaatactctcactgatgatagcatatctgaggttccttctcttaactttggtctatccaccttcactattcatatcagctat

SEQ ID NO: 73472 - DNA, 223 bp, Glycine max
  Clone ID: PAT_MRT3847_37360C.1
ggtcaacaaaataaaaggaaagatgcaaaaggcattgccagagttgctaaatgagtacaatctaccaataggaatctttcctcataatacaacaaactataaattcaatgaagaaacaagaaatcttgttatttacattcctcaaatatataaaattaactacaaagattcatcagtcttacatttcttcaccaccataactagattatctgaaaaaaagaaa

SEQ ID NO: 73473 - DNA, 423 bp, Glycine max
  Clone ID: PAT_MRT3847_37361C.1
cccacgcgtccgcgcgctcgttcccgccgtcgtcgaccgcctcggcgacgccaagcagcccgtccgcgacgccgcgaggcggctccttctcactctcatggaggtttcatctcctacaataattgttgaaagagcagggtcctttgcatggacaagcaaaagctggagagtcagagaggaatttgcgcgaacagtcacatctgcaattggtctattttcatctactgagcttccccttcaacgtgctattcttcctcctattttgcagttgctgaatgatctgaatcctgctgttagggaaacagctattttgtgtattgaggaaatgtatacacaagctgggtcccaatttcgtgatgaacttcagcgccacaatctcccttcatctttggtgaaagctattaatgccaggctagagggaat

SEQ ID NO: 73474 - DNA, 445 bp, Glycine max
  Clone ID: PAT_MRT3847_37362C.1
ggaaaacgggggccgaccgcacgcgtccgcgcacgcgtgatcagatgtcagattacgactgaacggggattggtcgaatggtcggaaaagaatgttttactaactcccattgcttatttattattgaatcaaccgatcaacttgcttcggtatcgaacatttctttttgatttcaaaaattttccggaaaaaatttgaatctatttttatatgctaatcaattctactacttctgatcctgatgttattgcgcttgaaaaaaaaaatctgtgacgtatcgcccaaataatttgatacagactatatgtatcttttaccccacataagatgcctaatatttacaacactctgatagttaaaggtcgagatactcttggtcaacaaatttatgtgacttgagaagtacagcaactattaggaaataatccaattagagctgtagcta

SEQ ID NO: 73475 - DNA, 260 bp, Glycine max
  unsure (1)..(260): unsure at all n locations
  Clone ID: PAT_MRT3847_37363C.1
aacccacccgtcgcgctcttcaatnatggcatctgttgccctcaaacctgcccttttcactgtttaaaattccttagttaaaggccttccctctctctcaaggaactcttcttcattcaaaattttttccaatgtcaataatatcaatacttacaaaccttattgaattaattgtttcattgcttttaaggattgaacttattcatcttacaagaaaagaaaaggaaaaggtgtttaccaatttgtaaacaaataccgtt

SEQ ID NO: 73476 - DNA, 250 bp, Glycine max
  Clone ID: PAT_MRT3847_37364C.1
gacaattccttttgagaatccgggcacgggagcgaaagatgagctattgtgaacaaatacaatcggcggtggacctagagagtatcggcttggctaaacatgcagccaatgctctgtgcaaggtattgacaactggagacataactggtctacatcttccttcatgccgcaacacattccatatcccaaaaaccgacgaataccactgcctttatccccaaagccgagggttggccctctcacctttcca

SEQ ID NO: 73477 - DNA, 373 bp, Glycine max
  Clone ID: PAT_MRT3847_37365C.1
ttttttttttaaatgcaaattttccattttcattccattattagttcatagtaattggggtgtacatagggtaacgtcagagtacattggtgaacttcgtggattcaattattggaaaaaaaaaaaaaaaggacctcaccaaatcctgaggatactcaacttttttaattttttagtatttttttttatccaaaatcatagaaaaagttgggcaaaaaaaattaccaagccatcaaagagaacaaaagttactgttatcactgcccatattctgatgctcccatgctgccatcattaactttatagacccccaaatgttattttcttattttctaccaataagcccaaacaaaaaaccctagacttccctcgt

SEQ ID NO: 73478 - DNA, 197 bp, Glycine max
  unsure (1)..(197): unsure at all n locations
  Clone ID: PAT_MRT3847_37366C.1
cgacatcgtgggatctcctcccggattgtaaatcctgatccattgggcctccaccattggggacaccccccgccagccgaaagctcggcaagctccgaaaacaccacaccttcactttccgacctagctccgaaggaaacggaggcgacggaatcgtacggagacgaatcgtcggagggaaagcgacgagagtgacn

SEQ ID NO: 73479 - DNA, 456 bp, Glycine max
  Clone ID: PAT_MRT3847_37367C.1
ggctgagatgctagagaagcaattggcttcagagttatccaagatgacgctggaagaagctttgccccttgctcgtgcctttagccatcatcttactttgatgggtatagctgaaacccaccatagggttcgtaaaggaggaaatatggttcttgctgcaaaatcttgtgatgatatctttaacaacctgttgcaagatggggtttctccagttgagctttataagacagtgttcaagcaggaggttgaaattgttctcactgctcatcccactcaaattaaccatcgtaccttgcaatataaacaccttaaaattgctcatcttttggattataatgattgacctgatcttagccctgaagatcgagatatgtggattgaagatctggtgggagagaaaacttcaatatggcagacagatgaacttaggcgttcaaaacccactccagttgatga

SEQ ID NO: 73480 - DNA, 510 bp, Glycine max
  Clone ID: PAT_MRT3847_37368C.1
gattgaaagcaactatgatattatgatgtgactagcttaattttaatttgtttattaaatgaatggtgctagactccaatatttatcataagaaacttctaaaagatcattctgtaattggagatctcttgcatacatcataccccccaactttacacgcgcacaaaactataaacagaagcaaagggtatctgatgcactaggacatgtacatgttaggtttatattaggggtgacttgactaataaaattttgtaacggagtgtgtgtcttatcttcctttatttctgttctcttctctcttggtttaatactatacttactgattaaattcctcagatcccaatctatgccacagctcgtgatcattaacatcttttagatctgaagaaagcaggtgcaacggatgccatattggaaaatgcagaaactagcttgcacctgcgttctaagctgctgaaaggtcttggtgtgatgtctgatgatgtggcatctctgagtccactttat

SEQ ID NO: 73481 - DNA, 201 bp, Glycine max
  Clone ID: PAT_MRT3847_37369C.1
aagggtttggttgttaaggtattcgcccctcagagtgaagtcgatcgtcatgcacacttcacgagattccggtcgctcatgacagacaatctcaggaagaatttcgcgaagtcaatgatgcacaacatgtctaacccttacagtatttgcataggatgtaggtgatgatgatgcactgcccgacacgttgtcatcggcgtc

SEQ ID NO: 73482 - DNA, 169 bp, Glycine max
  unsure (1)..(169): unsure at all n locations
  Clone ID: PAT_MRT3847_3736C.1
ctggtcatggnagaaanatccaaggnccanctgtaccaggcagnaaggtcagtaaagaatncccggtcaacgtgtatgccnatgcaaaaggnnttngcnntacnntgtagaanagcatgcaagcttgctgccnggtcngngcttttacaagcaanngggccncntgcac

SEQ ID NO: 73483 - DNA, 714 bp, Glycine max
  Clone ID: PAT_MRT3847_37370C.1
gcacaatttgttggacatttgagagaagtgtccaacaaggttcacaatgcagaactgaaattgtttttggaagtggaaccggggatggattcatgtcccatcgcaccacctgacaagaccaaggatgatatattacttttcttcaagctatatgatcctgaaaaagaggagctgcgttatgttggaaggctctttgtgaagtgtactggtaagccattggaaatcttagcgaggttaaatgaaatggctggttatgaccctgaagaagatattgcactatatgaggaaattaagtttgaaccaaatgtcatgtgtgaacctattgacaagaaagtaacatttcgaacaagccagctggaagatggagatatcatttgctttcagaaggcttcctctatggatattgaggaaaatgtccggtatccagacgtgccctcatatttagaatatgtgcacaatcgccaggtggttcactttcgatctctggagagaccgaaggaagatgactttttcttggagatgtcaaggctttttacatatgatgatgtggtggagagagtagcccaacaacttggtttggatgatccgtccaaaatacggcttacaccacacaactgttacttttaacaaccaaaactcccaccttatcaaaaacccgaggggtagaacctttgtctggatatggtagtttcattacaatcagacattcggata

SEQ ID NO: 73484 - DNA, 160 bp, Glycine max
  Clone ID: PAT_MRT3847_37371C.1
cttaacaacagcacaaagcgggttactgtctgttcaagctatcatctctctctctctctcttagtgcctccttgccagaagttaacatgagacgagaaactttcctattcagatgtaaacttgataacgaggggcaccccgactagctctctgatcagat

SEQ ID NO: 73485 - DNA, 321 bp, Glycine max
  unsure (1)..(321): unsure at all n locations
  Clone ID: PAT_MRT3847_37372C.1
caaggaattcaaattccagggagtgattgtactttgcacctcgttggaaaagaaaggccctcctgttgctgttcctgttttaggagagggaaccacaccaacttggaagatttgtgcccntgactttatttcatgcttttttttgattttttatctcacaacatatagaccgggaaaaatacacttttttttttttaaacctccaattatgcttttacaattcttcaaaaattttgtttctttgtgtgtgtatggtgatgataacttaattagtgttcatgaatatgtcaagcccccncttttttttttttttaatttaat

SEQ ID NO: 73486 - DNA, 522 bp, Glycine max
  Clone ID: PAT_MRT3847_37373C.1
cttttactcaacctcaatggactcctcctcatcgttttcgagcctccgcgcgtacctcaacgcactctctcacacccccacgcgcctcgcccaacgcgccctctccgtctccacctcctacgatgagatgagtcaggtccgctcccgctccggcaccagcatgcgcaagaccctccgctggttcgatctcgtcggcctcggcatcggcggaatggtcggcgccggcgtcttcgtcaccaccggccacgccacccgctacgccggccccgccgtcctcctctcctacgccattgccggcttctgcgccctcctctccgccttctgctacaccgagttcgcggtcgacatgcccgtcgccggcggcgccttcagctacctccgcgtcaccttcggtgaatttgcagcatttctgaccggcgcgaacctggtggcggactacgtgctttccaatgccgccgtcgccagaggcttgacggtttacctaggcaccaccatggggaatctcctccgccaaatggcgcc

SEQ ID NO: 73487 - DNA, 733 bp, Glycine max
  Clone ID: PAT_MRT3847_37374C.1
cggtcgcgtgggcggacgcgtgggctctgtgtctctttctctttctctttctctctcttggaattcatggttagaggtggtggactccaatccatggattcagatccaattgggagcttcttcctccacaagccaattgttctcaactctttcccagctgaagacacaaacaacaagtggaaaaaacttagtctccaccacaacatggatgccacagctagcaataccaaagataacaccatcccctttcaagtcagccttagatgttctccaaacaatcatggtgatgggatattagttccaaggcagtttatggatcttgggttggctgctaataatggtactagcactggtattgaaccctcttcttcatcaggaggaagaagccaagatcgatcaagatcacccaacgtagaagtggcttccaaggaattagggacaaatgatgaagaagagaagaaagagtatggtagagggatagagagagaggatgatagtccctcagggcatgctcataaagttccaaggttcagtcctccaaaggataataatagtgttgaggctgaggctactatgaggaaggcaagagtttctgttagagctcgatcagagacacccatgattgctgatgggtgtcaatggagaaagtatgggcagaaaatggccaaaggaaacccatgtcctagagcttattataggtgtagcatggcatcggcttgcccagttagaaaac

SEQ ID NO: 73488 - DNA, 154 bp, Glycine max
  Clone ID: PAT_MRT3847_37375C.1
gcttcatccaaaacacaggtaaatgttgcctatgttttctctattctgcacctattttctatgtgtaacagctagagcgttattcacgagcgttgcatttttaattttctaattatggtcttgaaagcatgatttgcaattttttaacgagtca

SEQ ID NO: 73489 - DNA, 983 bp, Glycine max
  Clone ID: PAT_MRT3847_37376C.1
ttacaaggtcttcgcagcggcgtgaagaagatgatggaagatctgaaatgggctgcacttgagaaactccccacttacaaccgtttgaggaaagggttgttgaccacttctcgtggagtcgccaatgagattgatatagctgatcttggattcaagtgttacctttagtacataatccgttaccacacttgcctcctggcctctggttgcagctgccttcatgtagacatcaatatctgggtctggcttgatctttgcgcttttttctcttctacccaactcagacagcaagtcgtaacgtgttccaaccccttggcaccttgcttagaatgccaaggtttccctaactgtcatttctccaatatgaacatcatgctggctaatatatgcagctgttctctgaggaacaaactcgttcattccatgtccattataagtcactttccctgatacatttagattgggagtaagtcttcctgacaggaccaaaaggaatgtggtttttcctgaacttggaggacccaaaagtagtgtcattctgtgaggtttgatgattccactaacatctttaaggatagtcacatgtttcttttttcctttgagaatatggagagaagtaaagagactctacactttattagtaaggaagtttagaaaagttggcaaagctctacttcccacgtaagcctctgcctcaacgtttaggtgctcatatcgaacttcaattgttggcatatcaatcccaaatctatcaattcgttccttgagcttcaacagaaacttttcattgtcctcttcaacaacgttgatcaaagtttcctttatctattttcaatgagtaagggctagttctagggagatggaaaaagcaaagaagcagcaagagcaatgaatattcattagttattccttacatatcaaaacttatcctttcatattgagaagcatcttgtctaataacaatatctatcatataggatatc

SEQ ID NO: 73490 - DNA, 928 bp, Glycine max
  Clone ID: PAT_MRT3847_37377C.1
accaaaacaaatagttccctaaacagaactttcttagcccaaattaagtctttgatggattataaaacctaatgaataattgaatataatatgattttaaaaatacctgctgaaagataacgtttgtaagaaaagcgtaatgatcatcgatgttacattggctatgctgggaaatttactttgcacaattaaattactcttcaaagatgagactctactattagcatggagtaaattctagccactgaaattataaataccgactacttcaatccctaattttacaaaacatcaatttacttaagttaaaagattgtagcgaaagaacttggagtgaatgatatttttgtatagttaagataagcttcttcaccaataatcaccacatgaacacagtccatgcctaaaatgatgatagcgattgacgtctctcacagttatctccctctccgtgatttttgagatgaacttgatagcaacatggcaatcctcacaaattcgtagattctttgttatcaaaagcctggttcctggcaatgtacttatgagtccaaatgcaatagccagtctttcactgtgactgcacaccatgtctgtcttctcatcttcctccacatcatggaagacagatcctgtatctgggacatacccagcttctcgcattagtccttctaacctcttcaactcagcatatattgcaccagaatttgggtgcgaaacatctccagaaagaaatgcatagaccttgttctttacttcaatccagctacaagcaatgtttttctttattcctttatctatcatcaactgcctcaatctagcaactccttcccacttacctgattgagcatacatgttagccaaaatcacataattgccagaatcatcgggttcaagttcaattagtttctccaaagccacctctgcc

SEQ ID NO: 73491 - DNA, 339 bp, Glycine max
  Clone ID: PAT_MRT3847_37378C.1
acagtatgttaacttttttttgggttttacacaccgggggccattctattttaaagaaaattattcttggccacaaaataaaattgtttatacttgggcaggctttgggacaagatcgtgcaagaactttaggtctttctttttcaaagttttcaacaaaaagttttttgccgccccccgggccaacaacctaacctttcttttccaaaaaagtaatttttttttggtggccccaaaaaaaaccccaatttttttggggaccttctccaatccggtaatgcttagggtttggtacccactccaaaggttttaagggtgaaaaaaattttttgtcccccc

SEQ ID NO: 73492 - DNA, 765 bp, Glycine max
  Clone ID: PAT_MRT3847_37379C.1
tacggctgcggctcgacgacaggtgcttggtgcgaccaaatattcccgttcctcgggccttgactattgagccatatattcgcattcgcgtgtttccttcggctcttgcttccgtgacttgagaaaagagaattagggtcacgagggtttcatcctgcggcatcagacatgggaggaggcaatgggcaaaaggcaaagatggctcgcgagaagaacatcgagaagcagaaggccgcctcaaagggaagccagctggattcaaacaagaaagcaatgtcgatccagtgcaaggtgtgcatgcaaacatttatgtgcaccacatcggaagtgaagtgtagggagcatgctgaagccaaacaccctaaatctgatgtttatgcttgttttcctcatctcaaaaagtgaacatattggagagtgcaaatggagaaaaactttatatcatcatggcctcttccttaaacctattgacagagatcttccccattttctatctatataaaatgtgtttttctgtgtttgtgccttgggaatttaggagggacaaggagaggaagactattttattatgatttcccttgatgacaggacaagaaactgtgtgatgcttgtcaaggtgtaactgtttaatgatggttcgtgttaatattaaagtgttacagaaacttaaattctagtcttatcagaggaaatatctgactatcaataatttcggctcacgagtctggaaccaaaatgtagtctttaccagggtggacctgatcc

SEQ ID NO: 73493 - DNA, 624 bp, Glycine max
  Clone ID: PAT_MRT3847_3737C.1
aattcggctcgagctcaccaaagggaggacttctgccatttcaattaatagtactttaccaaacgcgcttttcccaagaaaatattagatagtttcaaacctctatggtctctacggtttatgaaaaagaatactcaattacatgtaatgtggagattaattggggccatagtagtcagggatacgtaatagtttctccctcttagagggaaatcacgtttgggaaaacatcaataaattttccaccacatgcttctactcctactaggctaatactaacactcgtgtctcctcggaggaaaaaaatggaaatatcttttccttggattctggtggccacaatggtcatggcaatgcggccactttcatttcgcataaaagcaaaccaactttcttacgactactacaaattttcatgcccaaacttggaaagcatagtcaagagtgagttgctaagcttattcttgacagatgctactgcaccagctgcatttctcaggctcatgtttcatgactgccaagttcaaggatgtgatgcctcaattctgttggactccaactacctagctcacagtcacagctctgaaatgatatcttcaaggaactttggcatcagaaagcgcg

SEQ ID NO: 73494 - DNA, 154 bp, Glycine max
  Clone ID: PAT_MRT3847_37380C.1
gcccaacaattccacctccgatgagagggccggaccattatatccattggttgttccaggtccagctcacgacagcactcccaaatgtcacatcagttttcatggctgttccgtataaggccccactcaacaaattgatagcgccatcatgaaa

SEQ ID NO: 73495 - DNA, 372 bp, Glycine max
  Clone ID: PAT_MRT3847_37381C.1
cttgtgtaagctttgctaattttttttatattctttattcagttagatagggagaaggaagggtctttgtgacaaacaattcacatggatagcatatatagcattattgggttcccttcaagtggctttcaattcccattgaaggacaattttttccacttaaaatcaacaaaaataacatagcatgaggttccttatttgtttttgcatacttgtatttcataataacattggctaccttggctcctacctgtcacatgaaggcatagatgcacatcactttcaccaataaattacccaacaatgcaaacccttttggaaaactgctctcaagtctattaccaaatatggacaaaactgactagactatgc

SEQ ID NO: 73496 - DNA, 371 bp, Glycine max
  unsure (1)..(371): unsure at all n locations
  Clone ID: PAT_MRT3847_37382C.1
ganngccgatcgtcanaaaccagtcatnganctggaatantcgggtgacttgctattgacattggnnggaatgttatccntggaagngattgagttgagagtgctaacaaggaaatnggcattggncgngtccctggagggaccctgactgactctgagncaaaagactgccccagtcatcttcnattgggcatcctgatgggaggttaaatcagcncntataggccntgccnaaggtttggaatgctatagcnanaatttnggggccctatgnaangggttttgggaattgcccaagggaatttnaaatcgcttnaacccaatcggttttntaatcgcttcgggtgntnttctctcgggttttccccnaa

SEQ ID NO: 73497 - DNA, 397 bp, Glycine max
  Clone ID: PAT_MRT3847_37383C.1
gcacacacatacgttcaagatcacaactggtccttcaccttttgcttcctaatcttaattgcatcatccatcatacagccattattcatcatggcgtctcctaataaaatcactctgaatagctcaaactcacatgctttctacttctatcattcaatagcactctaatcccagacaatctagcacattatccagcactactacaccaacagcaacatccctctgcccaacactacgagcaataccctttccaacgttatcacttactacaagaatcacatttagaccaataatccccattactaaccctactaggaccatctcatatcctctgactcttaattcatcataatctaccataccacactctctcatctcatccatactcctaactact

SEQ ID NO: 73498 - DNA, 319 bp, Glycine max
  Clone ID: PAT_MRT3847_37384C.1
ttttttttttttttttttttttttttttttttttttttttcaaaaaaaaaggcggctttatatcctcaaaacctctaatagcaggctgggccggccaaataataaaaggccattgggttttttttccagggaaataattggccccgggtagagagaaccaattggaaatttggaacctcttggcaaataccaaaagggaggtaaccaaggggggctgaatctaaaatctattcccttaagggatccatcccttttctggtccggagtggaaaacatatatcctttctgaaaaaatagggaagttgcattcttgcagcat

SEQ ID NO: 73499 - DNA, 246 bp, Glycine max
  Clone ID: PAT_MRT3847_37385C.1
ctacacaccgccgcttgtgctgcagccatttctctaatgatccatgataagttccaacggattttttgggtacttaacaagggcatcgattggctacggaaaataccctttgccttaactgccattaaaggttcttatcatatatatactcatatcatgattattaaatccttcattaaccatataaagaagcccactgtactcaatattgatcatgtgcaacttttgataaacattattcagatt

SEQ ID NO: 73500 - DNA, 237 bp, Glycine max
  Clone ID: PAT_MRT3847_37386C.1
ggaaaaaacttatttttatttgagtggtccttttttttagtctagtctgaccctaaccctaattgtgggccgagccaatccattggatcaggttcattttgtgagtcctaattatatatactatcctttaattaattaacagtatattatttatatattttttctactgtgtgtacttaaattcaactgtaatctgaacaaaaaataaaatacttaaattcaactgtaatctgaaaa

SEQ ID NO: 73501 - DNA, 994 bp, Glycine max
  Clone ID: PAT_MRT3847_37387C.1
ggcttcgagtttactaggaggtccattattggcacgaagctagcagcagaggagaagaatcagaatttagaaggcatggctgaaggaagaagcgaagaagacaaagacgacagaaccatgaagcgccttcttctcacgacaaactgtctcttactcaccatcggcacctccggtgggcccctcgtcatgcgtctctacttcctccacggcggccaccgcgtctggctctccagcttcctcgaaaccgctggcttccccctcatgctcctccccctcgccgtctcctacctccgccgacgtcgcaccgcctccgccgccggaaccgccaaaccgaaattaatctcaatgaagcctcctctcctcgccgcctccaccttcatcggaattctcaccggcctcgacgactacctctacgcctacggcgtggcgaggcttccggtctccacttccgccctcatcatcgcaacgcaactcggcttcaccgcgttcttcgcgttccttctcgtgaggcagaagttcacggcgtactccgtaaacgccgtcgttttgctcactgtcggcgccggcgttttggcgcttcacaccagcggagaccgtccccctggcgagtccgttaaggaatatgttatgggctttgtgatgacagtgatcgctgcggcattgtatggattcattttacccttggtggagttggtgtacaaaaaaatcaaacagcctcttacttactctcttgtcatggagattcagttcgttatgtgcttctccgccactctcttttgcctccttggaatgatcatcaacaatgactttaaggtgattccgagggaagccaaaaaatttgagcacggagaaggaagttactatgctgttttggtggggagtgcaatattatggcaggcttttttcttgggggcgattggggttatattttgggcctggcttctgatctaggatttttgattgcggtgttgctacccgtaacggaagtgttggc

SEQ ID NO: 73502 - DNA, 187 bp, Glycine max
  Clone ID: PAT_MRT3847_37388C.1
cttgtcgtgctcgagagagtgagtgaactgtctgaaccgcatcagcaagagcattcttgtaggcatagacacacctgtgtggcgcagcactacgcgtcttgtatgagataactgctgacagcgaaggatccattgcgtcatccagagctaacatggtaatatcgtcatgcttagtgagatcaacaac

SEQ ID NO: 73503 - DNA, 496 bp, Glycine max
  Clone ID: PAT_MRT3847_37389C.1
gattccgttccaggaaggtttcccgtcatcactgtatgacgtcctcctatctttggggggggggggggggggggggggggcacccaggagacagggcgcaggagaggaccctgacctataaggatcggagccatacatgcgtaatactgcgtaggaataaatgtgtatgaatgtacgtaatgaatagaagatgaagagtaatgacagcaatgttttaacacgctatggcaagaaggctaatgtgaggataagaagtgaagatgagggaggtgaatagtagttatagtcacggaatagggggtaagtgaattttggaaacggctgcgggtggggatatagtattttgtaaaaaaccaaatgaattgtggggaacccgtcacaaaacggaaatggctgaggaaactaaataggggtaacggcaattaacgtaaaacgcaggaaagcaactatataaaactgcgataaatagggggcagacggttatttgacggttggt

SEQ ID NO: 73504 - DNA, 144 bp, Glycine max
  Clone ID: PAT_MRT3847_3738C.1
atcgtgtacaagtctgcaaatcatctaaacttcaaacatacagttttctggatgacgttgtgggtgtcttgtactaccctattcgtgtgattggaaacaggttgcctcgtgtgattgatggatgtattcggtcctcttgtgagg

SEQ ID NO: 73505 - DNA, 318 bp, Glycine max
  Clone ID: PAT_MRT3847_37390C.1
tgaagaacaaagatacacatgattcttccttattgcttgccttctcgtgatgggctatgattatgctcacctaaagcgctgatgccttaggctgctctcatccataagatcagaaggattgccctgtaccttacgtgacagccctatactgcacactgctacatatcgacacccccctaccaatcacacaggatatactacatagtatgggactgtgctgagacacactggttataacgatgtatgcacaggctggcttcgcacaacggatagaggctcttactttactcctgaaataggagcccacccaagaacaag

SEQ ID NO: 73506 - DNA, 260 bp, Glycine max
  unsure (1)..(260): unsure at all n locations
  Clone ID: PAT_MRT3847_37391C.1
gacaatttaaacaaatttgtctcttgatgatgttgaaactcctaaaggttctatgttggatcttaaaatttctcaatctaaaatggttcctccaactgngttcttggcaagtgccatcgtcgattgagaccaattaggatccgacctatctattttgggagtctaagcgtacaacttggccgcatgtttaggcacctgtccacgagcctgacatctgtcttccgtacgcgtcccttcgccagtattacaatcttattttt

SEQ ID NO: 73507 - DNA, 154 bp, Glycine max
  Clone ID: PAT_MRT3847_37392C.1
tgtgagagagaagggattggaactttggatatctatagcgaaagtgtgacaacaacaaaaaccggactggttccaaattttttttttaattcttcaaacattcgaattccaaaaccctaccgaaacaaaactcaatcgaaattcttcattctct

SEQ ID NO: 73508 - DNA, 463 bp, Glycine max
  Clone ID: PAT_MRT3847_37393C.1
tcttcttctcaattttttgatgaattaactctaatcgtatattgctagtcccacaatgaattaagtactgtgattacccacgaacaattgttttttccccttattcatacaaaagttaaattttgtagatttaatctgtcatgctccgttaaaatcgactttcaccaatagacgacgattgttttccctgcaattagaaattttttcattagggtttcagtgtttggtgatggatgatttctccattttgttgagttaataaaagtactgggaacattcactttggaagaggtggcatatatacgcaaaattcatgtcacaatactcagaggcagtggtcctaatgttgttcatgaattactgatcactcatcactatgtaagcaaaatgtttgttggaagtccgcagtaagtaggtaccttcgtttgtttcagattcgatttgtggaagtcgagtaagcact

SEQ ID NO: 73509 - DNA, 1175 bp, Glycine max
  Clone ID: PAT_MRT3847_37394C.1
gctggattcggctcgaatttagaagaagaaaccttagatggagaaaacttagaagaagaatacttacaagaaggagaaaacaactcaggtggagaaaacttagatggagaaaacaacccagaaagagaaaatttagaagaagaaaccttagatggagaaaacttagaagaagaatacttacaagaaggagaaaacaactcaggtggagaaaacttagatggagaaaacaacccagaaggagaaaatttagaagaagaaaccttagatggagaaaacttagaagaagaatacttacaagaaggagaaaacaactcaggtggagaaaacttagatggagaaaacaacccagaaggagaaaatttagaagaagaaaccttagatggagaaaacttagaagaagaatacttacaagaaggagaaaacaactcaggtggagaaaacttagatggagaaaacaactcagaaggagaaaatttagaagaagaaaccttagatggagaaaacttagaagaagaatacttacaagaaggagaaaacaactcaggtggagaaaacttagatggagaaaacaacccagaacgtgagtattcctacgtgacggggggtatacctattctgacattgtttgagggagaaaatttagaagaagaaaccttagatggagaaaacttagaagaagaatacttacaagaaggagaaaacaactcaggtggagaaaacttagatggagaaaacaaaaggagaaatttagatgagaacccagaaggagaaaatttaaatggagaaaacttagaagtagaaaacaacttcgaagctgaaacttagacgcagcttcgtaagtgagtgcttgtggtattgttctctaattggcattaatgtttatgtagtttcatgtcaataataatctgcataataaaggttttcattaaatgtaaatgcagattagtcagctggttaaattcttattatgtcgtcgaagttttattgttgtatatgaaacaaattaaaattaaatcttgggcatgattttggttagaacaggttgtatcttttcattttagtgcatgaataaaattgagaagatattgtaaataaaaaaagatgtaatatttttcgtagtttttttataaaaaaaattgagtaatgatattggaacactatttttctgaatattt

SEQ ID NO: 73510 - DNA, 379 bp, Glycine max
  Clone ID: PAT_MRT3847_37395C.1
gaacaacgaggggaaaaaagggggagggggcaccactggcataactcatatggtattacaactttatccgtgaattcaagacaactaataacacgccaattattggtaacttttatgacgatcgtaaggtgagagttatttccaaactaacacagagaggctattgacactacatccaactatctttacattaaaatgcaccatagacgggtgtatccattgtactatggattgcgagcgataacgctttacatgaaccaggcgtgattataatgttccgaacggccagaccgaatggcttgttgactagtatattaccggagggtagcagacagataagaaaaattgatggagaccatgatgaccagtactataatca

SEQ ID NO: 73511 - DNA, 451 bp, Glycine max
  Clone ID: PAT_MRT3847_37396C.1
ggatgtattgttagcgttccttcctttttttttttttttttttttttacacggcaacacaacgaatttgtctttattttagtatgcatccacattcaaacaacaagggcgccggaacaaaggggggagcgagccaaaaacccaggacccaggcccaccgagggggaaaaacgtgggaacggggggacacaaagcccccctgggccccggccgagggacggaggaacaaccctgaaacccggggccgcagggcaagggcctccggctccagctgacaggctccacaccaaacccgaggggggggcagggggaccgaaacccctgaccaaaccccttaaagggggaaaagcaaaccaattaggggaaaaggaaccaactcaaaaccctgggcaccgaagactctccgaaggggctttctaaaggaaaaaaaccagggaccccgaacgctggcc

SEQ ID NO: 73512 - DNA, 1153 bp, Glycine max
  Clone ID: PAT_MRT3847_37397C.1
cacgaaaaaggatgagcgttgatatatgaaagtaaaagatgagaagagaggttggtcggagaacataatctttgtcgattccagaaatgtgtagcactagcattagcatagcttcctcacaccaaagctttctcaccaacgcccttattccaccaaagttcaggaccaccaggattagtattgtttcttgcagttccccacaacaatctccaaggaagaagaataatgagaacaagttggcaaagttagcaatggttgcagtggttggtttagagagaagaaaacgttggtcggagaacattaccggaaagagaatctttgttgattccagaaatgtctagcatcgcttcctcacaccaaagcttcctcaccaacgcccttattccactaacgcacaacccaaagttcaggaccactgttactttcccttcttcactcaaaactgtctcttgcagttccccacaacatgaacagcaacaatctccaaggaagaagaatgagaacaagttagcaaagttggcaatagttgcacttgctgctggtgtgttaacacttgggtcagttcatgatgcatcagccgccaagactggtggtagaatcgggggccaggccttcaagtcagcagctccgcgctcctcaccaagaatcaacaattccagaaccaatatctatattaatcctcgagtggcacctccgctagttggtggctatggctatggttatggtgtgccattttacggtggctggggatggtctccattttcattctttgcaccaggtcccagtgtagctgtaggcgttggaggtggatttgacactattcttctgtttatgtttcttggtgctgccgctgcagttgtgaggagattctttgggtcaagaaatgaagatgatgactactagcggtataaaaaagagtgccaagtcgatgtatagaagaatggaagggtgaccattgtgaccaatttattagtttgatgtattttgagatattatacttgaaaaccaagcaatcttgtgctttctaatgcactggtttacatgcttgttacacaggatgtaatgaagcaatggagatacattatactcgttcagggaagttcccaatatttacactaatttaaaaaccatcaagaaaagcatatggttttag

SEQ ID NO: 73513 - DNA, 209 bp, Glycine max
  Clone ID: PAT_MRT3847_37398C.1
cagcattcacccaatttttttcctgtcctctttgcctctcagaggaggctctgattctgctcaggtgtaccgtgtcaagagatcctgttgtttatgaggtgtgaagggagagagacaagagattagtcagtgtggttatcaacagaaggatgccttgacaagctgtgaggagatgacggatggaatctgtggtgtgacctaaacctcga

SEQ ID NO: 73514 - DNA, 311 bp, Glycine max
  Clone ID: PAT_MRT3847_37399C.1
ggaacaaaaaagccaaacttttttttttataaaaaaaaaaaagccacatgggttaactcttttactactacgggggagccccccgagggggaggagtccgtcacaaatttttttttttactaatccgggggaggggaatccctcttcaccagggggtacctaaataccccatcaccttttggggaaactccccctcaacaaggggggaaactacgcctcttaattttttttatctacattcccgtttaattcctacgtctacctgtcataaggacattttaaaacattttcagggaccttaaaaggcgggg

SEQ ID NO: 73515 - DNA, 506 bp, Glycine max
  Clone ID: PAT_MRT3847_3739C.1
gcagtcaatcactccagccaataccacagcgccctactacgagccttacaaaccattctaaaatgcatttcactcaggctctcgctcctctggctttcgccaccgccgccttgggccaaaccctcaacatccccgcccgaaacggtgctattcaagtccttgaaggacctagaactctgtccggtgccaacaatgatttcaacaaccaggagttcgagcttaaccgcccttgtgacactgatgacgatcttggcagtgaaggtgccgtttttattctcaacgacggtgccactcttagcaatgtcatcatcggagtgaaccaacttgaaggtgttcactgcaagggcaagtgtactctcaagaacgtttggttccgagatgtatgcgaagatgctatttccatcctcggcaacggcgatgccctgatcgagggtggtggtgctcaggaggctaaggacaaggtcatccaacacaacggcaagggtactgtcactatcaagggattt

SEQ ID NO: 73516 - DNA, 458 bp, Glycine max
  Clone ID: PAT_MRT3847_373C.1
ggtcctaaattaccgggtcgacccacgcgtccgatattttctgacctgtttgctgaagtgatttgcgaattgactttcctagggtgttgcctgagtcctttgaaatctccttctgacatctttcccttctgttgtgaaatatgttaagccacaggccaaactgctataagatcgaagtttgtttttttctcacctaataatagagaggtaatcagatggtctagggcagatttaactctacaaggttatcaggaactttgtttccttctgtcttattcagccattcccagtatgttttcttacccataagatcaaagcagactcatcagctccatatctgcattccactggggaaagagagagagaaaagagcagatttttaaaaaaagatatgactgagcattgctcagatcactgtggccaaactttgctgaaagagatgctgggacatagaacct

SEQ ID NO: 73517 - DNA, 222 bp, Glycine max
  Clone ID: PAT_MRT3847_37400C.1
tagactgagacctgtgggcgtcccacttttccatatactgagccgaattatatcttgaggtaatatgggctaaaattgccccctgcataaaattggaacccgttaacaatccacccagcattgcagcccgaagcatataacttaaatcatgtggttcccactgactgacctaactcaaatcaatagcgtatgcctgactgcccactttctgaatggaaaacc

SEQ ID NO: 73518 - DNA, 385 bp, Glycine max
  Clone ID: PAT_MRT3847_37401C.1
cctcggttacaagacaaccccaaatctcatatacctctacttcgtgctcggacatgtaccacttaccttggctatacctactaacagctatccatgcatatcattaagaacctcaaaattctcttaccagactggggtagggtctatatgcttatgggggaactccgataaaccaacatcttccagaacttgatagaagcctggatatacttgttgcaactcctggaagactgctagatttactggagagagctatagtttcattgccaatgattaggtatacatccttatacgaggcaaatataatgctggatattgattttgagccacaaataaagaagattgttgaacaaatggacatgccttcaacatctgccagacatac

SEQ ID NO: 73519 - DNA, 302 bp, Glycine max
  Clone ID: PAT_MRT3847_37402C.1
ctcttgagagtcacactcttacttcaagacacgtaccgaaagaaactatcatccatcaaattatacactatacacgaacggtcccgctatctctctccaatatcacgaactactaactttcattggcaattttcacgaaacacttgctgcaagaactcccaggagaaccgtcattgctgcataaacatatgatctgattgatccaaacactgttcaccgagttcgcattactacaagtaacctgtactcaactgcattactgcatgaacgtaacaaacactttggaacatctctttcaacaa

SEQ ID NO: 73520 - DNA, 276 bp, Glycine max
  unsure (1)..(276): unsure at all n locations
  Clone ID: PAT_MRT3847_37403C.1
ctcttagccgnagatctctcagggcttgcatcttctcngttntanagatgtacacctcnaggnagnaaattccacnagggtaanggntgctgaaccacctgnagttngagagtccagtnggnnagggcctngtttgntctggaaaatancaaccaggngcttaaaangtgatctgaagggattattncttaaattcancngtgccagtngatggtnctgggaancgcaaggctgtnttattcagnnccctacngattnagggaaggttccgtaaga

SEQ ID NO: 73521 - DNA, 2156 bp, Glycine max
  Clone ID: PAT_MRT3847_37404C.1
tgggactgtcccgtctcgcctactcgccttgctggccgccgaggcttcggtccctcctctcgatggcctcctgctttctttgcgtgccagcaccagtgcggtcgtccccctcgttctcccctatcggggtctgcctccgtggccccccgtcggtgcacacgctcccgctgcgcgaaacttcaaccaaggcattgggaaggcctttcatctttgtactgtgcttcctcctttgctacacacaatgggtgatgatgataaggaggttcaaactttggtccaggaagcctctgaaacagtggtcttagttattgatgaggaaggtattgagccactcatgtcagagcttgtcaaaggtgttaatgatagtcaggctgctgtcagaagatctagttcatatctgataggatatttcttcaaaaatagcaagttatatctggttgatgaagctccaaacatgatatctactctaatcattttgctaagtgattctgattcatctactgttactgttgcgtgggaagctttgtcaagggtcattatttcagtacccaaggaggtgctgccttcttatataaaacttgtccgtgatgccgtgtcaacatcccgagataaggaacggaggaagaagaagggaggaccaattctcatacctggattttgtcttccaaaagcacttcagcctatattgccaatttttctccaaggtctcataagtgggtctgctgaattgagggagcaggctgctctgggacttggcgaactgatagaagtgaccagtgaacaatcactcaaggagtttgtcatcccaataacagggcctcttatccgtataataggtgatcgattcccatggcaagtgaagagtgccatcttgtctactctaactacaatgataaaaaagggtggaatctccctgaagccttttcttcctcagctgcaaacaacatttgtcaagtgtctacaggatagtacaagaactgttcgttctagtgctgccctggcgcttgggaagctcagcggactcagtaccagggttgaccctttagttagtgatttgctgtcaagtttgcagggatcagatggtggtgttcgtgacgctattctgactgctttgaaaggtgtcttgaagcatgctgggaagaatttgagctctgctgttagaactcgtttttacagtattctcaaggatttaattcatgatgatgatgatagagttcgaacatatgcttctagcatattgggtatcttgacacagtaccttgaagatgttcagctaacagagctgattcaagaactgtcaagtctagctaattcatcaagctggccacctaggcatggttccatccttacaatttcttccttacttcattacaacccagcaacaatttgttcgtcttccttgttcccaactattgtagattgcctcagagacaccctgaaggatgagaagttccctcttcgcgaaacttcaaccaaggcattgggaaggctccttctttatagatctcaggtggatccttctgacacactgctttacaaagatgttctttcattgctagtttcatccacacatgatgactccagtgaagttagaagaagggcattatctgccataaaagctgttgccaaggccaatccttcagccattatgtcactaggcactattgttggtcctgcattagcggagtgtatgaaagatggaaatactccggttagacttgctgcagaacgatgcgctctacatgcctttcaactaacaaagggttcagaaaatgttcaagcagcacagaagtatatcactggcttggatgctaggcgcctatccaagtttcctgaatatagtgatgatagtgacgacagtgacgaagatacctcaagtagctaagtagtttgtcttttatcaagtggtgtccttccctttcttatctggtcagaatacagaattctcgttgataaccaaatttttggtggcacagttatatagtcaaaatatatagatatacgcaatttgaggcaccttacccaatttttttcggcttgggtatttgattacgtctataattgtaaattagatgaggcgaattatttgtatactagagatttttactcaatcaattttggtggtaatatatttcttacttcaaaattttgtcccc

SEQ ID NO: 73522 - DNA, 368 bp, Glycine max
  Clone ID: PAT_MRT3847_37405C.1
aaaaaggccccaaaaagggagaatggggaaaggtcaaaattaacctactaacagtctggggaagacaacaggcaaacctcaaagggggaaaaataaccatattacctctataaaatggtgctgacccactcctgctagcgtaggattaagcgagggggggcaccatcatccttgagggcggaagccttttttgggggaggaaggcaccaccgtatttttgagggtaccccaaaaatttttccaagccacccggggaagataaaacccctcccaaaaaaatagaaaggggccaaaaataacccaggtgaggccttttagctggggcattaaatattagggaacccccacaaaaaagaagggggccccca

SEQ ID NO: 73523 - DNA, 484 bp, Glycine max
  Clone ID: PAT_MRT3847_37406C.1
gagcatttcgctttgcatccagtcgcgaccactgaatacgttactattagcatccacattttgtcgtggagataaacactaacccaagaactagatatccttccgaagagacgaaaaagaggaatttctcgaaccagaaaggcttcctagcaggtcgcaggacctgcttctcctgcttcagattacgcttgagatcatcctgaactttcctttcgtggctctttagcgcctttgcagaagattgtgatgttttctcagccttgaccgcagccaccttcttctgctcgtagtattgtgaagcgttggcccaagggctaaggccgagatcgatatctatcgtcaaaccttcgggtttcttctgcgggcttgctgctcccttcccttcctcctcatcagaatcttcagactcgtcgcttgagaaaagctcctctacctcatatccttcatctccagcctccctgagtaaaagcgtaattgtgttctc

SEQ ID NO: 73524 - DNA, 214 bp, Glycine max
  unsure (1)..(214): unsure at all n locations
  Clone ID: PAT_MRT3847_37407C.1
tccaactaagtcttgcaaggctagaagcaccaaccttaaggttcattttaagaacacaaagaaaactgcctttgcaatcaagaagttgcccttggtcaaagctaaaaagtacttagaagatattcttacccacaancagacaattccattcaaacatttttatcgaggtgttaaaaggacancccgagctaataatagacactctaatgaccaa

SEQ ID NO: 73525 - DNA, 950 bp, Glycine max
  Clone ID: PAT_MRT3847_37408C.1
ccacgcgtccggattttttgtcataccaaaacttctgttgagttatgggaagcacttgaattgaaatatggatctgttgaaaaaggtttaagtcgttactcttgtgaaaaaatgattgatggaaaatctatttcagatcagatccatgaatttgaaaacattgtttatgacatgaaattgaaaggaatcgttttgcctgacattatgcttgtggctttcatgatatcaaaattgcctccttcgtggactgattttgctcgaagcttgaaacataaacatgaaagttttacctttgatgatttgcttgtctgtctccgcattgaggataaacatcgttcatctcaaaaacacttgcaaaaatctgattctcactctaaggcctatcttgttgagagctctaacaaacctttctttaagtccttcaaaaggcatgggtttaacaaaaataaatttggtagaaagccttcattttctaaaaataagaacaatgcttttaataacaacaataagcctaaggataaaaatccggggaatgaaattttttgctttgtttgtgggcgagctaatcatttggctaagaattgttttcaacgtcatcgccaacccacgtctttccctaaaccgcaggctaatgttgttaccaccagtgctgcctctgattccccatctgacaggaatcaagcacacgtactgtgagcatggggaatgggagtatggcacatgtgttaggagaaggtcaagtgaagctagagctatcttcgggaaactttattgttttagatggtgtctatcatatttctgatattaggaaaaatttaataagtacttctttgttagtccaacaagggtacaaggttgtctttgaatccaatagagttgttattacgagacatggtaattttattggtaaaggctacatttgtgatggtttgtttaaaaaaaaaaaaaaa

SEQ ID NO: 73526 - DNA, 664 bp, Glycine max
  Clone ID: PAT_MRT3847_37409C.1
ggctcgaggccacaggcgatgctattgcccttttgggtgcacttgtcatgccgcacaatcttttcctccattctgctctggtgctgtctagaaaagtacccagttccgtgcgtggcatcaatgatgcatgtagatactttctcatggaaagtggattcgcactgtttgtggcatttctgatcaatgttgcaatgatttctgtggctggaactgtttgctctgccgacaatctttctgcagaaaatgctgatcaatgcagcgatcttacccttaactctgcttccttccttctgtgaaatgtttagggacggtcttgaacatactcttccacatccctgtatgggcaagagttctaataactggttgcagcaccctcttatttcttggtctgcagagatttggggtaaggaagacagaactgctgatatcaatcctagtttttgtaatggctggatgcttctttggggaaacgagctagtttttgtaatggctggatgcttcttccttaacttaattacttttctgtctttatttaaagaatcgatacatcattaatttttagactaaattataagtgacaaagtaagccactcagaagataaacaaagcattaataactgacaaagtataaaataaacttaatatgatgatttatttgcttgat

SEQ ID NO: 73527 - DNA, 814 bp, Glycine max
  Clone ID: PAT_MRT3847_3740C.1
aattcggctcgagatagggaggacttctgccaactcaattaatagtactttaccaaacgcgcttttcccaagaaaatattagatagtttcaaacctctatggtctctacggtttatgaaaaagaatactcaattacatgtaatgtggagattaattggggccatagtagtcagggatacgtaatagtttctccctcttagagggaaatcacgtttgggaaaacatcaataaattttccaccacatgcttctactcctactaggctaatactaacactcgtgtctcctcggaggaaaaaaatggaaatatcttttccttggattctggtggccacaatggtcatggcaatgcggccactttcatttcgcataaaagcaaaccaactttcttacgactactacaaattttcatgcccaaacttggaaagcatagtcaagagtgagttgctaagcttattcttgacagatgctactgcaccagctgcatttctcaggctcatgtttcatgactgccaagttcaagtaaatgtgtttcttctctctttttgtcccttatatactttgctcttcacaggcttgcttcaccaactagcattattgcagaacattttcaagacaaacccaaccgtgttcttgtttcattaattcaagatttatatataaagccttgttgttgttgtgtttattttcatgcagggatgtgatgcctcaattctgttggactccaactacctagctcacagtcacagctctgaaatgatatcttcaaggaactttggcatcagaaagcgcgaaacgatcggccaaatgaagtc

SEQ ID NO: 73528 - DNA, 146 bp, Glycine max
  Clone ID: PAT_MRT3847_37410C.1
gttatatgaaaaaaagccctcttaaaacccaaacatcacgacttatacaaaacccagagccaaaccatgcacatccctcaacatatattgatacaggccctgcacaggatgcctaagatatacctagcgcgggtaatattctacaa

SEQ ID NO: 73529 - DNA, 748 bp, Glycine max
  Clone ID: PAT_MRT3847_37411C.1
ggctctttcccaccaaacaccacacactagaaacaaaatgagaaccatccccaccacaacaacaactccaatagcacccgcagccaccaccataagtccttattctcagcactcgacgtggcactctccggttccgtatctgtttggaggactggctgcgatgctcggtctcatagcctttgctctcttgatcttagcctgctcctactggaaactttccggccagttactgaacgaagaaaacgccgaaagggacttggaaagtgttgctggtgagaaacagggtgactctgcaaacaaggactctgttaaggtgtacgaggagaagattctcgtcattatggccggagatgacaaacccacattcttggccaccccgaaagcctcctctgttactcgctgtgttcccaaccattttgaggaaaacctcgaaaaccatgtgacttctgagaaattagagaaaaaccctgttcaacaacctacgtctccgcaaccacaagaaacaacgcaacaacagagcctgccacgacaataagttgtcatttggtttgtaagtctatgattctatcgtgggctagatttgagaaacaggggagcatctttttttgtttcctagcattccctccctcttctttcttttccttgtttgtttgtattctaatgctgttcggaaattgtaaatttaaacgagatgaattagaatttaaaagaaaaaaaacataaaaaaaccccaaaaaaaaaaatgaag

SEQ ID NO: 73530 - DNA, 1432 bp, Glycine max
  Clone ID: PAT_MRT3847_37412C.1
ttgggacccaataaattgacatttgagaaggaagggacaaaagagaggtggctaccatatttacattttctctcatttacttctttcaccccctacaactccatgttctataagagaactccttgttcttccttgagatattgccttgaccgctcatttatttccttgttactacaaatattcgtgctaccctccctacattttcctcaccccacaacaaagtttttcgcaaaaacatttcagacttcatagcatgtcatcaactgcataccttcttcttttgtttctgggcatttcattgcatgcatgttatgcccggcatcttagccctctgaataagaagctggaagagaaatcctacttctctatcaagagtgatgagaaaaatggacttgattcctctccaaagcagctcaatgaagctggtcacaacaagacggagactcgattggttggtgattctgtgaagccaagaaaccaaagaagcactaaccatcatagggtagtgcacaaagctactgatgcaaatgcttcaggtggtggtgctctacaaaagtctcttgtttcagtttcatggcgtgtgcctcacaataacaagaaacctcgtcagaaacaccctgggtttgacttggactattcgccaccaaagacacaccctcctcatcacaactaagcaacaacaatgaagtgtgttaattaagccctgaaatattgaagagaaagaacaacattaattgaagaaagggcctctcattatagttgaaaaatgtttagtttccctagcataagtatgactacagaaacttaatgactgttttgacagtgtttctacttcttcttcttctaattctttatctttctaattatatatatatatatatatatatatatatatatatatatatatatataatatgtacatcagacatgtttccagaaggtacatgcatatatgtatatatctcctgggacaggtatatatatttagatctttatagtttatattatattattataagaagaattactcatgactatactttatatctatggtctaattgcattggtcttctaggtcttcatttattggcaattcacaccatattatcctcactataacttctatcataaatcatggtactggctaaatgaagagtcatgctctctctttctcttaattttgccttatatatatagtacatatatacagcatggttttaatagaatgatcagcaaccgcaggttgcatttgcaatgccatgtaaaagtttaatttcttgactcgcaatgagcgtaccacaaccacaattgtaattgcattaattgtattttatttttttacaattttatttttttgcagtgtaaaggattgtgacgtaatcgcaaccataatgtatagtatcctagttattaattatggggaattcccttc

SEQ ID NO: 73531 - DNA, 453 bp, Glycine max
  unsure (1)..(453): unsure at all n locations
  Clone ID: PAT_MRT3847_37413C.1
tttttccgtaaacaatccagctgaatgttcgccatcccctagcctctatgaacgacaagattacgcccagttccctctactagccgagctgaggaaggcacgcttgttgtcttcaacctggctccgtcaagcaaccacactccacttgctctcctcacctcctccgaaatcccgctcttggatccgcaccccttgcaatctatccaccttccctcccacagaaccctgccaatcggnaccacgcacgcgggggtccccgtgccaaaggcctccagcagttgcccccgcgccgccgccctctgaagttccggcaacgagaccgggcgctcgcagaccgtgaacgagccgcatccggcggcagcggcagcggcacccgcggcggcggggcgcctctggcgcagcagctcgagagccgactggcggatgaccccgggcaggatcgttccgtcgagc

SEQ ID NO: 73532 - DNA, 333 bp, Glycine max
  Clone ID: PAT_MRT3847_37414C.1
gcaacaactctggacccatgatgccacaataacagacataaactaagcattcgagcaacttaatcaccccagttgcgtcagattttgcatcacgatgcgataatcatattcccgcaatcctaggtaatctaaaacaaagtatgaaaaacctacacctcccactctatatcaatggccataaactacctcttcacccttaattttgcttgcgaaattgctatacccaaatactttgccatcaccctaccacacacagttcattttcaatgcatttatttaccctacgactatcaaataaaatctcaaaatttttgtattaagcaaaagtcttct

SEQ ID NO: 73533 - DNA, 353 bp, Glycine max
  Clone ID: PAT_MRT3847_37415C.1
tggttacgtacggacaagcccgagctatccacccggattccattcgcagtcgcaggcatactgcgcaagcagcacccacgcgcggcggcccagactaggcgctttatgaagcacgcgcgcgcgtggtcatcaacgtcggcaccgtcgcggtgactcccgaagagggaaggctcacggtcggacgatacggccctctgtgcgagcagaatgagcaactcaacgctgtcggacacgagatgatgctcggctccaccggcgccaacaggatgaggcggaaacgactcccgtaccgcaaaaggatgaacagaacaaagcaccacccttcaaaaaccccaactagaactggacgccca

SEQ ID NO: 73534 - DNA, 318 bp, Glycine max
  Clone ID: PAT_MRT3847_37416C.1
tctgggtaactagatactcctttaatacaacattttctccgctatttaaaactgattgacagaaacgcagcgtatacctttcctgcatcggagcaccccgccaagccggtcccgcaatgggagggggggtctgccaccccaaagtcatgcatccttgaatatattccacggagtacccttcaacaaagaaaagagtcaccaacatgctggcttgcttgcacgcgtttgaccccaaatgcaagagcattatagccggctttatcgagccgatccctccacttagccaggggctcgtgccctttgactcgtgccggtccc

SEQ ID NO: 73535 - DNA, 423 bp, Glycine max
  Clone ID: PAT_MRT3847_37417C.1
cttcgaccttttttttttttttttttttttttttgcttaagaacaacaaattttacggtgacttgtcttataaaaacaacataaaagcaagccttttttcgaacaaacagaaaggggtcaaaaacattgaaaacaacttcactctcagtaacccattaaaaaggccattctccgcaccaaaataaaaaaagctttattccgtaaaccgcgcgtcaaatatttgtaattacaaggtgcttcaccgtggagagcaaaccaaacacactgacccattacatttcatcagttagacacaggggtctttaacattcagggtcttaaaaagtggtctgcttcaacagggaaaagcccctcgtgcttatactccccattatccccagctggggcatcctggaactgctgggtctctttaacaaggaaggt

SEQ ID NO: 73536 - DNA, 795 bp, Glycine max
  Clone ID: PAT_MRT3847_37418C.1
acggctgcgagaagacgacagaaggggctcagaactcagaaggaattaggaaaaatgagttggatgtcggtggatgagttcctggtgcagtgcaagaagtcaggagacgctgcctacgcctccttgcggtcgctgctggagcgcctagacaatcccgagacccgttctcaggctcggatctttctttcccaccttcagaagcgtttccccaccaaggactcctgcgagcgtattgcctttacccattattgtctcgctaatgcattgcattgcaggacatcacgggagaaacaaattgggctcgagggtcattccaagcatttttctccccgaagactggtccttcactttttacgaaggcattaatagacatccagactccattttcaaggagaggactgttgccgagttaggttgcggaaatggatggatttccattgccatggccgagaagtggtaccatacaaggtctatggccttgatatcaatcctagagcggtcaaggtttcctggataaacttatacttgaatgctttagatgaaaatggccagctaatctatgacgaggagaataaaactttgctggatagggtagagttccatgaatctgatcttctatcctattgcagggaaaaagacattcaacttgaaagaattgttggatgcatacctcagattcttaatccaaatccagatgcaatgtctaagatgataacagaaaatgcaagcgaggaattcctgcattcattgagtaattattgtgcacttcagggttttgtggaggaccaatttggc

SEQ ID NO: 73537 - DNA, 816 bp, Glycine max
  Clone ID: PAT_MRT3847_37419C.1
cctcgagccgaatcggctcgagatcacattattatcaaccttataatcttcctcttagcaccaaccatgactacccagtttctcattctctcccttctcatctcatgccacgtcctcactgcaaccctagccgaagaaaccggctttgtaggttcactagaccgcaaggcattaggtctagataaaaaagacaaggtcagtcatttccggttctacttccacgagaggttcaccggaagcaacgccacctcggtcaccgtcgttcctccgctgccccagtacaactccaccaccaacttcgggttggtggggatcaccgacaacgccttgaccgtgggacccgaacccgggtccaaggtggtcggaaagatcgaggggttgtacgcgggcacctcacaatcggagttcaatttattgattgttgtgaattttgccttgaccgaaggaaagtataatggcagcaccatcaccgtggtggggcggaaccgcctctccctcaagattagggagatgcctgtgattggaggaagtggggtttttaaatttgccactgggtatgttgaaaccagcactctctatgttgatgctgataggtctaccattgagtacaacatttatgtttcacattactgatcaatttgtggtaactttatgttacaaaacttcttctatgttcccttacgtactgctatgattaattgggtatgcggtgttttacatatatatatattttttttatcaatgtaacgaggattgcgaggattgatttatatacaagtgaaaggaaaaaaaaaagagtttgataaaaaaaaaaaa

SEQ ID NO: 73538 - DNA, 143 bp, Glycine max
  Clone ID: PAT_MRT3847_3741C.1
tttcatgttctttgtgcatgtcaggtgataatatttcgggggaccgttactgggtactataatactacatataacttgaatgacctatttctcacatgagatacacttcatgggggctatactttagaatttggacctgtcaa

SEQ ID NO: 73539 - DNA, 245 bp, Glycine max
  Clone ID: PAT_MRT3847_37420C.1
tattaatttttttttttttttttattaattacccatactcaccattacacccttacttttataagtccttttaataaagggactaatacaccctatcatatctaaaccttttattaccaatttttcctcaccttattacaacatttttccaattattatacactctatatcttcccattttcttcttttaattcttttttatctaaataaacttcaaaaacttattactatttacaactttttcc

SEQ ID NO: 73540 - DNA, 371 bp, Glycine max
  Clone ID: PAT_MRT3847_37421C.1
ccagaagacgagagagggtgttgcacctactagttattactaagctatttgcaggatcagaataagcaaaagcctaatcaagctgagctatgacttgaacatggcttattttgtatccgatcaactgagccagtattgtgtgcaccagcaattgatacccttagatggacctatattcttacagaaattagacctatacctcactctttatttgttttcccacgcagtcagagaaactcaaatatgaaaggctatgacctacagtttgggtacataactatactaaagagatgaatgatactctgcttttatgatgatgtaagagagtataattcaagaagcatggatgtaagcatcatgttagactctac

SEQ ID NO: 73541 - DNA, 1336 bp, Glycine max
  Clone ID: PAT_MRT3847_37422C.1
ggcgggtctgaggtgggtccaaatcaaattgtcatcgtggccagatcttggacctgacttgcacgcacacgcactctccttcattccttcacacacacacacacaaacataggcacagacacagaaaaaatagtggatggaagaacaagagtgccaagttgtggaaaataaggaaactccaactcctcctgttcgagtctatgctgatgggatttatgatctctttcacttcggccatgcccgttctctcgagcaagccaaaaaaactgtttccaaacacttatctccttgttggatgctgcaatgatgagatcacacataagtataaaggcaaaactgtcatgactgagaaggaacgctatgagtctcttcgccactgcaggtgggttgatgaagttattccagatgcgccatgggtaatcactcgggagttccttgacaagcatcaaattgactatgtggcacatgatagtcttccttatgctgatgcaagtggagctggaaaggatgtgtatgaatatgttaagtctgttggaaaatttaaggaaacaaagcgaactgatggaatttctacatctgatatcataatgagaattatcaaagattataatcaatatgtaatgcgtaatttggaccgtggttatacaagaaaggagctaggtgtcagctatgtcaaggaaaagaggttgagaatgaacatgggacttaaaaaattgcaggagagagtgaagaaacaacaagagaaagtaggaaagaagattcaaacagtgggaaaaatcgctggaatgcaccctaatgaatgggtcgaaaacgctgatcggttggttgctggatttctcgagatgtttgaagaaggttgccacaaaatgggaacagcaatcagagacagaatacaggaacaattaaaggcacagcagctgaaatctcttctttatgatgagtgggatgatgatagaattctatgatgatgatgaaatactacacagactaaagtgacaaataaactcgtgtttctaggttccgaacattccataagtaagctatcctttctgtaacgacaatgtttattcgaacattactagaaagacaatggataagtcatacatatgcaagatggtttgtaaattatttgtcattgtacatacatagtttgattgatatctatttcttgttaaaagagaagaaaaaaatgagaaaaaaaaaaaggaaaaaaaataaaaaaaaaaaaaaaaaaaaaaaaagaagggagaaaaaaaaaaaaaaaaacaaacttacaaaaaacaaaaaaaaaaaataaaaaagccttgaaaaaaaaaaaaaaaaaatcaacacactg

SEQ ID NO: 73542 - DNA, 385 bp, Glycine max
  unsure (1)..(385): unsure at all n locations
  Clone ID: PAT_MRT3847_37423C.1
gagcgaaaaggacacagattcttaactctcatacttttagcaacactgttaaagaaacagatgaggatcatcaggggcgtgagcaataccagaatccaacggtcccaaaaagaattaatgcactcattcaaaaactctgcacaacatgcgctccctgacccacaggtctaattcttttttccctcagcnccatagaaacagataattacgagggttatttattttcttcttgcctcactacaagtgtacattccacaggtttatactaaagattatggtaggatttacctcacctctcaacagatgctggctaacaacaacttgtaaaggaagtcttttttaacaaccaccaccagccgccaattaacaagacgctcttctcatt

SEQ ID NO: 73543 - DNA, 698 bp, Glycine max
  unsure (1)..(698): unsure at all n locations
  Clone ID: PAT_MRT3847_37424C.1
cacgcgtccgatttctgctagctagctttcaagattgctttgaaccctagactgcttgctccttgctccttcgtttgaaccctccctttctgcttgctccttcgtttgaaccctccctctctttgacattgaagccctaccccttcttccattgaagctccttcacttgttcttccattgaagctcctaccccttcttccattgaagctccttcacctcttcgacttcatcgctccaacttctggttcagtttattcaagttttacaatttcgtggctctgaaactattagatggggaattgtttgcgcaagatcaatcaggctttagaagattgtgaattcatcatcagctcagttctaacgtgactggtaagtcaattcacagaaaaacccacttagcatgaagcttaattgagccaataatacttaacttgcttttagatgattaatgggtgagagtagatgtgattcaaattgttaattgtatgatatatgatatatgatatgattgtatctaaatagacgattttgcttgaatggaagattatctaaatagatgatttgtgtcttatatgttgtcactacccgtggacattatttcttgctgtacatctatatttctgtgtcttcacaggctgtacatgtgtgggaaatggaatgcactgngttttgttgtcaaaacagtcattgtccaaact

SEQ ID NO: 73544 - DNA, 782 bp, Glycine max
  unsure (1)..(782): unsure at all n locations
  Clone ID: PAT_MRT3847_37425C.1
gaattcgagctctgtacccggggatcctctagagtcgacctgcagacccaagcttgaactctaccaagtcccgggagaggcaaagtttccattcttcatctcccagtacttctaatgatgaaaatagttctgaggttatggctgctccaagtgaagctcttaagtccattcatcaaccgactaaagcctctcagtcttcacctggtggttcatttaataatgctgtaaatcgattagggaaaggaaaccaaagtagtcggtcagatcaagagacggaaaaaatagaaaagaatgcctcaaggcagaattctttgaaagagctagtgcttgcaactgagatggatgtcattgattattctaacaacgggatctcccaggatttgggtgatgcaagcggagaacatgatcatcctagatctagcaaaaggggtgaatcatttttagcaaacattatcaagaaagataatgaaaaaaataatgttactgtaaacggacagcccatatcagattgcatgattaagaaggctgaaaagctagctggaccaatccagcctgggaattactggtaagtattatgctttactgtcccaaagcttatttagttctttgctttggtccatatataaataagcaaagattttgaaattagacattctcccatagaattggcaaagattntgaaatttagttctactaaattggcaaagatttacccaggctggacaaatctttgcttacttgttataactcttgctttggtccatagaaattgccaattggca

SEQ ID NO: 73545 - DNA, 395 bp, Glycine max
  Clone ID: PAT_MRT3847_37426C.1
aaagcaatcatttacatctttttggggttaaactggcaatttcacaccatcagaatacctaagttgaattacttcaagagctattccttggttatcaattccaagaagaaaatcccttaccttaaatggttgaaccttggtttttattattgggaaagggcaacccatcctagtaccaaacctggatttcacaattggagcacttttcattcttaacctttttttgacatacattttttcggcattattttcacttttaccaccagggttggaacccattccccctggaccaccttttccttaactttcaccaaaagaactttccctgatcaagggaccaccaacggtggcacccaccattacatttttgaatccatatttgggaaccagccccc

SEQ ID NO: 73546 - DNA, 551 bp, Glycine max
  Clone ID: PAT_MRT3847_37427C.1
ggtttatccagtgcccagtggctaatgattactacgaaaggatagtgttttgttttaaatttaatttaatacaatttgggcctctacaataagggtggtgtaaccaaggctatgtttgtgtatctcctattctcaagggtttttcaatttgaatgggcatgaaaatccacaagatggatacatagcattttattttttttttgtcaattttgcactcctacgaggccccattgtcatttatcaatggaagcgtaatcttaacgtgcataaataaatattgggaattttgagattatgtttggcagtttgaatgatctcgtgttctgctgtcacaagttcccttacatgtctgctatgtaatctgtctatagtatatagacttgagaaagtgtatttgttttaatatatttcttctatttatattgcaccccacgaggctccgcgacaatttatataagtggaccttgcatttcagatagtaatgttttgcatttcagtacaagaacaagaacttcatgtccttactgcttctaggaccttgcatctacgca

SEQ ID NO: 73547 - DNA, 212 bp, Glycine max
  Clone ID: PAT_MRT3847_37428C.1
gaaagactgcaacgactcacgaaagtggctaccatcagtactacaatcgcaccgagagacgcagtgatttgatagacccaatcattgccattaactgaatgtacaccttaaatcccgtttaatatctactgcgttcgttactttctaacgggcagctatatcatcttatgaacatatctgagtatttcacccgagaaataagggatacgtat

SEQ ID NO: 73548 - DNA, 356 bp, Glycine max
  Clone ID: PAT_MRT3847_37429C.1
gtagccagaggcttcttgaggaagatttctaagcgcatcccatttactaagttcaccccccttttcatattttatggaaaagttacggaatccttacagaagtgttttggatttgattttaatcttttttatcttccctttcaccaatgttaagtgaaatatgcttacccatggttttcagaaattttacggaagcattacggaagccacgaaagccccaaaaaccatttttcaacaacgtggaggagcttgccgcccagttgcttcccccttaagcaatcccaattgcctagattcaaattgctatttacacccctatcttgataagttcacccccttatttttgtgtttttggg

SEQ ID NO: 73549 - DNA, 472 bp, Glycine max
  Clone ID: PAT_MRT3847_3742C.1
actttcttaaacattattaaaaggtttacttaccacgcctaatcatggatgttgactaggcattaactatttatgtacttgtgtatgtacatggttttgaagtcttaaacgtaataataatgtggactattcatctactttgagtatgcacaagtggacagtgattttgtaattttaaggagtaagtatcgaataaaccagtgagatttttatgctattaattaaatttgacagtgctgcaaagcctgtttatgacttttccttcataattcatacatccatcccaatgctatgatgattagagagcgacccttcagaagtagctgatcctgaccttctctgagcccttagcatctgtggctaaaatttcaaaacttctggggctctgagaaactgtggttctggttgaataccattttttgcctctactttcgttggaaccatgacgtgtttttgtaccaaacttgctgca

SEQ ID NO: 73550 - DNA, 292 bp, Glycine max
  Clone ID: PAT_MRT3847_37430C.1
acctaactgccaaagcaaacaaaacttcaaaccaagctgtttctatatatgtgtgtgtctctatttgtcaacaggctggatcagagagagacgctgcgatcgagtgcccaagaatccacactctggcaacgtgcgcgaacttctacacgaggagcacaacatgatggctgcgtaaaagaacaatgacctctgcggggagcggacctgcgacccacaaacagatatcgacccatagagggtcggccccacccgctaaaccgaccacagtagtctgtgccgctcgcgtggcacc

SEQ ID NO: 73551 - DNA, 225 bp, Glycine max
  Clone ID: PAT_MRT3847_37431C.1
gaaagaaaatgcttgtcaaaaagcttgacattgcttccaagaattttgacaccaacgtgatctacctgctcctaaccatgtgaattaacacttggatgtcctacacctaacatcccaatgcctttgggacgttgaggagtccatctgtatacagtctgcatggggtatgtgtacctgctttaatcagcccaaccgacctaactgatatcaccggctgttggagaa

SEQ ID NO: 73552 - DNA, 180 bp, Glycine max
  Clone ID: PAT_MRT3847_37432C.1
ttacgatatgggtagtaaccttaaaccgcttcgaatcgtggcttcctcatgctcgtagaacctctctcgaatactaccttcgtcttcttcgtcttcgtcttctcaacaaacagccgggtcgattcggatcgtttaccgagaatctccgatgtcatcggaagttgagttcccgatatggta

SEQ ID NO: 73553 - DNA, 254 bp, Glycine max
  Clone ID: PAT_MRT3847_37433C.1
ctcacaattcggctccagacggctccgagacgaccacagaaggcgaattccacaagtcctcatcgcccaaaaaatgcggttccacccaagcgcaaatagcagtgacatccacctctcaccagacgaagaagccaccatagaggcaaagaccagagactcctttgatggggttgcaccacaacgccacacaaagcctcaacgaagtgagtattcagctcaatatgtggatgctttctccaatgtccatcactctt

SEQ ID NO: 73554 - DNA, 1074 bp, Glycine max
  Clone ID: PAT_MRT3847_37434C.1
gaggtgcttgccttagctatatactcattttcgcgtgtttgcttgctctagatctgattagcttttattcgagttctggttccttgtttcgtccctgcataatctgaattcaaatacttgccatcttgttacttgttacgctaccagatctgttttgaattaagctgtaagttctctcgcctctccgcctgtttcttctccttgtggactgtaagggctgaactaagagatggggttgtctttcaccaagctttttagccggctctttgctaagaaagagatgcgtattctcatggtaggtcttgatgctgctggtaagactaccatcttgtacaagctcaggctgggagaaattgtcacaaccattcccacaattggattcaatgtggagactgtggaatataagaatattagctttactgtatgggatgtgggtggccaagataagatccgtcctttatggagacactacttccaaaacactcaggggcttatctttgttgtggatagcaatgatcgtgaccgtgtagttgaggctagagatgagctccaccggatgttgaatgaggatgagttgagagatgctgttctcctggtatttgccaacaaacaagatcttccaaatgctatgaatgctgcagaaatcacagacaagcttggtcttcattctctacgccaacgccactggtatatccagagcacatgtgccacctctggggaaggactatatgaagggctggactggctctccaacaatatagctaacaaggcttaagggacattttgtggaatgccgctatcttcttgcttggctttacgattatattatgaggttgatgggttgttgcatctcttatatagcattataatattttcttttttactcttttaagtcttttctttttctttatttaggtgtttgatactatatcatagcaatcgtattggatcctgtagaatttttaaataattaatgaattacaaactatacatgacccgatcatgtttttcaatcctgcagaaaataactaaaaaaaaaaaaaaaaaaaaaaagcggccgctctagaggatcca

SEQ ID NO: 73555 - DNA, 1082 bp, Glycine max
  unsure (1)..(1082): unsure at all n locations
  Clone ID: PAT_MRT3847_37435C.1
ggctcgagataagtttcgtatcttctggactgcgagaggtgcttgccttagctatatactcattttcgcgtgtttgcttgctctagatctgattagcttttattcgagttctggttccttgtttcgtccctgcataatctgaattcaaatacttgccatcttgttacttgttacgctaccagatctgttttgaattatacggctgcgagaagacgacaggggggggggggagtttcttcttggatcttaccctcttgtttgctaatattctcattcttctgtctctgcttcttctccttctgaactaagagatggggttgtctttcaccaagctttttagccggctctttgctaagaaagagatgcgtattctcatggtaggtcttgatgctgctggtaagactaccatcttgtacaagctcaagctgggagaaattgtcacaaccattcccacaattggattcaatgtggagactgtggaatataagaatattagctttactgtatgggatgtgggtggccaagataagatccgtcctttatggagacactacttccaaaacactcaggggcttatctttgttgtggatagcaatgatcgtgaccgtgtagttgaggctagagatgagctccaccggatgttgaatgaggatgagttgagagatgctgttctcctggtatttgccaacaaacaagatcttccaaatgctatgaatgctgcagaaatcacagacaagcttggtcttcattctctacgccaacgccactggtatatccagagcacatgtgccacctctggggaaggactatatgaagggctggactggctctccaacaatatagctaacaaggcttaagggacattttgtggaatgccgctatcttcttgcttggctttacgattatattatgaggttgatgggttgttgcatctcttatatagcattataatattttcttttttactcttttaagtcttttctttttctttaattaggggggttgatactatatcatagcaatcgtattggatccctgtagatttttaantaattaatgaattaccaactatacatgacccc

SEQ ID NO: 73556 - DNA, 1482 bp, Glycine max
  unsure (1)..(1482): unsure at all n locations
  Clone ID: PAT_MRT3847_37436C.1
tccgtcttcaaagctcaagtatagcctttttcggctcttggggcgggcatcccatttttttttttttttttaaatccttaaagatagtacgagcatctcgcgtctcagatttttttcctcaccaatccaattacactgttcatgatcttcgacttcaaaaattaaaatattaataaaattgattcatgggggcaaaaaaatcattagttaaatttttggttatggacctctcaactcctactccaatcacaagaatcatattaattccactagaaattcccgctcccctccaagccattgtaggcatgcaaggaagaagacatgaaagacaaaaagaaaatagtcagtgccttagcacatatacaacttcaaagtacctcgctacttttgtgaagtaaaacccataaaatgtgatgttattcccattcaattgttgatggtggctttgaggtaatatcttgcacaacacggtttacaccacggacaccattacagatctttcgggaaacatcgtcaaggaacttgtgctcaaagtagtaccagtcagcagtcattccatcttgacttgtaacagctctgagagcaacaacatgggagtgtgttctttgatcaccttgaactccaaccgatcgaacaggcaagaaaactgcaaaagcttgccatattgaatcatagagcccagcatccttgattgactgaatgaaaatctcatcaacctgtcggagaatatctaaagcatttccttcagtcacatcacccaagactctcactgcaagaccaggccctgggaatgggtgacgttttagaaaggccacaggaacatccaagatcctccctaattgacgaacctcatccttgaacagaagcttaagtggttcaataagcttcaacttcatatcttttggaaggcctccaacgttatgatgactcttaatggtatgggaatgggttctcccggtcccaggtggaggacaagattcaatcacatcaggatacaacgtcccctgaaccaaataagaaggcttcttccccagcttcccctcaagctcntgagcaaaagcatcaaaaatacaaataaactccttcccaataatcttcctcttagtctctggatccaccacacctttcaacttggtaagaaactgacccacggcatcaacacacacaaccggcaaatgaagatccttctcaaaagtctccatcacccgctccctctccttatacctaagcaacccattatccacaaacacacaatgaagcctatccccaatagccttatgcaccagagtagcagcaacagtggaatccacaccaccagacaaagcacaaatcacatgctcatcaggccccaccgtttctttaatcacctttatctcctcctccatcacatcctccatcttccaccctgctcccacaccacaaacatcaaacagaaaacgccgcaatgtctccattccatcctccgaatgggtcacctcaggg

SEQ ID NO: 73557 - DNA, 498 bp, Glycine max
  Clone ID: PAT_MRT3847_37437C.1
ggagataagatgtagaggactccatgtatagaagagtgccatcaccatacagcatgctccagtgcgacttggactacgactttaatctggtgctcatgcatgccacgagattgcagccatgctattcgtcacacgttaagaatagtggctcctttgagacacgtccatattggactgcaaagctcttgactggaaagatgtggacgccttaatgagggcaacactatttgagttgtcatatcataaactcgttgcttgagcttacactatataactgaacttactaagtgcaggaacgctatagtcgtgaggctgcctactcttcgaactctaccaacttacaacgttgaaagaacgactctccacttctaagagccctcgtgcacgggactataaccctctattgcagacgtctacgtggaataacttaagacattatctgatgtgatctggaccatggacgcggactttcttagaagtgcctagggagggttgctc

SEQ ID NO: 73558 - DNA, 340 bp, Glycine max
  Clone ID: PAT_MRT3847_37438C.1
tattgctgccaattttgtggcaccagcaaatgttcttgtgaatctaagtcctaaatggttcacctttagaagaggagcacttctaactgcactacttgggattgcatttcagccttggaggcttttgaagtcaagtgagagctttgtttatacttggctagttggatattctgctctgatgggtcctattggcaggattgttctagctgattactatattgtacagaaaacaaatttgaatgttagtgacttgtactctaaagatcccttatgggggatattaggtattcaagaggggttaatgtggctgatattcctggcactaattgttgggagtatt

SEQ ID NO: 73559 - DNA, 600 bp, Glycine max
  Clone ID: PAT_MRT3847_37439C.1
ggctcgagctgtaattcctccgatgcttcctcgtctggcttggtggactggtcgatccctctctcactccttgctgttgcctcctcccacctccagcaccaggtttattgccaagtgtttgaataagaacatgggcgtggacaataatttgcttgccaaacctagaaggcgtgctaattttcggttatgcaatgtgtcatgttacacttctgaagtattggagattcaatctgatgctcctacactgcatgttctgtttgttcctggaaacccaggtgttattttattctacaaggactttgtggaatttctatatgagttgctggagggaactgcttctgtcacagctattggccatgtttctcactcaagaaagaacttggaacatggacgcatgttttctttacaagaacaaatcgatcacaagattgacttcatcagagaggaattggaaaatgttgagattcctatattactggttggacactctattggttcatacatatctattgaaatgttcaagaagtcgccagagaaggcgaaatattgcattgtactttatccatttttgacgttaaacccacactcaacaacacagta

SEQ ID NO: 73560 - DNA, 407 bp, Glycine max
  unsure (1)..(407): unsure at all n locations
  Clone ID: PAT_MRT3847_3743C.1
cggacgcgtgggcggacgcgtgggaaaagcccagggaagaagaaaactaggtcgcatgttaacacttgtaggttgggtttcatatntngggtttccaatcttcaagtgttaatatgcgacctatatgttgttttccgggggctttttaaacgctttttttttttcatatgtggactctttcttatttccgggagttttgtgttggattttgttggcgttcctgttttttttttaaatggtattttgtttgatctgtttctctacttgttcatttcctttgtttttatagttgggggtggggggtttattttatgctttctttatttttatttattaatttttttgtgattattttttttttttattttttttttgttgttcttatgattttttttgttatttttttt

SEQ ID NO: 73561 - DNA, 346 bp, Glycine max
  Clone ID: PAT_MRT3847_37440C.1
accgggaacacccgggcgacacccaaaaaatactgcctagcggcacaaacaaaaactcgggaaaccggcacagtatcgaagaggcccgaacccaacgatctgccaagcacacgcgcactttgacaggagaatgggacgcgcacaggaactgcgcttcaccccctgcgggggacgtggggacgcacaaactgaccggcacaattgccagggccctagcgcggggagaggccgcatgcgtactgggctctcttccacgttctccctcactgacccgctaggcctctaaatcgtcggctgcgtttagggggctgatctaacgcaaagggggacaaacggcttacacaac

SEQ ID NO: 73562 - DNA, 1463 bp, Glycine max
  unsure (1)..(1463): unsure at all n locations
  Clone ID: PAT_MRT3847_37441C.1
gtttcacgctcatctttcagtttcactaacaatgacagtttcttctgagaatggcgtctcaagcgacgaggtttaatttcagggtaggggaaggtactatacttcttcttgtcaggtaaaactttgtccttctccacaaattcgccttgtctgcgtcaaaaccaatctcaaaacactcaccaaggcttcttctcagaattgcgtcgaaagcatgagttctctcaccagtcttgctccactcgaagcagtgctctttgatgttgatggaactctctttcattctgatccactccactattatgctttgcgtgaaatgcttcaagagctcagagttctctcagctgcccctataaaagtggaattctgctctttgacattttcggaacagttcagggatgatactgccttggttgtctttcctggtgatctggaacgaggtttaaagtttgtagaagataaggaagccatgttccggagattggcttcagagcaactgaatcccttgaaaggccttgataaagtgaggaaatgggttgaaaaccatggtctgaagagagctgcagtcaccaatgctccaaggaaaaatgcagaactcattatctcaaaacttggtctaacagatttctttgatgctgttattattggtgatgaatgtgaacatgccaaacctcatccagaaccctacttgaaagcacttgaagttctgaaggcatcaaaggatcatgcatttgtatttgaggattctgcttcagggataaaagctggagtggcagctgggatgcctgttataggtttacgctacaagaaacccggcagaatttactgatggaagcaaagcctgcctttctgattaaggattatgaggattcaaaattgtgggcagctttggaagaacttgacaaggctggtgcacgttaagtttgaattaatgatgtgactgacggaatttcttgttataaacatgtaacaaggagttccatattagatcccctacttccatgaattttattggtctaactgtgcaatattcagtcagaattactaatgcaaccgagctttgtttctgataaaaaaaaatatcgggattcacgttaatttgagaggttggcatgcataattttgttgtaggtggccacattatactactagtgcataattagtattgctttgcaaccgagagcagacagttatattctatttatgttttgtaataatgtcattatcagtatgaactcgcgggttaagccaagcagattgctgagcccaagtgatattgtttacacttgacagaatcaaaatataaaatctatcacaaataatttacaataaaaaaatgaacccgcatggtcaaggcaaggaaattgcagtgcccaagtgtactattgtttttactttacaaaatcaaatccctcacaaataatttacggtttatattttttgtagggtcaanncntngagcgngc

SEQ ID NO: 73563 - DNA, 507 bp, Glycine max
  Clone ID: PAT_MRT3847_37442C.1
aaaaaaatttttgtttttaacaaaaggaaccaaacaaaaaaaaaaaaagcaagcaaaaaaaaaaaaaaagggagagagaaaacaaaaaaagcggcccactgaccgagaaataaacaacgacaaagactgggaaaaaccgtgacgggggcccaatttaaagggcccagaatttacatacccgggaggccggcagacatatttggtatagagggccccacggatcgcccttccggaccggttttcaaccagaatggcaaagggaacacgccctgtacccccccattaaccgcggcgggcgaagcgcctatgggcagcgggaccggaacagtagagagcccccaaccgcccgctttttaaacataaggcccacccgaaagggcaacgggcaccggccctgaacggcaagctataacgcgggggctgcgtggataccccccactgagtgccttacctctcccgagaccccgaaaacccgggtcagggtgaaggttcccggttttgggccac

SEQ ID NO: 73564 - DNA, 472 bp, Glycine max
  unsure (1)..(472): unsure at all n locations
  Clone ID: PAT_MRT3847_37443C.1
attcccgggtggcgacccacgccgcgtccgcaaatacagnaaatatcacttttccggggaggtgcggggggtccatttccatcttcaatatttcttctcatcgagaagcgtcgcgagcgagaacaaagaaccctagacagagccattccatagccatgggaggggtggggcctctatcgcagggggggggacccgtcgtcctccggagagggggcccaccgccgccgccaagaggggggagaaagcgcggaacgcgggccggggctccggggcgggaattgagaccctaaaaaagtgtaatgcggggacaaataaagcggcgtctagcagcacttcattgagcactaagagggggggggaggagactgagaatctagctcatgagagggtgccaactgaacttaagaaggcgataatgcgagcgaggaggggcaagaaactcactcaggcgcaggttgctcaactgagcaat

SEQ ID NO: 73565 - DNA, 251 bp, Glycine max
  Clone ID: PAT_MRT3847_37444C.1
cccacgcgtccgtgcaacttcaaatgattcagagactttggtcccagcatttaaagaagcagcaaagtctttcaagggaaaggtatattttatacaagctactaattattacactctgttatgttattctttctctgggaaaatttgcatgtctttaatttcagaaatcaaaacagtgcaaataaaatagaattcattgtttttcatgcaaattcaggggcagggcattgcttagtaggtgagtgaaagtg

SEQ ID NO: 73566 - DNA, 358 bp, Glycine max
  Clone ID: PAT_MRT3847_37445C.1
ggatgttggacttgctgccaatgttgctatcattgatttaatttagactgcttatgatcttgggaaacctttcctttaatgtgctattcagctctacattccttcgatacgaatttcaaacatgaggatccgcatatggaaacactgatattggactaaggtttcgatgtttctattaacgacttcatcatcggaccagcgaacgaggcgaggaacgcctgcgccatgatacggggtggaatcgagtatatatagttaagaaatgtggtatttatattactgcctaaccttagctgtagatcattaacttgatccaatagttactggcttattggggcactgtggtgttgttcaatac

SEQ ID NO: 73567 - DNA, 394 bp, Glycine max
  Clone ID: PAT_MRT3847_37446C.1
tgactctcgcacgcaagaaaggccctacgtagcgaggtgatggccctttctgttactattcactcttggacttgcgagagaaagccatgccaaagactaaaagtttttggcatgctgcttggacaaacactcccataacaagttcattgcgagaccttgtaaagccagaccctgcaagtgagtgaactatatgatcaccctatgcaaagatgaagaaacacagaacccggaaaccttgttctataaataagaccatcatccaagcaaaacaatgagaggacaattcagcaagcctccctattaacaaccatggagtgttcgtgcctgggtaaaggaaattaaagacactactcaagaatgatatagacactaagagctctgcatacagaaagaa

SEQ ID NO: 73568 - DNA, 512 bp, Glycine max
  Clone ID: PAT_MRT3847_37447C.1
tagcctcgttattccaacccctctagatttgaatcaccaagcttcctcattcccttctctctcttttttgtactgtacccaaaaaagcgcttcacaaagttgaaagttgaaacctcttcaatcttcacgatggcggagaagctgcacttacgagagttcctacaggaggatcaagaacccttccttctgaaacactacatttcggagagacgcagccagctcaaaagggtaacaccttccccaaacagcactttacaacaacatctcaaaaagaatccacaaaactcaaacttcccacttaacaaatgcttcctcacttccctccaaaacgccacaaaatccccactcttattgtcaccaaagaagagtactcccctcactctcagaccctccaacgcaaaaaccgcgtcgctcctcctcgaagccgccctcagaatccataccaacaaaaacgcgaaaccgaagcccaaaccaaacagggccttgggcatcttcggctcgctcttcaagaa

SEQ ID NO: 73569 - DNA, 458 bp, Glycine max
  Clone ID: PAT_MRT3847_37448C.1
gggttcttctatttttttagcaaatcttggcaatcatataatatatagattatcaagactattaagatttcacatgcatgtacatgcatatacctaaataattcatttaaaaacgtacgtacatccacattgcagaataaaaaaaacgcacctgaaccttgtttgttcatcaaacacaattgaaacattattaaacaatatatcaatatccactttcagaaattaacccatatatttatatatatgaaacaaaatttagtatattttatgctaaaacttattttttataggttaaagtaatatgattcaagaattgaatgtggtgcaatctctccgaatctctccatcattcccagtcttgacccccaccctttgaagctttcctggtggctgcgaccaaaagcattcgttaaaaatcccccaacggttgttgggcgaaaccttatacaaacaaaatt

SEQ ID NO: 73570 - DNA, 237 bp, Glycine max
  Clone ID: PAT_MRT3847_37449C.1
tctagctaacacacaaatatatatgcactgcatattgtgttcaaattgtgtgttttaaataaaagcttgttcgagcagagagccatttttttttgttttttgtgataaactcgatcatcaatttcaaggcagtgtcctccatggccaagaccaagagactcctcacactttttctaaggttccttgccattggagcaactatagcagcagtgatcgttatggtgacaagccatgaat

SEQ ID NO: 73571 - DNA, 194 bp, Glycine max
  Clone ID: PAT_MRT3847_3744C.1
gggccagggatttcactttgtgacgccgagggggactcccatatttctcgaaattcttaatccccttcaaagaccgacagcgaaagcccgtctccttatgaatataagccaggcgccaggtgcttgtttgagaccatataaagatttcttgaataaacaaacatgcccttctgtcggcttctcgcagccctaca

SEQ ID NO: 73572 - DNA, 303 bp, Glycine max
  Clone ID: PAT_MRT3847_37450C.1
gtatgaagagggatgttcgcatgaattgccatatcaagttgacatatgcacgtgtcttgatcaaaaatcattcctcaaccaaatctctgaaagtatagtgtaacctacgtggagatcgcacaccccactttctcccagaaaaggggggctaaaaaaatcactatatcacttgagctaagcctttcttggacagatggacattagctcagacaaacaagcaggtgtctatacaggtggctaacctaaatgcattgcgaccatctctatcatgcatatcttcaaacctaaggcaagacggaacgt

SEQ ID NO: 73573 - DNA, 1672 bp, Glycine max
  Clone ID: PAT_MRT3847_37451C.1
aattttgtatcttcgaatcaaacatgctcatagtttgtctgatcaatactcattgttcgtcttcacaacgactttgtcatataaatttttcatcccacaaccccacacacgcccacctgaaactcaaaaccactaaattactccactttctctttacatggatgaccaccgaaactcaacaacaaaaaacgccgttggcctctgcctcctcccacaagaactcatccaaaacatcttcctctccctcgtactccccgaaatcattcgcttaaaactcctaaacaaatccttctccagaataatctccgacaacaccttcgttcgccagtacaacagtttatccacctccaccacgtggctcttcgtctacaaaaaacggtggctccgcgacgccgctctccactccttcaccgaccggagctccgaccgctggttccgcatccccatatcggagcttctcaaaccaatccaattccacggcgaggacctctacttcctcgccgcttcaaacaacgtcttcctcttcgcctccaacaccgttcgcgaagtcgtcgccgttaacctaatctccgtcaccgttaagaagatccctccctctccgttaggtccacgtggcacctcttcctggagacgctccgggatgaagctcgtcaccgacccatccggttcgggccagtttcgcttcatgttcgctgagttcgttgacaaccgccccgtcttgttcgcgtacgagtccgaaaccgacacgtggaagtcaacggaggcagaggaagataataacaaagagttttcattttcgttttcgccacgtggcgcgagtcacgtgtttctcaacgttgttcacgggcctatggagagcgttctggtcgcggcgacgccagagtgcgacaagcccgtagttctacggcccagattcaacgtgactgaggctaatgatgatctgacggttggatttagttgggggaacgtgatggacatgttacacgtgtacggcgatgggtacatgatgattgtgaaatcggagggtgggaacacgaggaacgtgagggtgttgaagggagtggagctttggggtttgagtttgaacgggagaaagtgggagtttgtgtctgcggttcctggtgtgattgagaagccttacgcggcaatgatgggttgcttagaggagaaaaacggtgtcgttagggctgcgttggtttctaattgtgagggagtttgggacatgacgtggctctcttttgataccaggtggaaccggtggacgtttatgcccctccctgattgcaaaatgaagggttggaacatggctggtataagcttctcctctggacttaccttgccatgatatccaacaaacataaataaaaatgtggaacatccaacatgttatgctacacctcaacacaaacaacacatgaataatgttttctcttcctcgtggtatttatttggtttcttttatctagacttcttttgtttaggtttctcggttttgtttttttcccctttagtgttgtatgaggcattccaattgtgcacaagcatgtgtaaaggtttaaaagctcaggatggaaagctatgtaaataatgattacgatagtgtaactgaaataaatgagtttatcatatcaatccgtttaagtgggtgggccaaaacatcaaacaccaaaaa

SEQ ID NO: 73574 - DNA, 551 bp, Glycine max
  Clone ID: PAT_MRT3847_37452C.1
aggaacgttagggtgtttaaaagggtggagctttggggtttgagtttagacggaagaaagtgggagtttgtgtctgcggttcctggtgtgattgagaagccttatgcagcaatgatgggttgcttagaagagaaaaacggtgtcgttagggctgcgttggtgtctaattgtgaaggtgtttgggacatgacgtggctctcttttgatacaaagtggaaccggtggacgtggatgcctctccctgattgcaaaatgaagggttggaacatggctggtataagcttctcctctggactcaccttgccatgatatcaaacataaataaaaatgtggaacatccaacatgttatgttactctttttttttagacttgttttggtttggtttttctgttttcttttttcctttttcttttttgcttcctttcggcatgtcaattgtccataagcatgtatactagtctaaaagctcaggatggaaagctacgtaaatatgattataatagtgtaactgaataaatgagtttatatatcaaatccgtttagtgggtg

SEQ ID NO: 73575 - DNA, 539 bp, Glycine max
  Clone ID: PAT_MRT3847_37453C.1
cagccacgtggggaggtaaaacattttgcatgttttatgcccttgcaggaatacctttaggattagttatgtttcaaagtattggtgaacgtttaaatacttttgtagcatattcattgcgttattgtaaaaagtgtttcaagatgaaaaaaaaggaggtatcagagaccaatctggtgatgtttgtccttttcttatcaactttagtgatgaccacaggagctgcggccttctccaaatgggaaagatggagctattttgatgcattttattattgttttataacattgaccacaatcggtttcggtgattatgtggctcttcaaaaagaatcagctctccaaagcaaacctgaatatgtcatttttagccttgtctttatcttatttggcctttccgttgtttctggaggtatcaatttgcttgtattgcgatttttaactctcaatacggaagatgaaagacgtgatgaagctgaagcagctttaactgcagccggtgcagtccatctagagggtgacgttatcacagccaatgga

SEQ ID NO: 73576 - DNA, 284 bp, Glycine max
  Clone ID: PAT_MRT3847_37454C.1
aaccacttgtcgattttcttccacggaatagcggattaggttgaagatagaagatgttaatacggataaagttgcagcacctgtgagggacttcatggaacgggaacagggtaatgagatgaacgtaagagctttggcatggcagacattggcacacgatgctgcatcgagtccacatgggtcttcgtttgtcaacatggacaacgtggatcgtcacgttcttatgaacaaaattgcatacacagtagtgtttacattattacaattctcaatggcatgaattc

SEQ ID NO: 73577 - DNA, 538 bp, Glycine max
  Clone ID: PAT_MRT3847_37455C.1
cagcattacgtccaaggatcatattcaaaactctgcattcgcaaacaagttcgattacaagccatggccggagactcgttgctcaatgaacaatgttagtcagccacaatgaaaaaggcataacaaaatccagaagtacaaggaaaaacacctccaactccaccgctaaaatcagacgatagcacagtcgtcaagaacgaccgccaaaaccttgcccaataaccgtgccagtttgacacgattccctcctcttccacgttttcatagagctccccgtagtcgtctagcgagctgaatgtctttttgcatgatggtaacgcgtttcgcatgcagggcgcagaggtttgtgtcttcgaaaagatgcacgaggaaagcctcggcggcctcttggagcgcttggatggcttgagactgccatcgatggccttctaacgatgcaggcgctacgttatatgcgacttcgcggaccaaacgcgagaaaggcaatttgagtagtaggagatccgtcgacttctggtatctcctaatttcgcgcaat

SEQ ID NO: 73578 - DNA, 489 bp, Glycine max
  Clone ID: PAT_MRT3847_37456C.1
atggaatgtgcataaccctcaaagtaatttggtggagaataaagagatggcattctgcaactatggttggacacttgtggatgttgataatcaagcatcttcatgttgcactactcgacctctcaagactcttgatctctttcctctcacaactaccagaatcaatgaagactgcaccgccacaccacccaagtagctctaactctatcgttccaaaactgcatgtgtgtgacatttgatgttaatagcctattgcttaaggagtttaatctctatataggaaaccatgctggaatgtatcaattataccaatagtaccaagtcttgtacgtaggacctttggttgcaccttgtgaaagcatgatccaagtattcaacactttcattctggaaaaaatcctgtgggtatatgtatatcccagtatgataccaagattattaattttatcccagaagaccatataatgaacctgtcacttatttctaagt

SEQ ID NO: 73579 - DNA, 1235 bp, Glycine max
  Clone ID: PAT_MRT3847_37457C.1
aggcggctcgaggaagaaacgaagatagaatgtgcatggggtcagccctaaagaggaattaccaggttagcgaggagattggtcgcggtcgtttcggcaccatcttccgctgcttccacccactctccaaccaaccctacgcctgcaaactcatcgacaaatccctcctccttgactccaccgaccgccactgcctccagaacgaacccaaattcatgtccctcctctctcctcaccccaacatccttcaaatcttccatgtcttcgaggacgaccactatctctccatcgtaatggacctctgccagccccacacgcttttcgaccgcatgctccatgctcccttctcggagtcccaggccgcctccctcatcaagaaccttctcgaagccgtcgcccactgccaccgcctcggcgtcgcccaccgcgacattaagcccgacaatattctcttcgattcggcggacaatcttaagctcgccgacttcggttcggcggagtggttcggcgacgggaggagcatgagcggcgtggtggggacgccgtactacgtggcgccggaggttctgttggggagggagtacgatgagaaggttgatgtgtggagctgtggggtgattttgtatataatgttggcggggattccccctttttacggagactctgctgctgagatctttgaggctgtggttagggctaacctcaggttcccttctagaatcttccggactgtgtcccccgccgccaaggatctcttgagaaaaatgatctctagggactcttctagaaggttctccgcagaacaagccttgagacacccttggatcttgagtgcgggtgacacggctgaactgacttgagaatgtagctacatgctgtagtagtagtgtagctaattttgcccctttgtcttttctctctactagcttaataaggtctactcgtggtggcagaggaaggaacgcttctgtaaattttcatggtgcaagtagttttttttctttctaggaatcttatatctgagactctgggtatgagtcgagagaatcttgttttccactctcggtgattctctcttttgtagtagaaagtgagaaagtgggtgatctcccagactccctccccctagtacaaaggaggagtttgattctactatccttgtagtttttgtatatgtaaatcataataaacaatcattttgaatgaatgtaaatggtgtttaatcttctgattaa

SEQ ID NO: 73580 - DNA, 460 bp, Glycine max
  unsure (1)..(460): unsure at all n locations
  Clone ID: PAT_MRT3847_37458C.1
tcgttcacgcgtccgctttaagctacgaaagattgtccttgaccatggggcaaaacccacgcgtccgcccacgcgtccggtttcttgtgaaagtacactttcatgacctgttgcattttatagttgggccaagtgtgtattttgtagaaattaggctgatttagaagtgtggttttcttgtctaaggttaaggaagcatgcttgtatttatttattataaatgttgttatcaagatcctgcatcaactagaaatatgactaatgtagttcttataacttataaggcttgggcagttctcacttttcaagtctgttttggngngtggaattaggcctaagtccaagttctaagatagtatgatagcctatcctagatgtctattcctaggcgtgatgcgttgttgttattgggcttgggtcacctgcttttgcaacactttaatgttaatcttgttggaga

SEQ ID NO: 73581 - DNA, 285 bp, Glycine max
  Clone ID: PAT_MRT3847_37459C.1
gaacaactgctggttcagggtgaaaacaaatgtagccaagccccacaagggtgagattggcatagtgtttgaacaccctacccaaccagcaaaccaaccaggtggttggatggtaaaggaaaaacatttggagaaatcactagagaaattaccaagcctcaaaaagagtggttccacgccatccatgaacacggcctcaaaaatgttcaccatctctgaagtcaaaaagcactgcacctccgactctacttggatcatcatccatggccacgtctatgactgcac

SEQ ID NO: 73582 - DNA, 387 bp, Glycine max
  Clone ID: PAT_MRT3847_3745C.1
gaaagcacctaagtttctaacagtacacacatatgccgggtgaattgaaaaagtcctgccacttaatcccacgacccttataaagggcagatgatgggacacaacattctccatataacgctcactggccttagatgccccagactcgatcaccacggggttgttactttcaagcctaatggatttacggtgccccttcatttccgagtcgcaaattttcacattagcacctacctataatcggcgacgttcagagtaccacattagatttttgaccttaaccgctgttgcatattccacataggacaagattgtctcagccaccgactggttgaggttttcgacggcgactttaaattctccatgcttgaaggcctttttttgttg

SEQ ID NO: 73583 - DNA, 276 bp, Glycine max
  unsure (1)..(276): unsure at all n locations
  Clone ID: PAT_MRT3847_37460C.1
gaacggaacngtttgatttttngcgcgaacgccnncgcagggaacgtttgttatgcactgaggcccccaccgcaacacggcaggctttggaggcggctcacaactcccttcttgcttccgaggcccgtttggagcgtttggagcggcaggagcagtttcttgacgatcgggagcgcgaaatggtgcgtcggggtttgtcattcttggaggagctggagcttgaagaggcgcatgcggcacagctatcgagtacaggtagtggtgacgtggcaagtt

SEQ ID NO: 73584 - DNA, 3046 bp, Glycine max
  Clone ID: PAT_MRT3847_37461C.1
ggctcttctcttttcagcaccttaccttattccaatccaatagcaaggagtcaccaaaatagtgtgattcatggctgcaacgaatgcgtcaatctttgcatcttccacgcaatcatgcttgcctgtgtctcctaccatttcaaacacgcttgttagtccttttctcaatgtttcgtcaccaagaagttaccttgtgaagaaaaagcatgtgaaatttagcaaacacatcagtgctgctgctgttgcaacaacaacaacaactgaggaaattcaagagtacaaattccccgtcttaataccttttccatgatctacttttgtctttccttcacttcacaatgatagtgtcacctgcaatgggaaaaaagagcatggaaattaaataatgaataggtgatggggatggtacttgaagggttttgctgaagggttaatgatttttggggaatttgctgggagaagagttcaggaagctaagcccttgattaggaacaagcttttagaaacaggccaggctattatctacagtgaaccagagaaacgggtgatgtcaagatctggcgatgagtgtgtggtagccctcacagatcagtggtacattacatatggagaatcagaatggaagaagctagctgacgagtgcctttctaacatgaacctgtattctgatgagacacgacatggatttgagcacactttaagctggttgaaccagtgggcttgctcacgatcatttggtcttgggactcgcataccgtgggatgaacagttcctagttgagtctttatcggattccaccatttacatggcgtattacactgttgcacaccatttgcagagtggtgacatgtatggatccggcgagtctgccatcaaacctcatcaactgactgatgatgtctgggattatattttctgtggtggaccatatccgaagtcaaccgatatatcatcatcccttttagaaagaatgaagcaggagtttgaatattggtatccctttgatcttcgagtttctggtaaggatctcatccagaatcatcttaccttctgcatttacaaccatactgcaattatggccaagcatcactggcctcgcgggtttagatgcaacggacacattatgctcaattctgagaaaatgtccaagtccactggaaatttcaggacgttgcgtcaggcaattgaggagttttcagctgatgctactcggttctctttggctgatgctggtgatggtgttgatgatgcaaattttgtctttgagactgcaaatgctgcaattctccggctcaccaaagagattgcatggtatgaagataatctggcagcagaatcttccatgagaactggcccaccatctacatatgcagatcgcgtgtttgccaatgagattaacattgctgtccagacaactgagcaaaattacaccaactacatgtttcgagaagctctcaagactggcttttatgatcttcaggctgctagggatgagtatagattctcatgtggggctggaggttgcaatcgtgacttggtgtggcgttttatggatgtgcagacacgtcttatagcacccatctgcccacattatgcagaatttatttggagagagcttttgaagaaggatggttttgtggtaaatgcaggctggccgacagctgatgctcctgatctcacactgaagagtgccaataaatatttgcaggactcaattgttttgatgaggaagttgcttcagaagcaactttcaggctcaaagaaaggtaataagaaaggtcctccagctgcatcactgacagatagcaaggtgacaggcttgatatatgtaaatgaacagtttgatagttgggaagccgagtgcctgagtattcttcagaaaaaatttagcagagatactcgaacttttgctccagagtctgagatattgcaggctttacaacagagttctgtaggtcaatcttctaattttaaacaagtccaaaaacgttgtatgcctttcttgaggtttaagaaagaggaagcaattgcacttggggctcaagccctggatttgagattgccatttggtgaaattgaggttcttaaggaaaacttggaattgatcaagagacagataggtctagaagatgtggaaattttatctgcagcagatgctgattccttggctagagctggaccactagcttctttactaaatcaaaatcctccatctcctggaaagccaactgctatctttgtaactctgtagctactgggtggttggggagcttgaaattttttgtggatagcagaagattttgtcggaaattgctgatgtagatttctggtttgctgatattctactttcttgtgccccgaaagagatctcttcttagcttttaatttcattactcctttaagtttccttcattgtttgctctacgtcttcttggccaagctgtcagttttctgacaattgggaaaattacattttgtagcttaatgttcttatgatgagttattttattttagaatgatattaaatcatacttaaatgtggatttcagtctttctttcctttgatttctttaataagggcttggctgaggaactgagtaaagaaggagcatgtgagcaagcaatatttccagacacaaataaaattataaccaaatgtgctatgattggtaatttgtcaaaagaagggggtgatcgctgcgatctgaattttgttttaggatgcacagatcctagttcgcacctgtacaacccgctagccaatgtagatgatggaacatgtacaattgaattggattgagtctgaagaatagcattatactttgcataaatattcatttcgatcatactttatgttggttttaagtacacagtgtatattgtaaattccactctcaacattggacataggcaattgctggtcttgttaccttatttctctccttaatctgttactatagaaacaagtttttctctttccttgtctagttgaaagtgtaatttatttgagaaaagtatacatacagtgtgtttggataattacaag

SEQ ID NO: 73585 - DNA, 1207 bp, Glycine max
  Clone ID: PAT_MRT3847_37462C.1
ctttttagcagctcccacataaaccagacatagcaaggacgcaccaagctagtgtgattcatggctgcaacgaatgcgtcaatctttgcatcttccacgcattcatgcttgcctgtgtctcctatcatttcaaacacccttgttagtccttttctcaatgtttcgtcaccaagaagttaccttgtgaagaaaaagcatgtgctttttaccaaacacatcagtgctgctgctgttgcaacaacaacaacaactgaggaaattcaagagtacaaattccccgtcttaataccttttccatgatctacttttgtctttccttcacttcacaatgatagtgtcacctgcaatgggaaaaaagagcatggaaattaaataatgaataggtacaagcttccatcatgggctaagtttgaaatagggagggctgctgtctattggaaaaccatgaatggcctccctccttcttcaggagaaaagctaaaacttttctataatccagctgcaactcaacttgtccctaatgaagaatttggaattgcttttaatggaggttttaatcagccaattatgtgtggttggtgagccaagggctatgcttagaaaatatcgaggcaaagctgatgccccaatatattccattcagatatgcattcctaagcatgctttgaacttgatcttttcatttacaaatggagtagactgggatggtccatatagactacaatttcaagttcccaaggcattacagaacaagccaattgacttctttaataagggcttggcggaggaactgagtaaagaaggagcatgcgagcaagcaatatttccagacacaaataaagttataaccaaatgtgctatgattggtaatttgtcaaaagaaggggatgcacagatcctagttctcacctatacaacccgctagccaatgtagatgatggaacgtgtactattgaattggattctgagtctgaagaatagcattatactttacataaatattcatttcgatcatacttatgttggttttaagtacatagtgtatattgaaaaaaaaactctttacattggacataggaaattgctggtcttgttaccttatttatctctttaatctgttactattattgaaacaggttcttctttctcttagtccagctgaaagtgtaattaatttgagaaaagtatacatataatgagtttgaat

SEQ ID NO: 73586 - DNA, 334 bp, Glycine max
  Clone ID: PAT_MRT3847_37463C.1
gctgtgacagactggctgctactacatgcaccacgtccaagggcaggagtgcttgatttggctacgacgacgcttcctacttggggaaacttggatacagccctggccagaatcgtgtcgttcgtagcgctggatttgagggagacaacatgctctggacgtgcactgaccttggccggtacaagggtccaagtctggttgacgcacttgaccacattagtgagctcataaggctctttgacccggcattaacgctctcacttcatggagcgtactggattgtacgcttagaaactgtgccagtgggacatgatcagaccggagccttgtaccc

SEQ ID NO: 73587 - DNA, 1175 bp, Glycine max
  Clone ID: PAT_MRT3847_37464C.1
ccccctgtcgcggacggctggacggctcttctcttttcagcaccttaccttattccaatccaatagcaaggagtcaccaaaatagtgtgattcatggctgcaacgaatgcgtcaatctttgcatcttccacgcaatcatgcttgcctgtgtctcctaccatttcaaacacgcttgttagtccttttctcaatgtttcgtcaccaagaagttaccttgtgaagaaaaagcatgtgaaatttagcaaacacatcagtgctgctgctgttgcaacaacaacaacaactgaggaaattcaagagtacaagcttccatcatgggctaagtttgaaatagggagggctgctgtctattggaaaaccatgaatggcctccctccttcttcaggagaaaagctaaaacttttctataatccagctgcaactcaacttgtccctaatgaagaatttggaattgcttttaatgggaggttttaatcagccaattatgtgtggtggtgagccaagggctatgcttagaaaatatcgaggcaaagctgatgccccaatatattccattcagatatgcattcctaagcatgctttgaacttgatcttttcatttacaaatggagtagactgggatggtccatatagactacaatttcaagttcccaaggcattacagaacaagccaattgacttctttaataagggcttggcggaggaactgagtaaagaaggagcatgcgagcaagcaatatttccagacacaaataaagttataaccaaatgtgctatgattggtaatttgtcaaaagaagggggtgatcgctgcgatctgaattttgttgtaggatgcacagatcctagttctcacctatacaacccgctagccaatgtagatgatggaacgtgtactattgaattggattctgagtctgaagaatagcattatactttacataaatattcatttcgatcatacttatgttggttttaagtacatagtgtatattgtaaagtccactctttacattggacataggaaattgctggtcttgttaccttatttatctctttaatctgttactattattgaaacaggttcttctttctcttagtccagctgaaagtgtaattaatttgagaaaagtatacatataatgagtttgaatagttactggaattgaaaaatg

SEQ ID NO: 73588 - DNA, 258 bp, Glycine max
  Clone ID: PAT_MRT3847_37465C.1
atctacatcaagcatcatgttcgttgctcttagataatgttgtatgattatagacgactgcatcgtgtctgcctgctcagatgcgtacttgaccgattcctgtctcttgtaacaccaggtcccacggacagagacgatggataaaacgttgttggcctgtctcggttgtatgtattagctggtgcaccgttcgagagcacgaccttacccatagctgctgagagtacacgatgacaagacgctctagatggcttcaat

SEQ ID NO: 73589 - DNA, 551 bp, Glycine max
  Clone ID: PAT_MRT3847_37466C.1
gaaggaaacttaaaggagtaatgaaattaaaagctaagaagagatctctttcggggcacaagaaagtagaatatcagcaaaccagaaatctacatcagcaatttccgacaaaatcttctgctatccacaaaaaatttcaagctccccaaccacctacaaagcatgattcagatcaggataatcatactacacattcctcagcggaatgaagtactattgcaacccagtagctacagagttacaaagatagcagttggctttccaggagatggaggattttgatttagtaaagaagctagtggtccagctctagccaaggaatcagcatctgctgcagataaaatttccacatcttctagacctatctgtctcttgatcaattccaagttttccttaagaacctcaatttcaccaaatggcaatctcaaatccagggcttgagccccaagtgcaattgcttcctctttcttaaacctcaagaaaggcatacaacgtttttggacttgtttaaaattagaagattgacctacagaactctggtgtaaagcctg

SEQ ID NO: 73590 - DNA, 1037 bp, Glycine max
  unsure (1)..(1037): unsure at all n locations
  Clone ID: PAT_MRT3847_37467C.1
cgaggtgttgttgatgtgccatgccatttgccacttcacactttctgacacgcacactgaaaaatatcatttatctcttggtatctcttggctattataaatttggacatgttcagttgttagatatcacgcgtccgcctcccttttcggcaccttaccttattccaatccaatagcaaggaggtaccaaaatagtgtgattcatggctgcaacgaatgcgtcaatctttgcatcttccacgcaaccatgcttgcctgtgcctcctaccattccaaacacgcttgctactccttttctcaatgtttcgtcaccaagaagttaccttgtgaagaaaaagcatgtgaaatttagcaaaaaaatcagtgctgctgctgttgcaacaacaacaacaactgaggaaattcaagagtacaagcttccatcatgggcttagtttgaaattgggagggctgcgccatgttggaaaaccatcgagggccagccgatgccccaatatattccattcagataggcattcctaagcaggctttgaacttgatcttttcatttacaaatggagtagcctgggatggtccatatagacnacagtttcaagttcccaaggcattacaaaacaagccaattgacttctttaataagggcttggctgaggaactgagtaaagaaggagcatgtgaccaagcaatatttccagccacaaataaaattatacccaaatgtgctatgattggtaatttgtcaaaagaagggggtgatcgctgcgatctgaattttgttttaggatgcccagatcctagttcgcccctgtacaacccgctagccaatgtagatgatggaacatgtccaattgaattggattgagtctgaagaatagcattatcctttgcataaatattcatttcgatcatactttatgttggttttaagtccccaggtgtatattgtaaattcccctctcaacattggacataggcaattgctggtcttgttcccttatttctctccttaatctgttactatagaaacaagttttttt

SEQ ID NO: 73591 - DNA, 1375 bp, Glycine max
  unsure (1)..(1375): unsure at all n locations
  Clone ID: PAT_MRT3847_37468C.1
caaaattgctccaactacatgtttcgagaagctctcaagactgggttttatgatcttcaggctgctagggatgagtatagattctcatgtggggttgggggttacaatcgtgacttggtgtggcgttttatggatgtgcagactcgtcttatagcacccatctgtctcgagccggcagaatttatttggagagagcttttgaagaaggatggttttgtggtgaatgcgggctggccaacagctgatgctcctgatctcacactgaagagtgccaataaatatttgcaggactcaattgttttgatgaggaagttgcttcagaagcaactttcgggctcaaagaaaggtaataagaaaggtcctccagctgcatcagtgacagaaaacaaggtgacaggcttgatatatgtaaatgaacagtttgatggtttggaagccgattgcctgagtatccttcagaacaaatttaacagagatacgcgaacttttgctccagactcagagatattgcaggctttacaacagagtttctgtaggtcaatcttctaattataaacaaatccaaaagcgttgtatgcctttcttgaggtttaagaaagaggaagcaattgcacttgggcctcaagccctggatttgagattgccgtttggtgaaattgaggttcttaaggaaaacttggacttgatcaagagacagataggtctagaagatgtggaaattttatctgcagcagatgttgattccttggccagagctggaccactagcttctttactaaatcaaaatcctccatctccgggaaaaccaactgctatctttttaactcagtagctactgggtgagtttctggaaacttttcttttcttaaactagttcacaattcctacttcattttttggtcatctaaacacgaatgtaatttatttttatttgttatatatgtagacatggatgagttactgaaccttagtgttaaattctttttggcttaaataaaagtttaaaaatttttttttattccatgatctttcccctcatcttttaaacctttccacttaccaaatacttccncaggtggaattactgcagagccccttttgcgcagttcctcttccaaaagctcagcaaactccctatggatcttcaccctttttgacccctttgttttggcatgagtaatcagaggctgcagtcctctgtaccaatcaatagcaccgggaccacctcgacaagctgagcggtgccactgcctttccggttcattgatcttttcgatagataggccatccaagttctcaaagaaatccttaaaccatttgctcttcttacgagtctcgtggctcttttgactagtatcagaatcataatcatcac

SEQ ID NO: 73592 - DNA, 386 bp, Glycine max
  unsure (1)..(386): unsure at all n locations
  Clone ID: PAT_MRT3847_37469C.1
ggctcgaggtctttctgtagcccttattttagaacttagtggttttggttttgtatatttgaagagcggggattgtgtgtatcggtgttgtgctgcaatcaatgcactcttccgaaagacttccctgcaatattattttgagaaagtgggcagttgtgtttcatctttttttgaaaatcacaacaatcattttccctacatctctgtctttttaatccctctccctctctttcattttactttttttaaaaaaataaaaataaaaaaactcgcattaattctggtaacttacgatatagtcctgtactgttgccattttgtggatgttttattttcaaaatgaaattaaccaatgtcagcgcaactagagcnaatttgcacttttt

SEQ ID NO: 73593 - DNA, 382 bp, Glycine max
  Clone ID: PAT_MRT3847_3746C.1
acaacaagaaaatttttttgggacttgatttggtgaaactcaaaattttctaaggacaaagaagggttttttcatggaattattctttaccttaaaaacccaaaacaaatttgtttaaactggggatttcggagtccactcaaaacatctgatttcgcctcctatttatttggggggcccttttttgggtttcgggaatttcgggggatctctccttggggggctggtaaaaccctggaattccccattttggacattgatgtagcaaaagatttccgaaaatttttaaatccaacagggaactcctaggagatctggtcagggtcctcactttttagaaattggggatcaactccaaagacaggttggagggaaaggaccc

SEQ ID NO: 73594 - DNA, 2890 bp, Glycine max
  Clone ID: PAT_MRT3847_37470C.1
ccggccgaattcccggtcaccacgcgtttctcttttagcaccttaccttattccaatccaatagcaaggaggtaccaaaatagtgtgattcatggctgcaacgaatgcgtcaatctttgcatcttccacgcaaccatgcttgcctgtgcctcctaccattccaaacacgcttgctactccttttctcaatgtttcgtcaccaagaagttaccttgtgaagaaaaagcatgtgaaatttagcaaaaaaatcagtgctgctgctgttgcaacaacaacaacaactgaggaaattcaagagtacaagcttccatcatgggctaagtttgaaattgggagggctgctgtctattggaaaaccatgaatggcctccctcctacttcagtaagtataaaagtattgagttaactcattgcttgttattcaatcaattatctttcagtaaaaaaatttacaaattttggcagggagaaaagctaaaacttttctataatccagctgcaactcaacttgtccctaatgaagaatttggaattgcttttaatggtaatttttgcaatgttactttggttgcccaaaaatgtcatttgccattgcatttgtaaggaaaaatattttggattcattataaacagacataaactgcaccaagaacaagcgatataaattacacatcgtaattcagaatagatgtatgtttggaagtcaatggaaactatgttgcaacttgaaaaaattatgaaatttttgtttgagctctcgagaaggttccatactacctgctgaggcctattctgcaataaaagaagtttcaattgacacttgatcaacaatatgtttgaaataacgtaattttgtgtaatatctaattgttgtaatgaataatctgactatactgctttcttagattgtagaggttaagatgtcatacttattcgtttcggtggtcatattttttccaactgactagtgaaatttaatccattcaggaggttttaatcagccaattatgtgcggtggtgagccaagggccatgcttagaaaagatcgaggcaaagctgatgccccaatatattccattcagatatgcattcctaagcatgctttgaacttgatcttttcatttacaaatggagtagactgggatggtccatatagactacagtttcaagttcccaaggcattacaaaacaagccaattgacttctttaataagggcttggctgaggaactgagtaaagaaggagcatgtgagcaagcaatatttccagacacaaataaaattataaccaaatgtgctatgattggtaatttgtcaaaagaaggggtgagtaaattcttcaatttctttactctttaaatcattgcttctccttggaacactgtcactttcttaatgatgaatgagaacatccatgcagggtgatcgctgcgatctgaattttgttttaggatgcacagatcctagttcgcacctgtacaacccgctagccaatgtagatgatggaacatgtacaattgaattggattgagtctgaagaatagcattatactttgcataaatattcatttcgatcatactttatgttggttttaagtacacagtgtatattgtaaattccactctcaacattggacataggcaattgctggtcttgttaccttatttctctccttaatctgttactatagaaacaagtttttctctttccttgtctagttgaaagtgtaatttatttgagaaaagtatacatacagtgtgtttggattttttgactagcatctgaatcatagtcatcactcatcagatcatcatcggtatcttcaaaagcatcagagtcctcctccccatcatcgtcatcaacatcatcattcttttgaaggtcctctggtgaaatttcatcccttgcattggactgcaatgcaccaggtctggattgccagttccagccatgctcaagtggaggccgaattgcaggatttggaacatagttgctttcatatccacttgttgctaactgaggccttccatttcctctgccagctggtctcctaaagttagcattttgtgtctgccagggatttcccgaagatcttccaagtccaccatgaccccggatgcctggcttttgagccatttctgcattcccccatgccctaggattagaattatgggctgggggggcccatggttttgcagcactgcttccagccttgttcttggatttccttgcatatacctcccactcaccatcatcttgtcctgagtttagcttagtgtcagcgataccctgagtcaactgctcaacttttggatgagcttcagatatgcttttccctttggacatatcattgttagccacggttacaggtctcccaccccctcttttcgaactcatttgtatatgctcagtgatcgtagaaagatcgcgcgaagagaatgcggcgattgagactcacgcgcaaccagtgtagcgcggacgtcaggctgttcaagccttgtattgtgaatgacaaccatcgaaggccaaactatttcatgatctttctcatcatcttttaaacctttccacttaccaaatacttccccaggtggaattactgcagagccccttttgcgcagttcctcttccaaaagctcagcaaactccctatggatcttcaccctttttgacccctttgttttggcatgagtaatcagaggctgcagtcctctgtaccaatcaatagcaccgggaccacctcgacaagctgtacagtgccactgcctttccggttcattgatcttttcgatagataggccatccaagttctcaaagaaatccttaaaccccttgctcttcttacgagtctcgtggctaatttgactagtatcagaatcataatcatcac

SEQ ID NO: 73595 - DNA, 328 bp, Glycine max
  Clone ID: PAT_MRT3847_37471C.1
ggaagaactgggtcgtgcggcgattccgttgttgagggtgtgattttcggttgaagttacttttttgggcagatccgttggctgttgaaggtacagagcattcttttgggagggggcggcgcatcttttttattagtagttgggtggcgggcgcggatctgcggcggcggaggtgacggtgcaactgatggagtcgtggttgggtggcccgcgtgcggatttgaaggaaggaagtggttgcgccatatggaggaaaatgggttgccgaattcttaaacattcaaggagggacaacacagtctttcaagtttgtggcaaaaacgtcatt

SEQ ID NO: 73596 - DNA, 481 bp, Glycine max
  Clone ID: PAT_MRT3847_37472C.1
cccacgcgtttttccacgcgtacgttcagtttctctccttctaaccctcattatatactacctatttctcaaccaagagcctatttatatatctcctgcaatggcactaaatgagcaaaagggcaaggatgatatcccagaaagtcaatatcagaaaggagtgaagcagttgtgtgagaaaggtcatcttaatgcagtacctaaaaagtacatacttcctgtttccgaaagacccaccaagagtagtgtggaagatccaaatgttgtgaagcaaaatcttcagttacccatcattgattttgccgaattgcttggtccaaataggccccaagtccttcaatccctagccaatgcttgtcaacagtatggatttttccagctggtaaatcattgcatgttggaggatgttgtgaggagcatgatagatgcgagtggtacgttcttcgatctccctttagaggagagagctaagtacatgaca

SEQ ID NO: 73597 - DNA, 124 bp, Glycine max
  Clone ID: PAT_MRT3847_37473C.1
ggcgcatgtttgtgtgatgttatctggattgcatcctaacggcagggttagttagtattctaggatatcctgtcaaagattagccgaagaaagataaggctatcacgacaatatagcccacttc

SEQ ID NO: 73598 - DNA, 309 bp, Glycine max
  Clone ID: PAT_MRT3847_37474C.1
ctctttagttctgtggccttcctttttctcttttttagaaccaacctaaaaaccccattatcaataccatacccccccccaaaaataccaggggcccaaatgaaggaaaagcagttttccctcttcccaccagaggatccaatcaaaatgtcccaaacccaacgacaaaccctaaaaaataacaaccaaccaacacaagagcgtaattttaaaaagatccccccccactgattccccggggccccccccccccatttgccagcaagcccccctttcttgtgaaggcccttgcgtcccccgcactaaatc

SEQ ID NO: 73599 - DNA, 401 bp, Glycine max
  Clone ID: PAT_MRT3847_37475C.1
ctaaggcaggaaagattaacatatctccgctacgactcgtagagataacattgatctacattaaagcactgttcatcaccaaggcattaaggctatgcttataaatgtacttacctgatgaaaatttggcatattctattaatgtaactaaataattagatgggtaaaaaattaaacattcgtaacaccaattacataggatatcttgagctgaacgtagcacgtcatattaaatgaaccaaacaagtaactgttagaactcttgcaaactttcattttaggtcccaccaagggtttctggctccaatatacacatgattaaacaaccacaaaaggatataactcttcctgagtaaacgaaaaccctagctattcttctcagcatgcaatggacgattaaa

SEQ ID NO: 73600 - DNA, 498 bp, Glycine max
  Clone ID: PAT_MRT3847_37476C.1
ccacgcgtccgcccacgcgtccggtcagaagatttcagttcagggcgaatgcttgtatatgtggcagcaggtgttgtgctgggcatgctgagttcgatgttcattacggccttattcagaggtatgtatgggttgttgctcgctgccgccaggtgggctgtgaggaagcattgcatcagagtatttgccagccggttgaagcgtgcctgccttcttgtcgcctatgtatccgctgttggctggatcaccttgcagtacagcaaatttatcgggttgaaagaactcttgtcggattctgaagtcatggagaggttcttttaggctgtagatgtattcgccggtgtatattgtacttgtaataccattcgggtatttaggaaggtttcttcttcttctttttgatgtgaaaccaatgctctgttgtacgagtatgtacatgccagttgccagctacactgctgctctgtcacaaacgtgttgttcatgccacattttatc

SEQ ID NO: 73601 - DNA, 514 bp, Glycine max
  Clone ID: PAT_MRT3847_37477C.1
agggaaccatatctatactggaggcacatattatatcttgtcagacataacagcataaggaggaataagagcatccccaaccgcaaatgaaacatgccctctcactgtggtgcaatctaacactgagctcgacaaaaggattggaacaatcatcttgtccccatttctaatacaatttatcgccgaacgcaatactttgacacttaagcccgattcatttgcaaatataatgctgtgaattaaaataactaccgagtggtatgttgtggaggatctaccataaagacctgatgtcaaaattggctataacaaatatgcactggttggttggtttagaattgagagagtttctgatgatgaattcaataactataagcttgtgttctgtacacagcaagctgaggatgacaaatgtggggatattgggattagtattgatcatgatgatggaaccaggcgtttggtggtgtctaaaaacaaaccgttagtggttcagtttcaaaaagttgataaa

SEQ ID NO: 73602 - DNA, 269 bp, Glycine max
  Clone ID: PAT_MRT3847_37478C.1
ttttttttttttttttttttttttttttttttatttatttttttttttttcatggggtggtttattttttgtaatccactattttcagttggaccaccggggaaacaacaaaaaatccctgctggtgaacacaaaaaaaacacccaccggtgtttttgtgggggaagatcggacaaccaaaaaggaggtgggggggtcaaacgctcttgaaaaaatggagttttcccccccccatgtcatgcccgagatgaggaaaaggcctttttatt

SEQ ID NO: 73603 - DNA, 423 bp, Glycine max
  Clone ID: PAT_MRT3847_37479C.1
gacagaaggaaaggacctgagctatgtggacctacaagacagtaagagtagtatccctgaaaggcctactgggttagccgagtcttttacttccattgatggccgatgaaacaagttgtttatggatttcttgaatgcacctcgttttccattttctagttttcagttggtgaaatccggattgaaatctcctgtcccatttccagtctccttccaaaggttttaaattgcagttatggttgcagctttggagtcttggaaaccttaaaattgcagaaaattgtacacaaatgtttttgcattgtggtggtttcagagaccatgatatttttgacgatgcgggtgcaattgcacttttgtatctccatttcaaaccttgttccttccttcaatggctctacaattgaaagtgaaacgtggttt

SEQ ID NO: 73604 - DNA, 561 bp, Glycine max
  Clone ID: PAT_MRT3847_3747C.1
ccacgcgtccgcccacgcgtccgtgagccgtggctggaggggacttttaatgggaatggatttctgtatgataggaaatggggtggcattgtcaccaaacaaggatctactgatgctggtgctgattttgggtttggaatttacaatgatcaccattatcatttggggtacttcctttatggaattgcagtgcttgttaagattgatccagtgtggggttggaagtataagcctcaagcctattcactaatggcagattttatgaccttgagcagaagatcgaactcaaattacacaagactaaggtgttttgacctttataaattgcactcatgggctggagggttaactgagtttggagatggaagaaatcaggagagtactagtgaagctgttaatgcatattatgctgctgccttgatgggtctggcttatggtgacacgcatcttgttgctattggatcaacactcacagcattggaaattcatgcagctcaaatgtggtggcatgtgaaagaagaagattatcagtatgatgaagaatttggaaaagataaacaa

SEQ ID NO: 73605 - DNA, 119 bp, Glycine max
  Clone ID: PAT_MRT3847_37480C.1
gggtgaggccgggtgaacaaaaattttcttttaaaggagcagaggtgataaataaaacatttttcatcattcccgagggataactatagatttaggaaaacaaaaggcacaagttgtga

SEQ ID NO: 73606 - DNA, 2193 bp, Glycine max
  Clone ID: PAT_MRT3847_37481C.1
ccctcgccccccctgtgtggctaaggctgttgtttctcttttcgcctctttgccctctctctgcacaccgcttcctctcttggtttcgagaggtgaaaatggagtcggaggatagctttagcgaccttattaagatggcaaagaagcttgagtcagacatattagccaagattaacttctcttctgcacatgtcattgatctagacagactcctttgtgatacctttatcagacagtgtccaacaccacttgattatgacaatagaagagatttggttcacatcttcaatacgatgacaaaggaaatatatgggaatggtgatggctcccctgttgtggaggagtatggatcatttgtaatggatatgtttgatggaaaaagtgatattgacttatctctcaatttcaataattcaattgaagtttctcggcagaagaagatttcagccctttacaggtttaataagaaattacagtcaattcaaagtaaaggacatgttactggtttacagttaatatttagtgccagggtaccgattataaaagttactgatagtggaacgggtattgaatgtgatttatcagttgataatagggatggcattaataaatcccatattatccgtgcaatttctgacatagatgaaagatttcgaaagctatgttttctgatgaaatcctgggcaaaagtgcatgatatcaactctcccaaagattcaactttgagttctttttctattgtatcatttgtcgcttttcatttgcagactcgcaatcctcctatattacctccattctctattttactcaaagagggagataatcctgcatatgttgctaaggttgttgaaacttatttcaactatgggaaacagaacaaagagtcgttggctatgcttttcattactcttttagttaagctagcatcagttgaaaatctttggcagaaaggattttgtgccagcttatatgaagggtcgtggattttaaaatcatggaaatgctcttactcaatgagtgtaattaaattcatttccaccaacccctagtgtagttggatattaacctatgtagttccaatttatgttgatgatgttttgttgaacaggttgaagatttcatagaccggtcccaaaatgttgctagagcagttcgaaagaaagttaaattcaatctatggatgtatccataaatctcttgactaccttatgcagtttcgaaatggtcagatccagggaaataatttgatggacgttttgtttgaaaaaaatactgcttctactctggaagttggggttactagccacatagttcaaaataagaataacctccctattttgggaaatccgcatccaccaaaaaagaggaggttagaggaaaatcaggttcggatacctagtggaaaaaaaattgttcaaggcttgcaaggaacagggccaccccagagtgcgggttggatgcagcaagctcttgatgaatctgtgcgtaatgtgcttacttctgcgacttccaccatttcctaccaacctatttcttctgtgacttcccctgtttcctatcaacttcctgttcctatttctagtaccaatgttaaggtgaatccagggacaacttctcatttttccttaaatgcaggagcttttggacatccttataacccaccttccataaagcctcatgttgcacctcaaacttcccaagatttttttgccacagttagtaaaaaagttttagctccatgtccttgtcttccatcaattaattcacaccttcatcaaaatcctccttccatacagcctcgtgttgcacatcaaacttcccaagattttttggccacagttagtcaaaaagttttaactccaagttcttatctatcatcaattaattttcaccttcatcaaaatcctccttccatacagcctcatgttgcacctcagccttcccttgattttttggctacagttagtcaaaaagttttagctccaagttcttatcttccatcaattaattcatactttcctcaagtaggccataatccatacagagagaaggccttctacaatcataggcgctaaaggggttgcttttcatggtatatgcatttgtagaatcaaattaaaattagattaaaataaatcatctatatgcaagcgatcatttctcttctttgcttcccctgtactgtcttatagc

SEQ ID NO: 73607 - DNA, 274 bp, Glycine max
  Clone ID: PAT_MRT3847_37482C.1
caggttctggtcagaatgtaaatgctactgacacttcgacagtctctgatgcttatgcaaagatgcttacaatttttatcccacttctggtggatgagagttctttttttgcacacttcatgtgctttgaagttcctacacttgttcctcctggaggtgttgttaatggcaacaaagctggatatgatgatgatgatgatttgggaattatggacattgatgagaatgacagcaaatctggtaaaaattctgcggagcttgaagctttgaataa

SEQ ID NO: 73608 - DNA, 456 bp, Glycine max
  Clone ID: PAT_MRT3847_37483C.1
ggccgacaaactttttcaggcctttggaaaaaaaaaaaaaggcgacaaaccttggggggggtcgggacaaaaaaaaaaaaaggtttggccccccaaaaaaaaaaaccccccataatggggaaaaaattccctttgggggaaaactttctaaggggtgggggggaacccaaaccgggccggcattaaaaaaaaaaattttcgggccccgggaaaaaaaaaccaaaggccccctttggggaactttgcaacaaaaagcccacggggtggggagggaaaaggggaaaacccccctgttttggggaggcaacccccctggggggggcaaacccggggagaatttattcccgaaaaccaaaaaggttggtttcccttaaaaaatgggccccccccatttttatttggggcaaaagaaaacccgcaagggctgaaaacgagggcccccccaacttttagcag

SEQ ID NO: 73609 - DNA, 757 bp, Glycine max
  Clone ID: PAT_MRT3847_37484C.1
ggctcgaggctaccaagtcagaaagaaagccctatttatccattttaagtacttctgattattattgttcatttgtgtcttacattactcatttgttttcaaacctgtgataaaatttgatgcttcctcaactattatagatgatcagagcatgtgattataatgataatgcaatatgtttctttgtatatcagacaatattccgcaacccaaaagcaatcaaaccatatgctgttccatcccctgagcactgcaatctaccagcggctgctatgcatacatcttcacatatggttgaggttgttggtttgaatgcaccagcagctcaggttgcacagcacaagtggcaacccaacacacctgatggccagggtacaccatttttctttcaacatggaaaagctacatcaggctctgtgggtgggaatcttacacgcacgttcaaaggtcctgctggaactggcgaagagtggcaatatccccaagcattggctttttctgtttctggaattagaagccaagctattgtttctataacatgtgacaaagaaattataactggtattgcatgtttttattcagaatcagaagaaactcaccatagcaacaaaataaaaatgctccatcaccatcaagttgcttcctggatttgcacactttggaggtatttcatgtattgaagctgaaagaaggacaagatatcactgctcttgctctatataaggataacacaaatcttttggtttcaacttgggat

SEQ ID NO: 73610 - DNA, 348 bp, Glycine max
  Clone ID: PAT_MRT3847_37485C.1
acctaggtgttgttcttttttttgtttttttgaaaacaccgttccttttatttttttgtttgaaattaacacgcaaggaataccttatagcatttattgctgccactgcttagatgaaaaagaaagaaagagaaggagcagatttgccggtggtttctcttgaaaaaaggatccaaaacctctcatcacaccaacggaggctatagggggggcataaagaaagaggaggaaaatcgactagttatcgagaacaacccaaaaatgtcacattataaaacatgcatggggagagcaccacattcgggttattgggcctcccattattgtacaccatatttaaagggaaag

SEQ ID NO: 73611 - DNA, 412 bp, Glycine max
  Clone ID: PAT_MRT3847_37486C.1
acaatgccgaacgcaagctcatcctacagtatcaaacacggttgcatttctggtgcatggatctctctttcccatccaaaacaggcaaggccgcgtagctgagcccatcagcccctctagtggggtgggtctgcatgaggataaccgtcacgaagcatgcctactacagaaacccttatgtcggcccagaccgcgatgcgtactagagcacattctctacatatcccccttgctacgttacctagcacttcccaagaagctacaagctggtcagctgatgtgctcacggctcgcttcgatggctgacacagacacacacaatcttataacagacactctacgtgggcaatacatattggcttaagagaggactatatctgaatagttatactatagctcttacatgatgcag

SEQ ID NO: 73612 - DNA, 657 bp, Glycine max
  Clone ID: PAT_MRT3847_37487C.1
tttcaaagaggagggcgaaaaaaaacacgccatacgactgtcacacccgcagcaacagaagcacaagccactgcaaacccaactggcatggatttagagttaccagttgatccaaatgaacccacatactgcttttgtaatcaagttagctatggagcgatggttgcatgtgataaccccaattgtaaaatagagtggtttcattttggttgtgttggtctgaaagaacaaccaaaaggaaaatggtactgttcgaattgtgcagcaaccaaaaatcggcgtagaagcaaatgaggctgccagaagaataagaataaagttaaaaatgattgtattgaatgtgcgtatatatattttaatatctctagaagggagttatttatattgggcctagaaactttgcttctgtagctgttattaatcgggaaattatgaaagtacaaatttccaatgacttatggttggtggctgtgtttgtatatttaattggttttgtacacacttcagagctatgttcctttaaggttcttctcctggccatcaaatgtttccttttcattgtagatctgggttgagaaagcacggaattactgtgtacttgtgtagcataccatgtagtttctgctctaattatataattagcagtttacccatgcc

SEQ ID NO: 73613 - DNA, 479 bp, Glycine max
  Clone ID: PAT_MRT3847_37488C.1
ctcatggatccagtttgagccaccggactccggttcgaacccaatgtcgctgccgcgtctccccaaaaactcccccgttggttgcctcgaagataacacctactcgcgctacgccggcgcgtcacggtttgatcaatttccactctcgaagaaaaccaaggacgccctaagagagtccaagttcgtggccatgaccgacattcagagagcgtctcttccccacgctctctgtggccgcgacatcctcggcgccgccaaaactggctccggtcttggaaaagttgtatagagagagatggggacctgaagatggtgttggcagcatcatcatatcgcctacaagagaattggctggtcagttatttgatgggttgaaaggtggtggcaaacaccataattttagtgctggccttctcattggtggtcgaaaggacgttgacatggagaaagaacgtgtaaatgagctcaacatattgatt

SEQ ID NO: 73614 - DNA, 346 bp, Glycine max
  Clone ID: PAT_MRT3847_37489C.1
tggctcgaggcacaacaaaccactctgaattttctcacgttatccacaacactctaaacccgggttggggcctatctaatccatccatgacttcttgttgcaccttcactgcaatgtgcgaatgctagctctgattcttcctacacatgtactactggcgctgccgtcgcctgatcaaactgccgatgattacccaggcgcagccgccccaccagggtctggcgcatggcctaagagttgcacttcaacaaaaacggtaccggaataaataagctgcatagcggagttaacaagctcgcggatctaggtgctcccactcttggtcacagcggaaaaaatgatcctg

SEQ ID NO: 73615 - DNA, 343 bp, Glycine max
  Clone ID: PAT_MRT3847_3748C.1
ggaaaaggggcttccaaaaaggatagggacccaaaagccctatatgaggtaaacagaaaaaattttgttagttaaggcgggaatctatcaaaaaattttttttggcaaaaaaaatatttaacaattttgggagtctttacagcctcaaaaagctaaaaaagcttaattgggggcgggtcttccatttgtttgatcttgcggttgcccagggggggcacccccaaaaaacatttccattattgattggaaggcccctggtatttcctttggcaaatcccccatgttttccctaatatttcccccaatttttattttaggctcacatgttccactaccattgccc

SEQ ID NO: 73616 - DNA, 1254 bp, Glycine max
  Clone ID: PAT_MRT3847_37490C.1
gctgtacgcctgcggctccggtccgcgtttccgttcgggctacgcgtacgtacggctgcgagaagacgacagaaggggcttactctcgttgtgattgataacgagaaattgagaattgttacagaaacgatcgtgtttttttttttattccatcgtaaaccaaaatttagttctccagttgagcgttcttcccacaaaccctaatgtcgtttcttgaagaatttcatgccaatttggattcactacccgttattcttcggaagaagtatacactgttgcgtgacctagataagagcttacaggatattaaaaggcaaaatgaacagcgttgtgaacaagaaattgaagatattaagcgaggtgttaggtctggaaacatcacgcctgatacttcggcaattagattctctgatgaagcgcttgatgagcaaaagcatagcatcagggttgctgatgaaaaagtagccttggctgtccaggcttatgatttggtagatacaaacatacaacaacttgatcagtatctgaaaaagtttgatgaggagattcggcgtgaaagagaaaacgctgcaataactggagtacctgcttcaggtcctgaaggtaatacaaaatctggaaggggtaatgaaagtggtactggtagaggagggcgaaaaaaaacacggcaaacaacaatggtcacagaagcacaagccacttcaaacccaactggcatggatttagagttaccagttgatccaaatgaacccacatactgcttttgtaatcaagttagctatggagcgatggttgcatgcgataaccccaattgtaaaatagagtggtttcattttggttgtgttggtctgaaagaacaaccaaaaggaaaatggtactgttcgaattgtgcagcaaccaaaaatcggcgtagaagcaaatgaggctgacagaagaataagaataatgttaaaaatgattgaatgtgtatataaattttaatatctctagaagggagttatttatattgggcctagaaactttgttttcgtagctgttattaatcgggaaattatgaaagtacaaatttccaatgacttatagttggtggctgtgtttgtacattccgttggttttgtacacatttgaaagctatggttcttttttattgtagatctgggttgaaaaggcccggaattattgtgtgtatgtgactatgtgtgtaccatacaatgaagtttctgcactaattatagttagcagttgagttaaaaa

SEQ ID NO: 73617 - DNA, 509 bp, Glycine max
  Clone ID: PAT_MRT3847_37491C.1
agcaaaccccaccaatctaaatcaaatggcaacaccatagagagaaagatgatggttgccacgtccactcctagcgggaaagacatccaagtggtgccaccagcttcaacatcagcgaccataccattatcccacgaggaaaaccccactatccaaaaagatattaatgatatttcagctctgaatccaacattgaacgtggatgacaaaacaattagtgtggtaactctggctggtgacaacagaggagtgacaatgcacgtggcgggttctcactcaactaggcccaaacctgaaggtaagaagagcgcgtccacggagaaagatgaagcggggaagacatacgtaaacagcaacattcagagcatcaacaattcgatcatgtcgaacggttccatcaatggaagagaccctggtgttcgtgttattctcccccaacagcctcagcctgatgtgaaacaaccgtgtttggaaaaacctaaggctgaagttagcattaaccgtgtgga

SEQ ID NO: 73618 - DNA, 609 bp, Glycine max
  Clone ID: PAT_MRT3847_37492C.1
tttaatttccattgtctttcctcctcaaaattattttcactcatcattaatatctccggctcgaggttgaaagctgacatattttccttcaaaagatcctttggcactttcaaatggaggatgttgatgacaagctgccactgccagaaccctcttcagtaagtgctgaattgaagccacaggcagaaaccactgaagaaaatcctgaagtgataaacccacccagtagtcagtcttttgttgaagctcctatcaaccaaattaataataataataatagaatggattctggcactcatttgccagtaaccgagttctctgacttaggagtgtccctaaatgcttttgatggagcagaacaaaaccaccagggagccacagttgcagattccgaacgagggccttcggaagaagatatctttaacaggcagcaggatggtgtttctactgccactgctagtggtgatgttgataatccgatgaatctctcaacttcctcttctgaaagaaaagatttgcagaccagcctcatagaactaataacagaaccacctcaattaagcttactgatgttcccgagataattcagcttcacttccaacattacag

SEQ ID NO: 73619 - DNA, 260 bp, Glycine max
  Clone ID: PAT_MRT3847_37493C.1
ggctcgagggctcgagtgatgatttcgcaactgtggcaggtgttgtggtacttcttgacagtttttatttttgtgttttatgttgaatttttatcatctgcaaagttgatgtggccttcctctataaaccatcttcatgaaaggggtcttcaattgtttaacttaaatatttatgtgctgttttatgcataacatttttgtttcatagggtttgctttcgtctacatggaagatgaacgtgatgctgagtatgcaatcag

SEQ ID NO: 73620 - DNA, 1076 bp, Glycine max
  Clone ID: PAT_MRT3847_37494C.1
tgtaatttcatatcgtaacaggttgttccttctatccctttcttttggtcttaggtcatatatcaatggcaacttcaacctctgcactcaataaaaggctggaaggaaaagttgcactgatcacaggaggagctagtggcatcggcaaacgcactgcagaagtgttcgctcagcaaggagccaaagtagtgatcgctgacatccaagacgaactgggacattccgttgctcagtccatagggccatcaacatgttgttatgtccattgcgatgtcaccgatgagaaccaaataaaaaatgccgtccaaaaagccgtagatgcttatgggaagctagacatcatgttcaacaacgccggcattgttgatcccaacaagaaccgaatcattgacaacgataaggcagatttcgaacgtgtcctaagcgtcaatgtcacgggtgttttccttgggatgaagcatgcggcgcaggcgatgatcccagcacgcagtggtagcatcatctctacggccagcataagctcctacgttggtggtgcagcctcgcatgcttactgttgtgctaagcatgctgtggttggtctaactaaaaatgcagcagttgagcttggacagttcttttataagggtgaattgtttgtcaccttacgctcttgctacacctttggccaccaagtttgttggagctaatgatgaggagcttgagactatcatgaactcactggctaatctcaagggtgtcactcttaaagctgaggatgtggctaatgccgcactttattttgctagtgatgattccaggtacgtcagtgggcaaaatttgctcatagatggaggcttcagcattgttaatccttcctttcacatgtttcagtacccggactcggagtcttgatttttgtctactatgaagaagcaagagtaattaataagggctcatatatattgagctatagtgcttgtgggattgggctttgattgtaaaacatacgggtgtttaaaaatgttgaactgaaccaaattgtgtgaaatcatcccatttaatttgtttcaattaaaaaaaaaaaaaaggcccta

SEQ ID NO: 73621 - DNA, 382 bp, Glycine max
  Clone ID: PAT_MRT3847_37495C.1
gatggaaacataaagaagcggaattttatttttcaactttgtgacaggattttaaaacattggattaatttctgaatcctaaatgacaagaagaagaatgataatcaatcaaccagtccactaaaatcttggaccatcaagttaaaccagaagattttcaagtgatcaactttgtggccagtattagatgaacaaatattatatcttcccatcccctattaaatgttattaatcaagaaaaaaacaaaaagaattacggtcaactaagaaaaagataagaagacaaaagagagataattttttatttaattaattgacagttttaaaattgagacaagagatataattttatttaattaattgacaattttatagttgagac

SEQ ID NO: 73622 - DNA, 866 bp, Glycine max
  Clone ID: PAT_MRT3847_37496C.1
ccacgcgtccgcggacgcgtgggttagggttgagcctcagatgaatggtggtgggcaggagagggggattaggagtgggactgttccaactcctttggttgttgggatgggtgcggcgtgtgaggtggcgaaggacgagatggagtatgatgaaaagaggatttctgctttgcagcagagactgcttaatgggattagagagaagcttgatggggtggtagtgaatgggagcttggagaggcgctatgtggggaatttgaatttgtcgtttgcttacgttgaaggggagagtctgcttatggggttgaaggaggtggctgtgtccagtggcagtgcctgcactagtgctagtttggagccttcttatgtgttgagggcgttgggagttgaagaggacatggctcacacttctattaggtttggaattggtaggttcactaccgaggctgagattgatagggcggttgaactcactgttcaacaggtggagaagttgagggaaatgagtccgctttatgaaatggtcaaggaaggtatcaacatcaaggacattcaatgggcacagcactgattattatcaagctctcagattgcaatgcaagtgatggggaagcaattgtgattgaactccagacgtagctgccactcttgcaattgcggtttcttagaacttgctgattatttagtaatttgtatgttgcgggtacgttacaattaaaaatttaccctggcagagctatttattaggtatacaccgtttgtttcaatgattgttagttgtgcttgtcagcgatgtttatgaagaagaaagacatgcattggcagtttggtactgtatggactaacaaatgttggtgtgttttatt

SEQ ID NO: 73623 - DNA, 294 bp, Glycine max
  unsure (1)..(294): unsure at all n locations
  Clone ID: PAT_MRT3847_37497C.1
bgncgcgcgcncgggtacgtgagctcggaattcggctcgagnggagagngagagcgatagnnagacnnaganggatncttacatgcnnnccctaagantaaaaatnaaanancttgnnattccaattccacacacatnngnannagccngngnctccgangagcttgaganatgaatacnanggnagncgggagnnnagggtaggaggcattganaancgngtgaaagggatggatanaangaagnggngnnaacaagaaaaagnnnnntaagantannngagcagganananc

SEQ ID NO: 73624 - DNA, 624 bp, Glycine max
  Clone ID: PAT_MRT3847_37498C.1
tacggctgcgagaagacgacagaaggggagtctttaccaatcaacaaagcctctcttatctttttcaccaaaaatggcaacattcatgctgaagttggtgcttcctctacttttcctgttcatgattcctccgaaaacagcgtatgcggagtttgagcaatggtgtgtagctgatgagcagaccacggagtctgagttgcaggcagccttggattgggcttgtgggaaagggggtgcagattgtagcaaaattcaagtaaaccaaccttgctatttaccaaacacattgaaagaccatgcttcttatgccttcaacagctactatcagaagttcaagcacagtggaggttcttgctactccagaggagctgccataacaacagaagtggatcctagtcatggttcttgtcactatgatttcattccctgatgacaaccgtgaatgaagacttaaaataactgcagcaaaaactagagctcgtgcctttgtgtgtttgtgtcccaaattcccaatcaagcaatttttttggggcctttttcttgtattattgatagtgctgaaatcttacattgcacttgatctcggtcaaaggttggaaagtcataataaaatcttgtctagct

SEQ ID NO: 73625 - DNA, 224 bp, Glycine max
  Clone ID: PAT_MRT3847_37499C.1
gttattattcgggtcgctctgttagtgattttagtgcatcactttcattacatagggggggattgtccagcgaaatagcaatagaacccccccagacatttataattcgtggtgtaattctaaaacattttgcttggtacatatgaattgataaaagtaaaagtttgtgaaaaaaaaccgtattgttgggaagtacttcaagaagttatgcagggacatcccct

SEQ ID NO: 73626 - DNA, 253 bp, Glycine max
  unsure (1)..(253): unsure at all n locations
  Clone ID: PAT_MRT3847_3749C.1
aanttnaggttncagtttccaaagacnccagcagganannntaccnagntgngacactgatgncgctcctgncaatgtttgctgcacctcctagcaccaatgacaatgatgttaacatggcaanatgntcaattccaaggcaatgntgatgcccctgggnncganaatgggacccctgaggcaggagatgagcctgtgcaaatggntactgntaccaaggttgaggcnccaaagaaaaaagttaaganantaa

SEQ ID NO: 73627 - DNA, 429 bp, Glycine max
  Clone ID: PAT_MRT3847_374C.1
cccactcgtccggtttgagcaacatatttgttttaatataagcagcaatggtggggagaattaaaaatgtgtattcgaaggtctacgatgtgccaagacgtccgttcgagaaagagcggcttgaccaggagttgaaattgatcggcgagttcggcctgcgcaacaagcgtgaggtgtggcgtgtcaagctatcgttggccaaaattcggaagcgtgcccgtgagctgttgacgctggaggacaaggacccgaagcggttgtttgagggcaacgcgctgctgcgccgtttggtccgcatcggtgtgctggaggaggacacgatgaagctggattatgtgctcggcttgcgcgttgaggacttcatggagcgtcagctgccaacccaagtgttcaagctgggcttggccaagtccattcaccagggccgtg

SEQ ID NO: 73628 - DNA, 422 bp, Glycine max
  Clone ID: PAT_MRT3847_37500C.1
gcggcactttatttgtatatgactgctgattgctcgcgacaagtcggagctgatggtataatgacatcacaaacttgcaaacccggtactcagcgctgcaacgcaaccctacataagctcgggaaaaaatctgacatcgcgctcaacattcagggtgatgagccacttattgaacctgagataatacatggtgatgggaaaactttgcatgcagctactgatgcaatgttcaacactgcgaccacatctttaaagcctgcagatgcacatgcatccaatagagtgaaatgaaggagacataactcgggaggtgccattgaactttcaccaggcataatcccactcaacaagacatgaaaggtcaaacaacaggacccgcatgagcctcaacgagggattcagagctacgacgcaaaacacct

SEQ ID NO: 73629 - DNA, 319 bp, Glycine max
  Clone ID: PAT_MRT3847_37501C.1
ggaaaacattcccctgggaacatttcacatgaatctttgaaaactccaatttccgggttccggtttgaaaaaccatttgcaaaaatttcctcctcctaaatgccaagttgccaaacttctggggaaatttaggggggggggcctccaactttgtttggccgggtttagagtcttaaaatgtaggactggggttgctaaaatttgagagacaaagggttctgccacaaaaccacccaaaatttttccgggggcagttttgggcaaagaatcgggaatgaaaacctttttggggcctttgaaagaggcaagattttttttg

SEQ ID NO: 73630 - DNA, 537 bp, Glycine max
  unsure (1)..(537): unsure at all n locations
  Clone ID: PAT_MRT3847_37502C.1
tcgatctatcgctagccatgtaccagagtaccgtacaccgtgccggtgtaaatcggcgctggctgctgctgctagacggcagtcaaactagcataatagtaggcgttactagttggggtaacccaaggctactgtcggtgggtattcttttgtgaatgaccgttgcggagtagccaagcacagatgggctgatgcgagtaaagcagttgcatatatagcagcatggtaacttactgaagaaatggcacaaggttaatagggtgggcctgcagcggaggcactaccagcgtaaccagaagttgcggagcagggatagcaaaccgcgcttgcaggggttatacgcgccagggacggtgtggctacggacacgcggataataagagcagcggttgggaacgctgacaaataggggccaccagttgcaatgcaaaaagctgcgaaaactgggtaacgagcggtagggngatgccggggaggatgtggctggtagaacacacgatgtgagggtgtggatacgcactataagggggtaaaagg

SEQ ID NO: 73631 - DNA, 184 bp, Glycine max
  Clone ID: PAT_MRT3847_37503C.1
cgcagttccgggatttgccgaatcgacccacgcacccggggttttgactttttgtaccaggaaacatctgatattgcatagggagaagatgactttgaagcaggagtacaagatggcgactccatatctctcgctgctgagcgcctccttcattatgggggaaagtttctcaaagccaaggacc

SEQ ID NO: 73632 - DNA, 490 bp, Glycine max
  Clone ID: PAT_MRT3847_37504C.1
acagcatatgatgctactctattatgacactaccctcttgtgttcatacaaagtcttttaggcaaaacttaaccaccgaatgcaacttctactcccatcgtgtccaattcttctgaaagcataaaaacaccaatagagcttctgcattcaaataagaagccgctaggcacatgactcagagaaatttaacgccagcctatacggttgggaacgcacaaaaaaaaatgggattgattgccaatacaccaaaagtgcctgacaaggccaacatggacagagactgcatgttaattgctgattattgaactgcagataataatggattaagtggtgaacagagtattactgaaaatataaaggtctagctgattttcaacacaagtgtctaacacgccaacatatgataactggacaaaaattataattgtaagctcatgctctttattagaaagaacgaagatgaggctgaatgtacccaccgttgatatga

SEQ ID NO: 73633 - DNA, 997 bp, Glycine max
  unsure (1)..(997): unsure at all n locations
  Clone ID: PAT_MRT3847_37505C.1
cctcgagccgattcggctcgagcaaagatggctgctgctacagctactgcttcttcaatctcagcgtggttcactcctcacgctttcgctcgtcgcaaaacccggaaccctaaaattcagaaaccagtcctcccagtccccggcggcggcgaagccaccacctacactcgcctcccgctcaagcacgactattccgctccctcccctctctcctctcccgaaatcaagctctccgaaacagccccaccgatcacccgcctcctccgtaatcgtaaaccacaaaatataaaacaagacgacgtcgtgttcgaatattccgattccgaacctgaaagcgacggcgagtatgaagccttcgacttttcgggagacgagaatgtgggcgaaggcgaggaagagactccgagcgtgaaggagaagggggtgccggcggtgatgcggtgtttcgaccgggcgaagatatacgtgaagtcgggggacggtgggaacggcgtggtggcgttccggcgggagaagtacgtgccgatgggagggccttcggggggcgacggagggaggggaggcgacgtgtacgtggaggtcgacggggcgatgaattcgctgctgccgtttcggaacagcgtgcatttccgggcagggaggggaggccacgggcaggggagcatgcagagtggggcaaagggggaggatctggtgggtgaaggtgccacctggaacggttgttcgaatgagtggcgaggataacgtgctgttggagatggtgtatcgggacagaaagggttgctgttgccaggtggtagaggaggcagagggaatgcttcattcaagtcagggactaataaggtccccaagattgccgagaatggggaagagggtcctgaaatgtggttggagttagaactcaagctggttncggatgttggtatagttggtgctccgaatgcagggaaaagtacacttttgagtgttgttagtgctgcaaagccggctgttgcta

SEQ ID NO: 73634 - DNA, 293 bp, Glycine max
  Clone ID: PAT_MRT3847_37506C.1
aacacaaaaaaaatcatgggagggtttttgcaaaaaaaatccctataaagttcccaaaaactctttggattcctaatctttttccgggttttaaaaagcccccaaagggaccactggattgaaattgcttttaaggaaaggaaaaattctggaccaaaaaatacccttggtgctttaactgaacctactggtttgtttacccttgggtttttgggcttttgcccccattttttaaacaattctgttggccccagcccaccaaatacgggaaaagccgacctcctttggaaatt

SEQ ID NO: 73635 - DNA, 313 bp, Glycine max
  unsure (1)..(313): unsure at all n locations
  Clone ID: PAT_MRT3847_37507C.1
aattcattattgnccctacaatgtgattaaaaactntaattacacttttttnatttatnccatccattttttttatattaaaatctttacttcccatttttttttaataatatctaatattatcaatttttttatttacatgacccaagaaagactccttatgcttcattgangtgattgttcataangatgacaccaataaagaattgtttgaattggtctcaagggttttctgtttccaaaatcctatttttcaattcttaattatttttttaatttattttcttttcttaatttttttaattttttcttt

SEQ ID NO: 73636 - DNA, 381 bp, Glycine max
  Clone ID: PAT_MRT3847_37508C.1
aaataggagcggaccattaaattgaggtgtttggcttaaattgtgaaacatgcattgatcgaggtgaaatctggataatctctgcaaaaccacaccaaatgaattaccaaacaccatacctggagttacgaacctacattatgggccgacattctagaccaaagcaaagatgggaaggcccaccggaatacatccgacacaagcccatcccatgtaaataatgtaacagatccattcaacttactcgaacttggggccagcaccaacggatccagatggaggaacatattgatgcatgcgtacagtcctgtcgggagcacctgctccctggaacattttggctatgatcgaggcgctaatgccctaacgctggttgatctt

SEQ ID NO: 73637 - DNA, 398 bp, Glycine max
  Clone ID: PAT_MRT3847_37509C.1
ttgcggtctcgtgggagaaaagatggaagtgatctgaaatagaagcgttcctgctgatgttcttgcaaagcgagctcatgaatttgaaaaacatgctgctcatgaaagactcatggaccaaatccctgctggtgacaagttgacttctactaacgttaacaagtgagcaaaaattatgaaccttacacaaacagctggtggcgacattaaactggtcactgctgcgcagggatatgagggcaagcacagctgccgctctaacattcactgggatgcattatgacgccaatgatatacccctgagaggcacaggaggaaattctgtcttctagagcaagtgacttcataactgcgagggtgagcaaaaacagcatgcctcaaactactgcactgcatgt

SEQ ID NO: 73638 - DNA, 329 bp, Glycine max
  Clone ID: PAT_MRT3847_3750C.1
ggctcgaggtaaaattcaggtttctagagacctgcggccatgcattcaatgtaaatttttaaggggcaaggaatcgggggtgaaggcagtcctcacctggactacctagatcttcgtactggacaaattacacgcaccgggctggggctggcggcatcaagaacaaacatcttagacggttgccttgcgacaatagcagcatgtgacatatctgggacttgtaagaagatgcttaagacttgaaaatggacgccaatgccatcgaccatcaccatcttatcaggaacatgacggggaggctattgcattcaaagctagatctttggttg

SEQ ID NO: 73639 - DNA, 240 bp, Glycine max
  Clone ID: PAT_MRT3847_37510C.1
ggtcatgaacataagaaacatctatagtgaaggggagaataatcaaaatcaaaacagcatatgtttctcctctcttaaaataagacatacattctatatccaatttgctcctggacgagctgaatcagaagcccaaccatgccttataggggtaatgagggcttggcagaaaggtgatgacatattgggtctaggagttattgtggaagatgagacggctgtgtttccaatctatgaggt

SEQ ID NO: 73640 - DNA, 1060 bp, Glycine max
  Clone ID: PAT_MRT3847_37511C.1
cccacgcgtccgaaaatattgaaaagccgcgagggaggtttcgtttcgtttcgttcagttcacacattctattctctatcgattcctcttccctttttctcaatccactacaccacagttatgaggagccaacttgtgtgtaatgggtgtaggagcatcttggtttaccctagaggagcaaccaatgtttgctgtgcgttgtgcaacaccattacctctgttcctcctcctggaatggacatgtcacaactctattgtggaggctgtacgacattgctaatgtacacacgtggtgctacaagtgtgagatgttcctgctgtcacactattaaccttgtaccagaatctaatcaagtcattcattgtgcgaactgccggacaacactcatgtatccttatggagcttcctcagtcaaatgtgcaatttgttgctatattactaatatcagtatgaccaatggaaggctttcaattcctgtacagagaccaaatggaacagccaactctggaacagtatcttcaacttcatcgtcaatgccttattctcagagccaaactgtcgtagtagaaaatcctatgtctgttgattcgagtgggaaattggtgaggaatgtcgttgtgggcgttacaacagataagaaatgatacttgtcacatgataatgttacacaagtgtaaagggaacattatttgactcatcaactgctggtgcttgaaaatattgttcgtgtatatgaaattgcagcttataagttaaaaatatttttgttctaaacgacatttagactgatttaatttacatatatgaatacgaggacaagtggaaagggcacacaacttgtcatttattgaattgccaaggtcctctttttgctgcagttgtatcacagggtttttcgcatctcgaattacaagtcctagatgcacatttgattcctcttctttggtgacttgattttattatgcaagcatataacctgataaggtgcctagagtcaactggcgcagaaattcaaatgtgtacacgcactaaatcaaatatcaaaggattagttattgt

SEQ ID NO: 73641 - DNA, 285 bp, Glycine max
  Clone ID: PAT_MRT3847_37512C.1
aatttattgttactcggaaattttctaaacacccttgtacaccactagattcaaaaaaaaaataaacataacggtttatcttagcctttttaggatatttactaggcctcggattgagactaaagatcttattcaagactttactttttcttagacaacaaaacaaggttaatgtttcgaaacacaccaacattttcaatggtcacaccagcaagcaattttctaaacttcttatctttccataaattcaataacacatttctcgaaataccctcttttcttttt

SEQ ID NO: 73642 - DNA, 485 bp, Glycine max
  unsure (1)..(485): unsure at all n locations
  Clone ID: PAT_MRT3847_37513C.1
atagccgcgagcgaggtttcgtttcgttcagttcacacattctaatctctatcgattcctcttccattttctcaattcactacaccccagtttatgggaagccaacttgtgtgtaatgggtgtaggaacatcttggtttaccctagaggagcaaccaatgtttgctgtgcattgtgcaacaccgttacctctgttcctcctcctggaatggacatgtcacaactttattgtggaggctgtacgacattgctaatgtacacacgtggtgctacaagtgtgagatgttcctgctgtcacactattaaccttgtaccagtactaggtacctaccatatatttctctgttgccagatttgtgaagcttattagctcaatatttattttgctctactaaatgctgatttgcttgacaaactatntacatttataaactgtaactgtagtgatgttttggtggttttcttgatcatgaaatatgcttaatt

SEQ ID NO: 73643 - DNA, 638 bp, Glycine max
  Clone ID: PAT_MRT3847_37514C.1
gttcctgctgtcacactattaaccttgtaccagtactagaatctaatcaagtcattcattgtacgaactgccggacaacactcatgtatccttatggagcttcctcagtaaaatgtgcaatttgtcgctatattactaatgtcagtatgacgaatggaaggcttccaattcctgtacagagaccaaatggaacagccaactctggaacagtatcttctacttcatcggtatgcctttctccttttcttttggtgattctgttagagcaattgttgcattcttgttatgatacctgatacgtcattttattagctgcagtcaatgcctcattctcagagccaaactgtcgtagtagaaaatcccatgtctgttgattcgagtgggaaattggtgagcaatgttgttgtgggcgttacaacagagaagaaatgatacttgtcacattatcatgttatacaagtgtaaagagaacattatttgattcatcagctgctggtgctcaaagatattgttcgtatatgtgactttgcagcatagaagttaaaaatatttttgttctaaacgacatttagactgatttaatttacgtatatgaatacgaggacaagtggaaagggcacaaaacttgtcatttgtgc

SEQ ID NO: 73644 - DNA, 300 bp, Glycine max
  Clone ID: PAT_MRT3847_37515C.1
cgtcctccactcgtccaaaccgctccgagaaggagcatatgaggacctacggggtttattcactcactctatataaatgcctgaaccagatgtcggactaagactatctctatctaggatacgacaaacggcgccactccctcggctgggcaagagaacacacacatggcaaacctgccccaacacacctatccctaacgatagatggcgggaatgacggaaaatgaatgactctctcctcgacaactatgacactcacgagctccagagaggaacctactactggggttgtacaacaac

SEQ ID NO: 73645 - DNA, 403 bp, Glycine max
  unsure (1)..(403): unsure at all n locations
  Clone ID: PAT_MRT3847_37516C.1
ancnggggnantnnnggngtanngctngnggggnnngnngnnggncnccncccncgccgnttngacgccgncgntagangnggnnnnngtcnngngngtgnggnggtgtntgnggnnnntgtgagntctcggtgagtgtgtggntacgngagntggtggnnagngtngngangtagntgtgtgngtggnagtntgnggngngngtgtgnacgtggtnngcgngnngnggtgannnggnggnggngngtggngggnngtggngnttnnngngtgtgtngnnaggnatnctngtggggngccntgagtntnggggngntngnnagntgntgaggcgntggggngntgngtgngcccgncgtngnttgngtgntngnggagtngnngggnggggggcgnaggngcc

SEQ ID NO: 73646 - DNA, 541 bp, Glycine max
  Clone ID: PAT_MRT3847_37517C.1
actgagcatcgtctagctatctcgatcgaactgtccaaggtcctgtcacgtggtaattgaatctactagtctgagatgtggtaggttagcctgggctttaagtactaaattcgccaggatttgacgggtaaatgtcggagtcgtccgcagccgcctataccaaacataattgggcgcaaaacctagtgtattccacaaggtcacaacaaagagcacttaattagtcgcgccaccggtatttagccaggggggtataaatgcgccaaacaggtcaggtgatcgtgcccagatgctgccataccacaacgggccgccgttgtacacaccgagatgagagttacccgtaacgcgtgaggagaagcgggcagcggatgcgtttcgtgaatagataaaaagcggtttattgcctattcgcagtgggctacccgtgcgcaaaatagtttaaggcggtggcgctcgaataaccggcagcgtaacaatacgtaacgcaaactaaagtaccggatgggttataccaacaacaaggcgtcgatgagcacag

SEQ ID NO: 73647 - DNA, 330 bp, Glycine max
  Clone ID: PAT_MRT3847_37518C.1
cgggaatcccgggtcgacccacgcgtccgcctcttttgggctgacccctttgcacaaaggaaaagcagggtggcgctgcgccaaaaaaatatcgaacttggttgggtcaaagccgaaacatgattctcattttcccatttccacattttttgggttggggagggaagcacaatcctagaatcaagacatgggttgctccataagagagcgatgcgacttattttcggatttgccgctgccatctgctagagcggaagacccttatagattatacacttggactgctacatatggagacatctatccactgtgctgttaagacaacagggg

SEQ ID NO: 73648 - DNA, 251 bp, Glycine max
  Clone ID: PAT_MRT3847_37519C.1
gtacaacacgttcattgaaccttctccgcagtggtccaagaaagtttacagtgccagaggcggctcctactacacaggagacgccttcaaccatccaatgctaacatcaaggaagcatacgagccgttgaagtatggtctaccaaaaacgaccttgctcatcctcgaaactctgacagaggcaaagacaggtatgcgcatcaaggattcagagtggccggaatatgagaggatggatcagaagagaacggt

SEQ ID NO: 73649 - DNA, 285 bp, Glycine max
  Clone ID: PAT_MRT3847_3751C.1
ggaacacgcgaaggcccccggagaacaacaccgaggcagaaaacaagcaggaccccgagaggacaggcaagccacgcccaagagcacggggcacaacctagacaagaagccgactggtgccaaaaccgccccgccagagggaaaaccaaacaaacgcagagagattatcgtgcccccaaagccaaaaaccacgcgcagaagcccaacgccggcacccgcaagcaggacaacgaagccatacaaaagcagagcaacgaaaagaaaccccagctgatgcaagaagag

SEQ ID NO: 73650 - DNA, 258 bp, Glycine max
  Clone ID: PAT_MRT3847_37520C.1
cactatctatacacaaacaacatggttcgctacattgaaggctatgttcagaaggtgaaccgagggaatgcacctttagttgttgggcagctgctagatgatgaatgcgcagaagattttatcaaaggcttgatcctttctgttcgttcattactgccagtggagccccttgtggaggaatgtgagaagaggaatcgacttcgtatgctcacacagttcttggaacaccttgtaagtgaaggaagccaggatgtacat

SEQ ID NO: 73651 - DNA, 253 bp, Glycine max
  Clone ID: PAT_MRT3847_37521C.1
gttcatctcttgaggaagaagtcttgctttaccctgcatctacacttataaaggttgcgaatgcttacgcggtttcgttgttgattccaactgatgtagtcatagcatacaagtatgcttctgatgctaacactaaaactgtacccgcatcaatcaaaccaaactggaggatgggattacatatatgaaccgagtccaacaaaacattaggtgaaccatttgatatgtcccatacctgcattctaaatgtacc

SEQ ID NO: 73652 - DNA, 427 bp, Glycine max
  Clone ID: PAT_MRT3847_37522C.1
cgtagtgccgctcacagttgtttgccctagcacacaggatgagatgctcattagccgtagccatgaacaatcgctgcgccaggctaaggctccaagaatgtttttacactctttgaaaaactatgtctcttggggtgggtatggagacgatgacttaatcagagaccatgaatatgacaagccttactacaatggttctaaatggaaaaccctcttagctgggcataatgtcaccatgactgatggaatcgataaaactagcgcaactttgcaattgataaagttagcagattgcgatttgctcaagagaaattgtgcgcacacgcctaatgctgtgaggggggctcctgaggacacggcgagattatggtcacaacttcattatgtttcgtgtcatagatccgaaatgcaagaagctgatcttgtc

SEQ ID NO: 73653 - DNA, 308 bp, Glycine max
  Clone ID: PAT_MRT3847_37523C.1
agtaacatgggagctgctggatctgctgattacaacttacaaatggttcgagtttgaattagctgctcacgtctcattctaaatcaccccacgcgaatatgccagctgctggaactgctgcctataatcctccaatgaaacaggcatgaggtttatagatttatgaactgtcatttccctacattcgagcttacataatggcttattgtcgaagaaggatgaccagacgttcattctgaggactctttcctgtagcccaccgaatattcttttctcaacggctgaagtcacattctgtgctcgtagca

SEQ ID NO: 73654 - DNA, 726 bp, Glycine max
  unsure (1)..(726): unsure at all n locations
  Clone ID: PAT_MRT3847_37524C.1
ctctcactctttctccacctttcttgctttcttctccttcctccatttcctatcttcattcctaccaatgactgacatcactgatgatattgctgaggaaatctccttccagagcttcgatgatgactgcaggttgcttggtaatctcctcaatgacattctccagcgtgaagttggcaccaacttgcttgacaagatcgaaaggactcgagtccttgctcagagtggttgtaatatgaggcaggcgggtattgtaaacatggcagagatgcttgagaagcagttggcttcggagttatcaaagatgacactagaagaagctttcacccttgctcgtgccttcagccattatcttactttgatgggtatagctgagacccaccatagggttcgtaaaggagggaatatggcacaaattgcaaaatcttgcgatgatatatttaaccagctggtgcagggtggagtccccccagaagaactttatgacacagtctgcaagcaggaggttgaaattgttctcactgctcatcccaacagattaaccgtcgaaccttacagtttaaacacattagacatgctcatcttttggattacantgatcgacctgatcttagcactgaagatcgagaaatggtgattgaagatctggtgagagagataacttcaatatggcagacagatgagcttatgcgccagaaacccactccagttgatgaagctagagct

SEQ ID NO: 73655 - DNA, 425 bp, Glycine max
  Clone ID: PAT_MRT3847_37525C.1
gttctcaatccaaggtcaaagctatccatgtgccaagcgatttattgttctctattccattttgaagagacaccaataaaaaaaaagtgatggtttttttctcttcatgcaactcactcaaatttattttttctcttcattttctcttcgtgttattgataaggagttgtatgccttagtgagagcgttgaaaatatggctacactatctttatcccaaggagtttgggatccatagtgaccatgagtccctaaaatacttaaagggacaaggcaaactaaacaaaaggcatgccaaatgggtagaatttcttgagtaattcccttatgttattataaaaagggaaaaggaaatattgttgcggatgccttgtcaaggaggcactttttgctttctatgcttgaaacaaaaatgattggatttga

SEQ ID NO: 73656 - DNA, 481 bp, Glycine max
  Clone ID: PAT_MRT3847_37526C.1
atccaaagcaataggatttcgaataataaaaccatttcttctcctatgctagcaataacatatattgcacccatcgcactgggatgagaagggccacgttctttgcagtaatcagaggctcagagactaactcatccttctccattaattttattacttcactttcattggtgaactttctctaaggcaatttgtatgatcatccagatcctctttcaaagattgctcatcactgaaatatatatagcagagggagacaaactcaaaccaaccaaagactaaagaaaagaaaaaaaagagcttccacaatggtaagcgctgcaattgctcgtaacgtcgtcggcgtaataggcaatatcatttcctttggcttgttcttttcacctgctccaactttctatggaattgtaaagaagaagacggtggaggagttcaagccagatccttatatagcaacggtgttgaattgtgcgttttgggt

SEQ ID NO: 73657 - DNA, 367 bp, Glycine max
  Clone ID: PAT_MRT3847_37527C.1
aaaaacaacccccatgggtttcaactaaggaaagaaaaaagtttccaaacccaaattgcccgggggttgaaatgggtggggggacgggccattaacatttaacaatttgaaaataacccttcttttccaaactaaaacccctggaaaagggaatgtttgtgaacacccaacaaagtttttgggggggaaaaaggtccccacccacacaaattttgttttaaaaaaagaaaattttttttttaaaacggtaataacattgggggtgaaggccatttttaggggacccattaggaacagattattcccgggttttttttatttttttggggcccttggggcactaaaaaccacacggggggcaaaaacc

SEQ ID NO: 73658 - DNA, 438 bp, Glycine max
  Clone ID: PAT_MRT3847_37528C.1
cgcgttcataggttgccgcaccttaaaaccggaaacaaaagctaatcgaacttgattccaagaatctctcaattactatctactttaagggggacgagcccttaagggaaagaagatcactccctgcgctggccacagactacgcgaatcattcacttttccattcttagttcatttgctgaacactctcctatttgatataggactccgtgacagatgtaaactgattctgaccctttttcagaactctgtgtaatatcaagaacaagctggagaaaactgggattagtgctcccactctcctatgtggcataggacttcgggggtagactttgctatctctctactttctatcactctatccttctcactgcaacgcattgccgttgaaaagaggattattagagaaacacttgggcgttggtgcaaatgcatgct

SEQ ID NO: 73659 - DNA, 204 bp, Glycine max
  Clone ID: PAT_MRT3847_37529C.1
agatcttcttcatttactagaagccacggaggggtaaaagaaagacaccccactctttttgggggtctcacactggtgtatttttttcttggggaggggccctcgatttttccgtttttaggtgtggtgtcattctttttccctattgccttgtataaattacttattggtgttttttattgtggtggggtggttttattttta

SEQ ID NO: 73660 - DNA, 580 bp, Glycine max
  Clone ID: PAT_MRT3847_3752C.1
ctccccccccccctctccccttctcccccctttttctttttttttttttttctttttcttttttcttttttttttcttttttttttttttttttttttttttgtttttaagggcaactgctcacaatttttttttttaagaagaaaaaaaccttttaaacacattttattttaaataaaaaaccctgaaaaatatgccggaggggaagcttaaacccaaaacagttttccttttaaaaaaaaacaaacaaacttggccctaggcaaaatttggaacaagagggggttccccaaatttacaaaaagggagcttttttttggggaaaacaatggggggaaaagggcccagccggaacaagccaaattatgcaagggtaagaactaactgggccattaaattacaaaggcgcccccaaaatcccccgaacttttttccgggccgggggggaaacctttgggaagctctttttaaaggggtaaaccccgggggaaacttcctccatagaaaaaaagaaactgtttttaaagccactgggggccatgccaacagggaagggtttttttttcatggcctccacccc

SEQ ID NO: 73661 - DNA, 1275 bp, Glycine max
  Clone ID: PAT_MRT3847_37530C.1
gctaatccaattcatcattcatttaagccctcagactcgtcccgttcgctgggcgctgtgctgtggagcagagcctcagcccgttctgctctcctctccctgcgctgtgcttaatccagccctgccctccccaccttttttatggccaggccttccttgctttgcatgttaagttctctgccctgccctcgtcccactctgctctggtgtcatcttacttttcactcttctcctgtcgtgttcgatgatggcaacctcatcgccacccctgcaactcctggtgcaattcaagcgtacgcaggggtaactggttttattggtgactataaatatgacgtagttatcaacataacagaaggttgtgacatcgaccttggtgatcttgtatatgaacctccaagagatggtccaacattgtgggaaattggcatccctgatcgctcagctgctgagttctatgttcctgacccaaatcccaaatatatcaacaaactctatgttaatcaccctgacaagtttaggcaatatgggttatgggagagatatgcagaactataccctgacaaagacttgatctacacaattggtgttagtgactacaccaaagattggttctttgctcaagttaccagaaagaaagatgataacacatatcaaggaaccacatggcaaatcaagtttaagcttgatagcgtgaacaaaagcagtagctataaactgagagtggctttggcatcagcaacattatctgaacttcaggttcgagttaataatccaaaggcacctcgtcctctattttcaagtgggttgataggaagggataactcgatcgctaggcacggaattcatggactttattggctttacaatgtaggcatacctggaactcaactagttgaaggagataataccatctttttgacacagaccagaggaaatggtccatttcaggccatcatgtatgattatattcgtttggaagctccaccgtcgtctagcttcaacaagaaaaattgagaaatttaatttctgttttactaacaatattaatttaatcaaatccgacgaataaatattgggaataaagagtacgtagtggagcttatgaaataatgaaaatttcggtttctttgtagtttgtacttgtttgggtttatagactgggatcgttccactagaaaaatatgtacaagaccttcgtttaatatgaattataaagtattataatagttaaaaaaaaaaaaaaaaaactcgagactagttctctctctctct

SEQ ID NO: 73662 - DNA, 232 bp, Glycine max
  Clone ID: PAT_MRT3847_37531C.1
tctttataagaagggaaactaactttataaacagtaccacatgttacctacccgaacataatgatgagcacatgcactctggtccaaacatatgtattacacttacattatgcccacttattaaatgggcggaccaagcgggtttcccccgaggggaaagggcgaaagaaaaagatttatgtgccaacctttattaaacggggaagggcgtatcataacgagggagggactg

SEQ ID NO: 73663 - DNA, 107 bp, Glycine max
  Clone ID: PAT_MRT3847_37532C.1
ctcgagccgattttaacatttagtataacattcaatctttcagttttggagtaagcaaataaggtttatgtatgaaattctgctttgtattgattcatcaactcaaa

SEQ ID NO: 73664 - DNA, 359 bp, Glycine max
  Clone ID: PAT_MRT3847_37533C.1
gaagaagtagcttttcctttctctcttagtcttaaccgcttctcttcctatgttggaccatgctttttcttaacaagtatcacatgctgcatgcttgtccttatttaacggtttaattttactataagtaacgggcacttgttgttctaactactggcccctctcttttttctttgttctctgattcagctcttttctctttttgcacataataataatacgttcttccttttcataattcaggaattgatcaatccaaaaggagtgtgcttcatttggggcagtgatcgattgtcggtggggggtggaagggatttagataaaaatcaatgctttgaaattgactgatcatcatggac

SEQ ID NO: 73665 - DNA, 466 bp, Glycine max
  Clone ID: PAT_MRT3847_37534C.1
ggattgagacacctgctgcatttcttcggattgatactggacgaaataacagatgttccagaaataaaccagacatcctggtttatattcgagcatctagggctttaggaacatcagcgtagcctgttgacagtccagtcgaaagatgaggccatgagaaacctagacatcagtctaatcaccacctttccaggttgtcaagcctacttcgaaactaaatttattcatgtgctggatgatcaacaatggtcaatagatattgcttgcacactacacgtgcgcttctcctgccggtgccaagatcgtcagctttcacccaaaatagcacatggccaatagacaagcttgcttgtttgcgagattcgcattctatctgggcacgatcttttcaagccaggcctcctaagtggctctagtagacactgaggcgctaaggtgcctaaatacgaaggtttactccaaaatc

SEQ ID NO: 73666 - DNA, 1195 bp, Glycine max
  Clone ID: PAT_MRT3847_37535C.1
ccacgcgtccgcttgtaaaagtcaagatagataatcactcagctttatcatgacatcaatccaaatagttatggctatcacttagcttagaattcaatttactataaaaaattgaaataaacttagcaaagttctaattctaattcacacagcttcatatcactaacaagcttaaaactaaagggggtattgtttggtgacagggtttacttgtttctttccaactgggggctatcctcccatactaattcaatcacacaattgagatccagtttaacaataatagacaaaaaaaaaaccagcttgacgcaaacctacctttgtaattgtacatgaacttctcagcagccatgaaaagagacggtggctgaggtttcctccggcgcctgttatgcccgtcaagccgtttcctacaactcctcttaacctcatcaaactccccaagtgaatgaaacctacacaacaacaacaattggcaccaccccatgtcacaaaacacatctaactagcgaaacaactgactgtcacaaagtctcatacaaaaacttttaacacccacatactccccaagcgaaccatacctgctgcattgctggcagaacctctgttgtttcccccccaccatcacaaccggggttttggagtgcttttcgcagaccctatggcgcctatgatactctctgcaatcactgagatcagaattgcatccatcaacagaacaacacatgttctgtaatccattctgaaggcgggatcttttcgacgacccggatggcgatgacacggtttttgagtcttttgtgtccttagcaacaacatctggggctgttttttcctcaccaagcctcaaatccactgaagctgcttcactcttctggccttcaccattagccagctccaacccacgtggatcccaagcaaactctttcccatcccaatccataaccaaccaacaaaactatggtttgctttatgtcccttttaagatgccaaagccaaacctaaacctaacacacatagttatgtactaatcttgaatctcttaaattctgatagctgcggataaagcctccaagaaaatgggcatagaaggtgcaagccccattttgatgtttctctctgagaggagaaagaacttgttcgagtaaaaaagtaggtcaccaactaaaattcacggacgcgtgggtcgaccggg

SEQ ID NO: 73667 - DNA, 398 bp, Glycine max
  Clone ID: PAT_MRT3847_37536C.1
cccacgcgtccgcccacgcgtccgaatttgtctaggttcgtgttttgtccttgttttgttatttgcgtttttgtttacatcttgtttcgttcttgtttgcgtcttgtgttctgttatttgcgttcttgttcttgtttcttgtgtctttcacactttgtgtaaaaaaaaaaaaggttgcagaaattttgaaaaaaaaaaaaaaaaaaaaaaaaaaaaaaaaaaaaaaaaaaaaaaaaaaaaaaaaaaagggcgggcggtctaatttatacaatctaacctacccttcccttccacgcaataactttttttttttgtaacctaaattaaattcaatggactgggctttacaacacaacgactggaaaaacaaaacccttacccaacttaatttaattgca

SEQ ID NO: 73668 - DNA, 711 bp, Glycine max
  unsure (1)..(711): unsure at all n locations
  Clone ID: PAT_MRT3847_37537C.1
ccccccccaccaacacanccggggtttggagtgcttttcgcagaccctatggcgcctgtgataatctctgcaatcacttaggtcagaattgcatccatcaacagaacaacacatgttctgtgatccattctgaaggcgggatcttttcgacgaaccagatggcgatgacacggttttcgattcttttgtgtctttagcaacaatctggggctattttttccccaccaagcctcaaatccactgaagctgcttcactcttctggccttcaccattggccagcagctccaacccacgtggatcccaagcaaactctttcccatcccaatccataaccaacagttgctccccacaaaactattttttgctttatgtcccttttatgatgccaaaccaaacctaaacttgtgtaaggcactcacaaaggaatcagaacttgaatttgaatccccttggtgtttgttttcaccacaaagctgaagaagactttgacttgttgggaaccaaaaaacaggataaaggggagatcaatcaattcaacacacaagagggatattagaattgggttctgagaggaagccaaaataataaatgcatcaatttttaaagaagattgcatcaaaattgaaagaaaataaataaaaaagaaatggatattggaagatatcctgaaagattatagacatgaacgtcacctctcgagccacgcgtgg

SEQ ID NO: 73669 - DNA, 1707 bp, Glycine max
  Clone ID: PAT_MRT3847_37538C.1
gtagaaaagatattgttccataagaaaaagtaaacaaaatatccgtggcaagagacagaaagaaggacactgttcacggttagggtttgagtctcaaccactctttctttaaagcacagtctcgcattcctccttgcctctttgttctctctttttctctctccttctttctttgtttctgtgtgttcgagattgaagaagatgatgcaggctggacccggcggcatggcccaacaagcgaaccaacaatacgcacagcaacagcaacaaccctacatgatgatgccgccgcagcctcagccccctcagatgtgggccacatcggcccagcctccgtcccagtcggtggctcctccgcaacccaccagcgccgatgaggtccgtaccctctggatcggtgatttgcagtactggatggacgaaaattatctctacacctgtttggcacacaccggcgaggtggcttcagttaaagtcattcggaacaaacaaactagtcaatcggagggatatgggtttattgagtttactagtcgtgctggtgctgagagagtccttcaaacatacaatggcaccattatgccaaatggcgggcagaacttcagattgaactgggcaactcttagtgcaggtgagaggcgtcacgatgatagcccagatcacaccatatttgttggagacctggctgccgatgttacggattatcttcttcaagagacatttcgggcacgatatccctcaattaagggggccaaagttgtaattgataggctaactggacggacaaagggttatggttttgttaggtttggagatgagagtgaacaggttagagctatgactgaaatgcaaggggttctttgttcaacaaggcccatgcgaattggaccagcctctaataaaaaccctagcactcagtctcagccaaaagcatcatatcagaatcctcaaggggcacagaacgagcatgatccaaataatacaactatttttgtcggcaatttggatcctaacgtcacggatgaccatttgagacaagtttttgggcattatggagagttagttcatgtgaagattccagctggcaagcgatgtggatttgtccaatttgcggaccggagctgtgcggaagaggcactgcgggttttgaatggcacacttctaggcggacaaaatgttaggctttcatgggggcgaagtccttcaaacaaacaggctcaaccagatgcaaaccagtggaatggtagtggtggtggatactacggatatgctcaggggggctatgaaaattatggttatgcccctgctggacaggaccccaatatgtatggcagttatcctgggtatgcgaattaccaacctccccagcaacagcagcaaataggatatagctaagaagttgggcaccaattttttccgttttcttctgtaatgctatgctattgctaagatactcgttttggttgcttctcttttattgtatcgtggagaacaaacttggctgaatacattctatgcgaataggatatagctaagaagtttcttatgacattctatgcgaattttattttgtatccattaaatattgcttgctgaattctatttggtgaaagcgatcacatttgattgttatgtgtaattcgcagtaccctcgagccggtggcatattgtgtagtgtataatgagttatgtatgcaatattgtcgc

SEQ ID NO: 73670 - DNA, 1824 bp, Glycine max
  Clone ID: PAT_MRT3847_37539C.1
ggcaagagacagaaagaaggacacggttcgaggttagggtttgagtctcaaccactctttctttaaagcacagtctcacatacctcattgcctttgctttgttctctctctctctctctctctcttttctctgtgtgtgtgcgtggattggtgaatttgagattgaagaagatgatgcaggctggacccggcggcatggcccaacaagcgaaccagcaatacgcacagcaacagcaacaacaacaacaacaagcctacatgatgatgccgccgcagcctcagccccctcagatgtgggccccatcggcccagcctccgtcccaatcggtagctcctccgcaacccaccagcgccgatgaggtccgtaccctctggatcggcgatttgcagtactggatggacgaaaattatctctatacctgtttcgcacacaccggcgagctggcttcagttaaagtcattaggaacaaacaaactagtcaatcggagggatatgggtttattgagtttactagtcgagctggtgccgagagagtccttcaaacatacaatggcaccattatgccgaatggcgggcagaacttcagattgaactgggcaacttttagtgcaggtgagaggcgtcatgatgacagcccggatcacaccatatttgttggagacctggctgcagatgttacggattatcttctgcaagagacatttcgggcacgatatccttcagctaagggggccaaagttgtaattgataggttaactggacggacaaagggctatggttttgttaggtttggagatgagagtgaacaggttagggctatgagtgaaatgcaaggggttctttgttcaacaaggcccatgcgaattggaccagcctctaataaaaaccctagcactcagtctcagccaaaagcatcatatcagaatcctcaaggggcacagaacgagcatgatccaaataataccactatttttgttgggaatttggatcctaacgtcacggatgatcatctgagacaagtttttgggcagtatggggagttagttcatgtgaagattccagctggcaagagatgtggatttgtccaatttgcggacaggagctgtgcagaagaggcactgcgggttttgaatggcacacttttaggcggacaaaatgttcggctttcatggggccgaagtccttcaaacaaacacggttactaaatttgctgaattgtcgtaattctgatctggcaatgtgttaactgattttaataaaccaatttggatttgtcggaagattttcaggctcaaccagatgcaaaccagtggaatggtagtggtggtggtggatactatggatatgcgcaggggggctatgaaaattacggttatgcccctgctggacaggatcccacatatgtatggcagttatcctggctatgcaaattaccaacccccccagcaaccgcagcaaataggatatagctaagaagttgggccccaatttttccgatttcttctgtaatcctatgctatgctatgctcgttttggttgcttctcttttattgtctcgtggagaacaaacctgcctcatcttttctagtttcttatgattactaatagcatttaccttttatgcgaattttatttgtttgctgaatactatttggtgaacgttatcacatttgattgttatgtataatttgcagtgccctcgaccttgagggggtgtcatagtgttgtctagtgtataatgcgttatgcatgcaatattgtgacgagatgcagagagactgtaatcgagcttttaaataatgtataaactattacaagtcaaa

SEQ ID NO: 73671 - DNA, 379 bp, Glycine max
  Clone ID: PAT_MRT3847_3753C.1
acttcaacaattcttaagcattgaaaccattcttgtggaaacaaaaaacaacccatgaattttattttcacaaacaaaatttagtttcaaattgcctaatataacttaatatttggggggtgttaccacacccctcggttaaaacctaatgggtcaaaagcaagaaattttaatttttgcaattttcttaaaagggaaaaaacctttaacttcttttggaagatttggcttacctttttgaacaagccttgggattccaaacatttttttgattggtttttttaaacaaggtttggtgttattcctaaaatccttaataaacctcttaatgggggccctttaattgtgccaaaaaggaggttttttatttttttttttt

SEQ ID NO: 73672 - DNA, 182 bp, Glycine max
  Clone ID: PAT_MRT3847_37540C.1
gggaattttgatacggttctgaactatttcctctaagggccgcatcggctacagatcggcagcactagtgcgagtactctcaggctatcgtcgatgatcaaacagaccacaaatagcacttgctcagcgacgacgcttatgaagaagaccgcgatggcgatggccatagctcctttgtcact

SEQ ID NO: 73673 - DNA, 120 bp, Glycine max
  Clone ID: PAT_MRT3847_37541C.1
gtgacaaaacccatatatcctctcaccaaattaacctcaatttattgcatcgggagaagccatgtcaatgaagtttcctgctttccttaccctcaccgcagtggcttttcatcgccacat

SEQ ID NO: 73674 - DNA, 456 bp, Glycine max
  Clone ID: PAT_MRT3847_37542C.1
gtcttaattggggtcacccctagcccgccttagttgcaacctccttaggggttgccttagttgcaacctcaagcgtggtggtttagttccaccgcaactagagatatgaactaaatagaacttataaagctggggtagtcctcaccttataagtcagttttatagtgttaagttaggtcttaagtcctaattctatgatggtattagagtaagagtctatcttagattcattatcggaccacctgtatttgctacgctccaagctggtagtgttgggtgaggagtgttacaaagccgccttaattgcggtcacccttagcttgccttgttgtggttctttggggttgccttaattgcaacctcaagggtggcggtttagtctcacatcaactagagatatgacttaaatagagcttatattcggtagtccttacttagttactttacaagctggtt

SEQ ID NO: 73675 - DNA, 377 bp, Glycine max
  Clone ID: PAT_MRT3847_37543C.1
ctacatattatatattttctgaaaagaaacgcaatataaataacaatattaatatgggggaaacatcgaactcaaggggcacctataaataaacaacacggggaagaaaatagaaagaaaaaaaaatgaaactctatccaagggaaaccacctgaataaaacataacgcatcgatacatttatctaagtaaaaaaaacctcctaaatctaagacgaacgaagaagcattgcatcgccgataattccacttatgaaactggggcgggtcctggaccttaatccttatgaacactccttcgaagggaacaacgaaagcgaactccacaccatctaacccttggttcgtggatgcgaaaaccaacctcggaatggaccca

SEQ ID NO: 73676 - DNA, 279 bp, Glycine max
  unsure (1)..(279): unsure at all n locations
  Clone ID: PAT_MRT3847_37544C.1
acgaggcagaattgaaactactgaagcttaaaggagatcttcacatcaaacatcttgagaaagtgaaaagtgtaatggatgctancaaanccagcatgtcaagtaaccaactgaacaacttgtggttaccataaagagtgtaaattacaagaaaatattcaggagattcttgaagtgcttcaacttaatacccaacaacttcagcatttaagcattataagatataataatattcatttcccacaataaatatcttctagtccttctctcaaatattta

SEQ ID NO: 73677 - DNA, 1171 bp, Glycine max
  unsure (1)..(1171): unsure at all n locations
  Clone ID: PAT_MRT3847_37545C.1
ggaattaggctcgaggctttattatggttgctgtcatgctcttttgttggtattactgtctaatttactaattttacatgatggtagtgtttgaataatttgaataatgctatcaaagcttataaacaatatgatgacttgttaatttaatggaaaaggatcaatggaagaatattcatgtttgttcttggcagcaatatcatgagatttccaatctatacactactatttagtgtacgatgcatattagatgtggatagaaaatactgngtttgaaacatgacattcagtgttttttgttctcagactgtgcaatctttatcatttttcttttcctgaactttgccgaaccgagacgtcggtcaaggtcttcgtggtctctgcatgattccttttttactggttcgtttattcaattcacattagaagagcgagccattgacttgaatcgcgccggtaacaacacacaatttggtagttgaatctagtttattttgttacacgaaaatttctgtggggtttctctgttacaatggaggagctgaaatctgctatggaggagcacatggaccttatggctgatcttgttcagaagctctcttcggatcttcgtgctggcttccgccctgcttacgataactttattggttttttctatgccattgactggaaggaaccttggctaatggcattactaggattccatgttgtgttgctgcttgtaactatcatctctaggaagaagactaactttcaaatgttcttgttccttttgacattggctggtgtatatcttgctgagaggctgaacagatttttgggaaaaaactggaaaagtttctctagtcagaactactttgatccgagtggactatttatgtcagttctttggtctggacctcttcttgtcatttctatgataatcttgatcaatacactcttctccttatgttacttgattgttaggtggaaaagagctgaactgagacatcgtgcaagggctgctcgcaataagcaggactagttgttttgtgatgggaatgtgggattttgatggattaaactctgaaggagttcatatcaatggcaatgtaatcatatggttttacaaatgaattttgtcttctttttttaaaaaaaaaaatcatattctgtacataacaataaaaaa

SEQ ID NO: 73678 - DNA, 416 bp, Glycine max
  Clone ID: PAT_MRT3847_37546C.1
cgcttatagataggtaattccatacgtaaggtattgcatatgagagtgttatcattactatctaagattctgaagtatctaactgaaaataagtacactgacataataataaatgagaagtcattcactagctatcctgtaagcttgaatttgaatgctaataatctctagtcccgagcatctctgtgtgtattgctttgaatcctgacgcggatgatgctaaactctctgctagctttagctaatagtagctaactgcttctgccatcctcaatgtttctctctccaccttttcatcctttactacctaagctagattggttgcttcaaaattgtgcatgcaggtttgttccacgtggcgagaggtgtcgcggtcggatctgctgtggcagcggctcacgagacgcatctggaga

SEQ ID NO: 73679 - DNA, 193 bp, Glycine max
  unsure (1)..(193): unsure at all n locations
  Clone ID: PAT_MRT3847_37547C.1
ctgtctctgtgtttgcggctgaggattccgaacganagacttcntcgttctcgcaaagtttaagtcatcatgggtangaaagatcaataacatgcgcatggcatgngcttggagcactacatgtattgtcncantgagntncacntntnaagtgagagagtctagtacanagctcanagctgtntgcancagt

SEQ ID NO: 73680 - DNA, 465 bp, Glycine max
  Clone ID: PAT_MRT3847_37548C.1
cgttctcttttttttttttttttttttttttttttttttttttttttttttttttttttttttttttggggaaaaaaaaccccccccccaaaaatattaaaattttcccccggggaggggaccttccctttggcgaaggatgtcaaaaaagatttctaaaaccaaaaaggaggatgtcttttttttaaaaaggaaattgagaaaggccccggggggccgcggtttgtagtgttgatcttttggggaaacatccctggtagtccacaaggggaaaaggaggaagaaaacaccccaagggggttcaaattccccccttggacccaaacgtgcttacttaaaattgagggcccccccccctggttttggccctcttttccaaacccccccaaaaaattgtgtttaaaaaaggaaaaaacaaaaaaccccaatttcgggaaatggataaaaagaaccctccccccccgg

SEQ ID NO: 73681 - DNA, 512 bp, Glycine max
  Clone ID: PAT_MRT3847_37549C.1
ggctcgagaaaattctctctaagatggtttgatctagaatacatctttgttgttttgaatctgtgtcaatcaactttcttttttgcagattaaactacaaaaagtacatcttatgctggttttgatcttgatatgttctgttccgatccggcttctctaaattgattagcaaatcactttagaggataaagtaagtaattttagtgtttgatgagaaaatcaactgtcagtgttatgtacacttgcataacaaatcatgaatgtattggaatattaacggttgattttctcattaacgactgaggttacttactttacagaagccaaatctattttgctcatatgggcatatagctacgttaattgagtctatcttgttttcaaattaaacgtgagaatcaattcagttgacccttttctttaatctggtttattgttatcaactactcaaattgatcaagatagattatcctctaatggccctaatcttgttctcaatgacagccagcata

SEQ ID NO: 73682 - DNA, 381 bp, Glycine max
  Clone ID: PAT_MRT3847_3754C.1
gaaacaaaaggaaccgtttttccccataagcgggccactaaaaaaaggggggggctccccccccttttttttatatggaacaaaacaccccgaacaaaaatagcctcccccatttaatttccccataggaagttttggcccacaaaacaggtttccccctaattaaaccatgggggtcccaaaatttttttcgggccccaaaagccttgggggtttgatgaccaaggcaaaatttgcggctttctttccctaagggtggcccccctgaccaagggtttgaatggttgccccccaaaacccgaaagaccctttggtccattccccatacccaaattgcccttgggggggcccatctgtgttttcaaaaaacccccccccctt

SEQ ID NO: 73683 - DNA, 410 bp, Glycine max
  Clone ID: PAT_MRT3847_37550C.1
attcgcctcgagcgaactcttggtgttcctgaaaatgccagtcaggacgagataaagaaggcatttcactcgatgcgtactcgtggttcagaagacatagaatatgatcgtgatgatgcagaaaggtttagaaatgcttatcgttctcatttttctgattcatttcataaagtattctatgagatatttgaagaagcaacaactcaattctcatcaaatatagaggtggagatgtctcttactttctccgaagcagcgagaggatgcaccaaacatgtgtcatttgatgcattagttccttgcgatcattgcaatgggcagggctattcacttgttgctcatgccaaaagttcgtccaacatgcaggggcttgggtcgaagtacaatcctcccatttacgttaacatgca

SEQ ID NO: 73684 - DNA, 385 bp, Glycine max
  Clone ID: PAT_MRT3847_37551C.1
tggcttggaacctttgggctgatttatgtgcttgcatggtcgtgagaagatgatagaaggggaatctaagccctacgaacgaccgacacgcggaagagcgcaccggcgccggcgcctccgcgctccagctccagcaacggcgacgactaagagaagaagaaatttcgcccgcgggagcggaagagatcgagcagtgtccatctcgttcactgggtatcccccttcctaagcaccggctccgatacgtccaagaattccgctatctatatacacgtttgccctcccttcttaaacacagaccccagaagagaggaagaagggtaagctaaaaagaacggagtcggggaaaaggccagagaagtccccgtgaaaagttcaagaaaca

SEQ ID NO: 73685 - DNA, 270 bp, Glycine max
  Clone ID: PAT_MRT3847_37552C.1
ggccccaacgcctattaccgatgcatttattccacatccacctgaactgatcgggggtaattcaactctttcgatcataaacatctaatggatactacaaaacaacgtaactgatcctatgcttttaaagtcctacagagtttgtgaaacaaacaacacgggtgtgcaccgcaaactatgcgtacagacttgtgctccctgacattctgatactggcaccatttttccccataaactacaattggaatccactgtgatgcagtgttcgct

SEQ ID NO: 73686 - DNA, 432 bp, Glycine max
  Clone ID: PAT_MRT3847_37553C.1
tctcaacatggccttgagccgctgtttactatccttatcccaaagggtgaaagcaccatcaacaatgagggttcaatatttgcttactcagtctgctatgactggagtaaaggggcagaaaattctaatcctgcaacagcaaagacctacattttcctgcacttgcctcaggaatctgaggtcaggggcaaaccacgcattggtgctactgggagaaagtagagatgatcctgctctgggaaactgttctattatgtatatagttggctagtacttgtataaaggtataagttgatatcaaaatatagaggttgaatgggctggtcgttcttgaaagatttttgttttttgtacgctgtacttgaaagaaattatcaactgattcttggtgaaaaattctatgtccaatgtatatatgtatataaagcatat

SEQ ID NO: 73687 - DNA, 752 bp, Glycine max
  unsure (1)..(752): unsure at all n locations
  Clone ID: PAT_MRT3847_37554C.1
cacgcaacgtaacccacgcgtccgactcaaaattccaaaccagttcaatccttttcagtcatctctttggtcacgttttcacagtaacataacatattctgtggaaatatggcaaaacttggagactgtgcagctcatttttttattgcagcaatggttttgagcacgttttacgtgaccaaaactgtggcacaatcagaaattgcacccacatcgcaaatggagactggtgcagggtttgctttgtctgtttctggggtgaccttatgttcttctgtgttggtttctattgtggcatttatgatgcagtgaattgcaaggcatattggctcctattcatgtttgattggtcttatcatgtacgtgttgaaattatattttatgatgaatttaaagggttgtttttgtttctttactatgcttgcttcttgaacacggtcctgtcgtttttggcattgtaacctagtactagctttatgatgagttacatgtttgtaattttcgccaagtacttaactggtgcatgtgaatagatatgttgtaattatatattttgattccattatctatcaaaataaataaagattttttctttgtttttattaaattattgaatatatggattgacttctacattgttgtgctgcttcgaagaatagtccattgtaactaaatttagttaattagttaactttgaaacggtagttcatggtaaaaattaaattatcatggcgcctatcaggattancgat

SEQ ID NO: 73688 - DNA, 436 bp, Glycine max
  Clone ID: PAT_MRT3847_37555C.1
aaaaaaaaaaaaaaagtttttaaaaaattggacaaaaagggccccaaggaataacatggggtacaaacagggacaaaccaaccaatgttcccccggggaaacccccaaaaaaccaaaacccggaagaaaccatacccaaaaataaccaaaccttgacaaaacgggccccgaagggttgtgggggaatggacgaagaaaaacggatagaacccttttgctttcgacaaaaaactcccaaggaccccaaggggacccagggaataacaaggacatatcagaacaaccaatttggcccaaggcacaagaagggcccaaggttccacaaggggccaaaaacctggaaaaaatttcacagcgaggccccccggggttcaatgaaaagtccccaaaaataagccccctttttgggaaccggttggcaactggtgctaccctg

SEQ ID NO: 73689 - DNA, 353 bp, Glycine max
  unsure (1)..(353): unsure at all n locations
  Clone ID: PAT_MRT3847_37556C.1
tccgggttggaccacaggcttccgcccacgcttccgattcaatagacatggccaccttcacttttgaagccgtggttattccctaattaactggcctaaaggcaggcgcaggcaaagtgagtgccgcagttaaagcttaagttccccaagccacaaggtggggcttaaaggcttcgctaaaagacgttgaagtcgctgttggggccactgccgcaagtgcagtgctggctagcaacgccatggccattgaagggttgctggggggggataacgggtctttggctttcgttcccaacattntttccggggcctttggggagaaaatcgggtccaagaccaccccaggtttcccc

SEQ ID NO: 73690 - DNA, 313 bp, Glycine max
  unsure (1)..(313): unsure at all n locations
  Clone ID: PAT_MRT3847_37557C.1
accacaccaacccaatcttcactgtcatattaacaataaataatggtttacaagaaaatcacatacccttatgaaggaaaaaatcaaaaagaaaaaaatacatttttttactggccctttgnaaanaagaaaagaaaaataaagggggggggggggggggaaacaaccgctcttttaacacttannnatcattttttttttttggcccngngggcctcgccccaaaagttgtnccacantttttttttccccnnntttttttttgatgggtgggtcggtncaattttanattgcaataccttttttttttatt

SEQ ID NO: 73691 - DNA, 163 bp, Glycine max
  Clone ID: PAT_MRT3847_37558C.1
cccacgcgtacgccataacaatggtctatggcgcgatagtcagctttggttctagatccttgtcattggtaggattgagcaagatactctgtgccgtgcactgtgacaacagcttcatgaatcatcatccataggaatataccaggttgtatcaatatccatc

SEQ ID NO: 73692 - DNA, 785 bp, Glycine max
  Clone ID: PAT_MRT3847_37559C.1
gccacctcatctccctccgcctcgccaactgctcctcctacctgaccctcgtcttcactgccctcatgtcgctctccaccctccgatccctctacctcctcgtgtgccccgtcacagtcatccgcctcccggagggatccggtgagattggcgcttcagatggcgagggtttggagcttcgtcatgcgggcgaggatgacgaaggggccggaggctttgacgttgacgtcagagacggtgaggtcggtgaggttctggaggttggagagccagacgccggagagttggcggaggctgttgacgcaggtgaaggaggtgagggagagggcgaggtcggcggggaggcggatgggggtgacggggcagttgaggagggagagggagcggagggtggagagggacttgagggcagtgaaggagagggagaggtaggaggagcagttggcgaggcggagggagatgaggtggcggaagggcttggcggcgtcgcagagggtggcattgtggaaggagggcttggcgcaggggtcctttgaggtggggaagttgagggattcaagggctgttgcttgttttgggtccaaagtggatgaggatgatgtggaaggaggagatggagatggagatggagatggagatggagtatgagggagggagagagatttgacaatggtgggtgaaagaaggagcagaatcacaacaaatgctaatgatctcattctcatgcctcacatcagagtctttcacatacaaccttggctctgcttcttacagcggacgcgtgg

SEQ ID NO: 73693 - DNA, 211 bp, Glycine max
  Clone ID: PAT_MRT3847_3755C.1
ttaatgctgggtttaaatatacatcccttttttcatgcatattccatgctttatatattatcatgtcttgtacttcattaataaattcacttctttcatcataatatgtcttcactatcaaatcatgcctttttatgaacattataactttcatactatatacttcatttattctttatagaacttatacatatcccataaaaatttttta

SEQ ID NO: 73694 - DNA, 249 bp, Glycine max
  unsure (1)..(249): unsure at all n locations
  Clone ID: PAT_MRT3847_37560C.1
cacacactctgatgttttggatttggcttaagtgactgtgttctgtttcttcaattgcacaaattggtggaccttaaattccatcacntgaagattagttgatagtataggaatagaagctgcatcatgacgagcataaatcgaacgctctttggtgactggtgatctcatctctttctactcggttgttcaggagagtgtgtctctctgagactacggaaccgttttcagtccaatttcatctattac

SEQ ID NO: 73695 - DNA, 330 bp, Glycine max
  Clone ID: PAT_MRT3847_37561C.1
tgctgaagcggagaaaaactctaacgctgcagttcatcaactgggcatagatagcggtgctactctgatcatacacatcctgactagtcacgaagggctaactcaagacactcatgcacgccatatacgcacatacagactttatctgatgttggcagcccagcacgtggaagctgaccctgcattgagtggcaaacatttttatctacggacggcatcacaagatggatatgtacgactttgagctgcctttgtactcagcatgatcccaagcgatcattgaccatcagaggcatcgaccgtattgatcactacgccaactacttccag

SEQ ID NO: 73696 - DNA, 1058 bp, Glycine max
  Clone ID: PAT_MRT3847_37562C.1
aaaagaaattaatagctaatgcttcataaatacaagggaaattcttgtacatcattatcctttatatcaaacccgataaaaaatataggaaaattgtaacgtgcaaatataagaatcctaaaaaaatagaaaactctaaattattcggagcaccctgaatctaatactacaaacccagtccaattttgatgactgcaatcattgataacatttttcgaaatcagaaaccagttatgcttcacgtcgtgggccatcacaaccattagaacataatgttaaccaccaagcctgaatcccaatccttgtttacttaaattccctccaagacaagctgggcatgaaaagaactcgcaaatcaacccaaatttacaccgccacctgaaaactccacctcctgagcaggtgccaaggatgagacccagtctgatgtgtgtgtaggaagaagccccaatgcattgagcttccaaacacctagtgccaagccgcccaaattaagggcaatgaataacaacttaggtccaagaagctccaccttattgtctttgtagggctcaaacatctttcccacgctctgtagggcactgatgggttgccaaagggctgagaaagtgattccaatgctaaacaagtggactgtgctaccagccatccacatcatgaaccccatcatcagcaaattcttcataggtgcttgtgctacctcccaagctttctgggctttccagttggattcagcgtccttcttctggcgacttagcgttgaatcgtcctgatcgagagaagcgcgagagaaaccgggaggatcgggaatgtcgcgagaagtggaattgtcggagaagtcaacgccccatcttcttcctcccgatcccatcactccctttcccttctccattgatgcttgcgaaacggcgtcgttaaggagcaggggttctctctggatcgtgttcagttcagacttcagagggtaacgctaacgcatatatgaggtttcaaaatttgtttttgcaaaacgacgtggttttacacattacacacaaaagaaagagggaaattggtca

SEQ ID NO: 73697 - DNA, 1073 bp, Glycine max
  Clone ID: PAT_MRT3847_37563C.1
tcctctagagcggccgcttttttttttttttttttttttttttttttggaagaaatcattagctaatgcttcataaatatacaagaaattcttgtacatcatttttctttatatcaaacctgataaaagagatataggaaattataacgtgcaaatattagaatccaaaatataaatagaaaaatcttaattattcggagcatcttcaaactaatactacaaacccagtccaattttaatgactacaacattttttgaaatcggaaaccagtcatgcttcacgtgggccatcataaccattagaatataatgttgaccaccaaccttgaatccttgtccttgtttacttaaattccctccaagacaagctgggaatgaaaaaactcgcaaatcaccccaaattaacacccccacctgaaaactccacctcctgagcaggtgccaaggatgagacccagtctgatgtgtgtgtaggaagaagccccaatgcattgagcttccaaacacctagtgccaggccgcccaaattaagggctatgaataacaacttaggtccaagaagctccaccttattgtctttgtagggctcaaacatctttccgacactctgtagggcactgatgggttgccaaagggctgagaaagtgatcccaatgctgaacaagtggactgtgctaccagccatccacatcatgaaccccatcattagcaaattcttcataggggcttgtgctacctcccaagctttctgggctttccagttggattcagcgtccttcttctggcgactgagcgttgaatcgtcctgatcgagagaagtgcgacagaaaccgggaggatcgggaatatcgcgagaagtggaattgtcggagaagtcaacgccccatcttcgtcctcccgatcccatcactccctttcccttctccattgatttgattctctgcgactacactactgatgcttgcgaaacggcgtcgtttaggagcactctctggatccggttcagttcagttcagttcagtcccttctgtcgtcttctcgcagccgtacggacgcgtgggtcgacccgggaa

SEQ ID NO: 73698 - DNA, 206 bp, Glycine max
  Clone ID: PAT_MRT3847_37564C.1
ccgaataccatggggcagattgaaccagacatgaattcaagggttcagctggtgagtacccctaccaagggtgagcatgatggcggaaatatctcgcaatggttaaagtgtatgtaaaatgtgcttgtgtggaatggaacaccatttgcaggctagctccataggaggaatctgttttgcgaaaagacataggagagattgatgaa

SEQ ID NO: 73699 - DNA, 242 bp, Glycine max
  Clone ID: PAT_MRT3847_37565C.1
tagtctattctctcactatgcatccacaccaagcacactctcctccgtgcgatgcattcaccaattgataggaggcgacagtatgtgtgaggctgtcatctgcattcattcgcccgagaccaatagacaatatcccgtcatatagacgggtaacactcggggatgtcccgacgtcaacacttacatccaatcacctttcacagaatcctatacaccagcttccgtttcattacccaaagaat

SEQ ID NO: 73700 - DNA, 172 bp, Glycine max
  Clone ID: PAT_MRT3847_37566C.1
cccacaccgtcctctcgcttcatcaattctttacgaaaatgctcatatatcaaaaaggtactgcatcatatatcaaatctcactctacccaataacattcgtatccacctattacccttcacaaatatcattcattaatcaatacaataacatatttaacactccacaatac

SEQ ID NO: 73701 - DNA, 1246 bp, Glycine max
  Clone ID: PAT_MRT3847_37567C.1
atccttactaatacttagccacatctattgcatgctctctcccctcatctccttcttattctctgcaatatatcatagtgccaaactctcatctttctctctctctcacacacacacaatataagtccaccctaaacaatcaccatggcagttgaagctagttacatgaatctcttgccttctcagttactcactaacagagaactcatcaaatccaatcaacagctacagcatcaattaaactctgattacatgtacaacactactacccagatggattcttcttcagctttgcctcaaccagcaacaatgcctgaatcactcttgtccttctaccaatccaacttttgtgatccaaacaaggcagatagtggtctcacctaccatattcctctccagagaaagcgttcaagagatttcaccaccgaattaacctctctcccagctcaccagaagaacaaaatctcctctgatccttcctttctcaaccaagagattctctaccaatttcagaaccaacaatcggaaattgatcgagtccttgcccatcatactgagaaagtgagaatggagctggaggaacaaaaaattcaaggatgttggtgagcgcagtccgcgatccaagaagcaatgggctgaagggaaaaagacgaagagattcagcgtatggagaagctgaattgggcccttcaagaaagagtcaaaagcatgtgcatggagaaccaaatttggagggaattggcacaaacgaacgaagccacagccaactacctaagaagcaatttggaacaagtcttggcacatgtcggcgaggaacgcgccaccgcggccgaggtggccgatgatgctcaatctagctgtggcagcaatgatgcggcagatgccggagatgacacggcggcatccgcggcggcgaccggtcgtggtaggttgtgtaagaactgtggggtgagggagtcagtggtgttgttgttgccatgcaggcatctttgcctttgcacaatgtgtgggaccacgataaggaattgccctatttgtgactctggcatggatgctagtgtgcatgttaatctctcttagtacaacttttgtttttttttacataggtttttattgtagagtttacaacaacagaaactagaaagaaaaaaaatatcttgtcgaaaagacagatagaagaaaaaaaaatagaatttggaattcttttgttcgtaaaaaaaaaaaataaaagtataaaaaaaaacat

SEQ ID NO: 73702 - DNA, 1054 bp, Glycine max
  unsure (1)..(1054): unsure at all n locations
  Clone ID: PAT_MRT3847_37568C.1
cggaagctcggctacgagcaataggcacacatcgcatctcgagaccaatcacttgttcgtgaagaacctctaatcttcgaaacccgtggccatnncgggtgccggctgcaccacnatnaccagtggtatggtnttcgttggcngnnccgccgtggcctatttggggtccttcggaaggtagggctccaatgttccttttgtggcgccaactcgtgagtgtcaagaaccggcgagtgccttttagttatttggtttggatcagcaggggaaatcgagtnncgtccggattactttcgaattcggacgaagaaagcaatgcccgtagggcgctgcatgnnggttcccctgatccaacaacccgagagcccagagtttttattacattgggctttcgggcctgggagttgggggcctgcgggtgtccatatccgaagatgtttttaaactatccgaattgggcgatggtggggttgttatggacaccgggaccgccgtgacgcggcttccgacggtggcgtatgaggctttccgggatggttttattgcccagaccacgaacctgccccgggcttcgggagtatccatttttgacacgtgttatgacttgttcgggtttgtgtcggttcgggttccaaccgtgtcgttttacttctcgggtgggcctattttgaccctgccagctaggaactttttgatcccagtcgatgacgtgggaactttttgcttcgcctttgctccttcttcttctggtctttccatcatcggaaatattcagcaagaagggattcagatttcggttgatggagctaatgggtttgtgggatttggacccaatgtttgttgagtaatagtaatagtaatagccattgccatgtatatcaaccaacgatatgaatttttctagtcttagtcatgtcacatataaaagaaacaactaggtcgtcgtgcatgtggtaattaattaactattgtatttaaaataataagttgtttcggtttttgattgagatgctaaaagtaatgctttatggaacttgaagtttctagtgttttt

SEQ ID NO: 73703 - DNA, 1008 bp, Glycine max
  Clone ID: PAT_MRT3847_37569C.1
aattattcatcattgtcgttattattagtagtaatagttgtccttattatcattgttgttgcagtaattgcaatgactttgaatgaatatataagaactgttaacaaactaactaattggtttaataaacttggcaaaaaaaaataatgtagaggaagcactgaatttactcgtctgggatcctagtaataaaacaccggagtagttagagtttacttgctgggtgttttggattctttctagctaccatccacagctttccaagagcaaccaattctccattatgctttttcctgacttccacaatcacagaaatcaactcatccttctttcttataacctttgcctccacttcaacctcttcctgaacctttgccgttgagtagaatgagatacttaaatcaagagtaacctgctgacacgaggtaatggagtaggaggcaaaacttgcaagcatgtcaactaatgttgctatggcactggcatgccaatttccattttcatccaacaagccactgtgtatgatcaagtcacaaaggatgaaacctttgtgtgcctttactagccggataacccttgtggtggaagtataactgttgacctttagtcccatctgacaggccttttatccatttccggatcacttctagactgggatcttccatctctttctcaaccatgcccacaaaccagagagaaacagaatttttccctgtttcactttatcactcttccttcagggcgtgttagatgggtgacaacttagtgacagagggaattgaagctgaaaggttattgatctccaagttgctcccaaaacagagactaaaaaacatatctatgttgttggttgttgcagagcaaaaaaagaagacaaattatatttcacaagcaatagaaaaacaaacactaccagttatctgatggagacgtgcatccgcaaatgaacaagtaaccaggccagcaatcaacaagagcgcaatccaacagaagcgaaaatgacctcgt

SEQ ID NO: 73704 - DNA, 376 bp, Glycine max
  Clone ID: PAT_MRT3847_3756C.1
ggtgaaaaaaaaaaatgaggccctcttataactttaaattgaaaaagttgtaaccctaacattttttaacttacaattcgttggattggatcaatcatggcaaaagaatcgagctttgccaaaaaacaatgggctcccactcttacctaaacaaaacttttatttggggtgcactcattattaacattttacaaatcattcccagggcctttcacttttttaactctttctccaatttaattccattacttccccattatcaaacaattctcaaagtgatgaaagtttttccttatgatgccatccttccaaatttttgattgccacccccccaaagctattcacattacaccttttactcacaacccttgttttt

SEQ ID NO: 73705 - DNA, 696 bp, Glycine max
  unsure (1)..(696): unsure at all n locations
  Clone ID: PAT_MRT3847_37570C.1
ccacgcgtccgctttcttttctcaattattcattatttcctcaattaacttgctttccttaattattcctgtatttctaggttttattttactcactaagcttcataaatctatcacttttaatattctctacacaaaaacttaaatgatattaatttaacaattattttcacaaaaaggaaaaattataagagaaaaattacaaattcttctatactttaacccccaaaatatactcataattagcagttatcaagacaaccctttcactctcaggagatggcgaagtgtcttcatgagtggttgatgttgatagggggagctcttgctgaatatgttgaggtgtgttttcttcttcaagaggaggaaagaatttgtattccttttcatgagtctcaaagacccattgtccttcttcattgaacaccacatctcgactgactagccttttcttgttgtttagactatacaatttgtacccctttgatcttgaatcataaccgataaagatgaatctctcactcttgtcgtcaagatttgctcttctcttgtctaggacatgaacatgagctatactctcaaagaccctcaagtgagagataccaggnggttctttcactccgcgcttcttgtgggggctttcatcatatactacctgtcggaaaataattggacagataaacccatgccatagct

SEQ ID NO: 73706 - DNA, 594 bp, Glycine max
  Clone ID: PAT_MRT3847_37571C.1
agcatctcaatcaaagccgaaacaacttattattttaaatacaatagttaattaattaccacatgcacgacgagctagttatttcttttatatgatcacgtaaacaatataatacaatatgtgacatgactaagactaacaaaattcacatcgtgggttgatatacatggctattactattactttacttaacaaacattgggtccaaaacccacaaacccattagctccatcaaccgaaatctcaatcccttcttgctgaatgttccctatgatggaaagcccagaagaagaaggagcaaaagcgaagcaaaaactttccacgtcatccactgggatcaaaaagttcctagctggcagggtcaaaataggcccacccgagaagtaaaacgacacggtcggaacccgaaccgacacaaacccgaacaagtcataacacgtgtcaaaaatcgatactccggaagcccggggcaggtttggggtctgggcaataaaagcatcccggaaagcctcatacgccgccgtcggaagccgtggcacggcggtgcctgtgtccataacaaccccttcatcgcccaattcggaaaatttaaag

SEQ ID NO: 73707 - DNA, 301 bp, Glycine max
  Clone ID: PAT_MRT3847_37572C.1
tgtttgagggccttatttttttagtcggtcggtagtcgggggggggaccccataaatgctatatgattcctgacccattttttcttttggtgggggaaaatgattcgtgttattttgggatggctgtcttattgcattgtcagatgttcatattccctgctgtttgaattttgtgacactgccttcccaaagtatgttgcttgtttaataattttatttatttttattattcttgtaaaaagatcgtttactataagatatttataattatgaaaatatttttttatgaacacatacttta

SEQ ID NO: 73708 - DNA, 415 bp, Glycine max
  Clone ID: PAT_MRT3847_37573C.1
gtgatacttgctattaacgatttcttggccctgatattttctttaatcctgatatatagggcatgtgactttaccacccctttgtcagttgtaataaacaagtgcattcagtctgcgccaattgacacatggagatcattatacaataatgtactgtagtctggaggttcaaccatgttcaaggatattcacaggaagttgcaacgttatctaaaaaaaatagagaatgctcgtgtccttttatctgaagcgcgcttgaatggtgagataaaatctcagccagcatatgtcaatgtactcatcaatccaatccagagatattcagtttggcttggaagatcagtacttgcgtcaacacctgatttttttactgcttgtcatacaaaggcagaatattaagagtatggagcaagca

SEQ ID NO: 73709 - DNA, 1568 bp, Glycine max
  Clone ID: PAT_MRT3847_37574C.1
gcgtacggctgcgagaagacgacagaagggggaagaagcaaacacaacaaagttcaatcgtctcaaacaaaaagaacaagaaaacaaacacacaaacagacaaacaataatttaaattgttctctggtgttcttgctattaattaatagtaatttccactgctccagttccaaatatatatacttactagtttcctacacactccttaattactatttttcactttctcctttcaatatgaggaaccccactcacaagtcccctgaggttgaaaatgatggtgattttaaagttcatctgttctcttcatcatccgagttgcttgaaaagcttcatgaaaaatggagttcagtggagaaaccaccatacccagctatgtattctagtatttatggaggtatcatacttgatccagcaatgatggtaatccccattgatgatcacatggttcacagagggcatggtgtgtttgatacagctattgttctagatggatacctctatgagttggatgttcaccttgacagattcctaagttcagcctccaaagcaaagatatcctctcccttttctcgatcagtgcttcacagcattctaatacaactaactgcagcatcaaaatgcaagaagggaactctaagatactggctcagtgcaggtcctggagatttcttgctatcatcagcaggatgtccaacatctgcattctatgcagtagtcattgaccaagatatttcccaatgcaaagagggagttaaagtgattacttccaacataccaatgaagccttctctatttgccacagccaaaaatgtgaactatcttccaaatgtcctttcagtaatggaagctgaagagaaaggagcatcttcttctatatgggttgatgaggaaggttatattgctgaaggtccaaatgtgaatgttgctttcataactcaagacaaggaacttgtcatgcctccttttgataacatcttacatggttgcactgcaaaaaggctccttgaactggcacccaagttggttgatcaagggcttctgaaaggtgtagcaactaaaaaactaactgtggaggaagctaaagctgctgctgaaatgatgtatgtaggaagcacgcttcctctgttgcctatcatcgtctgggatgatcaacccattggcaatggaagggtgggagaattaacaatgttactttcggatatgctttgggatgatatggtagctggccctggcacacagaggatacctgttccttatgttgagtaaacctacaaagtcatcaaattacaggctgggaacaactttcttacttttctatgtcatgttcctaggagttctccttgcaaagatttatcaagaggtttctctttgtatttgctttttgtatttcaagtgtgaacactgaacaagtccttaagtgaagcaccaggtgtttcctgcaacacaaaatttacgtagcagataaatagtccttgaactgtttcacgttgttgtattgatataataataataatgaagactcttcatgctgctttgtgccaaaaaaaaaaaaaaaaaaagcggcc

SEQ ID NO: 73710 - DNA, 769 bp, Glycine max
  unsure (1)..(769): unsure at all n locations
  Clone ID: PAT_MRT3847_37575C.1
ttacgaattcgagctctgtacccggggatcctctagagtcgacctgcagaaagaaaaaatagaaccataatgaatatggtaaggagcatgttgaaaggcaagagtctgctcaagtacttgtggggagaggtagtgtctacaactgtcttcatcttgaataggagcccttcaaagagattggaaggaataacacctgaagaagcttggagtggtgctaaaccaaatgtgagtcatttcagaatctttggatcactttgttttaggcatatctcagaccagttaagaaggaagctagatgataaaggtgaacaaatgatcttactcagatatcactcaactggaggctataagctgtttgatccaaagagtaagcagataataattagtagggatgtggtatttgatgaatctaaaagctgggactgggagcagaatactgaaatgaagggaccttcaataatgataaggtcagaagaggaggaaacaagtgaagggaatggtaaaaccactcaaagagaagtgagactccagagaaatgcacccaaaccagctagatttcaaggttttgagatgttgtctgatgctgatgtaagtgcagatgggaatcttatacattttgctatgttntatgaagcagaaccaataaactttgaagatgctatgactgatcagaggtgggttcaagctatgacagaagagcttaaatctattgagaaaatcaagtgtgggaaattggtatctcaaccaaaatcgaagaagcccattgatg

SEQ ID NO: 73711 - DNA, 230 bp, Glycine max
  Clone ID: PAT_MRT3847_37576C.1
aattctaaactaacacttctaaggtaacgtatggggatggttaaatcgatattaacaggccaaaaattatacagatacaatgagtttcaattgttaaatagcgaatggagaccttcaaatgtatgtaaaacccgaaattgttacacaagaaaaagaccgggaactcctgaagatgagatattttaaaaggaactgcacaataagcctaaaacaagatataatttgaaatt

SEQ ID NO: 73712 - DNA, 289 bp, Glycine max
  Clone ID: PAT_MRT3847_37577C.1
aggaaaaacggatgatagtagtattgatccaatgggcctttttaaagtcaatttttcccgtgcttcaaattggtgcacttccaaaatgcatttgcttgcaaatgactttaggaacggaatcgaacattgcggggttcattagacacaaattgtgcgttaaaaccttcactccttctatcagttacaagttgtattcttttggtaattcaagcctccaaagagttgaaaccctggatggtattggcttgtcaatatgggtactggtttccatgctaaacttcatttgaca

SEQ ID NO: 73713 - DNA, 345 bp, Glycine max
  unsure (1)..(345): unsure at all n locations
  Clone ID: PAT_MRT3847_37578C.1
ncactcncgcatgcgcacgnnatctcntaatnccgctcnagcnactnccaccntnntnntcncgcngctnccgtgnnnggttntccnntnngtnantcntcntctgcntccnnccgnnctttgcttgncnncnnccncaccgtgtnagctnccncaaccnctctntcctcnccncatcgncacaccntccaaccgtggcttntnccntctnncctngtnnncttgacccccnntgttntgtggntttcnggnggtgtccggcggcnntcgntctttgntnnngnnntgntntgcnagtncttttcgnnctcctcnctgtgtcnnntnttgcatntgntcnttntt

SEQ ID NO: 73714 - DNA, 258 bp, Glycine max
  Clone ID: PAT_MRT3847_37579C.1
agtttgagtctcaccctgtaacatgtgcagcatatgacagtatagatagtcggcatgacaataataatgataaaaatttgatcacagacagcaaagataagtggatcaggctggttctctggatttgaatctagatgttatctctggtgaaaatgaaaatcatttgctgcatattgctgataaccatcataataaaggtgtttcagtagaggaaaaagtatgctgttcagaagccaaaaaggaagaagacatcatggt

SEQ ID NO: 73715 - DNA, 221 bp, Glycine max
  Clone ID: PAT_MRT3847_3757C.1
gttctagatcgcgagctgccgcccttttcgccttttttttttttttttttcccgccggcaccgggttctttccttttccacctggtgtgcaatcccgggtctttttcaagttttttgggttcacaaaacaaaaaaaatgacctcaggaggggcccccccccgtctagtagtcttccccccggttgatcatgcccgcacgttcccccaagtggagcccgttt

SEQ ID NO: 73716 - DNA, 472 bp, Glycine max
  Clone ID: PAT_MRT3847_37580C.1
tctgctcacgcgtccggttttttttgtattgtatgcgcatggctcatgtctctcattctcctaaccatctgtgaagtactcttcttcttcttcttcttcttcttcttcttcttcttcttcttcgatgagcagcataaataatttatccaatgatgtgttgggagaaatattcattcgattaccatttagattcactgcaaaatgcaagtgtgtgcaagcgttggctgagactaatttcaagtccttctttcccaacaaaatttgtgtctcgccagcactctctttcaccccgccaacttattctcggtttcttcccttcagatttggactttaacggcttatttttgctgttgactttctttcccaaacttatgatttcaaagaagaagaacctttataagaagaacctatcactttaaagtggaagttttctcttcagagacaaatattactgaattgtgtggatggtttt

SEQ ID NO: 73717 - DNA, 409 bp, Glycine max
  Clone ID: PAT_MRT3847_37581C.1
taataaaaaactgcggactccggggccacgtcttcgcttttccctccggcctgctcttgcctgtcactgccctccgctgtgactccatgtcgggtcccaatctcgtcccacgacacattgagatcctccctgacagcgctgtcgactgcctgggattcccaccatgagcggcacgcgacgcgatgccccgccgcatcacaagcacaaggacagcgtccccgacgcggggctgagaagtctcgatcattataaaagagcgctgccaaaatggagatataacttgcgacaacaggcgctcccgctcattcgctgggagacgccgtatctggctgctctccagagcaagttgcgcacgccggcgctcgacagctacttcgccatcacggccaacctgggcacgcacaccttc

SEQ ID NO: 73718 - DNA, 272 bp, Glycine max
  unsure (1)..(272): unsure at all n locations
  Clone ID: PAT_MRT3847_37582C.1
atcgtattaaaggaangattaanatggnnggctacagttggtattcctgagaatacnggtataggcattggcctgtgntatgcatagttcttttagggggcgcgncagttcctgatatttacacccatctgctctcaagactgtgaattatggaatcctgcttgcacaaaagcaatggctatgtcatttaatccaaaacccgtgttctgatgcctggagtttggaatttctgcaagcgtnacggatttcatgtgatatcattgtgtcaangg

SEQ ID NO: 73719 - DNA, 457 bp, Glycine max
  Clone ID: PAT_MRT3847_37583C.1
gctggaatttgctgcggggtttttggagaaggtgacactccggcttcactcgaggggactcctcgacccttcaggctccggcgttcggacattttacctttaacagatatctccgacatgcccatgccgccgacggaggctttacggaagcgtaccaagctcatcctcagggactgggataactcaattgaaaattcgcacgaattcactgggcacaaggtgacgaacaaggaatccgaagttgactacaacgacgacggcgcttcggaaactaatatcgtctctgcctcggaacgtgctgatgaagctcccatgttcggcgtgacgtccgcttgcggcatgagaagagacatggaagattccgtctcagtgcgggcttgctttacccactgcttacactactaccgcgtcttcgacggtcaccgttggtgtcatgttgcgactatgtgcaatgagc

SEQ ID NO: 73720 - DNA, 755 bp, Glycine max
  Clone ID: PAT_MRT3847_37584C.1
tctcttacactagcaacactttccccacggattatgttcctacagttttcgacaatttcagtgcaaatgttgtggttgatggcagcacagttaacctgggattgtgggacactgctggacaggaagattacaacaggcttaggccattgagttacagaggagcagatgtgttcttgctggccttttccctcatcagcaaagccagctatgaaaatatatctaaaaagtggattcctgaattgagacattatgccccaactgtgcctattgtactggttggaactaaacttgatttgagggaagacaggcaatatttgattgatcatcctggaaccacagctatagctactgcccagggagaagaactgaagaaggcaattggtgctgctgtgtacatagagtgcagctcaaagactcagcagaatgtgaaggccgtgtttgatgctgcaatcaaggttgttttgcaaccacctaagtccaagaaaaaaggaaagaagaagaacacgccttgtgttttcctctgattcaagttgttgaattgcaattgcagttgcagtggtattgttcaagttaaattcccatcctgtaacattcagatccttcttcccgggattctctttttcttttcattttgattcatgaatccattagaacatataagtactgtaaactatactatattgttctctaatatgtctatttgatgaaagtagactcaactcaagattatatgatatacatcacataacatgctt

SEQ ID NO: 73721 - DNA, 328 bp, Glycine max
  unsure (1)..(328): unsure at all n locations
  Clone ID: PAT_MRT3847_37585C.1
tantaaaaccaaggaaagctagccaagatagggcaactatatacaagttcccttacctactcggaacactagggatggttacgctggccactacatacctcgctgatcgtcgccttctttcggtggaagatggttatgaacaccatcaccaccacccaacaaaaaaacactgggctccaaccgcacacattgaaccttcagacgtggaaaacaaggagaacactgaggtggaggatggccaagaacataaccatcactacccacctaaaaaacactggcctccgaccacacataatgaaccttcccaagacgaaaacaaggaggggtc

SEQ ID NO: 73722 - DNA, 2691 bp, Glycine max
  Clone ID: PAT_MRT3847_37586C.1
ggctcgagctcgagccgctcgagccgagtcgggtcgaggcttgcttgagttgccaactttaagtttgtcaatttccgtgctgcttggttggttgcaattgcaagtgaacaattggctagtgtgtactagttttgaatcacaatggcagaggatgatggttacacgaaagatggaacagtcgattactgtggaaatccagctaataaaaaggaaactggaacctggaaagcctgcccctatatcttaggaaacgaatgttgtgagagattggcttattatgggatgagcacaaacctggtgctttatttcaagaaccggctaaatcagcatagtgctactgcttccaagaatgtctctaattggagtggaacttgctatatcacaccattgattggggcatatttggctgattcctaccttggaagatattggacaattgctgttttttcaataatttatgctattggaatgacactcttgacattgtctgcatcagttcctggcataaaaccaacatgtcatggacatggagatgaaaattgtcgtgctactactctagagagtgcagtgtgcttcctagctctttaccttattgctcttggcaccggtggcattaagccttgtgtctcatcctatggagcagatcagtttgatgacactgactcggctgagaaggaacgcaagagttctttcttcaattggttctatttttcaatcaacattggcgctcttattgcatcttctctattggtttggatacaagataatgtgggttggggatggggctttggtattcctgctgtagccatggcaattgctgtggtgagtttcttttcaggcactaggttgtataggaatcagaagcctggaggcagtgccatcactagaatctgtcaggtggtaatggcatccataagaaaatacaatgttgaagtacctgctgacgagtcacttttatatgagactgctgaaactgaatctgctataaaaggaagccgaaagcttgaccacacaaatgagctaagattttttgacaaagcagcagtgctagcacagtcagataaagtgaaggaatcaacaaacccttggagactttgcactgtaactcaagtggaagagctgaaatccattttaagaatactcttaaaatgggccactggcatcatattttccactgtctatggtcaaatgagcaccttatttgtgttgcaaggacaaaccatggacactcgtgttgccaactccgaatcggctcgagcaccagcttcactgtccatctttgacaccctcagtgtcatattttgggtcccagtgtatgacaggatcattgtgccaattgctacaaagttcactgggaacaaaaatggcctaactcagctccagagaatgggaattggcctcttcatatccatattttccatggtagctgcagcaatattggagctcatacggcttagaatggtgaggaggcacaactactatcaacttgaggagataccaatgacaatattttggcaggttcctcaatatttcatcataggctgtgcagaagtcttctatttcattggtcagttggagttcttctatgagcaagcccctgatgctatgcgaagcttttgttctgctctctcacttaccactgttgcgcttggacagtacttgagctctctgcttgtgacaattgtgacaaagatcagcactaggaatggaagtccagggtggatacctgataatctaaactttggtcacatagattatttcttctggctattggcattgctaagtgtagtgaacttgatagcattccttgtggtgtctatgttgtatacatataagagacctgtgggaactctgcgctgaaaagtgggttaagttgtacattggaagtagtttcattatacatcacattggaagtttccttcacttgtagtcttgtttttcacctacactgtaagctcttgtgtcaaatccttgaaaaaatgatgtaaaattgttattatcaccattgctattatgtgtctgatctttctcatcaacatgcaggaattaaagttaaccaatgatagctcagttctatccaagtttaaagacatcccatcttataaaagggttatgttattgaaggataaaatgggcgacgtaccaagacaaacagtggaagaaataaagaagcatgcggatgcagtgaatcttccaaaaacctcaattatcaaagtatctaattccatcttagtaggaatgacaaatgttgtcaaagagttgaaagatgcaaacctcacagtattcgtccataatctcaaaaacgaatacacaaccctggcattcgactattggtctgatcctaatgtcaagattgcaacttacgtccaaactgccaaggttgatggaatcgtgaccgattttctagccactgcaagtagattcatgaggagtcccatgatcctgcctggtgatctattaaacaccattcctactgaacttcagccaccagcacttcctcctcttaaggttgcaaaggttgttaacagaggcctttctatagtagctattttagtgtttgctatgctattcgctggtcattaattattaatgtgattaacccctagcacaatctagagatcgctaactttcctctaacatcgtgtcgtgttttaatttgtattatagaatgcacacattggttctcagaaa

SEQ ID NO: 73723 - DNA, 893 bp, Glycine max
  Clone ID: PAT_MRT3847_37587C.1
aagacatcccatcttataaaagggttatgttattgaaggataaaatgggcgacgtaccaagacaaacagtggaagaaataaagaagcatgcggatgcagtgaatcttccaaaaacctcaattatcaaagtatctaattccatcttagtaggaatgacaaatgttgtcaaagagttgaaagatgcaaacctcacagtattcgtccataatctcaaaaacgaatacacaaccctggcattcgactattggtctgatcctaatgtcgagattgcaacttacgtccaaactgccaaggttgatggaatcgtgaccgattttccagccactgcaagtagattcatgaggagtccatgtagcgatccgacccatgatcctactatcttacctgctaagcctggtgatctattgaacactattccaactgaacttctgccaccagcacaggctccacttcctcctcttgaggttgcagacgttgttgacccacctcttcccgccgtgactaaaaattctaattcaactaaagctgagcctgctgctggtcctggggctaaacctgcctccccccctgcttccccttcaggtgccagggtaaatgttgccaacagtggcctttcaatagtagctattttggtgtttgctatgctcttcgctgctcattaatgattaatgtgattaacccctagcataatctagattgtatttcaatttgtattatagaatgcacacattggttctcatcataatattgggattattcattaggcaaagtttcttctttgcctctgcttgcgtttggattatttgtcatttgtgctttcaaagcacaatcaatgcctaattccaaaaattgtataagctttccaccatcaaacaagtccggtcaatataaaa

SEQ ID NO: 73724 - DNA, 441 bp, Glycine max
  unsure (1)..(441): unsure at all n locations
  Clone ID: PAT_MRT3847_37588C.1
gcttgcttgagttgccaactttaagtttgtcaatttccgtgctgcttggttggttgcaattgcaagtgaacaattggctagtgtgtactagttttgaatcacaatggcagaggatgatggttacacgaaagatggaacagtcgattactgtggaaatccagctaataaaaaggaaactggaacctggaaagcctgcccctatatcttaggtaattgttgtgttcgtttaagtccaaggtangatgtgatgtgtatgtactgtgttgtgtgtgaaatatttatcgtttcaagcttctatttgcaggaaacgaatgttgtgagagattggcttaatatgggatgagcacaaacctggtgctttatttcaagaaccggctaaatcagcatagtgctactgcttccaagaatgtctctaattggagtggaacttgctatatcaca

SEQ ID NO: 73725 - DNA, 400 bp, Glycine max
  Clone ID: PAT_MRT3847_37589C.1
cacgagcaattcccctaaatcaattagacggtcaaaactgaagatggcttccggagatgatacctcagctggcggctatgcgcaatctgtcaattcggctcagcaggcgaagggcccctccgacatcaacgttgggagcggagtagcggactctgctgatggaactggtggcgacatcaatcaaggaggcggggttgccgattcttcaggctcaattggacaggccgagcctggaaacggacgaaacctccagacctactctgcagcagaggctggatcgcatgaagataagggagtcggtcagaagatcaaagatgccttcaagccaaagtagatttcctgactcgacatcgggcaacccgaggcgcctgcgctttgttcttctcacctgtgtatcaca

SEQ ID NO: 73726 - DNA, 335 bp, Glycine max
  Clone ID: PAT_MRT3847_3758C.1
gccacacttctgggacatcacttaaggggacgcctccaaatattttcctgtttaccgttgatgagaatgcaccagatgttgtcattcacaatgagacaggtgtcgactcagcatcgtgcacattggagcttctgagttctcatgcatgcacttgccaccttcaattgtgtccatttcggtcaggctacagctgacatttcatggactccactgagcactgatagaaaagttttaaataactgacttacaattgctaaacgataatgccattgtcacttacacttcatttacagacttagtccaatttcaaatcccatagcggaacctattctcac

SEQ ID NO: 73727 - DNA, 1366 bp, Glycine max
  Clone ID: PAT_MRT3847_37590C.1
gccggacccaaccataatgtgggttggggatggggctttggtattcctgctgtagccatggcaattgctgtggtgagtttcttttcaggcactaggttgtataggaatcagaagcctggaggcagtgccatcactagaatctgtcaggtggtaatggcatccataagaaaatacaatgttgaagtacctgctgacgagtcacttttatatgagactgctgaaactgaatctgctataaaaggaagccgaaagcttgaccacacaaatgagctaagattttttgacaaagcaacagtgctagcacagtcagataaagtgaaggaatcaacaaacccttggagactttgcactgtaactcaagtggaagagctgaaatccattttaagaatacttcctgtatgggcaaccggcatcatattttccactgtctatggtcaaatgagcaccttatttgtgttgcaaggacaaaccatggacactcgtgttggcaactccactttcaaaatcccaccagcttcactgtccatctttgacaccctcagtgtcatattttgggtcccagtgtatgacaggatcattgtgccaattgctacaaagttcactgggaacaaaaatggcctaactcagctccagagaatgggaattggcctcttcatatccatattttccatggtagctgcagcaatattggagctcatacggcttagaatggtgaggaggcacaactactatcaacttgaggagataccaatgacaatattttggcaggttcctcaatatttcatcataggctgtgcagaagtcttctatttcattggtcagttggagttcttctatgagcaagcccctgatgctatgcgaagcttttgttctgctctctcacttaccactgttgcgcttggacagtacttgagctctctgcttgtgacaattgtgacaaagatcagcactaggaatggaagtccagggtggatacctgataatctaaactttggtcacatagattatttcttctggctattggcattgctaagtgtagtgaacttgatagcattccttgtggtgtctatgttgtatacatataagagacctgtgggaactctgcgctgaaaagtgggttaagttgtacattggaagtagtttcattatacatcacattggaagtttccttcacttgtagtcttgtttttcacctacactgtaagctcttgtgtcaaatccttgaaaaaatgatgtaaaattgttattatcaccattgctattatgtgtctgatctttctcatcaacatgcaggaattaaagttaaccaatacttgctccgttgcatgtagatgccatattacataaaatttcatctcagtgagtt

SEQ ID NO: 73728 - DNA, 417 bp, Glycine max
  Clone ID: PAT_MRT3847_37591C.1
cccacgcgtccgcccacgcgtccgcccacgcgtccgggatagaggaggagacgtaggaaactattgttatacaaattcattcaaatatattttataacttgtgattttttccaacagcatctcttgtaattttaattgaaatttctccttaagttgaaattttctgtattcatctagaatttatttttgaataggccgactaaggttgagaatttgtatcaaagtggaaatgctgtacgaactactttgggtccaaaaagagacattagagcagagaaagggaaagagtcttcaagaaaaatagaagaaaaatctaacacaaaatgggtggaaagaacacgtcttcaatcaaaagtgaaggatgaaaaagaggcagagatgaaaaggctaaaacataatgtcaaaggcacatcctca

SEQ ID NO: 73729 - DNA, 343 bp, Glycine max
  Clone ID: PAT_MRT3847_37592C.1
gctctatatttcaagggggcgggggttaaaaattatgatataacttaatgatatcttattttattcgggaaaaaggggatgggtgataataagacaattcaacagggcgatggaagggaatttaaaatatcttcacagaaaaaggcaagatggttatattaacattggggttttttaaaaatgaattagacgatgggggggttgggaggtttggggggctaggggaagaggggaagggggggggtggggggggaggtgggggggggtaggggggggggaggggggagggggggggtgggggggggggtgggggggggggttggggggggggggtggggggggg

SEQ ID NO: 73730 - DNA, 1031 bp, Glycine max
  Clone ID: PAT_MRT3847_37593C.1
cccacgcgcacacccacgcgggccacagcgcgtccgggatagaggaggagacgtaggaaactattgccatacaaattcattcaaatatattttataacttgcgattttttccaacagcatctcttgtgattttaattgaaatttctccttaagttgaacttttctgtattcatctagaatttatttttgaataggaattcggctcgagattatggagagaatgggggataaggacatagtcaaacgagcatttaagacattccataacagtttcaaccagccaaaaacttctgttgaagacaaatctttgacaaagaagcaggttccttcaagggggactgtgccaaaggttccaacatctacaactttgaggaaagaaaatggacggccgactaaggttgagaatttgtatcaaagtggaaatgctgtacgaactactttgggtccaaaaagagacattagagcagagaaagggaaagagtcttcaagaaaaatagaagaaaaatctaacacaaaaggggtggaaagaacacgtcttcaatcaaaagtgaaggaggaaaaagaggcagagatgaaaaggctaaaacataatgtcaaaggcacatcctcaccagcttttaaccgtggtcaaaaagtagtgaaaagtcgtcctgaaaagggtgatgctaaaacttagaatccttggtggccccacaggtgctaaagataaagagagcagaaggagaaaagaggttaatacaccagtgtgtcaggtagatctgaatgttcaggggaaatgtttgtggaatcagttcaacgccatgatattcttgttcagtaaacaacagcagcacaattttctagttaaatataggagcttatgattatgaacattgtgaggagtagaaggaaggagaaggcataatttattgatgataattttcttcctcgcgcccctctttaggcaatatgttggttagaaaataaaattgaataaatgtttgtgatgttaaaagtgtgctaaaaaaaaaagagagaaggggggggaagag

SEQ ID NO: 73731 - DNA, 536 bp, Glycine max
  unsure (1)..(536): unsure at all n locations
  Clone ID: PAT_MRT3847_37594C.1
aacccgccgcgtacgtngcttggtttcggggagcggccgccctttttttcttttttttttttttnccngtntnnttctgcggttcttggtcnctggnttccctgggttanctcaccgacctgttacanttccccagtnncccctaagggaaatttggcttgggcttttnnntctttttttttgaatgggccctgnnnaattggggctagatttcctacctctctctttnncantcnntcttgattgccccanncnntntttaggatcaatttgctctaccccccccatgtttcccgggtggggccnngagatngagagaagagaccgactttgatggctgcatgaagcttgttcctagttatcacctttcttgggttgatgcctttgtgccctacttctgngccctgacctgngaantgagcctctagtcggtaaccctttctttccgtgtggctgttttcctcccccctctgtgaatactggacccgtctccttgcttcttggggttctttgcctcttcctactttttccctctt

SEQ ID NO: 73732 - DNA, 331 bp, Glycine max
  Clone ID: PAT_MRT3847_37595C.1
aaccccggtaagagggcaaagaaataaaaatttgtcattaatcaaaagttgacagacaatggagcaatggggttactggttacattttcctttctaaggatcatttacccccccaccacaataaaacccttttgttcttaaacaggagtgattataaaccccatttttcatttgcatcgggtcagaattttccagcttcaggatgcaaaatactcagggtttctcaagcaacagctctgcaccttaaaaacatgtacacttatttgcaatgcttgccccccacccccaaataacgggtttcattatcaagagcccttttttctgggacccg

SEQ ID NO: 73733 - DNA, 371 bp, Glycine max
  unsure (1)..(371): unsure at all n locations
  Clone ID: PAT_MRT3847_37596C.1
tttcgnnataattccaanaccgaagcaagnccggnangaggaanggattaacccaaangccacgaacaaacacaacncccgagaagggagacaacanaccaagaaacgggcnngggcgannaaggggaccaaaaaaaaaggcggcaacncccacaccaaagcggnaaggcaacgcggggggagacaaagccgaaaaaaacaaacgcaacagagcaaggaccacgcngccaaaganagaaaaccagganggggccccgccccnggacccncaacaaccaccacnngnggcncaaacggaaaccgagaccccaggcaanacacaaaggncggcngcaccgccancgccacacccacaacagaaagcagcacgc

SEQ ID NO: 73734 - DNA, 507 bp, Glycine max
  Clone ID: PAT_MRT3847_37597C.1
gtcttaaacaaaattaaaattttgttatagttcatgccaaagtaacagaacgagcactctaacaaacacatcacaagccaggtaacagaaactcggtgttcctaattgtcctacatttgaggaccaaaccttccaagcttatactattggtaaaagcgaattaatacactacagattttgatctcaatctaccttgggtccaaactattagcaaacaagatgcaaaccaaaataatctcaccggataccatttcacgccccaaaaaagttgaaaatttgattggaaaccttgtggatcattcacaaaaatcatttccttggggatctaggttttttcacgcttctgattttgaattcaataatcctgtagaaacgccttcttccgaaagcatgttgtgaggatccttcattccccattcgatgtaatctggggactcacaggccttgtattcattaaccaaactaatcaagatggcccttgcttcatcaaaatctgagagggcgtta

SEQ ID NO: 73735 - DNA, 790 bp, Glycine max
  Clone ID: PAT_MRT3847_37598C.1
catcgagcaattaacagccatagagtcatctagaactagtcttgtgtcactcttgagagaagctcgcgggggtcaccattgcaggcgcgggctcgtccgccgcctgattcaggctgcacatgttcagtcagaacgggcgaccaacacctgccagcaattactgaatgtcaacaacattccatcattagctgagcagagctcaaaggaaattcaaacctccatgactcctgcaagttttaatatttctagtgaaagggagcaatcggctccattaatgtacacaccacaagtgtcattttctcaaaaatctggacacattgaggaagatccacgcaagtctgcagctgctgcagtggcagcaaaactgactgcttcaacatcctctgcgcagatgctatcttatgtgttgtcatccctagcatcagaaggtgtgataggaaatccaatgaaagaatcttcagcagattatcactctgagaagaggaccaagcttgagaatgaccagccatcttttgtaccatctcagaatcctcaacaaccacttcctccctttccactttctgagtctattcaacacaatccaccgacaaccaaccaacaatctactcccaacgaaccaccacctccaccttcttcatcacctcccccattgccgccaccaccaccaccaccaatgtcacagtaccctgtgccgcagttcatgcagactgccggatccattagtagtatggcatacagctatggcgtgacacaacagccatcaattgcagcctatccaggtgttgggcct

SEQ ID NO: 73736 - DNA, 177 bp, Glycine max
  Clone ID: PAT_MRT3847_37599C.1
gacctaaacatttggtctactacctttgggccactcggcattgggaccacaaccccaagaagagcttccatttattacattcaaccaaccaccgaaaaggagccttgccttggtccaaccaaaccaaaggaaattaattataggtgtaaaaaaaataatattaaccaaaaccaaaac

SEQ ID NO: 73737 - DNA, 755 bp, Glycine max
  Clone ID: PAT_MRT3847_3759C.1
aattcggcaccaggaaagggggatggaaaagaaaataatgtagctgacgtctgatgttggatcgcggttgaatgaagttacacctcaactagattttggagagagagagagagagagaggcgcagagagaagagaaaagaagagaggcattatgatggtagtccgaagatctctgcaatacccattgctcctggccttgacctctctgcatctgcaacacctttctggcctagacaacaacccttcaggtgccaaaaatgaaaataaagatgtgaatcatcatgcttcaagaagctctgtggggctcaagataattattattttccttggtgtggtgacagtcatagcattctgtgtttttcttttcaaattatggcaaaggaagaagagagaagagcagcatgctcgccttttgaagctgtttgaagatgatgatgaacttgaggtagaacttggtatgcgggattgacaatttatctcattccttctttatagaaaaaatgcacatcattttcatgtcaacaaggctatgttcttttaccatttaaatctagcatgggttagtttgaagagttgaactcaggcatttgcttgtcacccgtttggtcctctcctggtttagcaggggggatttagggttcaattctcatcttctcccttgatgagagcaagatgaggcaagtttatattttattattgtatacttatttgtaaatcatatattggttctacttaataaggtgatgtcccttaat

SEQ ID NO: 73738 - DNA, 437 bp, Glycine max
  Clone ID: PAT_MRT3847_375C.1
ctgcgaagacgacagaagggtatatataccagcaaaaatcagaacaattgaacgtggaggcacaaagaagagaattgtcaagttggaggttctaaagcacgatgacatattcccgttagaaaccccattcatcaaaagtgacatcttttcctatgagaaaatcacgtcgaatgagtcttagagggaaaactggattttgtctcagtaatttcccaattcctgtaaagaaacataaacaaacagtatccatgtttgatatggcgctacaatgaagcctagctttatttggaagtgacaaatttagagtctaagatttgcacaaatgtaacaaaagtcacacaccatattggaattatattccttctcaagtgactctatgtgcttatcctcatccgtcccttaaggaagaaaaatgtcgagtgtgatataatatatga

SEQ ID NO: 73739 - DNA, 2394 bp, Glycine max
  Clone ID: PAT_MRT3847_37600C.1
cagagagaaagtggaatccccaatcttgtaacggaactttttttcttatcagttccatagctagctgtgtggagacgacaactgccacccattccaacatacagagaggctatttactaattactgttcctcgtgtgaacaaacatataaaccacctcggattttgcttcctctgctgtgttttaacgacaacgcgtttctttgcttatacactaagatttcaaacggcgattcgttttgcgactgtgtggtcgcggcccggcgagaagacgagagggagataaaacataaacaaatttcggaatcgccaatcacggaactttttttataccagaactttttgataactagctgtgtgaagacgacaactgccacccattccaacacacagagaggcctattaacgcccacgtttctttgcttatacaatttcaaacgcggccaactaagatctggttttgttctgattgattcgtgcattggcttgaaacgcaaatgtggtggatgatgaacgagactggaggccaattactgttctaagaagaccgatgatttgtgcagcaatgtttgtgatcaggaatcaagtcaagtattgggcatgtcaagaattcgctgtattttacgcggtttggatgtgaaaacctatattttcatttttgctgttatcccaatgtgcgtctttggattatatttacatgggcagaaaatctcctacttcctgcgaccgctgtgggagaaaccacccaagcctttccatgtcatcccgcattactacaacgaaaatatgtcaatggggaatctctgcagacttcatgggtggggagtccgtgagttcccaagacgtgtgtatgatgctgtgttgttcagtaatgaattggaaatacttaacttgcgctggagagaattgtatccttacataacacagtttgttctcctcgagtcaaattccacatttactggtaggccaaaaccttttgttttcaaaggcaatcgggagcagttcaaattcgtggagtctcggttaacttatggaactattggtgggaggtttaagaaaggagaaaacccgtttgttgaggaggcatatcagcgagtggcattggatcaactccttaagatagctggtattacagatgatgacttgttgattatgtctgatgttgacgagattccgagtgctcacactattaacctcttgaggtggtgtgatgacgtgccttcagtccttcatcttcagctgaagaactatctatactcctttgagtttctcttggatgataacagctggagagcttctgttcacagatatcagagtggtaagacaaggtatgcacattaccgccagtctgatgacttattggcggatgctggttggcattgcagcttttgcttccgctatatcagcgatttcgtctttaagatgaaagcctacagtcataatgacagagtcagattctctcattatttaaatcccaaaagaattcaagatgtaatctgcaaaggggctgatttatttgacatgctaccagaggagtacaccttcaaggaaatcattggtaaaatggggccgataccccattcctattctgcagttcatcttcctgcttatctactggaaaatgctgagaagtataaatttctgttgcctggaaattgcttgagagagtccagatgatccaacagttttattgtgctcatgatggttttaactggggttttgatgactctgttgtcactcctactggtatttcactgtccagtaagatattcttttcagaatttcgttcatttaggacaaattctttgatcttggggacaattctgtacataatttagactgggacatcttccaaggagagcagcatctatttctgttgagcttttagagtacaattttgcggtcatgaggttgtgcttattttggattagtgtggctgatccccagatacattagagtagtttaaacttaaaaagttcccaacccaaccttttctccttcgggaagttttgtgttgcatataaatttattttctttctgctctactttaattttgaagatttctttctatcgtgattgaattccgtaaatacttcagacgtttaaaatttgctactgtttcctcattgttaacttttgtgcttttagcatattaattttctcactgtcatttagatatgcaaatatctaatccgtgtggttggtctattcccctgacactgcggagtttaaaattccccactttttcctgttagggaagttttgtgctgcataccaatttattttctaattattctttatttatgttgaatatctaatccgattgcctgcattatattcataacacttgactcagttctttgcgttatataaatataggttggttgctttcaatt

SEQ ID NO: 73740 - DNA, 484 bp, Glycine max
  Clone ID: PAT_MRT3847_37601C.1
ccagtttagttttcctcctgctgacacgttcaattttgtgttctccatatgaggatgctattcatccaagttagcaattctttgctggcttctaagttggctattagttagccggtggaatggaagcaacaattcaatcatagaaacaacgattgagactggacagttgccaaccaaaccaatcttccattaattggaattttgggaaaatgtagtaatttaatgcattcaatttgttccttcaccttcctataacatcatggggtttagcttatatagcagaggatgcaaaggcttcaccacattgctgtaatctgttatctttgatttttccccaaacaatcattagtttcttaccatcccaaagatgagctcaacatcatctacagcgtcaagcaggatgagggatcctataatgacccggccctgcatattacagtttattgcagcatttcacaatgagaaggactatatagaaataccg

SEQ ID NO: 73741 - DNA, 387 bp, Glycine max
  Clone ID: PAT_MRT3847_37602C.1
ggacaaatcagcctttcaaagtctctcacaatgtataaagttagtggaatgtaatttgaaaaataatttctatatcaaactggaacagaggaccaaaagagctaccagtctgaaagtgtttcatcaaaattattagtaggctatttcttgattcaatcttgagacattatttttcatgaacgattttctatttattcacaccttacaacacaacactaaatttcattcacaccctatcaacatcaaattcctatgaaaaattcaagaggaatctgtagagtgaaagcctatatgaaacttttgagaaagatggtgcactgcaacaactattcgacaaaataacaaaaacgaagaaaacgaaatataaaattaaattaacataaaaaa

SEQ ID NO: 73742 - DNA, 1186 bp, Glycine max
  Clone ID: PAT_MRT3847_37603C.1
tgcgcgtgtagaagaggtgttttactagtatcattaatgagttttaggttggctaatggctatatatatataaatacacatttggaagaagcggtgattgattggaattaaacagaaacaaaaagtgacttgttgattatgtctgatgttgacgagattccgagtgctcacactattaacctcttgaggtggtgtgatgatgtgccttcagtccttcatcttcagctgaagaactatctatactcctttgagtttctcttggatgataacagctggagagcttctgttcacagatatcagagtggtaagacaaggtatgctcattaccgccagtctgatgacttattggcggatgctggttggcattgcagcttttgcttccgctatatcagcgatttcgtcttcaagatgaaagcctacagccattatgatagagtcaggttctctcactatttaaatcctgaaagaattcagaaggtaatctgcaaagggaccgatttatttgatatgctgccggaggagtacactttcagggatatcattggtaaaatgggaccaataccccattcctattctgcagttcatcttcctgcttttcttctggaaaattctgagaagtataaatttcttttgccgggaaattgcaagagagagagatgatattggaaagtcatttatgatactggcttgtttctgagcttctagcttgtacagctcaagtgactctcctctctcggaggtttttaactgaggttgtgatgattgtatgtcactcgtatagctgtaagctgtgtcattgtccagtgagatattctttgggaattaattaatttcagataaattctttgatcttgggggaattctgtatataatttagagctggactttcattcaaggggagcaacatctctactgatgaggactgaaactgctgttttgagaacgggcttgccttcatgaaatgtgtttatttagtattagggtgattgatccccggatatacgagactagtttaaaattccccactttttcctgtttgggaagttttgttctgcagaccaatttattttctaattattctttatttatgcaaatatctaatccgattggttggtctatattcataacagtgctgactcagttctttgcattatataaatatagtttggttgctttcaattaaaaa

SEQ ID NO: 73743 - DNA, 792 bp, Glycine max
  Clone ID: PAT_MRT3847_37604C.1
acaagaataaaaaacaacatattcaagcgttggaaatataatgcaggcaatcagaagagagacatcttcaacatcaaagtagagcagaaagagaataaatttaatatgcaacacaaaacttccctaacgggaaaaggtaaggttgggaactttaaactactatgtatctggggatcaatcagccacactaatccaaaataaacacaacctcatcatgactgagagaaacattgtattctaaaagctcaatagataaagatgctgctccccttgaaagaagtccaagtctaaattatgtacagaattgtccccatgatcaaagaatttgtcctaaatgaacgaaattctgacaaaataatatcttactggattttgaaataccagtacgagtgacaaaacagtcatcaaaatcccagttaaaaccacaatgagcagctcaagctgcacaataaaactgtgccttaaataacctttccttgatcatctggactctctcaagcaattcccaggcaacagaaatttgtacttctgtgcattttccagtagataagcaggaagatgaactgcagaataggaatggggtattggtcccattttaccaatgatttccttgaaagtgtattcctctggtagcatatcaaataaatcagcccctttgcagattacatcttgaattctcttgggatttaaataatgggagaatctgactcttgtcgttatgactgtacgctttcatcttaaagatgaaatcgctgatatggcggaagcaaaagctgcaatgccaaccagcat

SEQ ID NO: 73744 - DNA, 450 bp, Glycine max
  unsure (1)..(450): unsure at all n locations
  Clone ID: PAT_MRT3847_37605C.1
tcccggggggaccgcacgcggtcccgaggattatgaggnttntcgcactggtcgggggggtcttctttttttctctctcacatcctttctgagtctgtgtaatcaaatccttccccgggaagagtcttctcaccatcgggctttattattatcatcccctcctcttccttccttctcctctcattccatacctcaacaaaacaaggggcagagagtgttccgagtcctggganaggagagnagaaaacctaaatcacagagccatggggggaggagacaccgatgtgagcctcccgagggggaccgactctgcgtgaacaacggcggggtcttcgggggcgccgcgacgaggagcctctgcgccaaatgcgacagcgcgagccgggtgagggagcaagaggaggcgtgnacnaaatccacaatcgaaaccgcgcgctcttctgcgtcctc

SEQ ID NO: 73745 - DNA, 1237 bp, Glycine max
  unsure (1)..(1237): unsure at all n locations
  Clone ID: PAT_MRT3847_37606C.1
atttgttgccaacaacaaacacttcacttctggtttttttttttttttttcatttgagagttttagagggacaatgacgtcttcagtggttgaaggtggacgcgacgaggggaaacacgaaccctcggatttcatcacggaaaccatgaatctgccgtctccaaacctttcacttcccagtgaaactgaaacattcttgagcgcagcaatttccctcaaggacaaggtggtggaggagacttggaaccggagagatcaagtggttgatccgacggtgtacacgggtctgttgggcaccgccttcacttgcttgcggtcgtaccaggttaccggttgccggaacgacttgatattatgcagcgatatcattgacacgtgtgtcaccgctgcacgtgcctccctcaggcacgtgacttttttgtgtggtagaggaggcgtttatgcgcttggtgctgtttttgggtctattctttgaggtggcaaaagagagagccctaccagttggaccagaggganggtggttttggaatgtcatatgatcttctgtatggacgagctggattcttatggggtgcattgtttgtgaacaagcacctaggagatgatgcagtgcccaaagacattttgatgcctatntattgatacagtgttggcatgttcgttcggcagcagcatcggatgattgcccctgtccctcgatgtattgttggcatggaactatatactatatgcgcagcacttcaagcattttttgcagtatagaactgtaaaatttgcagattttgtggatgccgaatttggtgaaaagactgcaaacctaatgcctggttgttgtgttgtagttctgggtgaagaaagcagagtttgtacagggcccctccaagtggatgattcaacaatagccattggatgctggaagggtaaagcaagtttgactatcatggttggtgcattggaatcccaagaactgctggaaaggcttttaatgtgtttagacccagtaacagaaaaggactcctccatgcatgataccaaggtagatgaagcacatgaatcaatcggtaaaaatgaagatgtttaaattgctggttgttaaaaattaataattaacgtatatttatatgccattttagtcatggttcccactcctaactcccatccttataagaacatttagagaaatttaaggcttttgctccacccgtgaaagattttgagtttgtttttttttctcccc

SEQ ID NO: 73746 - DNA, 512 bp, Glycine max
  Clone ID: PAT_MRT3847_37607C.1
ggctcgagtgatgtttaaactataacttgtgaatctgggtgatgtgtgattttttgtgttactatattagcataaacttaatccttattatgattatggggcactctaaaattgattattcacttcagcagttgttctgaagtttaatatgatataggttggtacgcatgcatgtgggagatgaatatcatctttgttctcctcatgcaatgaagagatttccattggcaactggacttttgaattggccttagtgtgtagctgaaccagtcataaactgctacttgttggctacagaaatcaatttccatcatcgagttgggatttttactttaaaatattaaaatgtccggcgttgaagttttagcattacttcattgttggagctttgctcttgaagcaggaacaagtgaaccagggctgcaatagactgactgtttatttaccacaacctcactcatatgtgagcttaactatagctgaatttaacgtcaagctaggatgcaccagat

SEQ ID NO: 73747 - DNA, 1261 bp, Glycine max
  unsure (1)..(1261): unsure at all n locations
  Clone ID: PAT_MRT3847_37608C.1
ttcacttgagagttttagtgagacaacgacgtcttcaatggtggaaggtggacgcgacgaggggaaacacgagccgtcggatttgatcacggaaaccatgaatctgacggctccaaacctttcacttcccagtgaaactgaaacattcttgagcgcagcaatttccctcaaggacaaggtggtggaggagacttggaaccgtagagatcaagtggttgatccgacggtgtacacgggactgttgggcaccgcctttacttgcttgcggtcctaccaggttaccggttgccggaacgacttaatattatccagcgaaatcattgacacgtgtgtcaccgctgcacgtgcctccctcaggcacgtgacttttttgtgtggtagaggaggcgtttatgcgcttggtgctgtcgttgccaattacatgggggaccttcaaaagcgtgacctgtttttgggtctattcattgaggtaatatagatattttggctctgttttcttaatgaatgaaccatgtggccacattttggctccctagcataatctgctgactctatatgttgtcagattttcagtaagcaagtaattaattttgcattgaacaaaattgaagaatttccttctgcttcagtagtctctgtcttatcatttatctttttgaaatttagtttttatgtattctaaatctaaaaatatttttgtatgacttttaagacaatttattgtacaaactaacaaactttgattggataactttgtaaaggttagactgtcagtgcacatattattttctgtggtttgtattttttgttctatctattttgtttcctcttgtgtgagcacgtgtttgaaaatcaaatcaaaggcattcacttgaaccgttgttttcttttgacaaatttgtctgcacacttcattgggctcgcttaaagtgattcgtggttcatacttgttcacataaaaaagctacaagagaaagacgagcgctttcatatttgttgtaatcttaagatcagacaaatggatgttgaagtagtagggcctatagtaggattttttcaaacttagttttctttcatctaccaaaatctgcgcattcacatttcacacactgtctggcatccccccaatattcattcatttattcattaccatttatgatgggattaatgcttangtggcanaagagagagccctaccagttggaccgaggaaggtggttttggaatgtcatatgatcttctgtatggacgagctggattc

SEQ ID NO: 73748 - DNA, 996 bp, Glycine max
  Clone ID: PAT_MRT3847_37609C.1
tttttttttttttagaacaccttgcaaatagctaattagttcatatttaaaccttaaagttctaacagcaccaataaaaagtacacatgttaaactactcacttagaaaactgataggctaaacaattcaacataacatccagactcaacgtggtcctaaaacaactatcaacttactttgcattgcaatgcattccaacacagacatggccctcatcatggtgaactaagttgtgtctgaatagacttcattgttgctggcttcctaccccttcttccagttccagttcttgttccagttctagttccacgagacatcggagtgagaggaacagtctccggaacaactctgaaaatgctcatatcaatgacaaaagtgttgtttatttggccagctggtttaaacacacaggcatcaccctcttcaaggttgctatccaaagaaaaatgtttccacccaccagtgagtcctccattgttacgaatattattgtagctgtatctggcaatccattcacccttacccatgcgcaatatcacatcttgagatgatggagagatatgttttcctatccatgtaccccttattgacacgaagaatctcttgtacacatgcgtgggtttcatgactacatatatactgtcatcggtgcatgctgccttggccaatgactcaatctttctagtctcatcatctgtgacaggccttctatttgatttgtatacctcatatgtcccacttctagatgcagaaacaggttcagcttctagtgcggctacccattcaagtggtctcgcccggccttgccgctgagcggggctccccttccgcttcctatggacatgcttaacagcagaaacaatgttcctgatccttttcccattagcagtttcggagggaacagctgccagagtgactcctccatcaggtgtgaattgctccacaccagaagattcaacaccagcattgaaagtattttcagtaggaggagtttc

SEQ ID NO: 73749 - DNA, 932 bp, Glycine max
  Clone ID: PAT_MRT3847_3760C.1
gctacgcctcgtgcattcggcttgcacgaaaaaaaccctaggagagtcgtgaccatagcggcgcctccttcaccctaatcgattttttcttcatggagtagtgtcataatcagacacagatcatggttgttctttactggcacctccttcacctctttgtggggaatatttgactgtgaagttctgtctttctcccttgcagaggcatccattcctctttctggattggttctaacaactaataacggaggacaatctttcatagactgttctaaatatgaaatcatttggcagtggaaggaggaattcggtgctagttttgggagctactaaaaaaattaaaaagagcaccatctattacagtattttgagatggatgagtgtttggtgtgcgacatgtgtagaacctttgattttcatccattctgttcttgctggctctgacaaactcaccatgggcattcttgaggcaaataccccaacttgtaatctgttgctatgtattgaagccagcatctacattgcacttggaggaggttcccaccgagcaatgttctgattgggtaggcttgtactttctggtttctttcaattttccgattggagccatcctcaaaactatttgcaataacagggagacagtttcgacaagcactcgggagcaatatatcatttgaaaagttaattaaattacatcccatcaattagaattatttgtattatttaaattaagtcattaacggatgctctttgtttgcattaattataatttttaattgaatttcacaaaaaaaaaaaaaaaaaaaaaaaagcgcgatgtttttggttgcctttattaataataattaaatggaattcccttaataattaagatttaattaaaaaaaaaaaaaaaggcggacggtttaaaagaatccaggctaaggaagggg

SEQ ID NO: 73750 - DNA, 285 bp, Glycine max
  Clone ID: PAT_MRT3847_37610C.1
tatgaactgtgcgagagtgtggtgagaactataatctatcttatctttaggagaatatgaacttggttgttatctttcttgctgtagtacattctgtcacatggtcattccatgatgcaaactaccatatggttacctctcctaatgaaaactatgtatcgtgagcattcttcctaggtaaaaacaccacattttaggctttctaaccatgcacacaaaatgcgagcctttaaaaccatacttcattaatgccttgcaccatcaaacgacttctttaacggctaa

SEQ ID NO: 73751 - DNA, 144 bp, Glycine max
  Clone ID: PAT_MRT3847_37611C.1
ggcacatatcagtttgctgatcaacataactacaaacggggtgatttaaaaaaaggatcaatgtttcttctttgctacaattctggtagcaaaccaattccactcataccacttgttccaatttcccaatgaacactctatatt

SEQ ID NO: 73752 - DNA, 155 bp, Glycine max
  Clone ID: PAT_MRT3847_37612C.1
gtgtgttcgggaaagatgagtggtgccgatagggctgcattggaatccaccactagtgtttgggcacttgtgcaaagaagccatgggcttcttccaaagaggggctttttcactggggcagaacaaccacctttggattcaacgccccggccttc

SEQ ID NO: 73753 - DNA, 396 bp, Glycine max
  Clone ID: PAT_MRT3847_37613C.1
gttataacagctaagtcatttacattgtttgaaccattcatgacagaccattttccacatgaatggccagagttcttcacataaggctctcttggcataaaacccaatcttccactcttgaactagcaacttggacaatgtagaaccatcccactcctagcgctttactccttttaaagtcttaaccataaccgaccagggaattgattaaccagcggcgtatcctatcttacgacaacaacttataagcctactccccgaaggatggctcaaggtaaaagatgccgtggctacccttaccaaactctgactgtttgcttgctctaaccccattgaccgaaagcagcgccgctcctatgtcttaccaacaaaaactgtggtcatatatgaacctaa

SEQ ID NO: 73754 - DNA, 267 bp, Glycine max
  Clone ID: PAT_MRT3847_37614C.1
ataaaccggggtcatcttagaacaaaccggtgttttttccccatcttatttcctccaaaaaaatatttaactatttgtgacccataaccaaacaatatttataccggcgacctctacaaaaaattatttatttcctttttccgcacagaatacaaaattttttactcccttggttatagtgtggaaaatataataattttggtgaaaactataatttcccacaaaaaccttattgaacttttcccaaaataaattatttttttttcc

SEQ ID NO: 73755 - DNA, 487 bp, Glycine max
  Clone ID: PAT_MRT3847_37615C.1
tttatgtttttttttttttttttttttttttttttttttttttttttttttttttttaaaaaccgcaaacccccaacaaacgaatccttgacttgcaaaaaaattacaatttttcccgttttttggggcataaagcaggataaagggtaattccccaacttgaaccaaattaattttattgggccctagttcccccttaaccctcccaataataaatttcccaattttttgaccttaagttttgggttttttacaaaagggccagtttttttttggggcgttttgattattccccccgggccaaaataatcctttttttcccccggaagatttaaaacaaacgtttcccccttttttaatggaacaaaaacaaagggggtcatgcccccttttttgggaaacagccggcccatctggggggggggtttaattatttggccctccttcaacaactcccaaaatggcctcctcaggggcccttgcctca

SEQ ID NO: 73756 - DNA, 591 bp, Glycine max
  Clone ID: PAT_MRT3847_37616C.1
ggtctctttgctatttgtctggcttccaatgacaacaaaaccatgccaatgttccatttgacatttgccatctggggactcttgtctgtcagctgctttatagttgtggtttgtgcttcatggtgcccatatcaaatttttcaacaaagcaaccaacgatttcagcagaagactgataagttttgggtgttcagtgaacaaactgaaacatgggttgaagcaaaactgccctatgatctgctctcttgtgttaacggtgactgtagaaaagtggggtcaatacttcagacagataagaagagcacacaagaagtattggagctaaaacacaagcttgatgaacaaaaaagaagtgttgagaataaggatagtaagttggaagcagaggatgtggttctgccccagagaaagagaatttccttgagtaaaatatccgagacatctgtgtggatcactggtgaaagtgggtctatctatgagaggttttggaatggaatggaatgggtgattgtccctcatgacttgcccgtatcagcaggaagtgccatatcaatttttgtcatcaatcagacgattcttgctctatcagaa

SEQ ID NO: 73757 - DNA, 125 bp, Glycine max
  unsure (1)..(125): unsure at all n locations
  Clone ID: PAT_MRT3847_37617C.1
tnntnaaanaaattnctttncttgtttggataacaatgggtatggagggaaaggagatggcaaggacattatgatttaccttatcgggaaaagggaatggtcccattaaattaacattatgattt

SEQ ID NO: 73758 - DNA, 486 bp, Glycine max
  Clone ID: PAT_MRT3847_37618C.1
gttgaatgaggcgagaggaggttgggtgggtccttcccagccagatgcactctcacaagatgctagaatagagagcaatcatgctgcagtaccctcacaaactgataaaatggacaacactttcagtgttgtaccctcaaaaattgccgaaatggagaacaacgatagtgctcttccctttcaatttgctaaaaccaaatgtaattgtagtgctattccgtcacaaggttctattcctgagagcaatcatggtgattgtttgggtgacaatgttgaaagggccctggaacagcttctatcacgcatggacaggatagaagaaatctgtcttggctttcaagagaaaatggtaatgcccatgagcagcattgaggcaagacttcagcaagtcgagcagcaactggatactctgactaagaaatttcagacttctgcttttccatcttgtcctagaatttctgctcttgatgcttcttgtattgaatc

SEQ ID NO: 73759 - DNA, 417 bp, Glycine max
  Clone ID: PAT_MRT3847_37619C.1
ccagggaaaaaaaaaccccccccccccgtaaaaaaattttgggggcccccccaacaaaggggaaaaaaccgggagggggcctccaggtttaaaagctaaattttttaaacccccttcaaagggctaaaaacaaaccggccctcccttgggaaaaaaaaaccaaaaatagggggggggctttttcaaccccaaaacatgggccccccccttcaccttttttttccccccaaaacccccccccccaaacttaaaggcccaacccgggggggaccccccggttttccccccttaaaacctttaagggggtcaaccgggggccccgaaattcctcccgggtaacactttttaaaccccaacctctccctaaatattaaaaaggtgggtttattatccaagccccccccccccgggggggcc

SEQ ID NO: 73760 - DNA, 297 bp, Glycine max
  Clone ID: PAT_MRT3847_3761C.1
aaaaataaaacgggctcccatttataaatttcaaaaaaaaacccaaagtggtatcatctatttcccataaacacccaaattgggcccaggcaaggaaccaacctggtttcccggggacaaaacccagctacgggtttgggatggccatactaacctaactcagggggttccagccacccaacctagtagggttactagctggaccttagccttgattccccatttttttgccaaaagaaatctttcttcccctgggctaacaattcttaaaaagaaatctaagaaaactaatctttg

SEQ ID NO: 73761 - DNA, 401 bp, Glycine max
  Clone ID: PAT_MRT3847_37620C.1
cccacgcgtccgcccacgcgttcgtaggcaatttcaattgagaatgcagggggagaaaaggaaagatgatgctaagtggaaactactagcgaggaaggtggcctcagccaaagtcatgtcttcattgtcacttccaaagaggaagcgagattaataaacatgagtgacgatttataatttcgggattagaagctttatattattttgaatatgtcttttcttattgtatgtttattcatttttcttttattatttatttatattaattatttatcttaattttattttctattgtggtgtgggtgtttaaattttatattttttcattttattattttttatatattaatactataatattaaatctatctttttattcgatatttcaatatatatttgtt

SEQ ID NO: 73762 - DNA, 422 bp, Glycine max
  Clone ID: PAT_MRT3847_37621C.1
ataaaagctggggggaatcatagataaaaaatagtacaggggaaaaaggggaaccccctaaaaattccaaaaaaaaaaaaaaccggaagcttaaagtgaaaagccaggggggtttaaagagggaaataacaaaaattaattgaattgcgcaaaaaaaaagctttcaaatcaaaaaacaaaaaaaacaaggtgcataaaggaatggacaaacaaacggagagagggggttaaaatattggttacaaaaataaaaaaaatttccaaaaaggaaacggaaaaaaagtgaatagaccttcacccgaaagggctataaaaaaaatttgaaaaaaacgagggaaggaaaatatttgttttgtcctcaaagagaggggcaaaaaaaagactgggtatagaataacattataaaaaaaaagagggggggg

SEQ ID NO: 73763 - DNA, 574 bp, Glycine max
  Clone ID: PAT_MRT3847_37622C.1
gacttttaaatttgagctgtttcttcttattaataatggggtctctaagtcaagctactctttttggccagcatgcctcgcttcttcagtttacacgttacttttggtagtgtgatgggatcccactagagtccaaaaaaagaaatagcaataaggtgaatcttatcacattttgtgaacttatgatgatacgtgtgagacgcctctggtgtgtgtctcgcacgtgcctacgtgtgattttttattttgttttttattttttttatgttttagctatggcgggaaatgctttttatttctttatttcttttttggcttgagctttggcctaactatacaggatccattgcctggtgtccacgcgtgatggaaacacgtgtctatagttttcattttttgttttggattttttcatttgttttcaagagaggagaaccctcttttgttttctttttagtgcctaattggctttgggagaaattggagtaaaggcctttggggccttttcctgagtgctttgtattgaattcattaataatgacactgttaattctataatttcttttagtaacaa

SEQ ID NO: 73764 - DNA, 194 bp, Glycine max
  Clone ID: PAT_MRT3847_37623C.1
tttttagaatacgcgcgataactgcttgatattgaatggaatgcgagtctcaggacaagcaacccggctttttctgcgggaacatctaaggattgccgattgtctggcgtggaggaaatactaccgaaatgtgagccggtaaatccgagatggaacgtaacactcttttgctcaaactccactgggagaacctt

SEQ ID NO: 73765 - DNA, 1287 bp, Glycine max
  Clone ID: PAT_MRT3847_37624C.1
cctgctcacgcgtccgcccacgcgtccgtacggctgcgagaagacgacagacggggaaaaacaagagattttgaatttgaaatactcccgctcccgtctccatatatttgcgaaccctttttctttgtgagagacccgttatcagagaatccagaaggcgaagaagaagaaacgacagagcaagaaggaaatggcgaccaacattgggatcatggatgcggcttacttcgtcggcagatctgagattctttcttggatcaactcaactctgcaactcaatctctccaaagtcgaagaggcatgttccggcgcggttcactgccagcttctcgatgccgctcatccagggatcgtgcctatgcacaaggtcaatttcgacgccaagagcgagtatgagatgattcagaactacaaggtccttcaagatgtcttcaataaactcgcgatccccctccacatcgacgcccgcaagctggtgaaaggaaggccactggataacctcgagttcatgccatcgatgaaaagaatccacaaggcgaagaagaacaaacgacagagcaagaaggaaatggcgaccaacattgggatcatggatgcggcttacttcgtcggcagatctgagattctttcttggatcaactcaactctgcaactcaatctctccaaagtcgaagaggcttgttccggcgccgttcattgtcacgtttgcgataagactcaagaagggatcgtgcctatgcacaaggtcaatttcgacgccaagagcgagtacgagatgattcagaactacaaggtccttcaagatgtcttcaacaaactcaaaatcaccaagcacatcgaggtcagcaagctggtgaaaggaaggccactggataacctcgagttcatgcaatggatgaaacgatactgcgattctgtcgattccggccttcagtacaattataatcctctggagaggagagaggtttgcaaaggaggaagagaaacgagcaagaaatctgcaaactcccaagcctcaaccaagggttctactgcacagagacctcattcttctcataatgctcgaagaaatgaggtttctaatgcaaaccctacaaatcaggctgcaaaggttgcgagagcagcaccttctgctggaaaccctgctcctgtgtatgaagaaaagataacagagttgaaggtgtccattgatagccttgagaacgaacgagatttttacttcgcaaagctgaaagatattgagatactgtgccaaaactctgagatagaacactcaccgattgttgc

SEQ ID NO: 73766 - DNA, 130 bp, Glycine max
  Clone ID: PAT_MRT3847_37625C.1
ctaggagctcttctccattggttcttcatctgcatgcacactcttgcatagtcatggctaccatctcttccagtcaggtagcatcactcagttgtccctctcatggagacaatccatgacagcggtcgat

SEQ ID NO: 73767 - DNA, 281 bp, Glycine max
  Clone ID: PAT_MRT3847_37626C.1
ccacgcgtccgatgtctatattatggaataacaattatgattctcaatgggcaaggctcctttctcctttcgtcgctccgcctctcgcgggcgtcccatgaagacagacgccacgacttctacttcctatgcggcggaacatcactacgccgccgggttcggcggcttactcgacgacaacaaccgtgttatcgccgccgccatcggcagcagcgccttgacgaaggcaaagaagaagaccggcaacgtccgcttgtggatgaggcttgaccggtccggac

SEQ ID NO: 73768 - DNA, 318 bp, Glycine max
  Clone ID: PAT_MRT3847_37627C.1
tgggaaacctcatttcactccggggtgtccattttttttaaacgtatccaaacataaaatttaaataaacaaaaattcatctctctacctataggatccaagataacttactgcctccttgcgactttataaactataaattagtgtgacctaaattcaattaacgggccattttttttcatctctgtaactgtaattaccactccttataacaattacataatccttatctacatctcaatctcaccatttggtttactatcgaatagaccctaatttaccttcctttttaataacatcacagccttaattattaat

SEQ ID NO: 73769 - DNA, 523 bp, Glycine max
  Clone ID: PAT_MRT3847_37628C.1
gaggatgcaatattcaatgcctttgtactttttttttactgatttactattattaaagggagaagaaaaattatctgattaaacattattggttagcatcagttagtaatgtttctaacttgacaccatttatttgattattgtagaatctttagattacaataagcactatttgatcgaaatgtcttgtagtcttcgttgtaatttgtaaatacttttgtacaataacatgtcagtttgtgcctgtatatatgacgcatgcttgtttctttagttcaaactttccttttaataagtatgtagtatcatttctgaaaaaattgttcattcactattataggtaaaatatattgatagttattctgttaccatccaagagttagaatctgtaaccgccaaatttaagttcaattctatgatgcgaggtaacctccttttattttttcttccttttcactggtgtattgacctcttaatctttaccttgctgctaatgttcgagcctcatgcagtcatcataatg

SEQ ID NO: 73770 - DNA, 454 bp, Glycine max
  Clone ID: PAT_MRT3847_37629C.1
cgtaagcgcggaattcggagcgaggtcttcgaaggctttagtgaaggatcaaggttgggtctttctcgttgcagttgatattatctgtactacttaatctaatgccagctgccatactttgtcagttgctcaaaagtcatttttggaacctatgatcacttttgctagagttttcccagaaaacttaccctctacacataaccatatgttatgtttgggcaagttgcataaaatctttcaattttataggactgaattttgttactttttcatatttacctgctccattcttatgtcaattgcaggcaaaggtaaaagtagtgagaaggcaaaagcagaacctagtaaggtggagatgcatcgagtggctgttgatattttgaaggaagtagatttcaataaggtaagtaatgattttctatgccaattcatgtatcttttttcattgatataa

SEQ ID NO: 73771 - DNA, 156 bp, Glycine max
  Clone ID: PAT_MRT3847_3762C.1
gggcactcatcccatcattcttagagattactttacagagtgaggctactctaatccgggcaatcattggccaagctaaatttgccgctacatctgctaaactttaacaaacttttgccactaaccacaacctttattgagcttatttcatttcct

SEQ ID NO: 73772 - DNA, 993 bp, Glycine max
  Clone ID: PAT_MRT3847_37630C.1
atttagtcatgttaactactcaggttctctttcacccacatttggtagcaagaagaaaaatgctactcactgtgtcatgcaatgcagaagacatgttgcttccacgcggtaattttacattttctgatacttgctgtgaagaaactagacaagagagtttctaatcaccaaacaaatgatgagtttctcgaattgataaacagtattgacataatccggcatccaaatattgttgagcttattgggtactgtgcatagcatggccaaaggcttcttatttatgagtattgcagtaatgggtcgttgcaggatgcactccattcagatgatgaattcaaaacaagattgtcatggaatagtaggtacaagtaaactgacttttacctacagtagaccgtaggtacaagtaaactgacttttacctacagttagagattataggtataaattaatattttttacctacacatttgaaatagtaggtgttacctataatgatagttaaatttgactgtaggtaaaaatatatccgtaggtaaagcctatagtgacagactattagttgtcactgtataccccctcaaaattgacgcaaaaaacgtctgtaggacaaagtcctttatacatctacctacggattttggacttctagtgatagattttgactgtaggtaaaagtcattttccttgtagatatatttttaaattaaaattataatccttaaaattgccttttttattctttggagaactctggtagccggtttcccaacatagatcgcatggtttttgaatactcaccttttatgagtgggcccatataccatccaaacatgaagtcaaggcccctacatgcagcgtctcgataacatttctctttagaaaccagcacataccagtcagaattcaaggtaatccctattaaacccttttgagatgcctgcatacacactcatttaactcgtatttgctatttttgccttgagttacctg

SEQ ID NO: 73773 - DNA, 427 bp, Glycine max
  Clone ID: PAT_MRT3847_37631C.1
gaaagtcttctctgcattatgtgagttcagatcccctcctaactgcaggaggcacaaatgggtcagagtctccaccagatcatgacaaggaattgtcttctgaagcagatccacttgatgaggtgaaggatatgaaggacttcagttgtaataaatataaggatccgttcaagagatctaggagtgcttctcttgtgggaatccaaacttataagggaggatctccaaggtcagagttccacactgctgaatctgagaaacatggtgaaggatttcgaggaaagagtagttctgacatggttgttagaagagaggcacatgttgttcccaagcttcggtgccgggtgttgggagcatattttgagaaactaggatccacttcttttgctgtctattcaattgcagtgactgatggtcaagagaaaac

SEQ ID NO: 73774 - DNA, 685 bp, Glycine max
  unsure (1)..(685): unsure at all n locations
  Clone ID: PAT_MRT3847_37632C.1
gggacgtcgcatggcaccgccgtaccgtaagccttggnatgccctctagnagcggcgccgccctnnttttttttttattttatttttatttatttatttatttatttattttatttttatttttatttttttttttattttttttttttttttttttttttttggggggaaaaacaaaaaacgggccccataaaaaacaaacagaaacaaaaaggggcccggcgaacaaaaacccaggtggggggggggcgggtacaagaaaagggggggcccttaaaaaaaaaagggggaaaacaaacccccaaaacccgggaaagaaaaaccccggggaggggacaaggttttttgaaaccccgggggggaacacagggggcagcaaaatggccaaaagggaatccctttttttgggggggggcctttgggaccctgggcccggggggggcttttttcccaaccctttggggggccccaacaggtaggggggggcgcggggcccccacaggaaaacgaccaggggggggagccccaaagaagggtccaccccccgggggggggggggggaccattttaaccaaaccagcatccccatttttaaaaaagtgggggcccttttaaaggcccttaccaaaagggcggggaatttgggggaaaatttcaaaaaacttcccaacaagggggaaagggg

SEQ ID NO: 73775 - DNA, 2364 bp, Glycine max
  Clone ID: PAT_MRT3847_37633C.1
aattcggctcgaggctcgcgcaggcgcaggagtgcgtcttcgagaacaccattgccaaagggagcactcccgaattctgtgccaagatctaaaggcaggttgggatatattatgaggaagctttagctgcgctcaatgttgcacccttgagccagcattttgataagtcctggatagttcacgtgcagttaaaggcggcactgttttatgcggaagcttgttataggtatggattggagctgcatgataaagaggagatagcagaggagattgcacgactgcggagtgctgttaatgtgctgactgaggcgaagaagagctctaagggtgctgcagcgcaaattctagatgcaattggaaagttagaggccaatattaaccggaaccttgaaagggcagtcaaggagaatgatagggtttacctcatgagagttccttcaccaagttccttacagcctcttccggcattttctatggttaagtccatggtgatgaatgagatgctagatgcaagcaaggagaatatgtttgctagtcttgttccagacaacagtgcaaaagccctctcccggtatactgaaatggtagatgacgttataagaacacaagctgaaaagttgcagcaagctagtgagttaacccgagttaggcttctcgaaatggagctgcctgaagccattcttgctttggaaggaaattcattgagcaaatcttgtctcaaagaagatgtggaggctgtgcagatcagtgggggccctgctggtttggaagcagagttgcagcaacttaaggacctaaggagggtgaatcaagagttgctggtccagactgaggaattgttgcagaaggaagcaagggaagattctcaatttagaagccaatttggcactaaatggaccaggcctcaatcaagcaccttgaccaagaacttgcaggataggctaaacaggtttgcaggtaacttgaagcaagctgccgaaagtgatggtaggattgagcgttctgttagagaacattcagctctcatgtcgatccttgatgcccgtccgattgaatctgcacttccaagcttggcaaggccgattatgtcttttgatcaaaatgaagatgctattgtgggatctctcaagcaaagcttgaggcaactagaaactctaggagctcaaagggctggtcttgaagatatgcttaaagagatgaaaagaaaggatgatatattacccaagttgatgacatccaccggttcttatgatgatctcttcaagaaggagatagcaaaatatgaccatatttgtgaagaaatagctcaaaatatcgaggcacaagagcaattgttgctgcagatccaggctcaaaatgatgagttttctgttatctttaatctcgaagattacaaagcttcacgtgaaaaagcctacaaacagattgaagctgccatagcaaaatttagagaaataaaggacaacatcaatgaagggttaaaattctatgttacgctgcaggatgcaatcacaaatgtaaagcagcagagcaacgactttgtaatgacgcggaacatccagtgcagggaaatgattgaagatgttcaaagacaagtggctggtctgagtttccaggataacaaaaacacaggtggttttaacagcaactacccttcagtgggaagccaaaatcaaagatcccctacacaaacagatccggctcgtccccaagcaccttactatcagcagccagttgagcagccaccagttcctccctatggccatcatccccctcccccatatggtggtcctgcacaacatcatcagcctccacctccataccacattccaccatcatcaactgcaccatacccaccccctcaggttcatcaacagccaccagcaaaccatgagtatggccaaccagcatatcccggatggcgtggtccgtactacaatgcacaagcacagcaacctggttctgttcctcggcctccttataccattccatctccatatcctccgcctcaccaaagtggctactataagcagcaatagtgttcatccatacatcttgtaggataaagagaatattctttctgatgccattatctcttgaataaatgagattcagccctttatcttataaaagcctttgcattgagtgaatcttttgtagtttctgttttctttctttatggtttgtgttggtttgcgtcatcattggattgtgtgcatagttgatcttaatacaacgttgtatgtatagtttgtttgacttgtactttaagagggaattctcccaccagtccgaataggaaatataaaagctttactggtgcatttgtgacatagtatcatatttaattatttattgtcagaa

SEQ ID NO: 73776 - DNA, 351 bp, Glycine max
  Clone ID: PAT_MRT3847_37634C.1
acggctgcgagaagacgacagaagggggaaattccaattttcaacattgtcccctacctttcccacaggttaggccttcgtctttattacctgacctgtgctaccacccaatcacctttccttccattatttcattccattccatatctcaccattcaccaacaccaacacaaataataattcaattaactgccacaagatactccaaattagaagcttgtagttgttgataaactttgattggtatctccacattttttgtggtagagttgttgggaaaaaaaattcaccaaaaaaaaagaaagaaaaaagcatagagacaaagaacttacttggttagggtgattgatg

SEQ ID NO: 73777 - DNA, 814 bp, Glycine max
  Clone ID: PAT_MRT3847_37635C.1
accacacctcataaatctccctcacacattaatctcccttctctcactcacaccacattactattactactactacatcatcatcatcatcatccatggaacaagaagataacactatcatacccacattcctcagaaaacctgcagcagaccagaacaacaacaacaacaacaacaacaactctcccaccaccccttctcacaagtctttgcatgttttccgccgcagcaggaggcggtggaggaaggaagtggcagtgaaagaagatgaagatgttgatgagggtgatgacagagaagagatagagaggaagattcatgcattgcagaggattgtgcctggcggtgagtctttaggcgtggacaagctctttgatgaaactgctggatatattcttgctttgcagtaccaagtcaaagccttgagggctctcactggattctttgacaagctggagaaggagaagacaaagtttggaggttgatgatgaatgaatgaaaatgaataatccatggtgatgatgatgatggattatggaagcaagcagcctaggttaggttcttttggtttttcccacagaccccattagttagaatttttatttttttattttcttcttttaatttttatgttttcctttgttgtacttttggaagttgggatcaaggaaaatgtttatcccatgatcggtgttcttagatttttattttttaatttttttttttgaagttctcatcagttagttctttctttctttctcactgttttctttttttcacgactttatctatatatcttgaaagttgatatatt

SEQ ID NO: 73778 - DNA, 508 bp, Glycine max
  Clone ID: PAT_MRT3847_37636C.1
cgccacgcgtccgcttctcgtgttatttcgctcgctgcatgcatggggatggtgcctgatgaacgatgcgttaagaatcgctactggattgaacgtacaacggacttggccgtatagccaatggtgctggattcccacacctttgttcttaacgaggaggatagacctaaagatttgtacctactaccaacatatgaaggacaatgatttgtaaaccttggagcacgtgttgcaagattcacagttgagttggccaagaaagctggccctgtacttgctgtgtagtttattgagagtgctactaaaaagaagtgacagcatcattggtcaccacatgaatgtcaaggtcatgtgcgctgacctcacttttcccaacttgtatattgctgaaggatcggctgatctgctattctgctattgggtattcatgtgtgcctcatagactgaggttgcgaactctgctgctaggatgatcgtatggtataaaggtgacgcatatgtactcttc

SEQ ID NO: 73779 - DNA, 149 bp, Glycine max
  Clone ID: PAT_MRT3847_37637C.1
cactagccggcggccgcccttggctcttggcattttaaagcaaaaaccgttctaaaatgtttagcaacaaagacagcaagaggggcgacggggaaaaattagaatcgggagaatgcctctcccacaaatgtaagggacaccatgaccca

SEQ ID NO: 73780 - DNA, 687 bp, Glycine max
  Clone ID: PAT_MRT3847_37638C.1
gcgcccacgcgtccgatcacattactacaactacatgccatcaccatcatccatggaacaagaagataacactatcatacccacattcctcagaaaacctgcagaagaccagaacaacaacaactctcccaccccttctcacaagtctttgcatgttttccgccgcagcaggaggcggtggaggaaggaagtggcagtgaaagatgctgtgcaagaagaagaagatgaagaaaaagaagaaggagaagatgggggtgatgacagagaagagatagagaggaagattcatgcattacagaggattgtgcctggtggtgagtctttaggtgtggacaagctctttgatgaaactgctggctatattcttgctttgcagtaccaagtcaaagccttgagggctctcactggtttctttgagaagttggagaaggagaaaacaaagtttggaggttgatgatgaacatcaacgtgagatgatgaatgaatgaatataatccatggtgatgaccatgatggattatggaagcaagcatgcagcctaggttaggtccttttggtttttcccacagacccccattagttagaatttttatttgtcttcttttaatgtttatgttttcctttggtgcacttttggaaggtgggatcaaggaaaatgtttatcccatgatcgatgttcttagattt

SEQ ID NO: 73781 - DNA, 630 bp, Glycine max
  unsure (1)..(630): unsure at all n locations
  Clone ID: PAT_MRT3847_37639C.1
ccacgcgtccgagacattataatctcatcacgagttttggatcttttacttcgagattgatgataattgatcaatcctctagctgacgctagcttgcgaggagtgaatcagtcgctccctgccaggtaaccatacttgaccttgaagttaggaggattactccgggggaccctcgatgaggtctcgttgaggtatacgaggccgaccgctgtggatctctgcgtgcaagactgaagcacggtctgtgtcttaggctctctccaggatcgttgctgtgtgaatgcccattgccgacgctgagactgtgctcattttcttacatgcactcactgggacctactagcacagacttcatactctggatcttgactcaagccgtaggattacttgtcacggggatgaagatatttatgaatgtgctggccactatcagatggaaatcttcagcttagcataggagagatcattcttgatgatgacgggacacttccgactcagccagctcttcaacatacctgtaataactgcatgtgctgggcggttgaccctcaccaatgatgctctgcactttgagacactgngagttgttgtatatgagagagctaggctatatgatctgagcacagacat

SEQ ID NO: 73782 - DNA, 427 bp, Glycine max
  Clone ID: PAT_MRT3847_3763C.1
aaggaaggctttcccgatcatcagctgtatgacgctccatccattcgtttgggggggtgggtggcgggtggcggcgtaagaagggaagatataagacgttgggagggtatacgtatcgcgccgccgtggggtaacaaaataaacggataggtttggtttgcggctataccgggcattaaagatatgcaaggatgaaaaggcatagaaaaccaatatgaccaaaataaaaactaaaaggttaaatcaggaggtgcccaacacgtaaattataagaagatggagtaataccaaaggtcgggcgcggatttagaagattcaggttgatgcgtatgacgtgtggtaaataatattaatggctaggcagtaagattgcgacggcgaaatagccacgtgtgtgcacatattagtactacatgagcacggattt

SEQ ID NO: 73783 - DNA, 308 bp, Glycine max
  Clone ID: PAT_MRT3847_37640C.1
cacacaccttcaatcagatctgtagtggtaccctttatcgtgccgtttgtgaagacctatgaaatgagctccctattgaccgcccggctgtccacatggcctttcacatatactatgatcattatcacgggcataagcacgatgtgaacacccttgaaaacactcgttttcatgattgttttaaggattgtaaagaggatagaaaaattgatatctgtcatcataactgtcaccataaatgggtgcagagattggcgcaactggcctttccacctgactgtgcaactgatgggtttaatgacccatat

SEQ ID NO: 73784 - DNA, 471 bp, Glycine max
  Clone ID: PAT_MRT3847_37641C.1
tcgcctttctccaaaattccccttaatttctcacactttctttcttttttccactctaaagtcaacctcatttcaatttcaatttttctttctttatatctattttgtttttttttctttctcttgacagagaacagaacaaaatggaggaagaagcgaaagagagaatcctacaaacgcaaccagaagcgtcacggcggcgacgaagacgactccgacgacgacaacgagcccgacgacaacgacgactccgacgaccaattccgcagccctagcgcccaattcgcggacccgcagcgcgtggagatcgaggtcgtgtcgcccgacggggtccagaattcgcggttcccgccggcgatcaggcgcgccgtgacccgcccccatgcggcggtcacggcaatcgctgcgctggaggccggcggcgacaaatcgcaacacagcagcatttcggttctggagaatgtgtcgcac

SEQ ID NO: 73785 - DNA, 397 bp, Glycine max
  Clone ID: PAT_MRT3847_37642C.1
ttggtcgtcttgtctcgattgagagggagaggggtaagaggtggtggaaggtgaaacagaagagggacttggcatccctcctacggaaatcatggtaccatctgaggttgtcggtgcgagacccgtgtcgggttccaacgtgggatgccattttgcttaccgccgctagcccagaacaagctcagctgtacaactggcagctgtgagcgggaccaagcgcatgggtcggatctctgcctccaccttcaccctcgccgtccccgaccccctcggccaaaggatcggatccggcgccgccactctcaatgccatccacgccctctctcactgcattaatcatggaagtgatattgatgtttctcttttggccaggaagcatatactgttgctgcatgct

SEQ ID NO: 73786 - DNA, 541 bp, Glycine max
  unsure (1)..(541): unsure at all n locations
  Clone ID: PAT_MRT3847_37643C.1
gtttctctgtgtcagcttctcaaattttaacaatggctgcattgtcagaagcgccattcttttcttcaaagcctcacagcactaatctccctcccaccaagtttcacactttcccctcaaaacccatctctctcacctttcgcagtacgtatactccttgtttcgcaaatgcttctccttctcttctnctaatccggacccgggaaccgactccgaccctgacccgacccgagaccgccggagaatcgttcgggtcgcctgggagaagatcgtacgctggtccaggtcttggcgctccaaggccaacaccgacgtcctccaacgcacaaataacgtggttgtacttggaggagggtcatttgggacggcaatggctgcccatgtggcaaataggaaggctgagttagaggtgatcatgcttgttcgggaccctcaagtttgcttgtctatcaatgagaggcactgtaattgtaagtacttcccggatcatacgctgccggaaaatgtagttgcaacaatggatgccaagtctgctttgctt

SEQ ID NO: 73787 - DNA, 724 bp, Glycine max
  Clone ID: PAT_MRT3847_37644C.1
ctcgagccgatcaggctcgagcttcgtttcgttataaccctagctgggaacaaataccatctctcgtccattgtctgcgtctcactcatcctctcccttctcttacattgttcatttctcaactctttctctcttttcttccaaaccctaatctggattagcctctcatcggatttcaattctcacggtcttcaccgaccgccagatctcttagcaccgctcttcttttcatcgattaaataacaaaaaattggcttaattttattctaacatcctaagcaaaaactaacgttttcacccgattttaacattcgagagaagagttagtttattttattgtatttttttattaagttactgtttctatttaaatcgataaacggcgaggtcgagcgttagaattcgaaatccggagaaaaaaaattacaggtattattatcaggggaatcgcgtggaagcgttgttgaggagagtgttgtgtttgatctgaggaagaagaaagaaaaaaaataatggtgggaggtggaagcaggagggatgaagggtcgttggtgttgaacaacacgaacgtgtttgcagcgctggatactctgaagaagaagaagaagtccgataaggagaagaagagcaagggctcgtcgacgaaatcgcaggcccagtccgcgaaggctgaggccccagtgttttgggccccggcgccgctgaaccgccaagtcctgggccg

SEQ ID NO: 73788 - DNA, 169 bp, Glycine max
  Clone ID: PAT_MRT3847_37645C.1
gacaaacacatggctttgtacaatcagcaaaccgtcgattacaccagcttcaatcgcgtcatcgtcgatgactgtggcacaggatagactacctacgtgtaaaggcatctcactggtggattctcgtacaactgatggaccgtaccactggtgtggtggttcatccgtt

SEQ ID NO: 73789 - DNA, 295 bp, Glycine max
  Clone ID: PAT_MRT3847_37646C.1
tcacccgaaaggacttgctgcggggggaactgtggaggcagaagcgcctgcacatgcgcgaacaggggcggaggctgtgcaagtgcccacactcgagctacacccagagaacacaccgccgagacgctccggatcggagcggcggcaccaaaggctgctcactgcaggcctgctgaaaggggggggcccgctgacaacgagggctgcaaacgtggatccagccgcgcctgcggcccctgctcttgcaagtgagggcgcggagagctaaagctgcaagcagaaatggcccttagaa

SEQ ID NO: 73790 - DNA, 652 bp, Glycine max
  Clone ID: PAT_MRT3847_37647C.1
taatgtaaatcgaatgcaataattacaaagtggattaaaaaatacaacaacactcttcagttttaatacattgacaaaattatttttacctgacaaatttacaaacatggattaaaagaacaaaacaacactcctcagttctcactcccctcaagttcaattacattcttcttgtcacaagcacatgattgattaagcaaacgcaaaacactcttttccaccttgacgtttcagcatcaacttttttcagacgaagaatcatatttttcgaacgtaactagaatgctctcaaagaggggaggggggaagcagagaatatatcaaatgcttcatctgtttttaccactgggggcactagtactaccttttacttctattatactgttgcttatgattcagatgctaaagatgaacaacttactttatattttggaaggtccgaacggcaagaattaaaacgatggccctttataacagacaaaacttaaaaggcttaactttactttcttagtcaaatggacacgccatcctcaaattaatttgtgtcgcattatcataggcttattccccttcatacattccattttcctcctctcaattctttttttttctttcaataatttcccttcaattatgaaaggcaaaacagccc

SEQ ID NO: 73791 - DNA, 457 bp, Glycine max
  Clone ID: PAT_MRT3847_37648C.1
ggaactcacaactattgtcctctgttatagagttaacatttctatgtgactgccttcccctatgaagtctgttcagcagtcaatatagaatgaaagtgctgcgtttgtaaccgcatttcgtttgtgaacttaacataatttcacttccagacgaaaccgttcgaaatatgcaatatacgtctacttttaaatcagaagaaacggacaatcgacagttttcttctgagatgaacattcgctagtgaaacaagtgcaattcttaggtattgtgtacatttggtagctttaaattagatgctcaaaacgataactgtaataacaaattcgaacaaaaaatattaaatcaattttttgatggtgcaacgggtctccttcaacggtcaaaaaaaaaaaaaaaaaaaaaaaaaaaaaaaaaaaaaaaaaaaaaaaaaaaaaaaaaaaaaaaaaaaaaaaaaaa

SEQ ID NO: 73792 - DNA, 468 bp, Glycine max
  Clone ID: PAT_MRT3847_37649C.1
ggaaaaatttatcaggaatcaaaaagcaaaagttggatatatatcagggatcaaaaatatatttaagccttgaatttaaattaaacacgattattataagagtgagagaatagtatctacacccttcaagcatcgcttatgttggacaagcagaaaaatgtccaggttttgttatattatgttttcagtccatgcatgttaacagcattaaccttttgggaataatggaggcttagcttgtttgaagtggatcttaatacaattttgcacttgatgtatgcttatgtgtatatgattgcaattgtacattggttggagcattagtagtaagtgcaatcatgcattcttggagttgtcttaactataccactatgatagtagcaatttagcagaacagatttcctttgaattttaaaatgtttttctaattatttctgtatggttaaattttaacaggacatgtgaaat

SEQ ID NO: 73793 - DNA, 719 bp, Glycine max
  Clone ID: PAT_MRT3847_3764C.1
ctcgagccgaatcggctcgaggaagaaccctgcatttaagccacctgcggattataggccccccaagcttcagaagaagctttatataccgatgaaagaataccctggttacaatttcattgggcttattattggtcctcgaggtaacacccagaagcggatggagaaagaaactggtgctaaaattgtgattcgtggtaagggatcggtgaaagagggtaggcttcagcagaagagggatttgaaacctgacccttcggagaatgaagatttgcatgtgttagttgaggcagagacaccggagtcgcttgaggctgctgcgggtatggtggagaagctcttgcagcctgtggatgaggtattgaatgagcataagaggcaacagcttaaggagcttgctgcgttgaatgggacgatcagggatgaggagtattgcaggttgtgtggtgagcctggtcatcgccaatatgcgtgtcctactaggacatcaacgtttaagagtgaagttgtgtgtaagcattgtggggatggtggtcatccaagcatagattgtccggtgaagggtgctactgggaagaagatggatgatgagtatcataatttccttgcagagttaggaggttcggttcctgaatctgcaacaaagcaaaccagtacattggcagtgggggcaggcacttcttggaagcaatcctccttgggctaacaattttaatact

SEQ ID NO: 73794 - DNA, 444 bp, Glycine max
  Clone ID: PAT_MRT3847_37650C.1
acgagggatcgtgtgggtcgatgaacctctaaccctaactttcagttgccttcaggcaaactttggagttaagaaatggagagggacatgatatcgactttgccgaaaacaatacttcatgacattctgtcaaggatgccagaggaagatgctgttaggacaagtgttttgtccaaatcttgggcggaagcgtggtccacgtatcccatcttgtatttttctgatactatgatcgtggggacgtttccgcggccgtgggaggattttttgaggaaaagaaagaacttcattgatcatgtaaagagaacattgctgaggttccatacccagggcttagcaatcaaacaatttaggcttattatcaattttgaccttcagtacatgtccctggatgtagatcattggttgaagttggctagtgaaagtggtgttcatgtactggaa

SEQ ID NO: 73795 - DNA, 465 bp, Glycine max
  Clone ID: PAT_MRT3847_37651C.1
gactgattaagctttcaaagagagatggtgttgggtttgcctcagatcaagcctcctagtgaagtatgtgatggttgtttacaatgtaagcaatcaagaagcactttcaaacaaaatgtaccaatcagggcaaaagagaaacttgaggtgatttactctgatgtgtgtggccctatgcaaactgaatctctgggtggaaacagatacttcatatcctttattgatgaattgactaggaaagtatgggtttacctaataagaaggaagagtgatttctttgaagtctttgagaagttcaaaaatatggcaaaaaagcaaagtggctcattgatcaagatattgagaacaaatggtggtggtgaatatgtttctacagaatttcaagaattttgtgatcaacaaggcataattcatgaagtgactcctccctacacacctcaacataatggagcagcataaagaaaa

SEQ ID NO: 73796 - DNA, 473 bp, Glycine max
  Clone ID: PAT_MRT3847_37652C.1
ctttttttttttttttttttttttttttttttttttttttttttttttttttttttttttttttttttttttttttttttgggggaaaaacaagaaatattttcccaagaaaacttggaaaaggaaaaaaaaaaccattttaaacatattttttggggaacccccccctcaaatatcacaggggaatcaattcggggattccaaaaacaaggccctaaaaaaatctctaccctaaaaaaggtggaaaaactacctccttataaaaaacccaggcccccccacttattgggggcaagggcccaaaaatttcgggggggggaaaaaccctgaaattggggatatccttccgccccaccccaaccccaatttgagggggcttaaaacccccctgaaaaaccggttgcggggcaaaaaggggagtctgaaccgcctcctcatatgaaaaggaaggggcatttttcatttttttttcc

SEQ ID NO: 73797 - DNA, 270 bp, Glycine max
  Clone ID: PAT_MRT3847_37653C.1
gcacgcgtcgagcggtggtgagctggtaatattcataaaatactggcctcttttgaaatctgagagctgttaacacaggttggggaaaaaagcagacacgggttaatcagatgaagagagaagagcattagggagagttgggcaggggtgagcagggagaggtttcctctatgagggaaaagagcttaactttctaattatcacaccattaataaggaacaagttacatacctttactctagatacacaaaaccacttttccacccaatg

SEQ ID NO: 73798 - DNA, 432 bp, Glycine max
  Clone ID: PAT_MRT3847_37655C.1
cctatatctatatttacaacattttatactactactgatattggggctactacgactgtttctactgccacagagtcaatcactcgcttaccataatgggtatgtatagccatgaccccacttcctttcactcttacattgcccttctacaatagaggtttatacatcttcagatagtaaaagaaatgacgtatgataggaaacttcacaagatgctcaatgaacctaaacaatacacttccaacaccaacacctttaataatcctacttatcacaattccaacaattctatcctctctcacccttaaattattattccatcaaagtcaccacccacagttactctctctatatcaccaacattttaacataagcaaacaggactaataaaagtgcttaaaccacctgtatcaatgaaactatcacattcac

SEQ ID NO: 73799 - DNA, 271 bp, Glycine max
  Clone ID: PAT_MRT3847_37656C.1
aaagttatttcaagatcattagaggtcaaaatgactgcaccattgaatcaagacgtgtaactgctggtttaccaaaaattgccggacaaaacatcaagtacccagttgaaacttcaactgttattgatggtgccagacaacaaatcgccattgacgaagaagttatcgaaatcgccaagtatggtgtttcacaacttgctgcatcaagaggcattaaccgtttccatggtgtcaaacaagctttcgctcaagtccaaaacggaatcgttta

SEQ ID NO: 73800 - DNA, 1092 bp, Glycine max
  Clone ID: PAT_MRT3847_37657C.1
tccttttttttttttttttttttttttttttttttttttttttttttttaggagggaacttttatctatccataacaaaagccagtccgaaagagggccagatggaaattataacttaaaatccaactctgataaagactgtacaggtcaacaaaaaaatgtacaaagggagcccagcaaaggctataaatgatagggcattatttattcagggccttcatcatcctcatcatcttcaacattcccaacatcatttccaacgccttcaagcagtttatcaacatcctctcctaactcgagcaatctagcactaagtctatccaccttgctctgttcttgccctaggcatacaagcagatcattcagttcaccttcactctccttctgagcttcctcccttgcttcagcttttattgcctccaaatctaggaatgtggagggtgctccacttttcaatgctttcacctgcttctcctgttctatgttagattgctcaagactattgtaggcaccagaaagactccttagatcagcttccatcttttcagctaaagtccggttctttcttgcctcagattcaacttctgctttttccgccttcagcatctccaatcttttagacgtttcttggagatctctactgagtgcgtttatctggactttatctgagctcccactcactctttgctcagattgtgaattactacccccacctgtcctagccaggtcttcagccaaagaagcattcctagaaaggaggtcctgtatttcagagcattgcttctcaagaaaagctttcagccgccttatgtactccccatcactttcccccatcttctgctctaattctgctggcaccactgccacctggacttttggatgactaaaggcctccacaatttgttccctgatatccgcctccagtcctttgacaagattcacaaaataagaatccaatattgaagacagaataggatgatccatatttttctgttcagacaggtcattgttgtctgaatctgcaatatcttccatgctagctgctgaagatctagtgaatgatttaaggtttagagatgactctatattagc

SEQ ID NO: 73801 - DNA, 516 bp, Glycine max
  unsure (1)..(516): unsure at all n locations
  Clone ID: PAT_MRT3847_37658C.1
cctagagttgatttttgcatccatcacagcacataatggcaaaccagttccccgaatctttagctcccagcgaggaggacgttcaacgcctcttggctacacaggcccacatcggtaccacccgtttggaggccgctatggagagatacgtctacaagcgtagctctgatggcgttcacttgatcaacgtacgcaagacctgggagaagctccagcttgccgccagagttatcgtcaccatcgaaaaccctgccgacatctgtgtcatctcttccagaccccagggacagagagccgtcctcaagttcgccagatacaccggtgctcacgctatcgccggacgttacactcccggttcatgtcatcaaccgtgtccaggatagattcctcgagccccggtttctcgtgctcaccgaccccagatcagaccaccagcccatcaaggagtcttcttacgtgaacattcccaccatcgctatctggcacactgactcctncatcaactacgtggacatc

SEQ ID NO: 73802 - DNA, 442 bp, Glycine max
  Clone ID: PAT_MRT3847_37659C.1
tggctctggaacctttgggctgatttatgtgcttgcatggtcgtgagaagatcatagacggggctcttcccctaccccacaccctctcggcctttgattcttcctctcccaactctccggctaagcctacctgcctggtctagctaatacactcacaacaaccacaatcttctctccctccctctaatctctataatataagaagacggtcctcactctatagggttcctcctctattatcgttacgtcctctcttattatttcgtcccacgccgtccctcttaggttcctaccctaaacctattatctcaataaatttatcccgtgtctccgtccgcacctagaggaaaagaaaaaggagggaaagaagaagaaaaagaagaaagcgaaacccgtagacagcgcgaaggacggaagagaaaggaacgaataaagaagtaat

SEQ ID NO: 73803 - DNA, 253 bp, Glycine max
  Clone ID: PAT_MRT3847_3765C.1
agcgattgccacaatatctcactcatgaaatcgtacatttcacttcagacgtatgcactctcaccaggtgcagagaacactagagtcgtatcgtacagtcttcatactttgtcatgctgatcacgacgcaacttggactgctttcaagtccagatctgatagctcgcggatcatcttctccgacgtatacaggattacaaaggtgacccattaagtttagtactgcatgtctgttaatacatgacattacacc

SEQ ID NO: 73804 - DNA, 447 bp, Glycine max
  Clone ID: PAT_MRT3847_37660C.1
cggacgcgtggggtcctccaggtggaccggttacaagaagatcaccacagaggacgagggcgcttttgacttttcatccgactccagctctactatgcctaacgtgaagatcacaagagttcccagacgaggaagcttctgggctctgtctaagccaaggtcacatatgtgggcaagcatttatgaaagctttaagcaagtggtcccatggagacgcaagcaacaaacacagaaaaaatgtgcttcccaattgaaaactgtttgatattttagatttttactcttgtcaaatggagttgtttaagtaattatatccttctgacaggaaaaaaaaaacgacgtcctgaacaaaaaaaaatagcatttagtatataaataaaaaattattttacacgtcaaaggcgtctctcatagcatatacgattcatactgactggatataatata

SEQ ID NO: 73805 - DNA, 369 bp, Glycine max
  unsure (1)..(369): unsure at all n locations
  Clone ID: PAT_MRT3847_37661C.1
tnggnngggcaaatatcaagttggtaaccacaacacagggggaataaaacacttcacaaagggacaaccccaaacacttatacaattacgcgcaggagtaaacatacccatgttaatttaacaaatgggcccccagtgaaaacaaaaacccttcacaacctttttttaaccccccaagcccataggtttatctttttgggatcattcataggttaaggatactctttcaagggacggtctaattctttttcttttgaaatataaagaaaaatggctttttcaaccccggaaggctcaaaattggtttctacaactaaaaaggttttgagcatttaactggtttttttgggaaaaaaattatttttaaaa

SEQ ID NO: 73806 - DNA, 390 bp, Glycine max
  Clone ID: PAT_MRT3847_37662C.1
cggacgcgtggggagatggtggaggacagagagcctagcttgctgcggtccatggggttacaaagagtgggacacaagttagaaactgaacaacaagaagtagatataacttatcttcgaacataacaccaactggtaaaaaaaaatacttgaataaagcaactagtaagatcccctggagaagggcatggcagcccgctccactattcttgcctggagaatcccacggacagaggagcctggcgggctacagtccactgtgtcacagggagtcagacactactgacatgacttagcatgcacacatgtacaaactaggaatagtcaatctagagtcatttgtataatgttctatctagttgtacatgtcaactcatacagaagcttttt

SEQ ID NO: 73807 - DNA, 2053 bp, Glycine max
  Clone ID: PAT_MRT3847_37663C.1
gagaagaaaaaataaataagcttgggctataagctacaattagcttatgcataagttgaaattatttttttagagaagataaaatcatttagcttctccaaaaagctgattctaatttatacataagttaattttggtttatgaaggagtttatttcatttttttttgcaagtacgtgcttatagagaagtttattcaaatatggccacattaacattcatatcttgcagtaaaatgatgtttttctttctaaccaatcttatgatgctttataggcggctcgcgcggcgaagacgacagaagggtacggctgcgagaagacgacagaaggagagcatatccaaaaaaaatattattaagatgatcaacattattggagcacttgttctactctttgcatttctcttcctcagttgtgtgtatgcacaagacacaacaacccttgtgcctgcaatcataacttttggtgattctgctgtggatgtagggaacaatgactatcttcccacccttttcaaggctgattaccctccttatgggagggactttgttaaccaccaacctactgggaggttttgcaatggcaaattagctactgatttcactgctgacacattgggtttcaagacctatgctccagcatatcttagcccacatgcatcagggaaaaacctccttattggagcaaactttgcttcagctgcatctggttatgatgaaaatgctgctactttgaatcacgcgattccgttgtcccaacagttgagttatttcaaggaataccaaggcaagctggccaaggtagctggcagtaaaaaagcagcctcaatcatcaaggatgcgttgtatgtgctcagtgctggaagcagtgactttgtgcaaaattattatgtcaatccttggatcaacaaagtatacactcctgatcagtattcatcctacttaattggttcattctcaagttttgttaaggacttgtatggattgggagccaggagacttggagtgacttcactcccaccattgggttgcctacctgctgcaaggactatatttggtttccatgagaatggttgtgtctcaagaatcaacactgatgctcaaggatttaacaagaagctcaactcagctgcagcgagtcttcaaaagcaacttcctggtcttaagattgcggttttcgacatttacaagcctctctatgaccttgttcaatccccttcaaaatctggttttgtggaggcaaacagaggatgctgtggtaccgggactgtagagacaacatccttgttgtgtaatccaaaatcaccaggaacttgttctaatgccacacagtatgtgttttgggacagtgtccatccttcacaagctgctaaccaagttctagctgatgcattaattctacaaggcatatctcttgtcacataaagactcgtcattatttatgttgttagaaattattattgtgtacaagtacaactacacatcgtgaaagtgattcaaaagtttgctgtttttctttagtttggaaaaaaaaaactgtgctctatgtattttagatcttgagaaatttcagataaactcgtttgtaaaccattttataataatagagaaatgtttgcttattatcatcaaaaaaaaaaaaaaaaaataacgcaaacaagactctcgctccagttggtgtgatcctgccataatgggtgtgtcctgctgctgcatccctgttgctgttaagctgaggtctaaaatcccgagcttgatgatattgatctttttaatgccccccagtatgtgttttgggacagtgtccatccttcgcaagctgcatgcatttattttccaacgcataaagaccggtcattatttatgttgttaaaaattattattgtggtcaagtacacctccccctcgttaaagtgattcaaaagtttgctgtttttttttagtttggaaaaaaaaaactgtgctctatgtattttagatcttgagaaatttcagataaactcgtttgtaaacccttttataataataaagaaatgtttgctttttttcctcc

SEQ ID NO: 73808 - DNA, 1470 bp, Glycine max
  Clone ID: PAT_MRT3847_37664C.1
tttcaaactcccactagaccgatcctggtgggtttatagagtagtagtagatgttgtactgctcatatatatacttatgcatttaagtttcatttttgttggaatgttttcttaatttgcagctgacacattgggtttcaagacctatgctccagcatatcttagcccacatgcatcagggaaaaacctccttattggagcaaactttgcttcagctgcatctggttatgatgaaaatgctgctactttgaatcacgcgattccgttgtcccaacagttgagttatttcaaggaataccaaggcaagctggccaaggtagctggcagtaaaaaagcagcctcaatcatcaaggatgcgttgtatgtgctcagtgctggaagcagtgactttgtgcaaaattattatgtcaatccttggatcaacaaagtctacactcctgatcagtattcgtcctacttaattggttcattctcaagtttgaacacaggacttgtatggattgggagccaggagacttggagtgacttcactcccaccattgggttgcctacctgctgcaaggactatatttggtttccatgagaatggttgtgtctcaagaatcaacactgatgctcaaggatttaacaagaagctcaactcagctgcagcaagtcttcaaaagcaacttcctggtcttaagattgcaattttcgacatttacaagcctctctatgaccttgttcaatccccttcaaaatctggtagacaatactttgacttaaattaattaattattcaacataggtcctgtttggataagtttcttcatgagcacttataagagaagaaaataagaccaaaaaaataaataagctatgcttaagttaaaattaatttttttatagaagataaaatcatttagcttctccaaataattgattctaacctgtccatagttaattttagtttatggaagaagtttcttttttttgtaagtgcttatagagaagttcatccaaataaggccatatatagtaacattcatatcttgcagtaaaatgatgttctttctaaccaatcttatgatgctttataggttttgtggaggcaaacagaggttgctgtggtaccgggactgtagagacaacatccttgttgtgtaattcaaaatctccaggaacttgttctaatgccacacagtatgtgttttgggacagtgtccatccttcacaggctgctaaccaagttctagctgatgcattaattctacaaggcatatctcttgtcacataaagactcgtgattatttatgtgttagaatttattttgtacaactacacatcgtgaaagtgattcaaaagtttgctgtttttctttagtttgaaaaaaaaaactgtactctatttattttagatcttgagaaatttcagataaactcatttgtaaaccattttataataatagagaaatgtttgcttattatctgt

SEQ ID NO: 73809 - DNA, 601 bp, Glycine max
  Clone ID: PAT_MRT3847_37665C.1
ccgggcccgacccacgcgggcgtggtagaatggaggagctgccaggggcgtttggaagcagcgccagtttggctctccgtttgggccaaacagtcttttcccagcttcccttctcttcatgtgcttggatgttgatttctatggctacaccgctttctgctatttggtaaccgtcatgggtttggtaattccctggagcataacactgttggttgtagatgcatactctgtctttataaaatgtttacccctccaacgaagactcataatgatcgtctttttgggagacatgccagtgtcacagatctcctgctcgatgccgatcgatcctattgcctgcaaaagttgtgtggtagatatcaattatctgctgctatggccttcttgtcttggtttctttcatcagcatcctgtctgtttaacttttggcttttcccttctttgtaaaatctatctttctgctagctgttgatatgtacaccaatgataagggtgcaaatgacgaagtcctttgttcttgtgcagatattttttgtttccccgtgaataaaattatcatgacaacaatgtaataagtacttttccaatgcaagagaaatac

SEQ ID NO: 73810 - DNA, 432 bp, Glycine max
  Clone ID: PAT_MRT3847_37666C.1
tacggctgcgagaagacgacagaaggggcacccaaaggtgcaaaaatattaagatgataaacattggagcacttgttgtactctttgcatttctcttcctcagttgtgcctatgcacaagacacaacaacccttgtgcctgcaatcataacttttggtgactcagccgtggatgtagggaataatgactatcttcccacccttttcaaggctgattaccctccttatgggagggactttgctaaccaccaacctactgggaggttttgcaatggcaaattagctactgattttactgctgacactttgggttttaagacctatgctccagcatatcttatcccacaggcatcagggaaaaacctccttattggagcaaactttgcttctgctgcatctggttatgatgaaaatgctgctactttgaatcatg

SEQ ID NO: 73811 - DNA, 631 bp, Glycine max
  Clone ID: PAT_MRT3847_37667C.1
ctgccaggggcgttggaaacagcgccagttggctctccagttgggccaaacagtcttttccacagcttccttcttttcatgtgtttggaagttatttctacggctacactgctttctgctacttggtaactgtcatgggttgtgttatgctccagagcattacactgttggttgtagatgcatactctgtctttataaaatgtttacccctccaacgaagacttgtactgatcgtctttctgggagacatgattttgtcatatctctcattagctgcagcatgttcaacagccagtgtcacagatctcctgcttgatgccgatcgatcctattgcccaccaaagttatgtggtagatatcaattgtctgctgctatggccttcttgtcttggtttctttcatcagcatcctctctgtttaacttctggcttttcccttctttgtaaaatctatccttctagctgctgttgatatgtacaccaatgataagggtgcaagtgacgaagtaatttattcttgtgcagatattttttgtttccatgtgaataaaattatcatggctatagacaacaatgcaataagtacttttccaatgcaagaaaaatacaaaaattccaagtattggttctca

SEQ ID NO: 73812 - DNA, 1061 bp, Glycine max
  Clone ID: PAT_MRT3847_37668C.1
attaatttcaggaaattccagcaagatagatgacgactttgaaagtgaagtaatgcttataagtaatgttcatcatagaaatctggttcagcttcttggttgttgcagtaaaggccaagatagaatccttgtctatgaatacatggcaaacaacagcctcgacaaatttttatttggtaacagaagatgttcccttaactggaaacaacgctatgatataattttgggcactgcaaggggattgacttatctacatgaggaatttcatgtttctatcatacatagagatatcaagagttgcaatatcctcttggatgaagaacttcagcccaaaatttctgattttggcttggtaaagctccttcctgaagacaaatctcatctcagtacaagatttgcaggaacagtgggatacacagcacctgagtatgcactccatggtcaattatcaaaaaaggctgatacatacagctatggaattgtagtgctagaaatcataagtggtcaaaagagtactgatgtgagagttgatgatgatggtgaggaagagtcccttcttcgacaagcatggaagttgtatgagagaggcatgcacttggagttggtggacgaaaccttgaatgataactatgatgcagaagaagtgaagaaaatcatagaaattgctttgttgtgtactcaagcatcggctgcgatgagaccagctatgtctgaagtagtagtgctactcagtagcaatgcacttgagcatatgagaccttcaatgcctatctttattgagtctaaattaaagccccacagagatatttttgcctcaactagttcctctacatctaatgctactgcctccagttctatagtacctgctcgatgattaattatgtatatgatgcacatgttagaggggcagaatgatgttgtagagcatacagatgcatgataagtaattaaagtttgttgtgatgattaattggtagttgtaattagttattcctggtagcactctttggtagtgttggatgtttgtataaatgccatacatagatttgttgcactgaatc

SEQ ID NO: 73813 - DNA, 512 bp, Glycine max
  Clone ID: PAT_MRT3847_37669C.1
ctcgagcgcgttcgagctcgctcgatcacgtctctgagggtggaaatacaaagcacaattcatgcaacggaatagatctatcttggctctgcttgtgttgagcatcatacctgggcgtttgcatcatatagctttgatctgctctttacaaacccaccagttccaaaccgaccgtgtccctactcaccgtttacgcgttctctttctggtacttaactcaactaatggtgggccaatagttacccatcaactacgggcattgggttctgaaccatgacccgaaacttaacacacgatgctgtattctgcttcatccgacgagatgcatgcggactctactgaattggcgatcctggcgacgatgccttcagtttaatcgaatggctccaccactcgtagtgcgccgtttggcacggtctagccctcgtgccacctgtcaaacaggccatcgtataaagatcgcgctactctggacacgatgcgaagtgaagcaacacgctcttgagctctct

SEQ ID NO: 73814 - DNA, 165 bp, Glycine max
  Clone ID: PAT_MRT3847_3766C.1
gcttcttttgattgatgagaaaggaccaccataaagttttttttgaaaagcataagtggaacccggacaatattaacaccgatttggacacaactgcacttgctgatgacgatgagaaaatgctagttaataggagcaccaagtctggggagcctaatgtgactt

SEQ ID NO: 73815 - DNA, 922 bp, Glycine max
  unsure (1)..(922): unsure at all n locations
  Clone ID: PAT_MRT3847_37670C.1
gcgggctggtttgggattacaatcgcagaatgcaatggcctcgcagcctcgttcggaagtattttcggattagtcatcgaattaattaattattataattgctcatttatgcatttcattcataactcttacccaaacaaacatacacagagattcaacattcatagtttcatagtcctacctttttccttttttttttcttttttctcaacgttgttataataaattttattagtaattaccacaactcttgaaggtggtggttgatgttacgggcatgtttggggttgaattaccatggtagaatggaggagctgccaggggcgtttggaagcagcgccagtttggctctccggttgggccaaacagtcttttccacagcttcccttctcttcatgtgtttggatgttgatttctacggctacaccgctttctgctacttggtaactgtcatgggtttggtaattccctggagcataacactgttggttgtagatgcatactctgtctttataaaatgtttacccctccaacgaagactcataatgatcgtctttctgggagacatgtttttctacacaccagattttgtcatatctctcattagctgcagcgtgttcaacagccagtgtcacagatctcctgctcgatgccgatcgatcctattgcctgcaaaagttgtgtggtagatatcaattatctgctgctatggccttcttgtcttggtttctttcatcagcatcctgtctgtttaacttttggcttttcccttctttgtaaaatctatctttctgctagctgttgatatgtacaccaatgataagggtgcaaatgacgaagtcatttgttcttgtgcagatattttttgtttccacgtgaataaaattatcatgnnacacatggtataagtactttntcaatg

SEQ ID NO: 73816 - DNA, 1543 bp, Glycine max
  Clone ID: PAT_MRT3847_37671C.1
gaactatgaaaaatgggaaagttgttgcagtgaaaaaattaatttcaggataaattccagcaagatagatgacgactttgaaagtgaagtaatgcttataagtaatgttcatcatagaaatctggttcagcttcttggttgttgcagtaaaggccaagatagaatccttgtctatgaatacatggcaaacaacagcctcgacaaatttcttatttggtaactaattaacatgtcaatttccagtagaagcattaagttttactttgtttcccttctattcttctcttaagttttgagcatataaacatgagagacaggtaactgaagatgttcccttaactggaaacaacgctatgatataattttgggcactgcaaggggattgccttatcaatatatagaatttcatgtttctatcatacatacaaatataaatcttgttaatatattcttggatgaagaaatttatctcaatatttttgaagttgtctatgtaaagttctttcctgaagacaaatctcatataaatacaagatttgcagaaacagtgtaagttaataaattaccacagaataagtttgaaagatttaaagagtaaaagttagtacaccaaaatgttaagggtaataatgtcataatatctttgaagtatatcttataaaaatgatatgcgagtgtcaggggatacacagcacctgagtatgcactccatggtcaattatcaaaaaaggctgatacatacagctatggaattgtagtgctagaaatcataagtggtcaaaagagtactgatgtgagagttgatgatgatggtgaggaagagtcccttcttcgacaagcatggaagttatatgagagaggcatgcacttggagttggtggacgaaaccttgaatgataactatgatgcagaagaagtgaagaaaatcatagaaattgctttgttgtgtactcaagcatcggctgcgatgagaccagctatgtctgaagtagtagtgctactcagtagcaatgcacttgagcatatgagaccttcaatgcctatctttattgagtctaaattaaagccccacagagatatttttgcctcaactagttcctctacatctaatgctactgcctccagttctatagtacctgctcgatgattaattatgtatatgatgcacatgttagaggggcagaatgatgttgtagagcatacagatgcatgataagtaattaaagtttgttgtgatgattaattggtagttgtaattagttattcctggtagcactctttggtagtgttggatgtttgtataaatgccatacatagatttgttgcactgaatcaataattgatttcattcggtctttctgttctctcagttttcttttatagtattagagctctcaattcagagctcagccagggtttgttttccatggtgagaaaccacaattcttcttcctgtcatttgcataaccaaaatcagaatggttcaaaatggatctgttcttaatcctttgcaaaaagaagttcctttggaaagtggcatcaa

SEQ ID NO: 73817 - DNA, 525 bp, Glycine max
  Clone ID: PAT_MRT3847_37672C.1
gccgcctgcttggggggggggggggggggaaaaggtaaaagctaaagtgagaggctaaatgaggccacgagcaacacaagaaaaaacaagcataatagtataaaagggaccggtataaagtaggatgggaaaaaaacaaacaaccctaaaatattgagaacttcacaacaaaaagaaagttaagagaaaggatacaagaacaaacaaaaccacaagaacaaaatagcaggggtttttggaaaaagtcagtaatgggctagcgattggcgtgcgcggctgccactatgaaaacaaaaaagcaatacctattaaaagtggctagggcagggcacagcagcagtaaacaagatgaggggcgggggtgggaatacacgcataggcggaagggattgtaggatttgtttggtaaatcaataattatattactgccggtccgggtggtaacggcttatctttcgcgtgctccgcgttatatctaagaagggttgatactagttaatctagtccaaagacctggaagcatca

SEQ ID NO: 73818 - DNA, 383 bp, Glycine max
  Clone ID: PAT_MRT3847_37673C.1
ccgcatttccttcccgacgataaccttttcggctctaactcttggaatcagacttggcaatgttgggtggaaataaaagttgagaactcaacacaacaattacgagaaccaaaattgagctgggcaggaaaggttcaggactctaaccagtttttactataggggagcacaaggaatcattctagattggatgaccccaaattgaaatagagtctgttagtcaaggatctcaccatgcaaacgacatcgtatagtcatcctctattctgtttctcttgcagaaacatcagtacaaatgggaagagtaagggttctgtgaaattccgtgcaccatatccctctcaactgggtcggaaatgtggattcaatgggagacctcgtgt

SEQ ID NO: 73819 - DNA, 357 bp, Glycine max
  Clone ID: PAT_MRT3847_37674C.1
atcacatctctaaccatcgccctatactatctactctctcgtacctcctcattctaccaggccaatacggtaccctgtctctttacaccaatttacaaacccctgacactcaaattttcatccctcaacatctccgtctttctctaccttaccggaccaactcaacattctcctcttgtcacctatcttgaccacacttacgatcgtacctaacaagcataacaacagattctcagtcagactgaagcatgccacgaaagatgaaaccccaacttaaaatactccgacgatgagagctctctcaaaccgacctatgaagtctacatcttccttgcgaactctccttacgacttttat

SEQ ID NO: 73820 - DNA, 288 bp, Glycine max
  Clone ID: PAT_MRT3847_37675C.1
aaaacaacccacatttatggggttgattcttgcaagcacaaaatacgggatggggtgcaatcctcactggaactgagcgcattatgaaacacaaccactcaaccgaaaaacctgccaagaaaccacacgttcacaatattttaaaacgaaatttgtgacctttgtcaaaaggagaggtgaaacagtataaagggtccaccgtggaggcgccgccgacaaagaccacaaactcgtatcctttacagggacacatagatggtgcccctaaccgcatacaagaaaggttct

SEQ ID NO: 73821 - DNA, 185 bp, Glycine max
  Clone ID: PAT_MRT3847_37676C.1
ttatgtacaagtacatactcagcctcatatctcggcgctcctgaatcgctcacacttgtagcgtctgccatatagtcgtagtagcatgcttgcttggcgaataagttcaacggggtcaacgtctggcacttcgagaagctcatcgcggtggagatcgaacgccgcggcgattacgatgatggtga

SEQ ID NO: 73822 - DNA, 262 bp, Glycine max
  Clone ID: PAT_MRT3847_37677C.1
cggttgcaaaaaaccaccaaaaggggccggcaaaaaccgaccccaaaattggggttgcgttcctttaaaactttcaatttttttttctttttccaatcaagggaataatttttttaaaaaattttccaaaaccatggttaaccccaatcctatgattttggtggtgggaattttaggtaacctggcctccttctgtggctttttagcaccagtcccaacattctatcgagtttgtaagaaaaaacccacggaaggtttcaat

SEQ ID NO: 73823 - DNA, 250 bp, Glycine max
  Clone ID: PAT_MRT3847_37678C.1
ggtcaatcaagctgccccttcagctgaatctgggagcatgaatgaaactgaaggtggagtggcaactaggacagaagcagatcagtcacagaaggctgagcatgcttcagatgacagggctaagattggaaacattactgttgttttggctagtgctgggaatacacttgaaggagctgatgcagagcttattttaaatcctctccgtctcgcgtttgagactaagaacttgaaaatccttgaatctgct

SEQ ID NO: 73824 - DNA, 392 bp, Glycine max
  Clone ID: PAT_MRT3847_37679C.1
tcgtttatagagagatggcgtatagaacgggcgaagattttcacgctgggctcgtgcctccaaatagatctatatctgtatctctcacaaactatgatcacaagcaactaatcgaagcactttttatgtgaaaatggaagcaggtgcgcaaagggtgccaagggcacataagccaaactagctcgaacggattcgccaccataatactgacagcgggactaaaccctcgaagaggttgaatggtcagatccgtcaaatatgctgagatactggtaggttaactgccaccgaagaggcgtttgtagctagcaacgagtgagctaaccatgcgtgatggactgggaatgaatagcaactagaggacgggaacaagcctgcccacattgaagact

SEQ ID NO: 73825 - DNA, 389 bp, Glycine max
  Clone ID: PAT_MRT3847_3767C.1
ggctgaccaaatgctgccaatctgaagtatttgcatcttgcctcaaaactaaataagaaaggacatgaagccattaattgattacaccacaatggcataccacaaatggagacagccaaagagtccctcatctgttgctctagcttctctgtcaacttactgcttacaaactcaatctgtgggacagaaggaactgttatttttagactatccaggttatcaactttcccttgggcaaaagcacaaattctttcacgcgacataaggtgaaatataattctgaaatctggctttaaccaggttttctccattgatcatcttcggattttcaatgaagaagaacttgagcgaatgctttgtggagagtatgactcttgggctgtcaacga

SEQ ID NO: 73826 - DNA, 356 bp, Glycine max
  Clone ID: PAT_MRT3847_37680C.1
ataacacgtacccacaaactaagcaagcggatcaaaattgtaacttctgcttctatgttctgcctgttggatatcgcttgtcagccattgctgatactcctgataatgctactggactcatgttcactccatcctatattgatatcaagaccaacaatgacattaccttcattgctatcaacactcgtagagtgcaatacatgcatgtgtatccactcattcacaaaaagaaattcgagactcttttctaccttccacaccttaattatacacaatttgtatacgaattataataccttcttacgaacttattgatttcttgctcaaaaattttacttggaacacggtttcttata

SEQ ID NO: 73827 - DNA, 356 bp, Glycine max
  Clone ID: PAT_MRT3847_37681C.1
cctcatagtcatgttgaacattctcctattttcgattccttattgatcccttgccttgacgagcatacgtgcatcttataagttaacatactattccacgcactaggagatgatcttcacctgatattacacatctactgtcaaggaactggagcaataattaattagacggctctatctcggcctctggccttatctgccttggtgaatgagctcatcttatatgcaaatttcctggattatggccagtatcaaagaacggcagcaacagttatccaagatttcacagattagtccaatgacgtttgtcaggagacactctctatcaataagaattgtccgagcctatgcaacag

SEQ ID NO: 73828 - DNA, 287 bp, Glycine max
  Clone ID: PAT_MRT3847_37682C.1
tccgagaggggctggatgggggactgggaactcgacgctatactatagttggatccagcgtcggcgacggacgaatcgtctgtcatagcctgagcctgctaccaaacttggatcagttcattagtgcctgcgtagataactgttcgaagcaacagccgcagcaacatcgcaggacgaggaggctgtatcttcatggataacatgaagatgataagcgatgatgatatcaacaacaagagtatacttgttgatcggcatgcagatagatccttctgatatgatgtacc

SEQ ID NO: 73829 - DNA, 177 bp, Glycine max
  Clone ID: PAT_MRT3847_37683C.1
gatgatgatgaaacacttgcagactgggcaaaattggagtctatgcaatcttctcatccaatgtactttgccaaaaagttggctgagatcgcatcagatgatcctgttgattggatggagcagcctccagcttgtgtggctattcaaggggttataagacctgcttttgttgacgac

SEQ ID NO: 73830 - DNA, 691 bp, Glycine max
  Clone ID: PAT_MRT3847_37684C.1
ttttgataaaatggtatccaataagtggattggatatggaaattttctgataattgatcacttaaacactaacatctggcaatttctacatgggagctatataattgtcttcgttttatgtcttttgactttttatcctatgtgcttaattagctaaccccacatctagcagtaaagcttttttctgctgttcacagttagtggccatcacggtttatgctttcctctatggcagattttacctgtcattgagtggattggaggaggcaataattaagatagccaggaaaaagggagatgatccattaaaggcagcaatggcttcccaatcccttgttcaaataggtcttctgatgactcttcccatggttatggaaattggactagagagaggattcagaactgcactaagtgacatcataataatgcagctgcagctagctcccgttttcttcactttctcactagggactaagatgcactattttgggcgcactctcctgcatggaggggcaaaatacagagcaactgggcgtggttttgtagttcgtcatgagaggtttgcggacaactacaggatgtattctaggagtcactttgtaaaagggatagagattgctatactgcttatatgttatgggctttatggatcagcaacttctgattcaacatcatatgcccttctgtcatt

SEQ ID NO: 73831 - DNA, 225 bp, Glycine max
  unsure (1)..(225): unsure at all n locations
  Clone ID: PAT_MRT3847_37685C.1
aatggaaatgaggcaggcgctcatggaatttatagactgaaccctgcaatttgaatgcntcacttactataatacaaatgcggtcaaattaatgaataggcaacgcacctaaaaagaaacattcttttttatacatacatacatgcggcctaaaaatataagcccaattctattccatcgaaatgtagtttaaagctctgggggcaaaaccattcgtctgggtgg

SEQ ID NO: 73832 - DNA, 204 bp, Glycine max
  Clone ID: PAT_MRT3847_37686C.1
tctgtcaagcctgagctgaaggccctctgaaccgcatgcgtacagccaagtgctgcgattgtctctgtccaaacagaatcgcctgactcttagccgtttccatttccatgcatttttttttgttttgttttgttctatacccagcatctcaccaaaaagaaggctgtagggccaatgacgttgttcgcgatctggaccttgtct

SEQ ID NO: 73833 - DNA, 398 bp, Glycine max
  Clone ID: PAT_MRT3847_37687C.1
ggctcgagcttaaccccaactttacgttgatggaaaatgtggttcatcttatcaaatttgcagtgggctttcttggaacatataccttgagtagacttcttcaaatgaattatcaagcgcgtttatgaatcatgactgcaggtgcttatgggatcactaagcttctgtagcacgtgtctatatggcgggctgcaccttttcagaacatgacacaattgccgtttacaactcatgatgatattgtaaggggtggtattgccttggagtttgagataaacactgaagcatacgatcaaggacacaaggtggaactgcagaacaagcttttattgatggacgctatccatgaccttgctcaggttgagaacaatgagcggcttgattagatcagaattgac

SEQ ID NO: 73834 - DNA, 281 bp, Glycine max
  Clone ID: PAT_MRT3847_37688C.1
acggctgcgagaagacgacagaagggtccataccacttttctttctccgttagttccatatagttcatagttttcctttgcaatttttattaatacaacaacgaagaaactataaaagcggaaaataccgaggtgatgtttaaataaatttctccatatatatttataggaaaaggaaataaaaaagtgaaatgaattgaatttctgtcagaaaataaaataacttatgtatgtagttgagcttatagaaagattaaataagaattttctttttaaattaa

SEQ ID NO: 73835 - DNA, 432 bp, Glycine max
  Clone ID: PAT_MRT3847_37689C.1
cggaattcccggtcgaccgcacgcgtccgcccacgcgtccggtcaacttagatgttgaaatttataaaatagaaaaatgattcctaaaagggtgcattatcaatcgagttattccttgaaattctaatagtcaatgaaattggtctctaaaattaagaaaattgcaaaatgatcccctaaacatcaatcaatttagtccctttagctaatatcatttaacctcgttaaaaatattaaattgacacgttaagtgcttgaggcagctagacaaacatagttgtcataccatagtgatgatgaaaatgactaaaatattgatgaaataataattaattattttcattctttaagtcaatgttcctcctcttctcattagttttacattagtctttcaatcaattcattgaggaaacgtcaccacagtaactcata

SEQ ID NO: 73836 - DNA, 445 bp, Glycine max
  Clone ID: PAT_MRT3847_3768C.1
tattgccgggtcgacgagctttcttttcggcggccgtcctttctttttccattgtccatggttttctttacagcaaagggcagcatcccctagatgacacatctgacagacttgaagctggcgtaatagcagggcatgattgtccataaaaggccattattacagtgaggacaaacaccaatttctccagaaacgcaagagcgcatgaggaggtgctataataaacatttttaaaacatgccctttggcaaatgaaacatgtaatgatccctggatgttccaaaaaacgggtgctaattgaccttttaggacgccactagtatttcaactcctatgttcattgaatgtttgcagctttctgtcgcctatgtcctgcccagatatccggatcatgaaagtaaaagacgatgaataggtcgccgacttggtgtacagtaaacggtga

SEQ ID NO: 73837 - DNA, 1127 bp, Glycine max
  Clone ID: PAT_MRT3847_37690C.1
gagagaactagtctcgagtttttttttttcattttaatacatttgcctattaacgattttattattggattatgacccagaggggagttgtacaagatacaagtgatgcagaattttgtatgctaacttctgtcctaacagtaattttctaagattctgtgtaccaataaaaaaaatctgagaaagttgttaggcgactgttagattcagctatgttgctatcgaagttcaactctggcagagaaactattttctatgttgcatattggcctttgtctgtatcgtcatcatcgaattcccaagctcctccttgctgtcaacatagtaccagcgtcaccgtcgcaaccttccctcccactgtgaatttgccttcccccaaatacgaaaggtgtttccttcacatccagatgaaaagaacttcctatattttcttttgaatcctctctgaacactctggaatgccgaggcagtttcaactgagatccattatttgactggacttcggatgttagggacatcttgctaaagagttcgcttggtgggttatgctgaaccctcttttccgtatggaaattaaattccattggcaccgtggtttcctgctttctgttcaggaaaacagcaatatctcctttacttgaaagaatcttcttattaagaggacgagctttaaaacaatgagcaaaatccaatccatcatgctttggagcacccagggcagatggccttctcaaatccctgattctattttcttgagcagaaacagctgtatgtttgtccaaatccttatcaaaatcattgcaatgaagtgaagacgatgaagtcgcagatgtatgctgcatggccctctcttgtgtcctgagatgaaattctagaaattctggcaatcgtggagtgctcctcttgggaagtggaaacgaaggagcatttagaatttttctgtttaacgggcgtgctttgaatctggggacagccactgtcacaacttctgcctctgcagcaggtttaggtctaatcctttgtgctctgtgagctgtttctaggtcaggctctctaggaatagtaatcttcagcttggaatgtccagaattttgatcaacagttgcaacctttttaggtgccttgtg

SEQ ID NO: 73838 - DNA, 453 bp, Glycine max
  Clone ID: PAT_MRT3847_37691C.1
cccgtatcaaaactgctttcttttttttcaatataaaactattgtcactgccacaaaataaaacaagtttctcattattcctacaacaaaagccaacccgcccacacttaggggcagaaaggggccaaaagcattatgcttaaaaaattgtccacaccaagacctacttaccctaccctcattgctcctcagctcacttcccccttttccccatgaaatcctgagtaccaatattttttcaaaacccccccaaaacttcggaaaaaaaaaaaattcttaaaaaacagccaaaaggttttttttttttcccccaaaaactgtaattaatggtttcccctttacaaaacacccctgctagattcgcgtacatttttccattccagtactccccggggggcgaccaccccaatggcctatggaaccgagttggaacacaacacaggtccctgatgg

SEQ ID NO: 73839 - DNA, 267 bp, Glycine max
  Clone ID: PAT_MRT3847_37692C.1
cttttcttttctccctatggagtttaatcctggggggcgtcacaagtttttaagatctgtgctgttcattatcaagaaaagggacaagcttagttccctagttagaatcaacccatactccatggaatgtactggtttggccaatagattactgcgtcaggccaactatattctgtgttgcgattatgctagatttgatggtttgtttaccaagcaaggtttgatgcaaaatggcatcaatgataaacagtctttgcggtcctgatg

SEQ ID NO: 73840 - DNA, 1667 bp, Glycine max
  Clone ID: PAT_MRT3847_37693C.1
aattcccgggtcgacccacgcgtccggaggcagagcgtcgtgtccagccttgtcagtgttagaagaagagatagagaagcaaacaaaccctagcgcagagaagagatattcttcttcgcagaatcattgcagttgcgagcaggccgaagaaacctaacctgcattcgaaaatcagcccccttggaaatcccaacactagtgtggtacctgtgctcgacgattgggtgttcaaggggaattagcttcgtctcgcagaacttcaacgcatcattcgtgaccttcgcaaacgcggtgtttgttcttatttggttttgtcagttgttggcagaagatacagagcagtagacaaactccgtttaggaacataaggtgttcgtttctgaaatttgtggcagagcaagtgagcgatggggaaagcttcaagggataagagggatatctattaccggaaagcaaaagaagaaggttggcgtgctcgaagtgcctttaaactccttcagatagacgaggaattcaacctttttgatggagtgaagcgtgttgtagatttatgtgctgccccaggtagctggagtcaggttttgagtcgtaaattgtatctcccagccaagcttgcacctgatgcaaaggatgaaaatcttcctcttattgtagctattgatttgcaaccaatggctccaattgaaggtgtcatccaggtgcagggtgatataactaacgctcggacagctgaagtggtcattagacattttgatggttgcaaggctgacctagttgtgtgtgatggtgcgcctgatgttactggccttcatgacatggatgaatttgtacaatcccaactcttacttgcagggttgacaattgttactcatgtacttaaggaaggagggaagtttattgcaaagatatttagaggaaaggacacaagccttctatattgtcagctaaaattatttttccctgtagtgacgttcgcaaaaccaaaaagcagccgtaattccagcatagaggcatttgcagtttgtgaaaactattcccctcctgaaggattcaatccaaaagatcttcatcgccttcttgagaaggttggaagtccctcaggggtagatgatacagattgttgtagtggttggctggaaggccctaataaggtgtatatcccatttctagcttgtggtgacctcagtgggtatgattctgatcgctcatatccactacctaaagttgccgggggaacatatcagagcttggatcctgtgcagccccctattgccccaccttacaagagagctttggagttaaaaaaagcttccagtcaaggattccgtgaacttgaaaacctctcattggattcttgatcgtgctatgcactgtttattcatcatgtcgtttggaattttagtttttgttacaatgatatgatttgtgttttgataattattagcgtacgtgtgaactttaacacttttttctcttgtaccatcattgcatgcctagcgagtcttttgttatcgcaattttttgaaatgaatacaactattttataggtaaccatccatacatataactgttccgctggatgatgttgatgatgttagacatgcttaaactagtatatttcaacacaaacaaggcaaagagacaagttaaataaagatgtcattaag

SEQ ID NO: 73841 - DNA, 1458 bp, Glycine max
  Clone ID: PAT_MRT3847_37694C.1
aaataaagaaaattttctcttcgagatggggaaccccactatgagcacataatcataatcatgaagaaagcagggagcataagctctggtctcaaactcacagttcctgctgcatctgatcgtgattcatttacaaagttccggtctgagcctgaaagtggaacgtttaaggctggtgacttgcttgtcaataatgaaggagttcgaattgtctctgagaatgaagtggaagctccacccccgatcaggccacaagataaccagttaagtttggcagacattgatacaatcaaagtgattggaaaaggaaatggaggggtagtgcaattggtgcaacacaaatggactaatcagttttttgcattgaaggaaatccaaatgcctattgaggagcctatccgcaggcagatagcacaagagctaaaaatcaatcaatcagcacaatgtccctatgttgttgtttgctacaattcattctatcataacggtgtcatatcaatcattttagagtacatggacggagggtccttggaagatcttctgagcaaagttaaaacaattccagagtcgtatctttctgccatctgcaagcaggtgctcaagggtttaatgtatcttcactatgcaaaacatattatccatagggacttaaaaccttctaatctgctgataaatcatagaggggaggtaaagattactgactttggtgtaagtgtaatcatggaaaatacatctggtcaagcaaatacattcattggcacatacagctatatgtcgccagaaagaatcattggtaaccagcatggctacaactacaaaagtgatatatggagcttgggactgattttgctcaagtgtgctacggggcagtttccatatacaccaccggatcgtgaagggtgggaaaatattttccagcttattgaagtcattgtggaaaaaccttctcccagtgctccatcagatgatttttctccagaattttgctcatttatctcagcatgtttacagaaaaatccaggggatagaccgtcagcccgggaccttataaatcatccttttatcaacatgcatgaggacttgaacgtggatctttcagcttatttcttcaactcaggatgtacacttgcaaccatatagaacacagtatgttccgatcctggactttattcaaagtgaaagatatggcattctatgtcaactgggcaaatggcaagtactgctgtcacttcatatgtaactgcaatttgtactccttgaagaggattcctagttgcctatgaccagaatttgtagaatggagccaaggaaaccagcttctaaaatttatgcctgctcatttgacaatgactaataatgcaattcaatagttgttgttttgattacttgagtggacaacttgaaacttttacaccaataaaaaatattttaactttgggataaaacaagccaccaatt

SEQ ID NO: 73842 - DNA, 436 bp, Glycine max
  Clone ID: PAT_MRT3847_37695C.1
aatattaggtttatgtttattgctttatgagcaagaaggcataaagttattaatgatttttagttctctttgattagacatgatttaaagcacaaacagacacttacgtcacagggagaaaaaatgcctcataatgggggtgtaaaaccgaacaagatgttggcacatcaaaaagaacaagaaaaagggggggaccataaaaacacataggtgacttgacagaatagcagagactagatccctatttatcagagcaaccctaaaacctcagatgatactccttcctctagccatctcagacttcctaacatgcgctggaacataaagataggtgaggctgtgaggcacaccaggagcaggaccaacgggataaacagtttaacgagcatgctttgggcctctaaaaaggaccgcgtgctgatccataggaggccgg

SEQ ID NO: 73843 - DNA, 239 bp, Glycine max
  Clone ID: PAT_MRT3847_37696C.1
acacaaaatggtatctaaatgacagaacgtttcatattatggatcgataaccatagaaaggacctgttcatgatctatactatgatcttattggttctttttctttttcttcttcttcaacatcatcttctgtctcttgaatttcaagtgtgtcataattggaatctaactctttttattaaatttcattctctgcctcctcttcttcattattaacttcattttatcaacttttattt

SEQ ID NO: 73844 - DNA, 292 bp, Glycine max
  unsure (1)..(292): unsure at all n locations
  Clone ID: PAT_MRT3847_37697C.1
ngtngcacgcgtacgtaagctcggaattcggctcgagntggcggcgtcgaaggtgaagcaggacatgcccccaccagggggctacggccccatcgactacaagcggaacctgccccgccggggactgtcgggatacagcatgtttgctttgggcatcggggccttgatctttggctactggagaataatgaggtggaaccgggagcgtaggcgcctgctgatcgaggacttggaggccaggatcgccctcatgcnactcctccaggcagatttnnaccgcaggaccctgcan

SEQ ID NO: 73845 - DNA, 344 bp, Glycine max
  Clone ID: PAT_MRT3847_37698C.1
cgcttcccctctcaagtcttagcaaattgcatatatgtatttgagtagttcttttttagtttaaacgatctaggattttgggtatgaataaacccaagttggagctctctacactccaagtctgaaggaagtgacggtagacccttgctgctaattcatggttacctttggattcagataaggaagcatgtgaaagtcatgggtctgcatgaatttgaagacggggctaccttgatcttttagtattggagtgaagggagctccgaattaggccttcttaacttaatactgatcaatcactatatattatatacacgattatttttgaaaaatggtttgcaact

SEQ ID NO: 73846 - DNA, 538 bp, Glycine max
  Clone ID: PAT_MRT3847_37699C.1
tggtgcccatatggctatgaccaaatgggatgaaactgtgtcaacagatacggagctcatggtcacggtgaacggcatcatgtcttttaagttaatcatggcatacatacgacctcttatgatcaatgatgacctgcttctgcaatgatctaaaaattacaactctcttggtcccttacctatagtccatgctcaaaatgcacatgctatgatctatatgtcacgaaaatatgatagaactcaaaataactgatcctgaaaacatactctttcatctcctgcactgttaaaaagacaatcaacttctcctacaattcgtttagctaatgtcttaaacactcctttatatctacttcatataattatcactaatgcactaacacaaatttctcatgcccggaaatcattactaaaactaataatatatcccgttgcctctcattataccctatatcaatcgaaacttatacatgcttactttaatactactacgaactatgtcatgactccccctcatatgagactgaaacatcaccat

SEQ ID NO: 73847 - DNA, 751 bp, Glycine max
  Clone ID: PAT_MRT3847_3769C.1
ccacgcgtccgtacggctgcgagaagacgacagaagggggttgttcgctttgcaattttttcttctagaacaccgcctcagccacactacaaagacgcgacgacgcacagaaggcgaagaagctaaacgacgacgcagcgttatggaagacgaaatgtacggcgtgtcgtccacgacggagtactcggacggggcgctgatgacgccggagaacatattcccggcggagtaccacagcttcctaatgtcctccgccgcccggattccgatgttcggatccgacgagcttctctccgccgtcaccgccggcaacgaaaccgaaccctaccctggcgccaccatcgcaccggaaattcagcgccaaaacgacgcctcctctctcatcaaagccaaaatcgcctctcaccctcactaccctcgccttctccaagcctacatcgattgccagaaggtgggagcgcctccagaaatcgcgtgtttgttagaggaaatccgacgagaaaacgacgtttgcaagaggagacgttgttgtttccacgtgcgttgaagccgatcccgaactcgacgagttcatggaaacctactgtgacatgctggtgaaatacaaatctgatctgacgcggccttttgacgaagccaccaccttcctcaacaagatcgaaactcagctttacgatctctgcagtggttcttctcttcaaacactttccgataaggggggtgtatcttcaaaaaaaggttttagtgctgg

SEQ ID NO: 73848 - DNA, 147 bp, Glycine max
  Clone ID: PAT_MRT3847_376C.1
ctcgagccgcataccatatcatagagcgagaagcgagaagagaaaaatggcaatctccatacccagtagacaacgctgcatagaaggagagcggaaagaccctcttctcaacaaacggggaacgatcatcaaccccgccactgaaga

SEQ ID NO: 73849 - DNA, 303 bp, Glycine max
  Clone ID: PAT_MRT3847_37700C.1
gcaaatgtggcgtcagcatcccctacatgatcatgtaagaatatatattaacttcattttatatatcatatcttccactcttgttatactctctttggttgttaaagaaattattgtatgatatatgagagatttctatgcaatgattttgactatttttttatgtggtagctgaattttatcattttttccctcatggatagaaggaaaaaaactgtttttagtcgttatacttttgatcaaatgttgtaagtaaattttttttaaaaaagtaaaaatataacggtttagttccttttaaca

SEQ ID NO: 73850 - DNA, 402 bp, Glycine max
  Clone ID: PAT_MRT3847_37701C.1
aggttattgtattctgtgttactgggatggtgacatcactcatgtataaccttcttcgggaaatgaaaatgaatgttagggagatacattctcgaaaacctcagctctatcgaactcgtatatcaaatgagttcagggaatccaaacaattgattcttgtctcatctgatggttcatcgcggggaatgaattatcctgatggtaccttagtcatacagggggaattccttttgaccgtgaacaatacatacaccggcttggaagaaccaggcgggaagaccaaaaaagggaagggggaccggtgaatgcttcaatggaaaaagttttttttaaatgaaataaaggttctacctttccaaaatttcccttacccagttttaattccccttccaaggttaaaaa

SEQ ID NO: 73851 - DNA, 666 bp, Glycine max
  unsure (1)..(666): unsure at all n locations
  Clone ID: PAT_MRT3847_37702C.1
caataatctgcacggtggagcatacttatgaaaatgattgtgcttggcaacgttttctaccaacaggtccaattgctcttttacccatgggtgataagtttagcaatattgtttggaccatgagcccaacagagtcaaataaccgcaagtcaattaccgaggaagaatttttaaaggatgtgaattatgctttagattatggacatggacctcatccgttttaaaccaagagaacacggatagtactgttaaacgcaaaggcgatgaaacaacagaaagaagaggtaaggttgtatcgtatcatcattcattcatccatccatctgtgttctgtgtgccatttccattgccaccaccgatcactctctcacccaccaactgataccagtaacttcttcaccttcctttccttccccaattaaaattaaacaaaaaaaaaaaacgaataaacaaaaaaaactgtccactaaggttgaggcacgtgacccatcccgcccttcctctcgctcatctcaaatccatgcttctgaattagggtttccatttggatttcgcagttctggtgcccccaatttgagcgacggaaaaggaaaagggaaaagagttgatgattagcttgttgggggatgagatcatgttcgtcctataaagcatatnangaactcg

SEQ ID NO: 73852 - DNA, 308 bp, Glycine max
  Clone ID: PAT_MRT3847_37703C.1
gaaaaaatactttcacaagaaaggagactccgtgaaatgagatccccacacactaaaaagacattctagtttatacaggccctttcgattaatccatcagcttgagtgatttaatcactgtttgtataatttgttgctctcacagaagacaaatctgtgaaatattttagtagaacttgtttaagattgatgtcaattattgaattgcttattgataaaaatgtaactttaggggttagtttgccatattttttattttttacttagattctctgcaccagtagtaaatcaagtgagttaatataaaa

SEQ ID NO: 73853 - DNA, 108 bp, Glycine max
  Clone ID: PAT_MRT3847_37704C.1
cggacgcgtgggcggacttgtgggtagggaaaggaactaaacctaagatggcctttcttctaacaccacacttattacaatctttcctcgcaaaacaaaacaaccctt

SEQ ID NO: 73854 - DNA, 401 bp, Glycine max
  unsure (1)..(401): unsure at all n locations
  Clone ID: PAT_MRT3847_37705C.1
tgtattttaagagaatggtatggttttcttactgtttttctttttaatgttggtcttaaaagatacttccctctgggccattaatgatgagatttcatctgattcagtatacactatacagcttactagaatcatattctttttactatgcttcgatgtcaataatctaactcgtcatattagtgaatggtgtttcatgtgcattactgtaaagcataatattctgatttgaaaaagaaacatgatctcactcattatttgctacctgatttattgtggttcatttcaatgtatatcatacttaagaagtggttatagttgtaaatnttgtactagttagctnttgaaagttattattcaatagttctttacttgctattgtattttaagagaatggtatg

SEQ ID NO: 73855 - DNA, 206 bp, Glycine max
  Clone ID: PAT_MRT3847_37706C.1
cccacgcgtgcggtaacgtggaacagctaatgctggtaatgggactgacaacagtatggatcggaaaatatatcttaagaggagaaaacttggaaatgacatatgcacatcaactacttgcctatgaatggaaagggatctagacttggtttgattccttaacatgtgcagagctacaatcgctggttgaagaagtagaggaatag

SEQ ID NO: 73856 - DNA, 520 bp, Glycine max
  Clone ID: PAT_MRT3847_37707C.1
cccgcgcttctctctttcaaaattgacctaccttacgttcttcttcttttggtggttcgatgggagcggtgacgtcgtcgatggcggcgaagttcgcgttttttccgccggatccgccgtcgtacacggtggcggaggaggtggaggggagggcacggatggcggaggtggctctgagggaaaacgtcgacgttttgaaggtgaaaacggagagagggaacagcgttgtggcgatgtacataaagaacccaacggcgtcgttgactttgctttactcgcacggaaacgccgctgatctgggtcagatgtacgagttgttcagcgaactcagtatccacctccgagttaacctcatgggttatgactattctggatatgggcagtcgtctggaaagcctagtgagcagaacacttatgcagatatagaagctgtttataaatgcctgctggagaagtatggggcaaaagaggaagatattgttttatatgggcaatctgttggtagtggccccactataga

SEQ ID NO: 73857 - DNA, 716 bp, Glycine max
  Clone ID: PAT_MRT3847_37708C.1
gtcggaacaaggtagccgtactggtaggtgcggctggatcacctccttttcagggagagctaatgcttgttgggtagtttagtttgacactgcttcacacccaaaaagaagcgagttatgtctgagtcaaatttggagatggaagtcttctttcgtttctcgatggtgaagtaagactaaactcatgagcttattatcctaggtcggaacaagttgataggagctacttttttcacccccatccatgtcgccacacgggggcgacatggatgggggtgaaaaaaggaaagagagggatggggtttctcttgcttttggcatagcgggccccggcgggaggcccgcacgacgggctaaaagttcagaacaaaaggaaaaaaaaaaaagtcgaataggtaagcaaaaaagaaagaaagaaaaacccaccaatgaaaaaaaaaaaaaaaagggcggccgccctttttttttttttttttaatatgtacatttttatattttacttaaattttctcttgcaattttaaatattttgaaaatacccatgtaataattgctagccaactttaatcattttgaaactcccctacattttgaaactccaattaatttatcttcaacaatttgtaaatttaaaagactcgaatcttgatatttataaatattttcgtatttttttcttgtttgactatcttcgtaatactattttctactcacac

SEQ ID NO: 73858 - DNA, 335 bp, Glycine max
  Clone ID: PAT_MRT3847_37709C.1
gccgcggtcgcccttttttttttatggtcattattttagtgctctctaacttgagatttaattcaggaaaaaattacaccacatgatatatgatgttatagccgcttactcctatcaaaaatagacaatacaccaagttgggggcaactcgctatgtgggtggcttgtccaaagaagacggcagcatcagcaacagcagacaaactccaaaagaaagaattatgtggatgataaccgtcccacttaaacagagaaactgttatctcctgaaagactcatatacagtaacagcttaaaggaatatcttacaaacaaagggttgtttgagattacaa

SEQ ID NO: 73859 - DNA, 530 bp, Glycine max
  Clone ID: PAT_MRT3847_3770C.1
gctcggaatcggtcgagctcgagccgaatcggctcgagtattgcacagagagaaataatacacatatagcagagttagaagctgagcagctatcagaaatatccacaacacagctgagaagttcattttcaaaatggccggtggggtggttcctgtggatgcatcaccgattggaaatggcttcgttggcaagataacgctctcagttatcatcacttgcatcgttgctgcatccagtggactccttttcggatatgacctcggaatttcaggaggtgtcacaacaatggtaccatttctggaaaaattcttcccagatatattgagaaaagttgctggtactgaagtgaacatgtactgtgtgtatgatagtcaagtgttgacattgttcacatcttctctataccttgctgggttagtgtcatctctcgcagctagtcgagtcacagcagcatggggtcggcgaaacaccatcttaattggtggcgttacatttcttattggtggtgcccttaatggaagtgctgaaa

SEQ ID NO: 73860 - DNA, 244 bp, Glycine max
  Clone ID: PAT_MRT3847_37710C.1
caaccacagttgctgactggttgtctaaatatgcgcataatattgcatttggtcttcatgtgcttgatgttcctcagcatggttgtgtaaaatacttaactgatgtctctgctggagtttataaactccgtactgtacgtgttaatgactcatgagggacatgttcctctagagagtgtgaaaaactaatatggccatttatagatggttaagattagtttcaaatcaattttgattatcagtt

SEQ ID NO: 73861 - DNA, 408 bp, Glycine max
  Clone ID: PAT_MRT3847_37711C.1
tttttttttttttttttttttttttttttttctttttttttttggggaaacaatatttctacaaatattttgaagcaaactttttacaaaggaggtgggccaaacgcatgagacctgattaacgcgttacacactcccatctctatattcccttcccccactttcatgggaaaattcaagggcttttacaacaaataaaactggaaacccaaagggtccctagggggctacaccaacacttacattatttctctgagccccaactgctttaaaaaatgttagacaacaatttttcctgaagatacaaattggaagggtgccaaaatttgggcggaaactttcctttatggccctaataaaccgggagggttgggtcccttgtggcccccgtcgattcttttttggtcg

SEQ ID NO: 73862 - DNA, 397 bp, Glycine max
  Clone ID: PAT_MRT3847_37712C.1
ggcatgtatggtatgggaaaagccctagttgtaaatctttactacttatgaaaatataataaataataaagttcgtaaaaatgtgctgaaaattaagaaaaaaggtgtaagctcagtgtactggagatgcgcttattaagcctttctagctttgaagcaaacttattccttgagtctgcgccgtcttaaaaaccaaaccctaatcttgctagttcagttcgtgtgttttacgggagcgcgttgaactagtgtgcatggaccttagccacgagtttttcggcctagacgctacctcttccctgtcttgtctttcaagagaagtgaagtgggcgaacgataagaagagtgactttctctctttgctctccgtaatatgattgattaaggaaacccttgc

SEQ ID NO: 73863 - DNA, 1535 bp, Glycine max
  Clone ID: PAT_MRT3847_37713C.1
atttagcaatctgagattccattttctccgttgctcacaatggaaatggattcccttcccaacggcaacaacacctccggaaccccgatctccgccaccgccaccgccaaccccgcgcagctccgtcgtcgaaccttccccaactgacggagtctctgaagctggagcaccagttcctcagggtccctttcgagtactacaagaaaaccctccgtgccaaccaccgcgccgtcgagaaggagatgtccgccgtcatctccggcgtcaacgaagccgccgccaccgacctgtcccccgacgacgccgtcaaccaccttaactcccttgtctcccgcctgcaagggctcaaacgaaagttggaggaaggaagtcgggcagagcatttgcaagcacagaaatgtcgagtgcgtctcgatcacttagaatctgctgatgcagaaaacatgtcagaatggaataacactcgtatgaagcggattcttgttgattacatgttgaggatgtcatactatgacactgcagtgaaacttgccgaaagcagcaacttgcaggatcttgttgatattgatgtattccaagaagcaaaaaaggttatcgatgctctacaaaataaggatgttgcacctgccctagcatggtgtgctgataacaaatcaaggctgaagaagtctaagagcaaattggagttccagttgagacttcaagagttcatagaattagtaagagctgagaacaatttgagagctatcacatatgctaggaaatatcttgcgccatggggagccacccacatgaaagaattgcagcgagtcattgcaacactagcttttaaaagggatactgaatgtgccacatacaaggttttatttgaagctaagcaatgggattatctagtggaccaattcaaacaggagttctgcaagttatatggcatgactttagagcccttgctcaatatctatctgcaagctggcctttctgctctcaagacaccatattgttatgaggatgattgcacaaaagaggaccccttatcacaggaggctttccgcacactagccatgccattaccatattcaaagcagcatcactctaagcttgtttgctatataactaaggagttaatggacactgagaacccaccgcaagtcttgcccaatggatatgtttatagcactaaggctcttgaagagatggcgaagaagaataatggtacaatcatctgcccaaggacgggtttagtttgcagctacacagaactggtcaaggcatatatttcataaatctacatacttgccttggcttcaagctaccatggctgtctgattgtaatgtattgggaaaatactctcatgggcttcctgttgttacgtccattcttttacttgtgttccggtgctatgtacatatgtaagatgtttcaaattgtcactgggatatcacgtaaacatgtgcatacattgatttgtatttttcattgcaatgaagttctgtcagtgccgccgtggtttgaacataccatgtagagggatttc

SEQ ID NO: 73864 - DNA, 332 bp, Glycine max
  Clone ID: PAT_MRT3847_37714C.1
taaagagaatgttatttttcttaatcttcaaattcaaccagtgcagttacaaagttacaatatataaactactacatttacaatatatttaaaactactccacataactcctatttaaaagaaactaccactaacttcttaacttctatttccacatcaacaaggatagggtgggataagaataggaaactcaagtggtggaggacatgtaggcctactgtttaaaggtggtgaaaccgcgatacaagagattcgcagtctcttatcgtttcaagacggcgactacggtgcgcgcaagtagaacttatttctccttcttccggacgcgtggg

SEQ ID NO: 73865 - DNA, 161 bp, Glycine max
  Clone ID: PAT_MRT3847_37715C.1
tgatgtaagatgtaccgggaaaattggggtatgacttatttactcgagtcgtgcataaatactacacacgtactatcttcaaacttaaaagtgctcacttgcatgtacatacacctgtagagctttgaactgtttagttacatctattcaggacaactttt

SEQ ID NO: 73866 - DNA, 443 bp, Glycine max
  Clone ID: PAT_MRT3847_37716C.1
gtgagccaaagaactattcttgggaaggcttaaaatgcaactatagcacctcacttcctccccgaattatatctctgaatatgagctctagcagtttgagtggaataataacttctgccatttccaatctctcctcgttggaatctttggacttacataacaatagcttaactggaacaatgcctcagtttttggaagaattgaaatcccttaaatatttggatttaaaggacaatcaattttcaggttctgttcctaccattcttgtagaaagatcaagggatggattactcacgttgagagtggatgatcaaaatctcggtgactcaggagggaacaataaaaccaaggaaattgtcattcccatagtggtatcagtatcaggtttagttatagtggttgctttcattctcttttggaaacttagaagaaatgaacgatca

SEQ ID NO: 73867 - DNA, 275 bp, Glycine max
  Clone ID: PAT_MRT3847_37717C.1
acgtcagctcggccttctgctcgaggtgaccttcttcgtttctcgcaaagtttaagtaatcatgggtaaggaaaaggttcacatcaacattgtcgtcattggacatgtcgactctgggaagtcgtctaccactggtcacttgctctacaagcttggaggtattgacaatcgtgtgattgataggttcgtgacggaggctgccgagatggacaagaggtcattcttgtatgcctgggtgctcgacaagctcactgctgagcgttaaagtggattac

SEQ ID NO: 73868 - DNA, 2068 bp, Glycine max
  Clone ID: PAT_MRT3847_37718C.1
tgcacataataacatctacaatttcccataattttaaaccataagaacgaaataggaaaaagagagaaattagaagcatttcatagaacttattacaacagatacatgttacaaatcactatcactatgatatgatatacagcagatgcgctatctatcgcccatgaaactgctagcactatacagattacagaaggggccaaaactgaaagaattattccaatgtaagtacatggcagcatagcatacactcaacaaccatcatcacataacatgccatatttaccaggaaaatcaaaattttggcaaatggatcagaatgatcacaaaactcatgaccagtttcaatgaagttttcttcccttggttctttaaagtttgccatcaaaagaatccaagttttgttagaaacttgtttaccgtgtcttggccccatttgatgtcattttgcacggtattgtcatcatctggctcgtagtttggccagtctttcatatctggggacaaatgagactcttcatgttgtttattgcaaagcagctctggtacattattgatggacaaaattcccttcattgataaaacaaagatgatgatacaaacagaacaggatacttctgtttattatttaatcacatatcctcacacaggatttcaaagttcaacccctaagctccaaacaacttgttcctcaaaagaaatcaagcaattctctgccaaaggtagttgtggacaagtaaagaagggaaaaaggttagaaggagaggagaaagggaaggccacactcatcatcaagcgtttacctcgggtatgttctgatcctgagtttcaaaagctccaactgaagtgtccgtgttagtcatctcttgaacttcactttgacccgcttgatcagttggctcagttggttctattattaagccaggtacaagaacaggacctccttcaagatcaaataagctgctttccacaattgtcttttcctgattttcgagtgacgcagcatttccattgtgtccaagatcatgtattatatcatcgtttcctggactatctgcagattcttcttttggttgaagtattatattctttttattacttttatggcttgtactgttgatgagatcttccgaagaacttatattttctgcaacaatagccattggcttttcgatagaggaagaaatagtatcagtgttttgttgcatgactggttcagcaagtggtttctcctctgcatgaatttgggtatcttcaacagctgatatttcggatgcattggaatccagttcctcttgaggattctccaaagtttcagctaaagtcggcacttctaagtcgacctggggttcctcatttggctcagcaagttgatcttcctctattatattctgaagttaggaattctcccaatcttcaaaaataattaatctgtacctcgatgatctgaatacaaaccggatgcgcaatctatgctgcataataatccccccaccatccagtttgtataagtggataaaactgaaggacttacaacaaggcaaatccatttcaacggcccatacattccatcaaaaccatgtcatggtaattccttttaaggggtcccatgaaccaagcacaggatcatctccaacgataagaaactgttcaccaaaattacaagtcttttctaactgaaaagatacacgaacaaactttgattcatttgtttgttcactttgttgagcctgaggctccacagtatccaagtccacctggtcctttggtggcactgcatgaacagggtagtgatcattgtccttatccactatcaggtttaataaattccatatttctttcttttttctcaattgtggaacgaagggtgaagcaggattatgatctataagaaggacgacggcaggagagaggagaacaggggtctagagcgtggccttagaactaggaacaataacttgtttcatctttggtgaattttggagtgtggtgtagtcacacaataagggtttcacggatgagggcgggtttggtttttagttcccttcttcgatcgctttagtagctt

SEQ ID NO: 73869 - DNA, 387 bp, Glycine max
  Clone ID: PAT_MRT3847_37719C.1
tttttttttagttttttttttgttttataaacttccctgttttcatgcttgctgtttgtataaccaacataggattttatcactaaaaccaaactggaagggcggtgacaggaaaaccgccccacaaaccctggggcaggccacaaacgaaaaaaagggggccaccacccccctactggagggacattcgcaccaaacccaaaaaagttgggcgtaaacgggagccccaggggggggaattgaaaaaaggaaacccgggggcgaaaaaatggccccaaaaaaagcatgccccgggggggatatttaaccccccgcgcccccgattgaaaaaaccccccccgaccaacacgggggataggacccccccccccccccgaactcgaatct

SEQ ID NO: 73870 - DNA, 869 bp, Glycine max
  Clone ID: PAT_MRT3847_3771C.1
tgatcctattttaataatgctttgtaatgttttttatgacatgatattatactttgatcctaagagtgatcaggtgagtttcaccatgctgctatatttcttaacaggttgacaagggggtgaatgcagaatttgttcgatcgatccttgtagaaagagcaaattttccctgtcttgcagctaaatcagcgtataaaatggaagaattatctaaagggaaccttttccctaaagtagttgaagcatactcccggccaacaagaattgtccgtgggaaagaagatgaacttcatatggaggtggacgagactgcttttgtgacaaatgaagagagagttttatggagcacatttttgtcagtcaaaaagagtgtcaatcctggtcttggcatcgatgattttgtagaaatttcatgtcagttaatacagccgcttgaggatttcttcaataatgtctttgtaatggtggacgatgacaagatcagagtaaacaggttagctctgctaaaaggaattgctgaactccctaaaggaatagcagaccttactgttctgccaggattttaaggattggtaaaattatttatttcccgtaggatatagaccatattttttttaggctccaaaagttgaccaattaggccgtatttattttttgcgccctcttgattgttgttttggtccgaatttggcccacttgatttaacaagagtttctatccgtgcgtttgtttctcctgtggcccagttgagtctgtaaatttctgaagctgtgtattgtacgatccatttgtaatattcttcattcatataataaaacttaggatttttatttttaaaaacttcctaacgtctttgtgacacaaattgc

SEQ ID NO: 73871 - DNA, 239 bp, Glycine max
  unsure (1)..(239): unsure at all n locations
  Clone ID: PAT_MRT3847_37720C.1
tcttgtgtaggcatttgcatcacagtatgtttattgcctcaagaaattnggacttgatcccagaaaggtcaatgtcaatggtggtgccattgctcttggacatcctttgggtgttacaggtgatgttgagatgttcagtcagaaatttaacttacttttgccttattattttcttattaaatggaagangtaatgctaaaatcttcagagaggcacctgcaactggaanctttatatta

SEQ ID NO: 73872 - DNA, 241 bp, Glycine max
  Clone ID: PAT_MRT3847_37721C.1
gatcgcatttcatatcactcaccatcatttccaccacgtcagcgtcctcaaaaacgtttttcgcaatctctgaatttccaacagggtcaggggaatgaagataagcatcaggaggagaacaactggaaactcacacaatatacatcttcaatggccccatacaagttcaacccgacaatcgtatttccagaaatgcaaagggcactatgtatagcgtcaccatacaaatcttccagaaact

SEQ ID NO: 73873 - DNA, 186 bp, Glycine max
  Clone ID: PAT_MRT3847_37722C.1
tcggtgctttctcacacaaacaaaggtgcatgggacttatatgaaggttgcagactcccagttgccgtcaaggctgagggataacggtggtcgaattggaaacgcatagcaacaaggctctttagttactcattgacacacctgcccctgttgatcctcaacataccccctggagctgaaaggaac

SEQ ID NO: 73874 - DNA, 397 bp, Glycine max
  Clone ID: PAT_MRT3847_37723C.1
aaaaaaaaaaaaaaaaaaaaaaaaaaaaaaaaaaaaagggcgaaagataataaaaaaaacaaaataaagtacaacgggggggcgacgttatagaagttaaatggtgagaccctagtataggctcactgatcgtttttttatagtgtcgtgaatgggaaaaccttgggggggccttaaaaaagggcgacgggggaaatcccccttttgcccgctttggaaaaaccttggaggacaccaccttttcccctttggaaaaaatccacaaggggcatgccgaatgggactttcaaagtatgggcgcattaagcgtggcaaggggggcggcctcttaaagggcaaatgaatcgctgggtgtgggggtaacacccgctgcgttcgctttattcttttccttcct

SEQ ID NO: 73875 - DNA, 370 bp, Glycine max
  unsure (1)..(370): unsure at all n locations
  Clone ID: PAT_MRT3847_37724C.1
cggcacggaccggcccggaagacccgggccgacccacgcgcccgagggcttaagggaggagaaaactaaaggatggagcaaaccacacaggcaccgaggaaaaaacatagtatagagaccccaaaaacaattgactgaacgacgagaaacaacggagagacagggaaaaccaaagcacacacaaaacaaaaaagggggggcagcacaaaccaaaaagagccaggtggcggaaaagcgaaaaggccacgacctaacgaccaaaccaacaggcgagcagcntgaatggcgaaagagacgcgcaccggagaaaaccattgaccgcggcgggagaggaggcaacgcgcaaagcgaccgctacacaggggggcgc

SEQ ID NO: 73876 - DNA, 452 bp, Glycine max
  Clone ID: PAT_MRT3847_37725C.1
ggactcggggacgcgcgggggaacccgggaacggcgcccgggggcctgcaagcttaccatatttcgatatagagaagagcttgagagcttgatggaaaaaggggcatagtgggtgaaagggtaaaacggtaataagttcacaaatcaaaacaacataaaacctaaagggaaaaagcggaaagcccgaagggcctaacgaacgaacaaaaatagattaatggccacgggccgattgccagttttaaaaccggaaaacccggctggccaaatgaattaataaatcggccaacagagggggagaggctattggcctatagggcgccatggtgttttaccttttaaacagtgaaaaggtgaacagcttataccccttgaccctctgagactgaaagagaggcatcaagcgtgccatgctggattgcccaaaaaagctaaattacggtgggaaaggg

SEQ ID NO: 73877 - DNA, 419 bp, Glycine max
  Clone ID: PAT_MRT3847_37726C.1
gccatagaactttttttccttcataatgcctaatcacaagttatctctcctaacttataaagcatccaatgtgggactatacccataggatacgcggaactctctaattttctcttaacaaaagctccccctaccagtgataaaactcataccattactcacatcatgccaactcaaagatactcataacctcaatatgttacaacagcccaacccacagctaaaagtgatatatacatttatccagatgttttccttcaaccattacccgcaatacatgacgcctacaaatccaaaaccttttaagaacccaatctagtagaaaactcaaaaccatatctaccatacaaaagaacactatttttgattatacacactcaaaccattattcataactcccaaaaaggagcctacattgc

SEQ ID NO: 73878 - DNA, 347 bp, Glycine max
  Clone ID: PAT_MRT3847_37727C.1
atcgatacatagaacacactcgcttttatctcatacggcaatggcgctcacgttgggcactggtctaattgcggtgctcccttcgcgctggatgtatcttttaccttacacgtctagcattgacacactctttttaactgcacgggagcgctttggactgaaactttatgggggaatggtaattaaaggcattaaggtgagggctcagctatgagttggcactgatggcactgtagctaactctggtgaacaggcccaacgccttgctattaaagaaagccagaggccagaataccccttgtatggcatagttggacaagaggagatgaagctttgcactgtcctta

SEQ ID NO: 73879 - DNA, 800 bp, Glycine max
  unsure (1)..(800): unsure at all n locations
  Clone ID: PAT_MRT3847_37728C.1
gttctccaccatatttatgctcccttcctggatcttctctatcagccgtcgccgaaggtgatttccgacggcgatgctattttttttctttctttctttctcttctttccctccctccccaaatctgttctcccaaccatcagtggccttgtttcctcccccacctttgccctcttctccttccggcagcccctcacaactcatcagtgtcaataaagccagaattcattaaaacaaagtcaatcaaaagatgaaaaggaacaccaatttctgaaaaatcaactaaaatagagtactgaaatatggttttagaggcaaaaaaacaaaggggcaaaacaaatttagtttctcctgtatgatctcatgtctatttgttttgagaaaagagatttgagatcctcattgatgatgttgcggcgagaattcgtcgtcaccgacgtcgatgatgacacggtaaatctaagagacacgatgnnnnngcgacgcaacgagacgacgacgaaagggagagcgagctcagaaagtgacgtcgccgccgaggaggagatgacatggtgaatctggaaaaaaggaggagaaaggaggagggaagccgtaatgctgtctttgaaattcgtctctggccacgacgcacagtggtggcagcgatcgctggtggtggcttaaatctggggagggagaaatatgatgtggaaggtgcatagtattatagtgagtaaaagattaatctgaaggccagtttttttttggtacacaatgaaccactttcaccctaccctagaatgggcaagttactcatt

SEQ ID NO: 73880 - DNA, 240 bp, Glycine max
  Clone ID: PAT_MRT3847_37729C.1
gcgacttcttccgtgttgatccacagaaacatgagggactaagttatgtgggaattcgcattgcactttgtatattccaagcacatgacatggatgaggtggctcctttagccgcccactacgccaccggtgagctcaagttctcagcggagtatacgattatcatctgaaaggccgaccataccataattgatggattgctcaatgaccctctgccgaaggggacattctcaccctaac

SEQ ID NO: 73881 - DNA, 647 bp, Glycine max
  unsure (1)..(647): unsure at all n locations
  Clone ID: PAT_MRT3847_3772C.1
gggaatgggtagcccattcagataaacgagttttaataccataaggtcttaaatcataggcctttcaagtagagctttggaataaacgtgggctagcaaaattgaacagcaacttcgctctttgttatcacttgtcatagtagaaattcttagttacggatcactcatggctcaagatttccacttagttacaggaaagatagtttctcttgaatctgtagagcatctttacagtcaaccaacttttacagcttaagcagtctgctgcatgatagcaatttccttagcctcttctgctgtgtggagggcagaaggaaggggtgcaataatttcaattaactcgttagttgtcggatgagagagaaccaatttatgtgcatgcaagtaatacccacaatctccgggaactggtttcgtaggtctctgataacccccatcttcagcaaaactctcatctacaaagtcacaatctaagcatttaggttgcccaccaacaccataaagcggantcacccttcagaggatgccctatgaaagagagatgaatgcggatctgatgaggccgtcctgactgaatcttaacctggaccaacgtgctgttttcttgtatgttcgtctctagcctcgtgccgaaattcggcacgagg

SEQ ID NO: 73882 - DNA, 322 bp, Glycine max
  Clone ID: PAT_MRT3847_37730C.1
ttttcgagaccctcctttggcgttgcactcttctatgcatattctctgctctgcagctgtattcagctgagagaccatcaagagggccagaacgatggagcggaccaagtcaaatctctcgactctccattctgatctttcttccgggctcagttacagacatgctcatacttcaggaagttagcagtgtactctttgtctataaaacggaggggcaggaagattgtctattgcctcatcctctaagttgatcaggagtaaaggccacgcctatgaacaggaagctgtctcagctgcaagaagcaaagagctggagcactcg

SEQ ID NO: 73883 - DNA, 216 bp, Glycine max
  Clone ID: PAT_MRT3847_37731C.1
accaggaaaaatgtaaaaaagctcaattaatagtgttcattaatgcttctgcctcccttcattcttgcagttgcagatggtgtagtatgataacttagtatgatgattgattatgtgaacgagtggaaaggactgtctctctaaaaaaaaaaaaaaaaaaaaaaaaaaaaaaaaaaaaaaaaaaaaaaaaaaaaaaaacaaaaaaaaaaaaaaaaa

SEQ ID NO: 73884 - DNA, 193 bp, Glycine max
  Clone ID: PAT_MRT3847_37732C.1
tcgcccacgcgttcgactaatataatacaaaatgaaataagaataaaaaataaatgttaaaaatttgaagtaaagtatatatctcataaaagaaaaggtcagcttggacataaaatggtaaattcttagacttacaatcgtctatacattttataattgttgactcaattttatcgttcataaaaaaaacatt

SEQ ID NO: 73885 - DNA, 276 bp, Glycine max
  unsure (1)..(276): unsure at all n locations
  Clone ID: PAT_MRT3847_37733C.1
gtctacccttatctctgaccatttctttctctgaagccaactccaaaactannnnnnnnnnnnnnnnnnnnnnnntaacccaattcctgtttcaactganacacagcacacacaacaatcatcatttctctacaaaaaaataacccccacaaagagaaacaaactgaaaccaacaggcaaaaaagaaatcttcacctcagcttcctctgttccgtccttcctcgtcgccgcgccggagcatctcgccgcttcatccacggcatcttcgcgagggaa

SEQ ID NO: 73886 - DNA, 162 bp, Glycine max
  Clone ID: PAT_MRT3847_37734C.1
agctattcctagttctttgttttagtggaaccgaacagagacaagaacaaccttcaggaatattgcattttctttatcctcgggcttctgtccccttcttggatctcatattcattcattacacattccaccttattggccgttttgtctccaacgctgtgt

SEQ ID NO: 73887 - DNA, 370 bp, Glycine max
  Clone ID: PAT_MRT3847_37735C.1
ctttctttccctttgcaactctctgcaataatgtggacgcagcaagtgcttcctctaccaccccacaaaccgtttcttcgttgttcaccttcgaacccatcctttgtaaatggcaaaaatggttattgcagagtaaaggcattgactttggatgaacttcccccaaacgcgcttcggaagaagagagagccgcaatggagaggaggcttcagcctcggactcgacttgggattggctcgcactggcctcgccctcagcaaaggcttctctattcgccctttaaccgttttggaactgcgaggacagaagcttgaggttcagattattaacattgccgaagaagaggaagttgatgagtttataattggac

SEQ ID NO: 73888 - DNA, 254 bp, Glycine max
  unsure (1)..(254): unsure at all n locations
  Clone ID: PAT_MRT3847_37736C.1
cgtatagcttggatncctctagagccgggcgcgnnngnnnntttttttttttttttttttctttccacattttatttgaggaggcgatcgacaatgtatccttctcggaggtgttactttacaggaaactcttgttacccacttttccttttctttataatgataagagttcagtgggactttctcacaaacgtcgcgggcaagcgaaccgctcacagtcgccgcaatctcgaacacttttaccggacacattc

SEQ ID NO: 73889 - DNA, 182 bp, Glycine max
  Clone ID: PAT_MRT3847_37737C.1
aacgcgcatagggtgaagaagaaattgtcttaggaactgaaggacaacacgcaaagcaggggcgagcatgagatatcaagatctccctagcttaagtcttagctgaagaaatttaagatcctaacgagactaattcatccatgttagatgaaatgatgcatgagcgctaccataactaaccc

SEQ ID NO: 73890 - DNA, 265 bp, Glycine max
  Clone ID: PAT_MRT3847_37738C.1
gaaggtttcccgatgatcactgtatgacgtcctcctatctttgggggggggggggggggaaaaactgtaaaagcagtggggagggaagatgcccaccggcaaaccgttgagaaccaaataccttatagataagaaataggcaataagtacaaagagaaaacctgtagaacgttaaaattaaccgcgccataccacttatgaagataaaaccagtaagaacgacttaaagctaacacacaaacgcccgaatgaaaactatagctaa

SEQ ID NO: 73891 - DNA, 445 bp, Glycine max
  Clone ID: PAT_MRT3847_37739C.1
attgaagaacctttttctttttttagcattactaactcagtttagggaacaacatataggaaaatgaatttcctttttccaaccatgtttttttgcaaacacaaattgcaaatttcccctccttataagggcaaacccttcttaaccgaaagaaaccaacctgaacctaaaatcctttactacattgcccaaattacatcttcatatgaagaaacaaagaattgttttcagaatacacgagctccctggggaaaaaactcattggcctttttttcgcccacaaacaaattatgagtttttcttaacgcctccttcgccattttcaacaccgctcctgtgtgcccccccgacttgtttttctcgaccgccccggaaaaaagcgcaacctcaactgttataacctccataacaagtggccctacgctgcctctgattaatctttcca

SEQ ID NO: 73892 - DNA, 381 bp, Glycine max
  Clone ID: PAT_MRT3847_3773C.1
gtggaaaaattttaaataggataaaaaattttttttgggggcaaatctcctacccattttattttttttaaaaaaaggggtgcggggggggttgaacctaaaaccaaactccccaatccctaattagcacaatccattaaaaaaaaggggttttcaatatcccactttccctcctaaaatgggggaatcttttggtaacataggaatttaatcattttttacggggtacaaaacatatacgggaaacaaacaaacaaaattcaccccctcggggaacttttttattcgagcggggccaaccaccactttgttttcttacgacatttctttttttaaacatgccccccatcccatttttagcatccccaactaagccccggg

SEQ ID NO: 73893 - DNA, 505 bp, Glycine max
  Clone ID: PAT_MRT3847_37740C.1
cttctttgggggggggggggggggggaagaaacatacgcttatggaggggtagggagaagacacctaaagagaaccgagatagacagcacttactgactgaagaacatagacctaatgcaatataatatagcagagttttataaaccagaaagtagaacatcgataaaactataaaccgaaccatgaggaggaaggtagcctttggaaaaaagatgaaaaatattaaccccctagctaaagcagatagagcgaaggaggaggaaggaactaacaagtgttggtaaacctggccttgtaacggggcttggtgcagtaacggtggctaaagctggggtaggtgtaaccgttgctaaagctggggttggacttactggtggtagttggctaagtgtaagcgttggctgtagtggttgttgcgatagggtactaaaacgcaggccggttgttagtatacctggtgtgttggtgtgcagtggtacacccgaaatacggctagggccgctg

SEQ ID NO: 73894 - DNA, 363 bp, Glycine max
  Clone ID: PAT_MRT3847_37741C.1
aggcgtgcaagcacgacgcaaggagacagcgtaagatgcacgcgcattgctacaactaacagctgcagctgcatcaggattggctcccagactatgaggaaaggctccaacatctacgtcgctataagcaaccctgagaaggtcccaatgcagtgcatgagaatcgttctatgcatgtccgaatctttagggacgaagccttcgtatagagacttgattctgcacttagaagagaccaaagaatgctgaaattcaaagtaggagaaggatactaaatcacatgcagaagggacatcaaagtcatacccagcttaccagagctgtagacgaaggactaccgtcgactctgttgaagttgcttat

SEQ ID NO: 73895 - DNA, 457 bp, Glycine max
  Clone ID: PAT_MRT3847_37742C.1
ccatggggcaggggaaaaattttcccggaaatttaacaggcaggcggaaacggggggcgggggaatcaacccccaaccccaggggtgggcccaacccccggggggaaaacaaaaaaaaaaaatcccctccccccttaggcaaaagggcccatcaaaagaaaatttcccgggagcccaaaaaaaaaggcaggtttttggtccccccggttattggttaaaaaagaaaaggaaaaaaaaaccccttaaaacccaaaaggacaacctggtgggaaaaatggactttttccccacccgacaacttaaacacaggcagggcaaaggaaaaaccccagctttttttttaatggggccttaaacttccccttgggttctggggaaaaaaacaacggttttggaaaggggttgggttttttggttggggaaacctttaaacccactcccctgggggggggccccc

SEQ ID NO: 73896 - DNA, 530 bp, Glycine max
  Clone ID: PAT_MRT3847_37743C.1
agaaaccaagacatttttcatagactagtaagaggatagtttaaccatacaataagaatcttattccactaggggagatcggttacatagatcacacaatgtcatttggattgattaaagaccaaaactttagagatagcacacttcaaccaagttcacagaaaatcattattaccaaatattgagctaattacatcaaagacgagtaaattaaaaaatgactgtttaatcaatttcttggccatgtgtctgtcttctaagagcaaaatatgtttcgatgtaatccatatccaaactgaaaactaacaaacgtagagaacttaataatcaggctgataagacgtgagagcctccattgtgaacgataactgggtctcacatccagccagttcggcactcactcctgcatcaacccagtcagataggaaagagggggatatccacgctgtgctgtgaggtgagcaaactgggctgtgatgccaaaagatgtaccgaacccactcctaaagggtagagtggtttcatttttt

SEQ ID NO: 73897 - DNA, 471 bp, Glycine max
  Clone ID: PAT_MRT3847_37744C.1
cggctgcgagaagacgacagaagggttctacaatacttattagatatctgtttctaaggattaaaatgtatgtagaattagaagtcttgagattccaacacagggattttttgatgtagcataatcattatcttatcctatatattcagtattttttggatcaaaagtattagtattgagcattgttgcaaaggttttaaattgtggttgactggttgcaattacaatttcagacaaaccttgatattgtggaaaattgtagataaatgcggttgatgcaaatgcaactgtggtcacgatgtggttctaaaaaacccataaactttgactttacagctgcaattgcagttttggactttaatttaaatttagaacctcaacaattctttaaagggtcaaacgtttaaactttgagcattatgtattctattgctgactatgagaatgtgatcaaatattctcttaaagcat

SEQ ID NO: 73898 - DNA, 267 bp, Glycine max
  Clone ID: PAT_MRT3847_37745C.1
gttacacccagtcgcctgcatcttggtggttagagttcgtgtattggtaccctgctaactggtaggggatatagacgctggactgaactatctgttaaagctcattctttgaatggtcaacagtgtatacattgtatgttaattgtacgagatggttgtgttacaatcacaaaatgggaaagtatcacaatgtcgtttgatcatgcttaaaatgccgaggaagaataggatgattattcaattgactacgatggaaatgatcttgat

SEQ ID NO: 73899 - DNA, 282 bp, Glycine max
  Clone ID: PAT_MRT3847_37746C.1
gtcgctgcactgctgcagtctattgatgctagcaccatccctacagttgtcactttctagacaagaaccctgacaaccacccatacctcatgaaattcttccaaagctcagcccccaaggtatgctgtctctgaacttctccaccggaccttttgattctttcaagtatgactactcctgctgccgcggaggaattccaggtctaggagatcaagtgccttattggtgacatcgaagccaggcacggtgccttccagtactctagcctgaaagaggaccaga

SEQ ID NO: 73900 - DNA, 333 bp, Glycine max
  Clone ID: PAT_MRT3847_37747C.1
gtttaaacagtgacctagaatcagttgaataaaatttagttccaactgcaccagagttttggtacagtttcaaaaaaccactgtcatgggttgaattttgaagttttcaactttgcatctaactttagatatcctctggagactggagtgattcttcctctctgccactgacggttagaaatatctgtttttggtttcccttttcttgatgcctgttttcagcgcaagttccaatagtcaagtctatttgttttggttttaaggttggaagacagacatggaaaaaatcaggagttggaaaattgccattttgctatttcgggggttcatact

SEQ ID NO: 73901 - DNA, 477 bp, Glycine max
  unsure (1)..(477): unsure at all n locations
  Clone ID: PAT_MRT3847_37748C.1
gaataaccataacgaccgccaccaacagcaacaacaccgtaacgaagcgtggggcaccagagaagagctgtagctagcgtgcgccgagaaccgccatggcttcacagacagagacgccggagacaaggangtnnanntnnnnntntaaannnnnnnnnnnnnnnnnnnnnnnnantagcgacggggcgggggggggggcggcgcgggggggggcggcgggaatcgaaccaccgacgggctccggcgtgccacgaacagaccnncancngtatgagtagcgacccgccctgcgcgagccaattgcgcaaactcccggttgccgagctccgccgcgacgtccaacgcagagacgtttccattctgtcgttgcaattggaagtgaagaggttgcaggaggagaaagcgcatgaaaaagacttaaagcacgaccaagaaccacgtctgcgagttcgcgagcagttgcgcgcgcgaaacgac

SEQ ID NO: 73902 - DNA, 269 bp, Glycine max
  Clone ID: PAT_MRT3847_37749C.1
tctatcacgccacatgcaggcatacataatctctcaataccctttaacaaacaatttctcaaaccttcccacgggaatatccggggctttaatctactttatccaacatcttaatacctttaactttcacaatctacataattccaccattaactttctcccatacatccttctacaaaaaacaccatttaattaccaaacaaaatttactaacatcacaacacacccacacaattaaaacacttatacacacataattaatactatta

SEQ ID NO: 73903 - DNA, 245 bp, Glycine max
  Clone ID: PAT_MRT3847_3774C.1
tcgggagttcaattccaatatatgaccactctctctgtggaatggcctaccttctacgttcaagatgcatatcttcgacaatacccttaccggctagaccattacccttgaagtggacatgctctgacaccatcgacaacgtcatggccaatatccaggacaaggaatgaatccccccgatccatcaacttctcattttctcctgaaagctacttgatgtactgccgtaccctttctgactacaa

SEQ ID NO: 73904 - DNA, 1424 bp, Glycine max
  unsure (1)..(1424): unsure at all n locations
  Clone ID: PAT_MRT3847_37750C.1
aattatttacctcttcggaggttttagtggtgactgctggaagctttagccgtggctaggcaagaactgcacccactcactctcgattcaagattcaatgaaacgaaacacggagagcacaatgtttcgaaacgacgacgttcgcatagtttcctcttccatcaaaatccctcttccttacatttccaaacgccctacctgtcctctgcgaaccgcgcattctcacatcgccaacgccacaaactcgattgcgcaactcgttaactccttcacctctcactccaccgagttgactcgctccgttctgcaaaaatcgtcgctcctgtgctcagcaacgctgtccttaaccggcgacctggagagaaaatgtccaattcggcgtttggcgtcgctgtctctggcggaggaagcacagcagaaggctcggcagaatgaggagagagtgctgataagcgaagtgttggttcgaaacaaagacggcgaggaattggagaggaaggacctcgaggcggaagcggcgcaagctctcaaggcttgtcgacctaactcggctctcacagtgcgcgaggtgcaagaggatgtgcatcgcatcatcaacagtggantatttttcgtcgtgcattgccggttgcggttgatacgcgcgacggtatccgattagtatttcaggtagaaccaaatcaagagttccaagggttggtatgcgaaggagctaatgttcttccggctaaatttttagaggactcgatgcgagatggtgatgaatgtggtggaacgtcccagtggaggattttctgctggtggtgggatatcaagtgggattacaaatggtccactaagagggcttattggaagctttgcctattctcatagaaatgtttttggtaaaaaccagaagctcaatatttccttagagaggggccagattgactcagtctatcgcataaattacacagacccttggattcaaggagatgataaacgaacatctagaacaataatgattcagaattcaagaacacctggaaccattgttcatggtaatgcagatggtaatggtagcctgaccattggccgcatcacaggtggtatagagtttagtcgaccaatcaggcctaagtggagcggaacagtgggacttgttttccagcatgccggagtacgtgatgagaaaggtattcctatcattaaggattgttacagcagtcctcttactgcaagtggcaatacccatgatgatacattgcttgctaaacttgagactgtttacactggttctggcgaccatggatcttctctgtttgtccttaacatggaaaagggacttcctcttttgcctgaatggttgtccttcactagggtgaatgcacgtgccaggaagggtgttgagataggtcctgctcgccttcatttaagtatctctg

SEQ ID NO: 73905 - DNA, 471 bp, Glycine max
  Clone ID: PAT_MRT3847_37751C.1
ggaaccaaaatacctttaaataaagtaagggccttcccggaccaaaaaaaaaaccccagggaaaaccaaaaggggcagggtttcttcaaaaggtccccaaaccagggggaaaaaaaggggggggccccaaaggcaataggatccctatacccaaccccgccccaaaaaggcttaaaccttggctcccccccgggggaacctggggaaaaaaaccaaaggaaaaacctggaaaaaaaaaaaaatacctttggcaaaaccagggcccccaaccccagaggcacggaccctttggtttcaagttatcccccgggacggggaagaaaaaacctttttactttgggaaaaagcatcttttaccccaggaacccttttaggaaagtcaagaaaagtcttttttggacggggcaaatttgggaggagggggattccaagtttttaagcccccagcaggggtcggggggggccccaaac

SEQ ID NO: 73906 - DNA, 601 bp, Glycine max
  Clone ID: PAT_MRT3847_37752C.1
gacaaaatgtgcatattctactcatgacttctattgtacctacccgttaaccttgtctttacaaacgcccttcatatattcacacaaaaaatcagttgtttcctttgaaaagaaagatttttataattgtaaacaaacataaattagattctacttttcttaaaatatctaaaaaaaatatctctaaattacttcatatatcaaaatcactttattttttttatcttaaacaaatttatcctatgcgaagagatgatatatgatgaataatatacaagataaagataatatcgggaaggatctaaataacagaagataatatcctcagaaaagataatctaatttttatattgatttctaattctaatttgaaaacatatgagagatcgttgatagttgcagaaaacgcactcaaaagtggcacaccgacaccatacaattcacagcgtaaatccctagagtgagaagtgacagttgagcggatcaatgacaaacaaggtagtatttcagatgctcatttttctttcttgtagaaaaataatctgtcggaaaaactaacaacagcaataataattttgtttgttacagagtaagtttgtgt

SEQ ID NO: 73907 - DNA, 320 bp, Glycine max
  Clone ID: PAT_MRT3847_37753C.1
aattcggctcgagcagaatgtagtatgtcacaacctattgactgataaatggttgtgtcacttaactcaacagcctagtccatcgtcgggaaatgtgctggcgcgcgtgcggtagcattctctatcgattgactcaagtcaacccagcttggctcgatctggacttactgatcaaaacaattcaccacctgatgagaaatgctgtgcagttatttcccaggctcaattgctttgtctttgctgttcaagtctatcctacctacatatggaattaatctcaaaaatgctttggccatacctgctaaatgaggtctacaatt

SEQ ID NO: 73908 - DNA, 310 bp, Glycine max
  unsure (1)..(310): unsure at all n locations
  Clone ID: PAT_MRT3847_37754C.1
acttgaaaagcgggnagcaataggtgaaatactaaaattagatcccagttacaagcctccacgtggttttaaaccattgttaaaagnagccagcattcctttgcctgtccaagnatatcctgggttacaattttgttggtctaatatatgggcttgaaggttgataatccaaaaacaacttgaaaaggaactggtgccaaagattaaaaattccatggaatccaaagcaaacacaggaaaaaaaggttgaatttaacctgaaactggattcccattgcaatnacaaaaaatgcatntttacctatcccct

SEQ ID NO: 73909 - DNA, 497 bp, Glycine max
  Clone ID: PAT_MRT3847_37755C.1
gccccggaatgacccgggtgggactcacccagtccgggaataacttcgtcctactgcaagtgatttcagaactgcaattgttggtgaaaatcgcaagcctcatgctgctgccatgcatgtgggagctatagcaagtatccttgatggttgcgcaggtcctgaccgcaacacagatggtgcaatgctttaggttgatactaatcataccaatactgaaaatgcagtgcgaaataatttagtcgcgcctaccataggcggaaggcccattcgggtggttacatctgcgaataccattgtgcatgttgaaccaaacatgaatacaaagtctcagtttacgagtaccactgccagtgctgattgagaccaaggagaagatctcgcaatggctaacggtaaagaagcatgtgctgctcttgggttgacatcaagttacactccaactacattgctggcatctggcacagaaaaagacaccaggctaagtggggaaccctttg

SEQ ID NO: 73910 - DNA, 210 bp, Glycine max
  Clone ID: PAT_MRT3847_37756C.1
ggggttctgttttttcaacaaaggagatcttttggcctaactttattcaagttttgctaagggaggaaatccatttttcacccttaatcgtgtaaaattcacaaaatttcaagatgctatgcccgttttctttacttagtagtttccttcgagtcatacattcacactctttaattcataaaaacttttcttcaaaagaggggggggggg

SEQ ID NO: 73911 - DNA, 413 bp, Glycine max
  unsure (1)..(413): unsure at all n locations
  Clone ID: PAT_MRT3847_37757C.1
atcacccttctcttttgttttcttttatatagaaaccctctatgacatggatgttttcttttcctgtagctacaagtggtggctacatctgctgcctgtgttccattcactattcgggcagcacgttctcttagtcgcactgcctgctaggtcacgcttctggatgccggactcaaccgtatcctaggacgatacgacactggtccgatgcagcttgggaattcacatgattagacattacttgaactggcagtcacagcggctgctcttttctataccagctgtgggttaacctggcgagcttgacccgccgaatgaatcgcttcttaggtaaaggtagatcgcaaaaagctcggcaatggtgtggctgggatcaataggttaactnctgtaacgagcattgctcctgggcc

SEQ ID NO: 73912 - DNA, 577 bp, Glycine max
  Clone ID: PAT_MRT3847_37758C.1
gatgaagatcctcaagcccgacccgaggcttggggatctcatccagagcgagtgtggcaagagctcctggcagggcatcatcaccaggctgtggcccaacactaagtatgtggatgtgattgtgactgggacaatgtcacagtacatccccacgttggactactatagcaatgggctaccacttgtgtgcaccatgtatgcgtctagtgagtgctactttggtgtcaaccttaaccctctttgcaagcccagcgaggtctcttacaccctcattcccaccatgtgctactacgagttcttgcctgttaatagaagcaacggggtgtctcatgactctctccacacccccagatccctcaatgagaaggaacagcaggagctggttgagcttgttgatgtcaaacttggccaagaatatgaacttgttgtcacaacttatgctggattgtatcgttacagagttggtgatgtgctgagggtggctggattcaagaacaaggcaccccaatttcactttgtgtgcagaaagaacgtggtgttgagcatagactcggacaagaccgacgaggtggagctt

SEQ ID NO: 73913 - DNA, 1887 bp, Glycine max
  unsure (1)..(1887): unsure at all n locations
  Clone ID: PAT_MRT3847_37759C.1
tggtancgcctgcaggtacccggtnccggnnaattcccggnngtcgnnacccacgcgnntccggctaaggcataagggctcgagcttaacccttatttcatttcttcagagacctcgctcctcgccagaaattgtattgcagaggaaagaccgagaaaaaagaagaaggaattttgatggtaaagtaatattctaatttccaaaattcgattttgttgccgaaggaagaaaaggacgaaggaagaaaagaaacgaaatgggaggtccagcagaaccgaagcttgtgcaaagcgtgttgttgtatgcagcgagcgcagctctgagctgcttggacctattcgcgggtttgagacacctggaccctaatcgcgaaccatcgaaaaaggctctcgagcataagaaagagattgcaaagcgtcttggtcgtccccttattcagactaacccttacgaggatgtaatagcctgtgacgttataaatcctgatcacatcgatgtggagttcaactctattgggggactggaaacaatcaagcaagctttgtttgagcttgttattctgcctctaaaaagaccagacttgttttcacatggcaagcttcttggaccacaaaagggggtcctgttgtatggaccgcccggcactggaaaaaccatgcttgccaaagctattgctaaggagtctggagcagtttttattaacgtgagaatatcaaacctgatgagcaagtggtttggggatgcccaaaagcttgttgctgctgtatttagcttggcttataagcttcagcctgccatcatattcattgatgaagtagacagttttttgggtcagcgtcgtacaacagatcatgaggctttgttaaacatgaaaactgaattcatggctttatgggatggctttactactgatcagaatgctcaagttatggtccttgctgcaactaatcgtccttcagaacttgatgaagcaatacttcgacgtcttcctcaagcatttgaaattggtattccagaccaaagagagagggctgacatattgaaggttatcttgaagggtgagagggttgaagaaaacattgactttgaccatatagcttacttatgtgaaggttacactggttcggatctatttgacctctgcaagaaagctgcctattttccaattagagaactgctggacgaagagaagaaagggagaagtttttctgctcccagaccattgtcccagttagacttggagaaggtccttgccacttcccggaagactaccgttgctgcatttgaatacaatggattgagtgcagatgctctaagatggtcagggcagggggaacaagatgattatcaggttcaagctgcaataaatgaactcaagtttgtggtttctcacatgattaaccgccagccagatgccaaagatctttaaaatgctatctttcatagtttctttagaccattcttttacagtcgtctagcttagtccgtcttgtaaaggcaccgatctcatagttatacacttgtatactaatgctacaacatttgttatgaagcatcatattttaaggttggtgagttttttttttttttaaaaatgatgcaatatgatcatttgtggatcagcatttaatattccttttaagaaaaattttgttgattgtcaccttcaagatggacagtgcctggtgagtcaggtgattctcagtttcaagctgcaatccatgaagtctctaagcttgtggtttctcacatgattaacctccaatcggattctcaggatccttaaaatgcttgctttcttttgaccattattcaactgtcatttagcctagttcagattgtaacagtgattgcttagttattatactaattataggaacatatatt

SEQ ID NO: 73914 - DNA, 156 bp, Glycine max
  Clone ID: PAT_MRT3847_3775C.1
gttagagtatggggctatggccaagtaaggcacagaacagaagcactcatagcttgtttggtctcatgtttggaacgtgatttttagaaagtaatagttataacttccacgtctcaaatgtgacacttctataatcaacgagtttccaaacatgct

SEQ ID NO: 73915 - DNA, 301 bp, Glycine max
  Clone ID: PAT_MRT3847_37760C.1
ggaattgccgggtcgacccactcgtacttccactcatccgtacgcgagaatactacattatgttgaagattaatctcctgggttgcgagagatacatgggaaggtgcgtaatttaatactatctgctcaagatcctgcaaatactcttgcaattgatgcctattaaaaaataatagattctcgatccgtctttctaagcaatgtagactattcatgcactcctgaagaaattcaacttcattctcagtctactgtaacacgaaacaaactcaccattcaaactgttaagattgtgcaacct

SEQ ID NO: 73916 - DNA, 416 bp, Glycine max
  Clone ID: PAT_MRT3847_37761C.1
cttgaatatacacacctcgtcaagcacaacttcaaccacaatgccagaactcgtaagaaagcaggtcggcgacgtaggcttcggcctcatgggcctgacatggcgccagagcccaccgcccaaggagcagagcttcgagactatgcgcaccgcgctgtcccacggagctaacaactggaacggcggcgagctgtatggacctcctgacgccaactccctgcagcttctcagtgcgtactttgaaaagtaccctgaggatgcggagaaggttgtgctttctatcaagggcggactactgccgggccagatgaagcctgatggcagtcagaagaacgtgcagcgcagtattgatgagtgtctgaagtggctcgatggcaagaagagcctcgacctcttcgaatgcgcacgcgttgatc

SEQ ID NO: 73917 - DNA, 237 bp, Glycine max
  unsure (1)..(237): unsure at all n locations
  Clone ID: PAT_MRT3847_37762C.1
acgattggtattgcactatctaaaatttatgtgaaaattaactccaaatgggtcacctgcatctgcttcaaaattaactccaaacagagttatggtttacgacatgaaagattcacgccggnattcagtcagcaganaggataatgcttcagctctcaattcttttccagngnngnactcaagntggngacttgttgagngtaactgttggnggtcgtcaaattnctccgactggga

SEQ ID NO: 73918 - DNA, 347 bp, Glycine max
  Clone ID: PAT_MRT3847_37763C.1
cccacgcgtccgctcaaattattaaaacacagcgataattcactcacatttttattttatttttactgatgatgatctcatgtgctgctgctgcctcttccttactggaattgcggccgagtcgcagccaccaaatgactcccaaggaattatgcgaaaatgatgatctctgtacagccattctcgtggatacaattttgggctttcagacgcataaaatgagcttagatcataagccattggcagaagaagaacggaggcaactcattgaaatgctctccaattttgtggacaatggccacgcacttgtactgacacagtcacttttgtcgttgagtacggtcacg

SEQ ID NO: 73919 - DNA, 196 bp, Glycine max
  unsure (1)..(196): unsure at all n locations
  Clone ID: PAT_MRT3847_37764C.1
cctttctcttctcttcttgtttncaacactttttctgtctngtnttctctccaaacatgttgtgntgaagtgttgaaatttgaaaccttaactattntcattcatctgnncttggcatgtatnaatgctgaaatgaataccatattagacttggaagctttagagattgaagagggctctcctaggagtcaagggt

SEQ ID NO: 73920 - DNA, 386 bp, Glycine max
  Clone ID: PAT_MRT3847_37765C.1
acgaccttcagatggtcgagtccattagatggttgtcaaaccaatcttctgactgaaaaacactggaaaagccaatgatctgaaagtgactatgagaaaatcacctagggcctgagaggaccatggcttggactcacaaggcctagtagtcactggggtcggactacctatctgaagaaaagagtgatggcggattgcacttgggagggacagagctttgggaggctgcccatgtttgtgcaagccctttacctggatgcatgcgtacatgttaggacattatgggcctgtgggccggaagatattgagagcacaagactgccacctgaactatattgtgaggctaaaattgccaatagtacgatttgctaaccttgaaaacaggc

SEQ ID NO: 73921 - DNA, 386 bp, Glycine max
  Clone ID: PAT_MRT3847_37766C.1
gaagacgttttcgggtctcagatacaatctccagccagaattcaagtgcatcaaaatgtgaaccagcaactgagaggctatccctccaacctttacaattcaagcgtgataggatcgccctcattcagggttgatccatctggggcagcagccgcaatggctttgaatccaagaaatgctgcctttgctaatcggagccagagctttatggttaacggtgatactgagtttccttctcctgctacctctactgctgccaagccttctaccttctctggttggggtccctctgatggcaagttagattggtccatccgtggtgatgaactaaagaagccgagcaaatcttcttctgtaggatttttgaagcagcagtagtcctttta

SEQ ID NO: 73922 - DNA, 296 bp, Glycine max
  Clone ID: PAT_MRT3847_37767C.1
gataggaggggaaaaagcttttcgactaacaaaggctaacaatttgtaacaaggatagacgatggtatgaccattacataagcaaagaggctcacgttttacaagccatcaatgattgcaccttgaatactcacacgcctaaacactaatccattatgtttactgatgtactgaaaatctgcggtctgagtgtcattatgctcaaggagatcattccttatgaacaccccaggctctgagacatcccctatataaagtttcccccactcgtatatgttaccaacataacttatttt

SEQ ID NO: 73923 - DNA, 451 bp, Glycine max
  Clone ID: PAT_MRT3847_37768C.1
cccattcgtccgtgcaacttttgctgcggcgacgaacaacaacaaacagaaaggaaggaaacagcggagagaagagatggcgaagttggaggtgcaagtgcgccactgtttctgctgcggccttacgcccggctccgtcctcgtcgggctgtacactttgtttctctatgctttgttgaccgggttggccgcttgggcactgtcggacacggctttaaacggtgacaagccgatttatgaggactgcgaattggaagtccagggaaactcctcgggtgatgcacgagagaaaaaaagttgaaaatccatggcggacagactacaattcaatttgaagatacttcttcctatcactgctcgatcggcatgtacactgaagagatgaaatggtcgtacggcaatcgttacgttctgttggtgatcgctctgtgcctgtacatcccgctgatct

SEQ ID NO: 73924 - DNA, 872 bp, Glycine max
  Clone ID: PAT_MRT3847_37769C.1
cggacgcgtggtttgggaacttagtggaacaatgatcatgatcttctattcgttagttcatctagaataaaggggacacaagtgatctctctaggcattccagtaacaactatcactgatttcttcactccggttggggcgaatttgtctttggttaccaaagatggaaaaatgcttgtagaagggattcaaaatactcgtttgggcttctctaatgacatggtttatttccaatcagtgaatgcaaatggtgatcaaacaagttatgacggcgttgtttcatgcaaagatggagatgcagaagctgcctctattttgaatattcagggtgttgagtatttaattcgctgctccaccattgatataatggaaataaaatcggtgtatgttttggctgtcccacgaaaaggattggaccactttgttctggacattaagaaaaaaggattggcactattgacaacaatgattgtcatgatactcattgccatggtcagttttctatacataaatgttagatcattaaggcgagaaatgcatttgtgttggtcactcatcaaacaaaatgaagccacacaacaagctgagcgaaaatgtatgaacaagagccttgcttttgctagtgccagccatgatgttcgcgcttcgctggcgggccttactggtttgatagaaatgtcctttcatgaagtttctcctgattctgaattaggaaccaacttaagacaaatggattcttgtaccaaagatttactaggactattgaattctatacttgatgcaagtaaagttgaagctggcaaaatgctgcttgaggaagaagaatttgttgtattttaactccttgaagatgtggctgatttataccattc

SEQ ID NO: 73925 - DNA, 913 bp, Glycine max
  unsure (1)..(913): unsure at all n locations
  Clone ID: PAT_MRT3847_3776C.1
ttcttgacgaaagatcatgacatacgccttggtgattttggacttgccaaaatgttgacttcagatgatctaacttcctctgttgtgggaactcctagctacatgtgccctgagctccttgctgatataccttatggctctaaatcagatatttggtccttgggatgttgtatatacgaaatgacctccctcaagcctgcattcaaagcatttgatatacaagccctgattaacaagattaataagtccatagtggccccattgccaacaaaatattctggttcatttcgaggtcttgttaaaagcatgctgcggaaaaatccagagcttaggcctagtgcttcagagctacttgggcacccacatcttcaaccttatgttcttaaggtccatctcaaaatcaacagccccagacgaagcacattgccagttcactggccagaatccaactacatgaagaaaactagatttttggtgcctgaagatgatcctgtttccatctatagggataagcgacattctttcaccaatgatcggactctaaatcctagtgtatctggagctgatcaagattctctatgttctactctagagatagattgtactcctgaccatttgaatcaaagattagcagaactacgtattggagatagccatcaagtgaagtcaatccataagccagctgtttccagaacttctattaatgccaagactcctagattagctgcatcaaaagcttctgccacccccaagaaatcaatggtattctcaaggaatcataagacgcttcgtgtttcatacaatacgaaagaacctgtccatacaactcgcagagcatcattgccattcccaagaagttgtgccatacagcagcctnctcgcaggcccagtattggtttacttgaccatgtaa

SEQ ID NO: 73926 - DNA, 385 bp, Glycine max
  Clone ID: PAT_MRT3847_37770C.1
aaaaccattaataagacaggtgcctcactttttttggggaaaaggagccaaagcttatttttttcagaataaacagattacccattgccaaaatagaaataaaattccccccttacaccaaaaaaaacatcgtttttaaacaagggcagcagagctcagcgggccaagggcttttttaattttttctaccactgcctgtaggggtgaaagcgattctgcataaaaaatgcggatgcaagtgtcatttccaaatgcactccctgggaccaggggttcctggcccacctccagtttattttggcagggggacccagaatccacaattttaccaaaacctttagctttttttccattatagaagcggggatcaagggatttataaaat

SEQ ID NO: 73927 - DNA, 380 bp, Glycine max
  Clone ID: PAT_MRT3847_37771C.1
ggcaaaaaaaggggacaaaaatttgaaaaaattccccttggataaaaaagggaaccttgggtaccccaaaaaaaaagggggggtaaaagggaaaaagggaaaaaaaaaacagttaaagatttggggaaaagccatttgccccaagaaggaagcaataagagaactggaacccccaaatttttcatccccccctagcaagaaatcccttggggggggggattaactttccaacaatttaaaacttgggggttttaaaacctgggggggttcaaaacttccccggggaaagcgggggcatccctttcaaaggggcccaaatccggttgtttggggaacctatggccccccccttaaagggcccagtctaaggggaaaattcc

SEQ ID NO: 73928 - DNA, 433 bp, Glycine max
  unsure (1)..(433): unsure at all n locations
  Clone ID: PAT_MRT3847_37772C.1
gcaattttctttcttgcggattataaatccttatttctgtttggaaaccccaaacatccaggtgccttatactaggtgtcctatttgtccatagttcaaaatgtgtctttggaactgccttactaggaaccctattcaacaaatacatgacaattttcaaggcatacatccacaaagatatgggtaaagtcaaattgattaacatgctcgtaaccatatccattaaaattctattacgtttttctgatacaccattttattgtggtataccgagcattgtgtattgcgcacaaatgccacgtttctgaataagcttagcaaatggacctgngtattgctcagtttcatcatatcttccgtaatactcaccacctctatcatatctaataantttcacatttctgtctaattgcctttttacttcattctcgta

SEQ ID NO: 73929 - DNA, 1979 bp, Glycine max
  Clone ID: PAT_MRT3847_37773C.1
tcttttttttttttttttttttttttttttttttttttttttttaaaaaaaatcaagatttctaatttttttttagctcaaataatctgatgtcatttacaacttatatatgtgatttttgcactgtacagaacgtgaacatttgcaactaacaatttacctatatcactatatgcgtaataagcaacctgatcagaacatgcttcaactcataatagatgtctgaaaaatcttaagaagtcttcgtctgcttgtaccttttggcagcaacaatgtataccaacatacttaagaagctaagtccagctaaaagcaagaaaaaataatcgagatgacccttgttcaaattatcaggaatccagccaagctttccaccatgtgtggtgaagtaagtcaccatagtaagaatgaaagagctcaagtaatttcccaacgcaaaatacaaaggtgacagtgctgtacctaaagtcttcatagtatctggagattgatcatagaagaactcaagcagtcccacgcgtccgtacggatgcgagaagccaccagaacggggggtgctggtggtgcagaaagggcgtgtaagtggctacaaagcaaagcgaatcaagcattctctgaatgcgctctatctatctctttcgatctgggtactaaccctaacccgcttcgaaccgtggcttcctcaggctcgcagaacctctctcgaagaaaaccttcttcttcttcgtcttcgtcttctcaacaaacacccgggtcgacccggatcgtttaccgagaatctcggatcccatcggaatccgatttcccgatctggcagcagaactggttcatcgcattgctcttcgtcatggctctcggattcttcgccctcgccattttcctcttcctcactctcgactctgacatcgctccttcttccaccgcatccgcctccgcctccgccgcttcctccgaaggcgtcgaggtgcaggttacttacggcacggttctgaagcttatgcacgagaagaccaaatttcggttgcattctcatgacgtgccctacggttctggcagtggacaacaatcggttactggtttcccaaatgtcgacgattccaatagttactggattgtaagacctgagccaggaacttctgctaaacaaggtgaccccattaaaagtggcacaatcattagattgcagcacatgagaacaaggaagtggctgcacagccatttgcatgcatccccgatatcaggcaatcttgaggtcagttgttttggaggagaatccgaatctgacaccggggactattggaagcttataatagaaggaagtggaaagacttggaagcaggatcagaggattcgccttcagcatattgacactggaggctatctacatagtcatgataagaaatacagtcgtattgctgggggtcagcaggaggtttgtggtgttcgtgaaaagcgtgctgacaatgtgtggttggcagccgaaggtgtctaccttcccgttacggaaagcaaatgagttacttagtatcgatacttattctaaacgggtaaaccatggatagtgggagtgggtggctggcaccggttctgataacaaatgcaggtttttctattgaaggataaatatacaggagcatttaggattagataacggtagtaatattttgtcataggtacactttgttatgtagtaagtgcatgccccattttcattttccccgctgaaaatacttggtgtctgttgttttgtgaacgccatataccattcctctaataggactacgaaacgcaatgagtctatttttcaattgaattattatacggataaaaatgaacctttatggatgtgtttctctttttgattttgataatgcaaaaggatgggaaatcctttctggtcctttaaaatcaaatgcaagcgaggaaaattcttttcaggtgaaaaaaaaaaaaaaaaaaaaaaaaaaaaaaaaaaaaac

SEQ ID NO: 73930 - DNA, 322 bp, Glycine max
  Clone ID: PAT_MRT3847_37774C.1
tttttttttttttttttttttttttaaacccactttatgccccgggactttataaattacccgaaatccaagttgggattttacagatttaaatactaaaaactagtaaattgggggccctactttttaaggggccctttttttataccctaaataaattattctaaaaaggccattaaattccagggattatgaaagaccgaccaaactttttggatccctgacaatagttatggggggggaatcctttctttgctgggggtgcagcaaaccccgagccgggacactaactaaccccaataataggggcggatattttagc

SEQ ID NO: 73931 - DNA, 768 bp, Glycine max
  unsure (1)..(768): unsure at all n locations
  Clone ID: PAT_MRT3847_37775C.1
cacgcgtccggttacttacggcacggttctgaagcttatgcacgagaagaccaaatttcggttgcattctcatgacgtgccctacggttctggcagtggacaacaatcggttactggtttccccagtgttgacgattccaatagttattggattgtaagacctgagccaggaacttctgctaaacaaggtgaccccattaaaagtggcacaatcattagattgcagcacatgaggacaaggaagtggctgcacagccacttgcatgcatccccgatatcaggcaatcttgaggtaagttgttttggaggagaatccgaatctgacaccggggactattggaagcttataatagaaggaagtggaaagacttggaagcaggatcagaaaattcgccttcagcatattgacactggaggctatctacatagtcatgataagaaatacagtcgtattgctgggggacagcaggaggtttgtggtgttcgtgaaaagcgtgctgacaatgtctggttggcagccgaaggtgtctaccttcccgttacggaaagcaaatgagttaattagttattgtaaaccatgggtggtgggagtggcacagatgcagatttttctattaaaggataaatatacgggactattttagggttagataacggtagtaatattttgtcatagttacactttgttatgtagtaagtgcatggcccctttttccccgcagaaaaaaaaaaaaaaaaaaaaaaaaaaaaagcggccgctntagagga

SEQ ID NO: 73932 - DNA, 273 bp, Glycine max
  Clone ID: PAT_MRT3847_37776C.1
gaaatattggatgatattggcacacgtagcgtcaggtttcttgttcgtgatatgccttccgttttaggcagttctggcagtagcaatagctacttgggaggcagctcatagcatatgggatgtggtggacaacatcattgtgaaaattcaagtcatgctttgacaagatgatgctaatttttcacaatcttccaaaggctctgcaactggaggagtttgaatcataggcatagcctatgccaattgcaaagcttcttcgtttctatctaaact

SEQ ID NO: 73933 - DNA, 860 bp, Glycine max
  Clone ID: PAT_MRT3847_37777C.1
gggttggtgatcttgagcaaggtaacatatggttgggtagaatagtgcaaaatgtgggggggttttcctgttatagattgacttacagtaagtaatatctgatgaatcatatgttatattggctaatcccgctgtgagaattggcataactatctggactttatagaaagggagggtgacttgagcaagcaactttttaatcgggaaattgaactgagactaaagcatgggccttcaatttggtttcttgaggataagtacttcaaaccctaatttgtctgtggacattctaggttcgtcatgcgtttgtaaaagtttattctttttaaagtgtgaatgttatgcatgcaggtgtcttcttatcttcctaatcatctgtcgcaggctaggagggtccctcctttcatatttgaggggcctctctgtcccgctaaggagtatttcttgatgctttgtattttccttttatgttttatattattgatttttcttgtgtctgcatcatcaatgacaattttacgacatcgtcttgtcttttgtgatttagattgtcaagttgtatgagagatgtgtcattgcatgtgccaattatcctgagtattggatacgctatgttttgtgtatgggaagccagtggaagcatggatcttgcaaataatgttcttgctcgggcaacccaagtctttgttaagagacaaccagagatacatattttttgtgctcggttcaaggagcagactggagatatagatggtgctagagctgcatatcaacttgtgcatactgaaacttctcctggtcttcttgaagcaattatcaaacatgccaatatggaataccgactggaaaaaaaggagatg

SEQ ID NO: 73934 - DNA, 471 bp, Glycine max
  Clone ID: PAT_MRT3847_37778C.1
agcccaaataatctgatgtcatttacaacttatatatgtgatttttgcactgtacagaacgtgtcatttacaacttatatatgaggatgtatatccctttgtactagtacctctggtactgttttgatcatatatatataatatatttagttttgctgatcaaaaaaaaaaaaaactaacaatttacctatatcactatatgtgtagtaagcaacctgatcagaacatgcttcaactcataataaatgtctgaaaaatcttaagaagtcttcgtctgcttgtaccttttggcagcaacaatgtataccaacatatttaagaagctaagtccagctaaaagcaagaaaaaataatcgagatgacccttgttcaaattatcaggaatccagccaagctttccaccttgggtggtgaagtaagtcaccatagtaagaatgaaagagctcaagtaatttcccaacgcaaatacaa

SEQ ID NO: 73935 - DNA, 402 bp, Glycine max
  Clone ID: PAT_MRT3847_37779C.1
gcattcaataatactcaagattgaattcacgctggctttgtagacttaaacacgacaccggggttggactcataagctagacaccgaacctatcacaatggacaaaaatgctttaactcatagcacctgagcggttgtacatcctgtggcacccacactattgaccactagagaaaagacctccaggaactctttgcatacttgcccaaacgataggctcatcaaaatgcaacatgcagcagcctctatctgctgtatacacccattctttccacattgacgctggctgattatgagagaaactctgaacactactaccttccttggaaggttattgcctctgggaaagctatcacaatggcgtgaatgacagtcatagccccaataatacttagggtatgc

SEQ ID NO: 73936 - DNA, 197 bp, Glycine max
  Clone ID: PAT_MRT3847_3777C.1
attcggctcgagggaacaccccccacgaatcaccaattatggctctgcatcttcgtatcggacctaagaacaaatgggttccttccttagatagagctccctatcctttgagaccttcactagggactagttatggtaacataaacacagctagcgtgagcctcaggactcctagaattttgaggtctaagcggtta

SEQ ID NO: 73937 - DNA, 286 bp, Glycine max
  Clone ID: PAT_MRT3847_37780C.1
gaataataattatagtaatagttagttcaccagacagacacatggaaccaaagtgcaccataaactgtcgccggccggagttcgttccgacccctctgccggagagtcctcgtgtgcccatggagtttctgtcacgctcatggagtgcctcagctcttgaggtctcaaaagctcttgcacctcactcttcttacaacaactcctcttccattccagaacaaacttctgcttctgctcccaaccacaacaacaaccctttttctgaagacttgtcaaacatctcctc

SEQ ID NO: 73938 - DNA, 271 bp, Glycine max
  Clone ID: PAT_MRT3847_37781C.1
gacaaatatatgaatagtattgccactgctctagggacaaaggttaatgggcaactaatggttatgacacccgatgaacacctgtctatttctgaagatgatgaatgatgatcatcatgggttgcatactatgatcaaagagagggatctaagctatatgaacatcatgaagacagtgcatgacaatggcaattcctgcatatgtgaactactgcttacttaccgattaaccactcttacgtaagttggtcataatggtatcagtatatac

SEQ ID NO: 73939 - DNA, 308 bp, Glycine max
  Clone ID: PAT_MRT3847_37782C.1
caaaaaaccccatgaaggcggctacccctctttttccccctcttaaccccggggccaacccgcttacaccccaaggatcccccccctcatacacagaagccctatctcccccaaaacaaatttcaggcccctcaccaccttggggcatccccccaaagataggattgcacacgctttcccctttcttcaaaaaggcctcaccccaaggggattcccccaactgcccgctgccaccccctggaaagctaagcaaccttttttttcttaaaccccccactcggggtttgatcacctttttcaccggccct

SEQ ID NO: 73940 - DNA, 680 bp, Glycine max
  unsure (1)..(680): unsure at all n locations
  Clone ID: PAT_MRT3847_37783C.1
caatctttctccgtgagatttattctgtctgtcactgcgatctcctctttctccctcacaacatccaattccatttcgctgcgattgctgcatctgttcaatcttccttttttactttaccaaattcaaaaccatctcttcgatcccttttccaatttggatcgaggaacaatgagataatatattggattatgcattttccccaaataataggaaaagaataatagataaaacaaaatattagcggtgttgatcgatttgcaaatctcagagtaaaaccttgtgctgcgatttttatttatttttatatatatcagatggcgtttcaggaaaagcaaaacaggtttaagaggcagccagagaagagtgcctctgcttcacaatatggaagaactccagctcccatcaaattctctaacgatactgaaagacttcagcatgttaatagcatacgcaaagcccctgttggggctcagatgaagcgtgttattgatctcctatttgagccccgaaaggctttaacgatagagcaaataaatgaagcatggtntacgtggacatgaagaagctaataaagatgtttttngagagtatgaaggaaaaaccccaaaagtaaaatatgatggggaaaagattctcttacaagtcgaagcatgacgttagggacaaaaatcagctgc

SEQ ID NO: 73941 - DNA, 1863 bp, Glycine max
  Clone ID: PAT_MRT3847_37784C.1
gcccgaaaacaaccaccatacggttgcgagaagacgacagaaggggatccaaacaaagctaaaaacaaacacacttattctttctttcttgtctttaaggtcaacaacatagttatagcacaaacttaattcaccatggtttttccaaaaccctcttctgagtctgacctctttctttattccaactttgcttctcgctatgccagggactctcttcccaggttcagcatgccagaaaactccatgcctaaggaggctgcgtaccaaaacattcacgatgagttgcagcttgatgcaattccaaagctgaacttggcttcttttgtgaccacttccatggaagaagagtgcaacaaactcatcatggaatccatcaacaagaactatgttgacatggacgagtatcctgccaccactgaccttcacaatcggtgtgtgaacatgattgcacgtatgttccatgctgaaatcggagaaaatgagaatgcaattggagcaggaacagttggatcatcagaggccataatgttggcagggcttgcattcaagaagaagtggcagaacaagcgcaaggcagagggcaagccttatgataagccaaatttggtgactggttccaatgtgcaagtatgttgggagaaatttgcaaggtattttgaggtggagttgagggaagtggaggtcagagaaggctattatgtcatggaccctgccaaagccgttgaacttgttgatgagaacactatttgtgtggctgcaatcttgggttcaacttacaatggagagttcgaagatgtcaagcttttaaatgacctgttgctagaaaaaaacaagcaaactggatgggatacgcctattcacgtggatgctgcaagtggtgggtttattgctccattcctatatccagagctagaatgggatttcagactcccattggtgaagagcataaatgttagtggccacaagtatgggcttgtttatgctggcattggttgggttatttggaggaccaaggatgacttgccagaagaccttgtcttccatattaactaccttggagctgaccaacccaccttcaccctcaatttctctaaaggttctagtcagatcattgctcaatattatcagctaattcgccttggccatgagggataccgtagcataatggagaactgcagagacaatgcaatggtgctgaaggaaagtttggagaagagtggacactttaacatactctcaaaagacaatggtgttcctgttgtggcattttctctaaaggacagaagccagtacgatgagtacaagatatcagagatgttgcgtcgccacggttggattgtgccggcatatccaatgccaccagctgctcaacacatcaatgtgctccgtgtggtcatcagggctgagttttcacgcacccttgctgaacgccttgtgtttgacatatacaatgtgctgcatgaacttgaaaagctacatccccccaaagtgaccaacttcattaaggaagaaaacaaggccttggttgaaactggtgtcaagaaaactgcattggatgcacatagggaaatcattgctcaagaatcaaacaagcgtcagaaaattatggctgcctaactcactatgtcaactaaacaaggagccagagccttcgccatatttgttctaactccattcaaaatccacccttaactatattcactttattcttttcctaatattttgggcaagtcaattagctagctttagtttgttttcctatgatttgatgtcaattgagatatgtaattcaacattgatgtattatttttaaatgtttcaccacattgattttgtagtaaaagttcagtttttgtttgttac

SEQ ID NO: 73942 - DNA, 471 bp, Glycine max
  Clone ID: PAT_MRT3847_37785C.1
ctcgagccggttttggatcctcctttttattccttttttttttttcattttgtgaaggtaagcaacaactcattgcttttacggtttcaagaagttaatctgaatgcactcaagaaagaaatgaaggcaaaatttatatagatagcaatggcataaagtgggtggaagttgacatgaggatgggtggccatgttgtagttgacacatgaaaagaacataagaggaattaatcgaagattggtgagagggtagagaaattaaagattttagaacaaaacagagtccaaaacaggtgtcttctcggtgtttatatgccaattgaacttgtcatagagaagagggttgatggggttagcatttataggattctagaggataaggctattttttgctacaaagcaaactaaaaaaaaacctatggaggaaataacttcgacggttgcagtgccattcacacttgggaatttaata

SEQ ID NO: 73943 - DNA, 172 bp, Glycine max
  Clone ID: PAT_MRT3847_37786C.1
tcccactcatcctctctatctcatctattttcactatcaaccgttccttatccggcatggattctttatacactgtcctcatttccattgctttcttctttattcatattaccaacatttacaattatcctcattattatcatctttatattattacatattcattcatttt

SEQ ID NO: 73944 - DNA, 246 bp, Glycine max
  Clone ID: PAT_MRT3847_37787C.1
gagttgtgagcgaacacacactatctctttactgtgcagttgctgcaatgcctacaaagctgttctcccaactacgtcttctccatcccctcctccccatgaagccccgcactctcccgcttctgtcaagagtcttcttcttcccttcctcgacgttcctccgaaccgcaccgtttaaggttcgtgccttctcttctagggaccatagcagggaaaagcttccgctccgatcctccaagagcctcg

SEQ ID NO: 73945 - DNA, 1741 bp, Glycine max
  Clone ID: PAT_MRT3847_37788C.1
ggggtgcttccccttgagctcaacaagctgctcataattgtcgttgtattgtcaatggcattaaccccatttctgaatgaagctggaagaagggctgctagctttattgaagaaaattttgaccctgagaataaacagaatgtttctgagacggttaacttcaacattagtgaacccgttgttatccttggatttggacaaatgggccaggtccttgccaatttcctgtccaatccattagcttcaggaggagatagtgatgaagtaggatggccttacgtggcatttgatcttgacccctcagtagtaaaggcagctagaaaaattggcttccctgtactctatggggacggatcacgtacagatgttcttcactctgccggtgtctcttctcccaaagctttcatgattatgtatactgggaagaagaagataactgaaattgttcctcgtgttggacttactttaaaggaaagtgtcagactacgattgcttctatcccaaggaggcgattttggatttgttgttatctctttagcaaataggcttggagtgcttactcttgagctcaacacgctgctcataattgtggaagtattgggaatggcatcaaccccatttctgaatgaagctggatgaagggctgctagctttattgaagacaaaattgatgaatagaataaactgaatgctcctgagacagttaacttcaaacgtagtgaggtgagagttgctgtctcgagggaagcacgtgtgctagcggcaacaactgcacgagaagctgaattatcagaaatgaatcagaatgatcaagcttcatcagttagaaatcaaagagaagtagatccagaagaacaagattatgaactaaatgaagctgtgaatttagaaggaaatggtgttttagttatcaaacaaagtagtgaagaaagctcaatgattgtagaccaatcaaacccttcttcccatactgccactgaggaaccctgaatagggcttcttcccatttattttgctcctctaacccccataacttctgaaagatttcaggaagttatcattttcattgcagagctaacaatatatgtataggaaacatcccaatgtaagagagtttgtagaacagcatcattccaactccgatgcttcaattcttttgagaaccacaaaatgtatagtaatttaacaccagtaacataacttttatttcttgtggggagtagaaattagtttaagcctttatggtgatgttgcacacgtgagggaagcacatgtactgacggcaacaacttcaccagaaactgaattatcagaaaggtatcagcaaaaacaagcttcttcgattagaaatcaaagggaagtagattcagaagaacaagattatgaactgaatgaagctgtgaatttagaaggaaatggtgttttagttagcaaacaaagtagtgaagaaagctcaatggtagtagatccatcaaacccttcttcccatactgccactgaggaaccctaaatagggcttcttcccatttatttttctcctctaacccccataacttttgaaaaattccagcaagttatcattttcattgcagagctaacaatatatgtataggaaacatcccaatgtaagagagtttgtagaacagcatcattccaactttgatgcttacttcaattcttttgagaaccccaaaatgtatagtaatttaaccccagtaacatagcttttattttttgtgtg

SEQ ID NO: 73946 - DNA, 398 bp, Glycine max
  Clone ID: PAT_MRT3847_37789C.1
agcaccaagtggagttcctctctatgaagcttaatgcagcaagtacctattatgacttcaattcagagtcagatgttttggaaacaatgcagagagcaagagcatccgaggtgaaagagttggacaggtatgtgagagaagaatgtgaaggagtttcttgctttgaaccaacatggtcatggcccctgtgacttgggttttggatgttgtaacacaaaccagaccatgaattgaagaagctccattgcatgcacttcttcttactttctataattttaaaggatcagattgttttcactccttagtgtataagtacagaatagacattctcgtttgtacaatcccatcaaacacgtgtagaaaagaattggaatggaagtgattaaagcctacatttc

SEQ ID NO: 73947 - DNA, 576 bp, Glycine max
  Clone ID: PAT_MRT3847_3778C.1
attaacttaaaaataaagcaagaaaaaagagagcgctggaagatgatgatacgaaggggaagcaaatggaattgagcctctgttagtgatttccatggacgcacctcgtaaacagcaggtttcgttgagaggagcaagtgcgaaggagataacaagagacgcgcttcttcagaaggtctctcaggaaagagaacttcgcaattacgcaaaaagagctgctgctgctgcgctcttcattcaggttcttcgtctctgcttcctttccctgattttaaaaaatcaccataccagttggtgtcgtaacatgatcaattttacaaattacattacacgacaaacttataacatataaaatcaacctaccaccgaccacatggatcaagtaccaagttgctctagcgtaagtttcaagttcaggctgtgtgtatgcaactttgttaaatacttggagggcacccgtagtcaactcggctcatgttattgtataaaaaaaataatctaaaattaatatgaataaaaaccttaaatcatgttattgtactcaattttatagtggtgtgaaatacctgaagttat

SEQ ID NO: 73948 - DNA, 150 bp, Glycine max
  Clone ID: PAT_MRT3847_37790C.1
acggcatcccgttgttgcatccagggctcgtccctggtggataatccacagttctgaagataggtgatgatctcttgaatcacaatcttggatgcaaacctcagtagttacgacctgcctgtgcgatctaacatgggaaccgttcggacg

SEQ ID NO: 73949 - DNA, 305 bp, Glycine max
  Clone ID: PAT_MRT3847_37791C.1
cggacgcgtgggcggacgcgtgggcggactcgtgggcggacgcgtgggcggacgcatggagtacgaccgtggtgtggatgagttatttttgtaagaataaaatttaggtataacatgttaagtatttcctgaggttttaaaatgactgaaggcaaacaaaaaaaactgaatagaataggggagaatgccatatcggctattgcagaggtcaatatcttttatgatgacgtcattatgctgtttctacataccaaaggtcaagcattcattgctgctaatacttgcaatagttgtggttctccaca

SEQ ID NO: 73950 - DNA, 565 bp, Glycine max
  unsure (1)..(565): unsure at all n locations
  Clone ID: PAT_MRT3847_37792C.1
ggctcgagcacttaatatacttccttcccaccttagtcagatttacaactgttttccaaactgagtcaaacttaggattgaaaaaaacacctaagctctaagatgctggaaaagatggatgatggagaaatctcaaatgctttccctcaccagaacccttcaactgctgcatctaacaatcagcctcctactttgaagaggaagagaaacctccctggaaatccagatcccgaagctgaagtcatagtcctatcaccgaagactctaatggccacaaacagattcgtgtgtgaaatctgtctcaagggtttccaaagggaccaaaaccttcaactccatcgcagagggcacaaccttccttggaagctgaagcaaagaacaaccaaagaagtaaggaagcgagtttatgntgtgtccagagaagacatgtgtccatcaccacccttcaagggccctgggagacctaactgggataaagaagcacttctgcagaaaacacgtgagaagaagtggaagtgcgagaagtgctcaagcgttatgctgttcagtcagattggaagcacac

SEQ ID NO: 73951 - DNA, 373 bp, Glycine max
  Clone ID: PAT_MRT3847_37793C.1
ggggcttaccacgaagtatcattttcgcagaatgcgactgaacgttggaagcgacaaggatcaataacgattatgaggactgcagagcctcatcttctcgtggagcatgaggttccgacgaagcgtcgaagtccgacttatcgctcacatttgcagaactgatgccatacattattatatcaaagcctcagatgtactacaaggaaagatattgtacgctcttgcgatcatagttccgacctcatgaacatccgcactatgatgataaagacaggatatagatagatgctcgagccgatggagtacccgctccgtgatcaatgtacctggagagtgattgcgacatcaaatctgttaatataggtgactcgct

SEQ ID NO: 73952 - DNA, 267 bp, Glycine max
  Clone ID: PAT_MRT3847_37794C.1
ggccaagcactctgaaattgtcagttgtggcaaggcatgctagtgtggatgatcacctactgtgtgaaatctaaggtgaccacctatccttacgccgttttcatcggccatgactgaagcgtttgggcccaaagcaccaactttcctcagttagtcctgaggaaattactgcccttaatcatgatcttaatgggccctggatcacttggtccaactggattggctatcggggggaccaatttcatggccatccagtgtgaggccttg

SEQ ID NO: 73953 - DNA, 122 bp, Glycine max
  Clone ID: PAT_MRT3847_37795C.1
gtattacgggcgccatccactgtcgttcgtttggcgtatctacaactagggaactgacctgacttgttgactttagacaaacaccccggctatccgagtcagaggacttagatactgtaata

SEQ ID NO: 73954 - DNA, 320 bp, Glycine max
  Clone ID: PAT_MRT3847_37796C.1
cccacgcgtccggttatggtctaatgcatcatagacacttagtagttgagccattttttaactcgttgtattcagtaacaacaatttcattcagttaagggtgcaaagagagttatggatgtagcatttaaaaagtgcatgatgctgtgtagcatttgcgtgattgtcttgaatgatgtaaaggtttgtgaatcatacgaggaattcattttgagtctgactaagcttcttcagtgtaaaagctgaccttttgtgtgttgtctgcgcattgatcatggatttgactgcggagcttggtgcccgtggttcgaagccgttta

SEQ ID NO: 73955 - DNA, 188 bp, Glycine max
  Clone ID: PAT_MRT3847_37797C.1
tttacacgttttttcacccgctcattgagtcagagccttgtatctaagcatttagtgagcagatatattagctgaagcgaattgtacagactcctgcttcttataatcttacatctggaggttctaaactgagcaaggtgggcatgggtaataatcccaccatggtccctaatagtgtatccacagcg

SEQ ID NO: 73956 - DNA, 184 bp, Glycine max
  Clone ID: PAT_MRT3847_37798C.1
tagaaacattacaaaatactatctatttaatataggtcagtgtcactttaaagggaataaatcgcggggtgaatccagaaggggatagtgctcctaacattatattataccctttaccatgttgttatgacttttaaatctgaacctacctaggaatggcaatggataatacaacattgtattg

SEQ ID NO: 73957 - DNA, 367 bp, Glycine max
  Clone ID: PAT_MRT3847_37799C.1
cataagtttagtcctcatcagggagttctcatgatggatcagtgacatggttggatgatatccttggtggctattatgaggactttcttgttgatgaaacacacaaagaagcaaattcagaagaaagaacctactttgaagaacaacctagtggcactagttcttctgtccttgaagacacaaatggaagcactgaaactcaagaaaacctgacgaatacacaagataatggtggagaagatgaaaaacataaggatgatgatgaggccagttgcaacacaaagccacttgatgaagagacaattgacaacactcaatgtcagaagatgagtggaacttgcaaaattgaagagacaaatgaaaatgg

SEQ ID NO: 73958 - DNA, 469 bp, Glycine max
  Clone ID: PAT_MRT3847_3779C.1
ggaacctttgggctgatttatgtgcttgctgagaagatgatagcaaggggacctatgtaatcaaacaagaaacgaagagcatcactcctcccgtctctccctcagcccgcgttcctattactctacattcgttcctagttattgtctagcctgcgtctgatatcgacgacgacttctcctaaaatggcggtatacatcacacgccgttagccacgagaggaaagggtggcggaacagaagcagacctaatcggaaaagaaacacgtttctctatcgccgcgtaactatttaacgagtctgacaaggggaccggatcagctcccatactcttaccatacgtttcccccactgttgaaggtcacttcccgagtaccaagcccggcctacccgtagccacaatgtcgcgcgttggtacgttcatcgagcgggtcaccgcggagagagagggctcataagtcgccaaatccgt

SEQ ID NO: 73959 - DNA, 265 bp, Glycine max
  Clone ID: PAT_MRT3847_377C.1
tcgcgatctagacggcacgtgcctttggggggccgaggccccctactgctggattctacccgccgctcgatgggaattgcgcttcaaggcgtctcgtagggctaatccgcctcacgagggtcaccaacggcacgtgcctttggggggcacacggcctactaatccggtacctaaaaacccaaatcccactcttcttcctaattaatgctacctcacactggatggggtggagctcactggcctcctcaccacggtatccgggcgc

SEQ ID NO: 73960 - DNA, 444 bp, Glycine max
  Clone ID: PAT_MRT3847_37800C.1
gcttttctgtttttctgtttacttgagttttttttttttttttttttggaaaaaaaacctcaccttcccccttttttttttaaggaaaaaaatgaatgggggatccgcctcctgctccgtgggaaagaaaaaccgcaaacacctagctcctggtttgaaaaaaaatcaataaaagaggggcccccctgcttttaaaatttccaaattttactgtctcttgaacattcttcgctataacatgccttttggaattttcatgcccaccccactagtttattttatcttccgcaggggatgcctttttattccaattggttctatcgcccatgaaaaataaaccccaggtttggaagagagctcctaacaactttccagaccaaatccccatgacccccttgtgaagcttggcccctaaaatgagccccacaggaatccccaaaaagt

SEQ ID NO: 73961 - DNA, 263 bp, Glycine max
  Clone ID: PAT_MRT3847_37801C.1
attggatgggggcagtagtataattggaacaagggttaggtgtgactgcgtcgtcactttctctctttgcaaaccaagcctatacatacacatggacagaaaatgcttcagcggtggcaacttgcttagcaaagggaccactgaggaggcaaagagggattgaactacagggaatgatgctaaaggctctggaaaagatgccttataaattgttgtgagccctacctgtgggagcattacagtagcaaaacggacgactagcc

SEQ ID NO: 73962 - DNA, 2553 bp, Glycine max
  Clone ID: PAT_MRT3847_37802C.1
tttcctttgtttctatggcttctgcagaagtagagttccgatgctttgttggtgggcttgcttgggccaccgaccacgatgctctcgagaaagccttctctcaatttggcgaaatcgtcgaatcgaaggtcatcaacgatcgtgaaactggaagatccagagggtttggatttgtgaccttcgccacagagcaggcgatgagagacgcaattgaaggaatgaacggccagaacctcgacggtcgtaatataaccgtgaacgaggctcaatccttcagtttcacatatgcacatgcattctctctcttctctctacataaacttcagctcgcgtgtcagaatactctcgtgactccctccagtcgccataacccaaacatggtcataacctaataaaacactatacatatatataaatacccaccatccaaaaatcagaacagaacccaaccaaagcagctatggcggtcgatgcagaggccactcaagagaaccattgcaatcgccaagcaacgcgcgtgcttttcctctctcctaccctccgccgctgccgccgccgccgccgataccgtcgcgcctccgcagctccccccgttcgatcaccagccgcacccttacaacggtccctccgccgatgaagtcttcgccaagcgcaaaacgttcctcggtccttccgtcttccactactataagaaacctctgaatatcgtggaagggaagatgcaatatctttatgatgatagtgggaggcgttaccttgatgcatttgcgggaatagttactgtttcttgcggacattgccaccctgaaattttgaatgctatcacggagcagagtaaacttctgcagcatgctacaaccatatatctacaccatacaataggtgactttgctgaggcattggcagcaaaaatgcctggaaaccttaaggttgtttattttgtaaattctggttcagaagcaaatgaattagcaatgatgatggcccgtttatatactggtaatctcggtatgatttctttgagaaatgcatatcatggggggaaggttctagtacagctttggctcgactgctctgaactcgtggaaatacccaattccagagggccatgttcatcatgttatgaatccagatccatatcatggagcctttggtacagatgctgctagttatgcaaatgatgtccaagaccatattgactacggaacttcgggaaaagttgctggatttatagccgaatcaattcagggagttggcggagcagttgaactggcaccagggtatttgaaacttgtttatgacattatacataaggctggtggtgtctgcattgccgatgaagttcaaactggttttggccgaacaggaagccattattggggatttgagacacagggtgtcattcctgatatagttaccatggcaaagggtattggcaatggtctgccattgggagctgtagttacaactccagaaattgcaagtgtgatggcccaaaagattcaatttaatacctttggtgggaaccctgtctgctctgctggtggacttgcagtgcttagggttcttgataaggagaagcgtcaagctcactgtgctgatgtcggatcttatttgcttgaacgtttgagatttctcatggaaagacatgacatcataggaaatgtcaggggaaggggactaatggtaggcttagagttggttactgaccgaaccaacaagacacctgcaaaggctgaaactgctgttgtgtttgaaaaactcagagaactcggtgtgctagttgggaaaggaggacttcatggcaatgttttcaggatcaagccaccaatgtgtttctccaaagatgatgcagattttcttgtggatgccttggactattctctatctaagttgtgagctgattgtgcatcttgctagcatgaaatgaaatcttcgacaatggagccaaattactacaagccaacaacaaaaagctcatttagttcatagaaatcaccatgaataatgtaatgttctccccgttgagaagagagggggtttccctccctttttgctgaacattataagttgaatgctgactattattgtatataaatttgggtttcatgacatcaaaaagttgcattcaatctgcagagtaatgtttaaatccaaaaaaaaaaaaaaaaaaaaaaaaaaagggaaaacaaaaccgtgacctcaaacgcttcacgtttgacaacatctgcaagatcgcgttcggagtaccgttagtcgcagggattggatcggatttggattctctcatcccttctgatctgttttgcgttacttgatctatgatacttgtgttgcttgatctataatgattcttttattactcacaccaatcggtacgttcatcttcatctttgattcaaaggcgaagatcgatcggttctaattaatctgtttttttcttcttctgaatttcgagattccgttcccgatctgatgcaattctatgcttttttgtgtgttcaggtcatcaacgatcgtgaaactggaagatccagagggtttggatttgtg

SEQ ID NO: 73963 - DNA, 278 bp, Glycine max
  Clone ID: PAT_MRT3847_37803C.1
cgtattatgacgcaatggttcccgttttgagtggaccccgccatagaagagttttttgggaatgaaggcctttgggttcctgtttgatttaggtttggacaacgcttctagtatggagtgtgtgaccgaaagtctatggctgtgctcaataacgttcgtgggatgtatcaaagttgtggtgttcagttgttgatagagatgtttggtctttcgggttcttctgagatactcgagctcctgataagaacggctgggaggaaggtgaagcattatcatgt

SEQ ID NO: 73964 - DNA, 137 bp, Glycine max
  Clone ID: PAT_MRT3847_37804C.1
gtctggaatcttcaagtccaaaccaatagcaaggaatcaaattttttcttgtgaactcaagaaaaatgtgtttcttgcaagaaaacagtagacccgcttgaaaaggcagctcgcgatagaacatctatacacataag

SEQ ID NO: 73965 - DNA, 1743 bp, Glycine max
  Clone ID: PAT_MRT3847_37805C.1
ccacgcgtccgtaaccaaaccagctatggcggcgatgcagaggccactcaagagaaccattgcaatcgccaagctacgcgcgtgcttttcctctctccgacccgccgccgccgccgacatcgtcgcgtctcctccgccgcagctcccgccgttcgatcaccagccgcacccttacaacggtcccttcgccgatgaagtcctcgccaagcgcaaaacgttcctcggtccttccgtcttccactactataagaaaccttgtcgatgcgtttccgaccaggcaaagatttacggatttagccagtgctcctcagtcaagctgaatatcgtggaagggaagatgcaatatctgtatgatgatagtgggaggcgttaccttgatgcatttgcggggatagttactgtttcttgcggacattgccaccctgaaatcttgaatgccatcacggagcagagcaaacttctgcagcatgctacaaccatatatctacatcatacaataggtgattttgctgagtcattggcagcaaaaatgcctggaaaccttaaggttgtttattttgtaaattctggttcagaagcaaatgaattagcaatgatgatggcccgtttatatactggtagtcttggtatgatttctttgagaaatgcatatcatggggggagttctagtacacttggtttgactgctctgaacacgtggaaatacccaattccagagggccatgttcatcacgttatgaatccagatccatatcgtggagcctttggtgcagatgctgctagttatgcaaatgatgtccaagaccatattgactatggaacttctggaaaagttgctggatttatagctgaaacaatgcagggagttggaggagctgttgaactggcaccagggtatttgaaacttgtttatgacattatacataaggctggtggtgtctgcattgccgatgaagttcaaactgggtttggtcgaacaggaagccattattggggatttgagacacagggtgtcattcctgatatagttaccatggcaaagggtattggcaatggtctgccattaggagctgtagttacaactccagaaattgcaagtgtgttggcccaaaagattcaatttaatacctttggtgggaaccccgtttgctctgctggtggacttgcagtgcttagggttcttgataaggagaagcgtcaagctcactgtgccgatgttggatctcatttgcttgaacgattgagatttctcatggaaagacatgacatcataggaaatgtaaggggaaggggcctaatggtaggcatagagttggtcactgaccgagacaacaagacacccgcaaaggctgaaactgctgtcgtgtttgaaaaactcagagagcttggtgtgctagttgggaaaggaggacttcatggcaatgttttcaggatcaagccaccaatgtgtttctccaaagatgatgcagattttcttgtggatgccttggattattctctatcaaagttgtgagctgattgtgcatagcatgaaatgaaatcttcgatattggaaccaaattactacaagccaacaacaaaagttcgtttagttcatagaaatcaccatgaataatgtaatgttctccacgttgccaagagaggggtttccctcccttagctgagcattataagttgaatgcaaactattttgtatataaatttggattcataacatcaaaataaagagtaatgtttaattcc

SEQ ID NO: 73966 - DNA, 235 bp, Glycine max
  Clone ID: PAT_MRT3847_37806C.1
cgaccccccaacgggtacccttccatctttgctacctccatctgggtctgaagtgcctgctgagattgccatggagattcccatcgaacacgggatacttttggacaacattttggatcttgcgctcgccgctttttctcacccttcaactttggctacgggagggagtgttcccagcttgatgaagtgggtgatacctgcttctggccgtaatagatgctggggcgcttatccc

SEQ ID NO: 73967 - DNA, 584 bp, Glycine max
  Clone ID: PAT_MRT3847_37807C.1
cggctgcgagaagacgacagaaggatacggctgcgagaagacgacagaaggatacggctgcgagaagacgacagaagggtcctaacttagaatcctacatttttcttttaacactagtcaagttattgtataattcacaactcacaatacaagtaatatcacatcaagtattaatcacacacttattcacaaccatatctcatgtctacaattcaacatctcacaatttaactaattacaaaatatacttaacaattagataaacatgtataataataataataataacaaaacatatgtaaaaatatacaacttagcctgtgaatgtttactgctttgaataaaaattacaaatatttttcgtgcaaataaaatatttataaactagtcggtaatccgtgcatatgcacgcgtcgttcgtcaacttattttcgatgaaagaattaaaagaaaggtattgtaagaaaggaaaaagactaacattgatattaaaaagttttatatagtgcaacatattgattgccaaatccatagaacataagtataaagacagttccaaacaaagataactaaaattgtctgcc

SEQ ID NO: 73968 - DNA, 312 bp, Glycine max
  Clone ID: PAT_MRT3847_37808C.1
aaaaactgaaggggaattttttcaacagtgtattcaagtttccatatttaatgatctggaagcaattttttcttaaaaaagaaatatgttacacttaaacaaaaagtaccctgctttcttggaactttttaggaaaggttaattccctcatttttaccattttgaaaaactttaaaccaattccctctggggggaaaaacttaaccaaatggtggccccagggggtgaaaccttttttttttttaagcccaccaaaaaaatgccttgggcctttttgcttttccccggaacttaagccattcccaagaccct

SEQ ID NO: 73969 - DNA, 501 bp, Glycine max
  Clone ID: PAT_MRT3847_37809C.1
ggcccaaccttttgaaaaaggaaaaaggggaaaaaatccaaatagattttttaaacccaaacaacccttaggtttttgtgggggacttgagggagggcccaaaggccacaaaaagcaaaatttttgaagctaaaaattgtttgtttgcaacctttactttgttgggacccaaacatttatgaaaggacccttgttaacaaaccgaaggttaagaacctggggttttccttaagggtcaacggttaaaacccagccccaggggcccgtttggaaacaatccatactttttgcaaattcaaaaaaacctctcatcctacaaaaattcctaccctttccttcccctaaaaaaaaaaaaaactttgcgggaacctccttaataaatagaggcccggaaaaaaaaaaacctacaaaaaattttcccaattcacaaacaaaagttgaattgcccccaacacccctgcctttagccgcagaaacattctttgggtggcaggggaccct

SEQ ID NO: 73970 - DNA, 668 bp, Glycine max
  Clone ID: PAT_MRT3847_3780C.1
cccacgcgttcgattgagaccatgtcaacaataaggagctcgttgctttgcgcccagttggttgaagaggtttgcgccggcgctccaaaaagaccccagctcagccccggatccacctcgtaccaccaccaaaatggaaactggagaaaacgaaagaatcgcatggttcggacggaggggcagtggtcacttctcaccacattatacgacaaagacaatagtgacttttgagagagatcgataccgaagcatcttcaacgtggaaggccctgactattttactttaactgtacgagactgacaaagaccgaaattaccggcgataaaagatgcttgcattgacaggactggtacctgcatctatggaaacgcactcccatgccgccaactaacactccaggccaacctttacgatgaaagatcacataaccagcggacctccttcaagtcttcaagtccgacgctgagcaatcgtcctcaaagtccgttcgactgtaatggaatgccaactgccggatccgaaaaccggctccgagaggtcatctccggatatacagtacaacttccccatctctctgtctcaacggcaatgaagacaatagcaggccctcgatgagctgtcttcctttgatactcacgtaagtgtcgcaatatttgttttaaaaaga

SEQ ID NO: 73971 - DNA, 1912 bp, Glycine max
  Clone ID: PAT_MRT3847_37810C.1
ccacgcgtccgcataattctgctctcagatctgagtcactcgctgaccgcaacaactcgagcacactgataggtcctataatacaatagcactgatacaatgaagaatataattgcacctgtgcaaagtgctatgccatctccaacttttctgtggaggttcaaggtgacactctttctgatatggggctttacttgctgcaagattggttgggattctgtcatgagaatggatgcaaatctgcgagatctgtttttatatgaagtgtttttgtattacaatcctcttcttcttgtgactatgatggtttggctttggggagtaaatttgtgggtatttctgcaatccactgtaagctatgccaaggtttttgatcttgatcaaaaccaccttactcacaaagagatatggaagtgtagcacttggatgacaatcattgtccctactagcatgactgcttacctctatctctattctcatggggaagtatctttggctgcatctcaaccagtgcttctctacattcttgttgcagtaattttgatctttccctttgatattttctatttgtcttctcgttacttctttttgaggacattatttcggatagctttcccttttcagccaattacatttcccgactttttcttggctgatattttaacctccatggcaaaggtgttttcagatttggaacgttcagtttgcagaatggtaaacagacaggtcgcgacaattgcttggcttgaagctgattcagtttgtggtagtcactcagttgcaataccaatagcccttgttcttccttatatatggcgtttattccaatgtcttcgccagtacagagataccaaagaaaaaaattgtctcttcaatgctttaaaatattcaactgcagtcccagtaatttttctttctgccctcaagtaccatgtcctccatgagaaatggacaactctttatcggccactgtggcttctctcaagtgtcattaattccctatattcgttttactgggatataaccagagattgggatttaagtggcttttcccgcatattcaagttcaacaaatcaaatccaatctccaacctgttatacggtcgacaatgggtatacttttgggtgattggaagcaactttgttctgcgctgctcttggacatacaaattatctgcccatctccgccataactacctgacagtgtttactatcactcttttggagatgtttcgacgcttccagtgggtattttttagagttgaaaatgagtggaataagatcacgcggtctggtgttcaactcacagaaattccaagagaggaggagaaattgctaggttccaacattcacgatgtatagagaatctcaagccaaccaaattttgccaatatcttcgtatcagcaacaggtctaattcaatttttaagctaatattagttctaatcccaaaagcatttttcttcacgtgttcctggccaaccaacatgagggagttttcttgcacatgcatggatggatgtctgagacttagagatagttgattccgttgctgaagctgcctcggctcagtcattcctttcttaagttgtatcttcatgcactatatgctttattctggaatgggaaggggttctgtcagtctcagcagttcaatgaaaatgaggaagcaagcctacaattgcacgcacatgttcacttatacatgaagagctgcaagaactagaacttaagaacaatggtggccataatggatgttgcattcttcttcttttttgtctccctttttgtttgtgattctttagattagcatttgtaacaagagaatggacacaaagggtttgtttgcttgctacacaaagagtcaaatcgggatacacttctaataaaaggaaaaaaggttgaatcagtt

SEQ ID NO: 73972 - DNA, 273 bp, Glycine max
  Clone ID: PAT_MRT3847_37811C.1
tttctttgttcaaaacctcctttgccatcattttattaaaaatttaaaactgcttagagggcctgctgaaatgacccacggccaaaacatgcttactccccataaaaattccccactcgtgagacaaactgctgtctaacaaaaggaattttttttaaagagcactgctgatgttacaaatgctagaacccagcctcaaattcatatatgaccctgcttgcggtctgagcctgcacttgttaaacccttcgttgtacgcatctctggaccttt

SEQ ID NO: 73973 - DNA, 182 bp, Glycine max
  unsure (1)..(182): unsure at all n locations
  Clone ID: PAT_MRT3847_37812C.1
cacacctgtcatctatacctaccctattttcaaaacacttatcaacaaattcaaatccgtntatttttaaaaatcctttcacccaacaaaacacaaacataaaatgatcaacctctccttcctaaaaacttaacttactcacattaattactttttacaaacttaaaaactctccagtacca

SEQ ID NO: 73974 - DNA, 284 bp, Glycine max
  Clone ID: PAT_MRT3847_37813C.1
ggtgacaacgcgtgaacaatatgtgcgcatttgggcctcatgctcgtattcctggtctctgattttgggcaccattcgtcaaccatttctcagcaaactggttgagatcaaagggcaacagtgaaaagaccattgaatattgcatcttccaagtataattctagcaagcttatattgagcttatcggtggagggaccttatcggatgaaacagtctaaggggttcaatcatgcaaatggttcacactgatacttaatgatacattctgtgtgtaatataagagg

SEQ ID NO: 73975 - DNA, 287 bp, Glycine max
  Clone ID: PAT_MRT3847_37814C.1
ggaatgcccggctcgcccccggcgtgcttacaggatgagagaagacgagagaaggggagcggttcctggcttggagacagagtgagagaagctctcactttgcgaaagaatgcaagagcagtactcaatggtactggatcggcagagattggtagattccatttaaatctcttgatgatcctgtcaggcccctcacccaggcctgtgagccctaagcatggatgtggactgcctggcctgctaagtatggaaggcctctgctgtgcgttagctggcagatgaatctc

SEQ ID NO: 73976 - DNA, 2272 bp, Glycine max
  Clone ID: PAT_MRT3847_37815C.1
aattcggctcgagcttttaattctcaggctgtgtacttaaggcgaagaggggccttccatgggcccccaacaaactcctctaaaacattggatggtgctgggagactgagttcagtggagtctactgaagacaaaagtgagctgtatgttgtgagtactgaagatccagaaaatgatgacgataggaatgatggctctgatccagctgagggaatgcctggatttcagaatgtcttgaaagatatgattccgggggtaaaggtgaaggttttcaaggtgataactccagacaaagtagacaaggatatatctaatgtgattgagcagataattgaggatgaagacgaagacgaagatggcaacgaagacgaagacgaagacgaagacgaagacgaagacgaagatgaagaggaagacgaagatgaagatgaagacgaagatgaagggaaggaaaatgatacagaaagtctagaactggaagacattaagtctgagactgaccaggagggagatgatgagattgaagtaaatgctggtctgggaacttttgaacgtgaagaccagaatgagtttgccgtcaaaattgccattggtggtcttgttcagaaactttccggtaatctatcctctagagatttgcttcgagttcctgctaagctggagatgaaggggcgtggttcattttcctttactgttgaaaaagaagtcaatcagcaggttggtcttgacaaaggaaaatcttcatctgataaatcaactaagtttcaaggtcgacgcagagttgatcatgttatttttgaccttgcaaaattcattggcaggggaaagataccctcaaaggttctgaaagaagtgggagaattgataaatctcactctaagccaggctcagagccatcaccagttatctggctcaacaatttttaatcgcatcgaaataccaacttcatttgatcctttaaatggtctatacattggtgcgcatgggctttactcctctgaagttattcatctaagacgtagatttggtcagtggcaagaggacaatggggccaaggagccttcaaatcttgagttttatgagtatgtagaggctttgaagctaacaggggatccttatgtaccagctggtcaggtggcatttcgtgcaaaaattggaaagaggtatcaattgcctcataaagggataatacctgaagagtttggcgtgattgctcgctataaaggtgaagggaggttggctgagccagggtttcagaatccccgatgggttgatggtgagcttgtgattcttgatgggaagcatctaaaagcagggccggttgttggatttgtgtattgggcccctgggtatcattttttggtcttcttcaatcggcttaggcttcaacagtagggttttgttcataatatcagagacttgtaaattctttcttcagattctcagcgttctaggttttgttgaatgctaaattgtgcttcaatggaagatatcaccaatcaatacagggtttccatttgagctttaaaagatcttcactactagctttctgccgagtagcataggttgagcatttggctgcttgtctagaactcaaatgaccgaggtatcttaagcttggtagctgtagcttgactaactatagattgaagagggattcataatatcagcactaaagcacaatgtactagtctcttcattccacattttatggaggtgtagtgttcagggtatcttcatcaactttgtacattgttcctaatttataagaaaaattcccatgtatcataaaattcatgatatcatcgttctttctgtaatgatgaaattttcatcacaattttttcttctttggatagtatttagaggtctttagtattagcttcctcattaattctatatccagtcaacaattgaatctcccccgaaagtgtcaagccaaaattttgaatacagatttgatttcatgacacccgtagttgccttttttcaatccctgtatgaccttacggatgagcttggtagactatggccagcaagttcatgccttgtattgaatttattgacacaattaaactttattcgggaaagagaaatgttgtggggatgaaaattgggggaaagttcttgtttggaaaactgaagatgttgaggaaaaaaaaatgaggataagtttggcctttaattatcataaaattagtctacatatttaaaaaagggagaaatacaaaacataagtgtccggttaatgcccttactgaaattgacccat

SEQ ID NO: 73977 - DNA, 657 bp, Glycine max
  unsure (1)..(657): unsure at all n locations
  Clone ID: PAT_MRT3847_37816C.1
aaaaatgtatagtcagagttatctacatggaagctgttgttgacaaaatctctagccatcagaaggaggatgaggtgagaagtggaggcactgttgatatggaggatgaacttgtgggtaaggatcgctatataggatccattgagagcctcataaggaacaatattcaacaatataagatagatatggctgatgaggttattaatgctggacgttttgatcaaaggacaacacatgaagagagacgtttgaccttagagacattgttacatgatgaagaaaggtatcaagaaaatgtccatgatgttccttctcttcaggaggtaaatcgcatgattgctaggagtgaagaggaagttgaattgttcgatcaaatggatgaagaactggattggcctgaggacgtgatgcaacatgatgaggtgcctgagtggctccgagccaatacaagagaagtgaatgctgctattgctgctttatctaaaagaccattaaagaacactttattgggtggtaagtgttgccattgaatccagtgaggtgngtggggtctgaaaggagaaggggacggncccaagggaaaaaacatcctaattataaagagttggaagatgaaaatggagagtattctgaagcaagctctgaagacagaaatga

SEQ ID NO: 73978 - DNA, 691 bp, Glycine max
  Clone ID: PAT_MRT3847_37817C.1
ggctcgagcttaaagcaaagaggggccttccatggacccccaacaacctcctctaaaacattggatgctgctgggagactgagttcagtggagtctactgaagacaaaagtgagctgtttgttgtgagtactgaagatccagaaaatggtaatgataggaatgatggctctgatcctgctgagggaatgcctggatttcagaatgtcttgaaagatatgattctaagctcggaattcggctcgagcaaggtgataactccagagaaagtagacaaggatctatctaatgtgattgagaagataattgaggacgaagacggagacgaagacgaagatgaagagatggaaaatgatgcagaaagtctagaactggaagagattaagtctgagactgaccaggagggagatgatgagattgaaataaatgctggtctgggaacttttgaacgtgaagaccagaatgagtttgctgtcaaaattgccattggtggtcttgttcagaaactttctggtaatctatcctctagagatttgcttcgagtccctgctatgctggagatgaaagggcgtggttcattttcctttactgttgaaaaagaagtcaatcagcaggttggtcttgacaaaggaaaatcttcatctgataaatcaactaaggttcaaggtcgacgcagagttgatcatgttattt

SEQ ID NO: 73979 - DNA, 240 bp, Glycine max
  Clone ID: PAT_MRT3847_37818C.1
gtccgagattctcccctgctctactggttatgtataggcttcctgcgttcacatgcttactatgccgtggtctgtatagcactagtatgcatcgagtggtcatgctgcttgctgtcggctaccatgtatactcgcgctcctgtatgcagttgcagaccaggcaggggcatcatgagaggagatagggcagttgtcgacgttcaagctcctgaggactgtcactaatgagagacgtgcagg

SEQ ID NO: 73980 - DNA, 141 bp, Glycine max
  unsure (1)..(141): unsure at all n locations
  Clone ID: PAT_MRT3847_37819C.1
ttctcacgccaagccatggcgtctgcaatcttgtnaacttctgactncattgtntncattacttcnaattctcttcttaccgactcntgcgccttggctcctgttacagggagaagaccttggatggctnnnganaccagg

SEQ ID NO: 73981 - DNA, 249 bp, Glycine max
  Clone ID: PAT_MRT3847_3781C.1
gcctgtgaagagaaataccttaaccaccaggtaaaaggaaaccccccccccaggaaggtcgcacttgccatacctggcaatcggcggtgcaccttgagttacctttgacagggccaaaatggttaaaaaaggcttgggtggggcaactaaaaaacccggccttattaaacaaactcaaaaaggaacttttggggaatatcgaacctaatattccggggaaaattatgggggacgacatggttttgttct

SEQ ID NO: 73982 - DNA, 632 bp, Glycine max
  Clone ID: PAT_MRT3847_37820C.1
gtatattaagtttgttttactttaacataaaaatatgtttaagtaacagagatatttacagtggcacatcctctctcactaagcacttgtttccaaaaacccatcatctcatcaaggtttgaaagtagagctaacaaaaactaaaggtttcctatgtaatgcttcagcctcgatgaataacagcgataagaggggaagataagtgttcaacacaaaatatatgcattaaaggaagatctgcaaactgaaccaccgcatatttacacattgcataccctaccaatcttctatgtcatcatcagaaatctccctagattgtccatctaaatccattttgtcaaaatcaaaatcttccatttccaagttcagtaatgattccggacttggttcatgatgtccaccccatgctccatttccaagcaatttaagcatgggcatgtactcagtggtcataattgacatatgataagaactaaaccgtctacaggcagggattctgagcctatccacctcattcttgtataatgatgctttctcaacttgccagagctttggtcgccgaattgcatgccacctggaggatagtggatgagaatttgcaaataacaccccacgaacagctatggatgcag

SEQ ID NO: 73983 - DNA, 335 bp, Glycine max
  Clone ID: PAT_MRT3847_37821C.1
gggggaaacaataaatgcttttcttcataaacaagactattttccttccctttccaaaacaaaatcctctcatcacttcacttcctaacaaggatcctacccatcaaccttgcacatcctaaacccattgatctaaaagcaaaaataatgcaccctgcccttcactccaaatctcttccctccccaaaactcaaaaaaacgttcctttatcctaaaaccaccccattacataggcttcaggattaatcctacactcccagtatctctctcatccaaatatttgtactcctgaaaaaaaacactccaacacccaacctcctttctcctcatgctaa

SEQ ID NO: 73984 - DNA, 440 bp, Glycine max
  unsure (1)..(440): unsure at all n locations
  Clone ID: PAT_MRT3847_37822C.1
acggctgcgagaagacgacagaagggatatcatgaggagtagattaatatctggaaaaacaaacacaacgatattttaactgaacaatgggtggaatagtgacacatacactagagtacatgggatggtataggaaaaacactattttgttcttgtctgttgcacaacaactaaatgatccacacacaacaattacccataatgctgcaaggataactgttgaacaaacacatatcaaaattccacatcctcagtcaatgtaatgtactccttcacctattcatcaaaatttggccagactggcgagttagtcagctcaactagccatgaatggatgatcaatttatttggtgtcaatttgaatacatcaaattcngcgacatcatatttagcttctttacaacaattcgatgcaccatattcgtttggagaacaaggac

SEQ ID NO: 73985 - DNA, 1359 bp, Glycine max
  Clone ID: PAT_MRT3847_37823C.1
ccacgcgtccgcggacgcgtggctcgagattttccctttcgtcttgagagagagaatcggtgtattgcatctgaattggaggggctttggttcacagaaaataggaaaccaaaccctaatataagtcccaaatcacaatcacagcatcagaagagaggtctctcgccgattgttttgtatctgcagttcactccttacgaattccgagtatctccgtttgctgtggcctttcactttcttctctaatcagcgcgtagaaccacaacaacgcttcgcaggaccaaaagaactgttatagtgtgtacaaactgccggcgaatatggaagaagatgattatgtggagtatgtgcccgtggccaagcgtcgtgccttggaagctcagaagattctccaacgcaaagggaaggcctctgctgtcactgacgatgatttggagaaacaaagagtggctgaaactaagcccagtcttctggttaaagcgtcgcagctgaaacgagagcaacctgagatcagtgtgaccgagcagattgttcaacaggagaaggagatgattgaaaacttgtcagataggaaaaccctcatgtctgtccgcgaattggccaaggggattacttatacggaacctttgcctacagggtggaagccgcctttgcatgtgagaaggatgtctaagaaggagtgtgatttgattcgaaagcagtggcatataattgttgatgggcggtgatatcccacccccgattaagaattttaaggatatgaggtttccggagccggttttgaagaagttgaaagctaaggggattgtacaaccaacacccattcaggtgcaaggcctgcctgttatcttatctgggcgggatatgattgggattgcattcacgggctcaggaaaaactctggtctttgtgcttccgatgatcatggtggcaatgcaagaggaaatcatgatgcctattgttcctggagaaggtccatttggtttgattatttgtccatcaagggaactggcaaggcagacatatgaagtgattgaacagttcttgatacctttgaaggaagctggatatccagagctcaggcctttgctctgtattggtggagtggatatgagatcgcagcttgatattgtgaagaagggtgttcatattgttgttgccactcctgggaggttgaaagatatgttggccaagaagaaaatgaatcttgataattgcaggtatttaacattagatgaggctgatcgattggtagatttgggatttgaagatgacattagagaagtttttgatcacttcaaagctcaaaggcagactcttctattttctgccactatgcctaccaaaattcagaacttt

SEQ ID NO: 73986 - DNA, 212 bp, Glycine max
  Clone ID: PAT_MRT3847_37824C.1
taccaaagctttttccataggagttgactggggattactacaaaaaacacatcgccacccctctcttttaatccccactatttctaccacccggtgctattgtttatccatcaaaataccttatttttaagtttgcagaggagattcactttgtctcttttccttatggacaagaaggaactcctccttcttgaaattcttttgattcccca

SEQ ID NO: 73987 - DNA, 294 bp, Glycine max
  unsure (1)..(294): unsure at all n locations
  Clone ID: PAT_MRT3847_37825C.1
cccccctaataaataccncccccaagaccgcggagaagggggaggtgccaaaaacacaggccgcaccccgacgataaataagaaccctccagacccaacgaacccccggggctagacgccccgccacgcggccccggggacgggcaatcaaaaacaggcccgccacgcaaacaacggtattaaaacccctctccgacccaagaggcgacccacttcgcggcacgccaaacaatgcaccgagcgaaaagggcctctccccctgcttctaacaaagcctccaggggggggatacca

SEQ ID NO: 73988 - DNA, 517 bp, Glycine max
  Clone ID: PAT_MRT3847_37826C.1
ggaaaaattaatccatcatattaatagtcatcattaactattttgttttcattgtcaatttttttgttgtcgtcttttttcagtgttcctgtaagctcaaggcaagggagagattagtacaataaaattgatgcatgtttggaagtttctttcttcttgaaaaaagaaaataaaatggtttgttgaatatacaagcgtttcatgttggaaataataatgagtggatattttctaaatgtgttcttattcatatgcatcttcatcatatagattaatatataatgtttaattaagttgaataatttgtgttttaatttccggaaaaaaatgtttcaaataaaaaaaagtgattaattatttcgaattttaaatattttaatgaacgaaatccatgaagtcacccgtaaatcattctttaaaaatgcttctgtcaattcactaatttcatttataaacattttgtcttttcaaataacactaaaaataaaaatgtttttgtcaacatcagtgtcaaatg

SEQ ID NO: 73989 - DNA, 156 bp, Glycine max
  Clone ID: PAT_MRT3847_37827C.1
ttttgtcgatccagtgtcatgttaaggatactgtatgcataagggggtccatttctttggctcttaggattgtgtctgatactgttgtgtaatttattcgaatgctcaactgatgcccaggttttatgatacgttccggagcttaacttgttcagg

SEQ ID NO: 73990 - DNA, 379 bp, Glycine max
  Clone ID: PAT_MRT3847_37828C.1
gcacactatcaacaacattttccgcatcttatcttagaccccaatgtctagcttggggggggcgaagctgtctcatgctcttcaatacaaaattattgtcacgggatattctgggtctcacagttcacacgtgtcaccaatatggaactcacaaaatagcccacggtcatagatcaccaaaggaagcatgttgatgtcgatggtttttcggtaacatatcttgtcggcatacactcaggacacattatatgataagatcttttattgaccatgggtctagaattgtagtggtatgtccaaatgatttgcttggtaagcctgaacttatccttttgtgtaagatgcttacaatcaaacactctctgatgtaggggatatt

SEQ ID NO: 73991 - DNA, 805 bp, Glycine max
  Clone ID: PAT_MRT3847_37829C.1
aaagactaaaatgttctatcttgctttccaatacaaaagtaacttgaaaagtaaataagtaaatgaagtttatcgtcggtattgagatgtaaaaatttgaccaagctattagtattatcttatagcccatctataatatccaaaacattagatctttggtgctccaagccttctctagtaacaggtgaacttcctacactattgctatgatgccaaactttggcacttcttttcttggttacttcaagattctcgcttttgctaactccagggcttcttttcctcatagttacctcttctaataatcttttatcctcttgagaaagtttagatcccaaaggcttgttaatactgtctaaagatataaattgcaacatgtttgattgaaaatcaagtcgcctaggtaaagttcttttatgcattggccacatgatcttgtgtctgtatcttacaaatgtaaccaaatagtgaaggtgagtcaacaattcgattatgtttaaattgatgccaaactttggcacttcttttcttggtcactgcaagatcctcgcttttgctaactcctgggcttcttctcctcatagttacctcttctaataatcttttatcctcttgagaaagtttagatcccaaaggcttgttaatactgtctatagatataaactttgattgaaaatcaagtcgcctaggagaagttcttttgggcattggcttcatggtattatgtctgtatcttacaaaggtaaccaaatagtgaatctgagtcaacaattcgatgatgtaaaaatctattttatgcttctca

SEQ ID NO: 73992 - DNA, 395 bp, Glycine max
  Clone ID: PAT_MRT3847_3782C.1
tttttaaatccaattattatccaaaactatgcataaaggcgtgccaaaatataaacctgaaccacaggcaggtacatagagacatccactccttacgtcaaattaaactaaagccaacagaaacaaagggatagcacaaattacagaatcacatgggttcaatgcattggtcataaaaaaacaagaagaaaatctaagtatttgatcttacatatatcataaacaaatctacgttttcagatgattaaagagtgatactcccatcagctcaatactagctagtaccttaaattggaaggaaataacttgagccattgccttcattcatgtgattatcaatgtttaatcctgctgcactcacttcctgaccttctggtttgtgattcttgacatca

SEQ ID NO: 73993 - DNA, 324 bp, Glycine max
  Clone ID: PAT_MRT3847_37830C.1
aaaaaaaaaaaaaaaaggggcggccccccgccatctaaaacctcgggcccaattccgggcttaccaccccgggcctgccacctccaagccctttaaagggggcccccaaattcaaaccacgggcccgcgttttacaaccgccagacggggaaaacccggggggtccccaactaaatcgcctgggaacaaatccccctttccccagggggggaaaaaccgaaaaggcccgcaccgtacgcccttcccaaaaatgggcccccctgaaggggaaatgggcccccccctgtgacggcgcataaaccccggcgggtggggggggtaccc

SEQ ID NO: 73994 - DNA, 1666 bp, Glycine max
  Clone ID: PAT_MRT3847_37831C.1
ccacgcgtccgaatgagcacggtagtgttacaagaagtcttcaacgttgtaccaacttccgaatcagaagagtttcagttaccaactcaaacatcgctttccctcaccttcttcgacatcctatggttaaggttaccacctgttcaacgcgtcttcttctatgaattccctcacccaacccatctcttctttgatacccttcttcccaaactcaaacactctctttctcttgcacttgcccactttttccctcttgcgggccacctcacttggccacttcactcccaaaaacccatcatcaattacaaatctggtgacactgttcccctcacagttgctgtatctgaagctgatttcaaccacctagcaggcacagatctttatgaagccaaagaaattccccatcttttaccccacttgaccatatcccacgaaaaagccacgcttttggccctgcaagctaccctctttccaaactctggattttccattggaataacctcacaccatgctgttctagatggcaagacttcaacatcgtttatcaaatcctgggcttatctttgtagagaatcacaatcacccacttctttaccacctgaactgattcctttttatgacagggaagtaatcaaagaccctaaccatttaggggtaaaatatgtcagtgattggttagagcagaatggacccaacaaccgaagcctcttggtttgggatctgcaagctccagaagatgcaactagaggcatatttcaattgtctcgttcggatattgaaaagctgaagcaaatagtggtgtccaagaagaaagggaacaacaccaaccttcgcttgtcaacctttgtgttgtctattgcctatgcttgtgttttcagggtgagagcagaggaaacaaagaacaagagagttatgttggctttgaatgttgattgcagggcacgtttggagccacctattccaccaacatattttggaaactgcgttggagcgagacttgcaattgctgaaacaagagagatattgggggaagatggcctaattgtggttgtggatgcactgaatgatgccttggggaatctcaaggatggagcactgagtggagcagaaaattggtcaaggtggttgcttgaaagttttagtgatgatgtgagaataattggtgttgctgggtcacctaggtttgaggcttatagtaatgactttggttggggaagaccaaagaaagtggagatggcttctatagacagaactggggcactttgtttatcagatagcaaaaatggtgatggggttgaggtaagttttgtgtccaacaaaagagcaatggagacctttgcttatctctttgccaatggccttcgatcttgagtccctcttggtacaatcttgtggtttttcatgaataaaaagttgaggaaaaataaaggtagagtagtgtaggtgttcttatgaaaattcgtttttaacaattaattgtctgaaatgttctggtggtgtgtaatgcttcaattatttgacaattttatgtatattaatcatgtattgctgttgattatccgaaatttgcttctcagacttcacaaataatagttagtggctacaactttctatttatttatttatgaaggtaaataaatactcgcataaataaaatctgaaaaaa

SEQ ID NO: 73995 - DNA, 148 bp, Glycine max
  Clone ID: PAT_MRT3847_37832C.1
aagatacaatttgcatcattcatttagattgtgaatcaaagcatcaaatttcctaacacattgacgtaaaacaaaggatttccaaacacattgacataaagcatcggattccctaacaccctgacgcaaaacaaaagatttcctgaca

SEQ ID NO: 73996 - DNA, 273 bp, Glycine max
  unsure (1)..(273): unsure at all n locations
  Clone ID: PAT_MRT3847_37833C.1
gatcccaagctcacacaccaaaccagagcaagaatagtgttctaagagtgagcaacaacttcaaacaccattgtgagaaatgngcntccaagggtgcattctccngtgtctcaacattctctncttcactgtggtaagcntccacatatgtnccntgcaancggccccctataattcnaaacaagacactggtnccnangcanctttcccnaagngaataagtgcnnccanggngtgataaagttgggggcgannggntgggctgggtgcngt

SEQ ID NO: 73997 - DNA, 1742 bp, Glycine max
  Clone ID: PAT_MRT3847_37834C.1
atcggttttggaaagttctggtcccatttatcaaggctagaaccgaaccaaccaaccccccctttttattttggctgttctgttgatcgcaaatcctcatctcatccctattcgtcgcaatctccactgcaccactttccagcatcttgaatttcaaaatgcctaaagttagaagattgaagtccctgtctactgattgtaatagaccgtatccttacccatccaactccaaaaacattgagctgcataaacctatgaatttgttggaatcggctgatgaaatgaaagaatgggaggaagctagatgtcctatttgcatggaaccccctcacaatggtgttcttttgaaatgttcttcctatgagaagggttgtcttccttacatgtgcaataccagttaccgccactccaactgccttgaccagttttgtaagtcctttgcttctcatctctcatcagaagtactgcaagaaattcctgtcacaggcagagtctcacatagtagagaaattcagtcagagtcttggcaccctgctcaatgtgggagccagttacaaccaaagctcatttgccctctttgccattggaaaatatatggatatatgatcgtttggagcctgcttgaaggtatatgaattctaaactaaggagttgttcttccgaaacatgtgaattccaggggacatatccagaactcaggaagcatgctaggtctgagcatccttctgttcgaccatcagaggtggatccctcgcgacaatgtgattggttaaggatggaacaagaaaggggtttgggagatctttttagctcaatccatgcaagttctggtgcagattacaatagagataccattttgactgggggtcttgctgacttgatgtcctcattcttgtatgaaatatttatctctattgaagatgttaaccgaatggctagtttgttgactaattcgagacacagagttccattatatgacagaaggtctggaacaacaaacagggtatcaaatgatacacagacaagtcaatcagctagatggagatccaatttaccttcagtgcatcaactggagagaattgccagaagtagagtgagaagcaattttccgtatttatcatcccgtgatcttgaggcagaggcaaatcgtacggctagatggagaacaaatttatcatctttaagaacgcctcgcaatgagcatcagtatagagacctcagtgcagaggtcacatcttcaacaaggatgcctcgggcctcacaaggtactcagactaatccccagagcaacatttcttcatctggaaggttccctggtcgtcaattacgctggcgtgatcaaagctggtcgacaaacaaccaccaatgatgaatggcaatggatacaagctagtctgtttcatataattacagatgtttacttctgctttccgttatggaaagatacttcaaactaccgcttaacttcgttttatttcaacgaaatcgttttattggaatttaatgattcttgcatgctcaaagtagatcgttagcaactacgaaatatttttctaactatttttgtttgtttttcatctaaattctaaggatggactattttggccctaacaaggccaaaattaatttagttctcttctttaacatttttttttgtttcattaaaaaaaacatttttttcttaccacaaatcttataattcaaacatttgcttgatacctttaattacatcattagtttca

SEQ ID NO: 73998 - DNA, 1287 bp, Glycine max
  Clone ID: PAT_MRT3847_37835C.1
ggaaacaaaagaaacgagattgtcgaacttggtgttctttggcaacctgcgagggtgcgactgcgagcgagcgagcgagcgagagagagagaatcgaaggcgacacaacttgcatccgattctgagaagaagaagacgagggttctcctcctgttctctttcgaatacaatctttctgcttcatgatgttgaacaaatgatacagaatttattctgtgcacagaaaatctggtacatatggcaggacttatgcctggagagttgtcacatcatggaacatctgatggcaactctggtaaaagttctatagagaagcaagaggaatcattaggtcgctggtatatgtctagaaaagaaatagaggaacattccccatcaagaaaagatggaattgacttgaagaaagagacgtatctgcgcaagtcatactgcacattcttgcaggatttaggcatgagacttaaagtgcctcaggtaactatagcaacggccataatcttttgtcatcggttctttcttcgacaatctcatgcaaagaatgaccgaaggaccattgcaacggtctgtatgttccttgctgggaaggttgaagagactcctcgtccactaaaggatgttattcttgtttcttatgagatcattcacaagaaggatcctgcagctgcacagaggataaaacagaaggtgttttattactgatggtgctttgaccagttcactcctatacatcaacatttttgacttaggatttagctgaatcttattgctgctgttaactcgagactttttcttgcctgtcatctttctccaattgtctaaactggactaggtttttgccccccaattgcttctagactgtgaatccctccaccttgtcagtttctagccaacacatctatgtaggttatatgtcaaacatggtagctatgttccaaatattgaaatcctataaaatgtttttctgccttgtaaattatgaaaagtatcaaggttatttttttttattgctcaataactaaagttgaacttgttgcctagagtttttaaattttatcattaaggaaatgttctttcctataccccattctattggatagttgatctgattccatctccaactgccgtatattggtaaagtactacgtggtccctttctgactttttattttttatttacactcctcttttatagtggttctctttcctttacccttgatgtatttatatttgttcaatagaaattgtaaatgatgcaggaagtgtatgagcagcaaaaagaattaattt

SEQ ID NO: 73999 - DNA, 273 bp, Glycine max
  Clone ID: PAT_MRT3847_37836C.1
tggcccattcattcggtgtcggtccactccccttaatttacgttattctactcgtacgctgattaaaacaggacatgagaatggcatgagcataggggctaaacagataacagttcgtgtaccttgcgaagctgccagagcaggcagtgcggaacgaagagatggaggatttcatgcataatgatgcggtggagtggactccagcgactgatacttactgtggatgatcataacctcctatcggtggcctacaagaacgagaacggttctctg

SEQ ID NO: 74000 - DNA, 493 bp, Glycine max
  Clone ID: PAT_MRT3847_37837C.1
ctgcgactgcgagcgagcgaaagagagagagaatcgaaggcgacacacagcttgcatccgattccgagaagaagacgaggcttctctttcgaatacaatctttctgctacatgatgttgaacaaatgatacagaatttattctgtgcacagaaattctggtacatatgacaggacttatgcctggagagttgccacatcatggaacacctgatggcaactctggtaaaagttctcaagacaagcaagaggaatcattaggtcgctggtatatgtctagaaaagaaatagaggaacattccccatcaagaaaagatggaattgacttgaagaaagagacatatctgcgcaagtcatactgcacattcttgcaggatttaggcatgagacttaaagtgcctcaggtaactatagcaacggccataatcttttgtcatcggttctttcttcgacaatctcatgcaaagaatgaccgaaggaccattgcaacggtct

SEQ ID NO: 74001 - DNA, 954 bp, Glycine max
  Clone ID: PAT_MRT3847_37838C.1
tgcggtaaatacttaattgtagtttttatcatatgattaattcattcttttgcattttttaattctaaaatcaaatacatttcctttcactaagcatctggacgtgacaagaacgcaacctccgagtgagtcgttagaaacagaacgatggcgtatgggcctcaattagaaatcggggcaacccaacagctcagatgggccagcccaaattaaaaaggcttaggtagagagttgagagttgaaatttcaccgcgcgaaaacccttccctgattctggttttggcgcagagtgcaaccgattttcgatggttcaattccacgagcacataatcacagagcttctagaagactccaatggcggtctggttgttctctcctcgggcctcgctctctccaaactcatcgcttctcttctcattctacactcctcatctcagggcacgctcctcctcctctcaccgtcctccacttccctcaaatccaaaatcaccttccacctcaaaaccctaaacccccaattctaccaaattcccgccgaaatcaccgccgacctccacgcgccccaccgccacgcactctacacctccggcaacgccttcttcatcaccccgcggatcctaatcgtcgacctcctaactaacaagttaccgacctccaagatcgccggcataatcatcctcaacgcgcactcgctctccgagacttccaccgaagccttcatcgttcggattttccggtcgctgaaccgcggcgcgtatgtccgggcgttctccgacaagccgcacgcgatggtgtcggggttcgcgaaggcggagcggacgatgaagtgcctgcacgtgcggaagctgcacctgtggccgcggtttcaggtgtacgtgtcgcaggagctggagagggacccgccggaggtggtggatataagggtgccgatgagcaggtacatggtggggattc

SEQ ID NO: 74002 - DNA, 376 bp, Glycine max
  Clone ID: PAT_MRT3847_37839C.1
gggaaatgccccaggagtgacatgttattgataaattagtttttaacaaccataaggacgtaatcttggggtgggcatatgatcctatacacacatttttttatggacaaaaaatattttaacaacttgggctttttgaaaaacaatagaacacatgttggtcaacaaatattttaaggaacaaagcaaaaaacaaacagcccaagaatttttggtacttctttatatacttgaataactttttttttttgacgaaataaatgcgggaaaatgtccggttgcgcgggattttagcagagagatgccattttttgttaacattgttcttcaaatatgacactgtaagggggctacggtccttggaatcaaacttttg

SEQ ID NO: 74003 - DNA, 1272 bp, Glycine max
  Clone ID: PAT_MRT3847_3783C.1
atgtattgtattattactactttgtttgtgttccctctttgtctcaagttttcatcagttttcacaattttttgttcagattttaattccaatctctctctaaatgagagaaccgtttttatgagaatgtgaaatactgaatggtcaagattaaaatatatagtaatgtgactttttttttttttttttttataaaagttatgatttttttaagtaatcattatttttttatcggttttttaagtaatcatataacttttgaaacttttaatcttgaccatccatgtatggttgcatggtttaaattagtttctctcagtcttatatcaacattactgttggaaaagcccgccttaattgtggacacaccacttagcctgccttagttgcagcctcttagggggttgcctcaagtgcaacctcggagggtggtggtttagtcccacatcagctggtgatatggccaaattaaagtacgtaagtgggaggcaactctcaccttacaagcgggttttgtagggttgagttaggcccataacccatattgtaagaattattactttctcattaaatacatcccctacatatacgtgtgtgtgtgtcattgcatttctgctggttttgacttttgaattttgatgaatctctgcggacaacagatgcaggctcgtttagaattggaagaggtgagcctcctcatgtgcctgattctctttcaagagatgcacgggattttattctgcagtgtctaaaagttgatccagatgatcgccccagtgctgctcaactcttaaaccatacctttgtccaaaggccactgcattcccagtcttctggttctgcatctccttatattagaaggggttaaacttgtcacctccaactgtgaaagataatgaagtcaaattggatgcacgtatcatacacaaggcttcagttgagtcgagggtggggttcaaatatagtgtcattcttatttaggggcgaatgttcatgcaaattctgaaataacagggggggaaagcagcaaaacctttcttaccggtctctggtggtggatcttttgttttttgttttttttttggttttacttttttttatatatatatcttttataatgagaagagcagccaaagccttactttagtggtttgacaaagtcccaaccaatctgtccaataattggttctttgttaaagggggtcttggtggacttgaaaggaaatacattatgcaatcatgcagatgggtgatttatctcactgctactga

SEQ ID NO: 74004 - DNA, 261 bp, Glycine max
  unsure (1)..(261): unsure at all n locations
  Clone ID: PAT_MRT3847_37840C.1
ctacagtccaggagangctctttctaccctccgccccttctaanctccaggggctctggcctggatgggtgggctctccgctccccancanccaaccctcaccacgccggctgcgagnacccttgcaggcagagccacttccagcaggcgtgcagcaggagcaggtgaccggctctcgggtgtgaagtcccaagagcacagcgcgtgcccgagnggtgcggacaggagccagtgggccagggaggcacaactcggaggagt

SEQ ID NO: 74005 - DNA, 575 bp, Glycine max
  Clone ID: PAT_MRT3847_37841C.1
ccacgcgtccgcaaacatacgatggaagcctctagaacaaccatgatgctcctactccacctctacttaaagacctgaagagcgccatgccaatgcctccatgatttttccatccaaccagattgaaagaaagtgccttatcttgacacaactttgatctggatcctcaacttttatgtgaaaacggctcacttctttggcgcccacaaagatcctgcttctcatgttcggaatgatacgctcacgaatgccctagacgtagtgccattgggagtaatgacttcctggctggaacattgactctcaactactgacacaggaagattgatgatggattgtcattcagagggagctggattcgcggcggcttccatcgagtacacttaggatcacataggggacttggattatccaaatccaactttcgcacaattggtacatcagaataatgattttcttaaagatggtgatggtccactctgtgtagcccaagtgacatccttcatatgtggctgtgctcgcattagccatatctactatccacaccacctttgatggcctaagcttcaaaacct

SEQ ID NO: 74006 - DNA, 157 bp, Glycine max
  Clone ID: PAT_MRT3847_37842C.1
attggtccttaatcactcatcactcatcaccatggctatactacttttttccctttgttttctgcttttcactggctgctgcttcgcttgcagttccatagagcatcctcagcacaacgagtcccacatccagctcctcaatgcccttataccggtt

SEQ ID NO: 74007 - DNA, 730 bp, Glycine max
  Clone ID: PAT_MRT3847_37843C.1
cccacgcgtccgaatcctcattccttccatcaaaacggtgcgcttcgctccctctctctaaaaccaacacatactacttctcttcagcttctcccactaaaacacactatctatatggaagtgccggaatacttcgtcggaagcttttttggcaccggaggagccgaacagttctgccctccggagaagcgccactccgaccagaaaaccggcgagcctttcgccattgacgacctcctcgacttctcccacgccgacgccattatgtccgacggtttcttcgacaatgtcgccggaaactccaccgactcctccaccgtcaccgccgtcgacagctgcaactcctcaatttcgggcagcgacaaccgcttcgccgccaccattgtccctcgcggcttccccagtgatcctcaattctccggagaactctgcgttccgtatgatgaaatggcggaactggaatggctctctaacttcgtggaagactcgttctccgccgaggacgagctgaagacgctgcagctactctccggcgccctcggggcgtccaccgccattggcgcgaaaccgcaggcgccggagtcctcctcctccactgactcgcttcgacacgcctccgccgacgacaccttgcgaaacgcaccgaaacgcaactcggaaacgcctctcccgtcctcgccccgcagcaagcgctcccgggcggcgccgggggactggtccacgcgcctgc

SEQ ID NO: 74008 - DNA, 405 bp, Glycine max
  Clone ID: PAT_MRT3847_37844C.1
cagatcgtaagtgtgatcctgatatacgacatgtcgatattgacccagatgctgagctttcgatactagccagggatagtgtgtagaaggtaatggcaaaccaataggctaacacatatttcactaaagataaaagatccacaaaaggcatctaaacaactatttgtcgagtcattgaacagagatagttaggatgatattccaagcatcgtagttcctttcaagggatgaacaaggcaaaccaacgcaacacaactactccatacattttcttcgtatatataatatcaatatgcactcccatctgattggagatctcgtgaaatccattctctacaacataggtttagctcattactgtgtaaaactgatactcttcagattagactgtgccaatctaatatc

SEQ ID NO: 74009 - DNA, 493 bp, Glycine max
  Clone ID: PAT_MRT3847_37845C.1
atggtgcaaatgtgaaaggatattatgtatggtctttgttcgacaattttgagtggtcttcaggctatacatcacgtttcgggatgatcttcgtggattataaaaataatttgaagagataccaaaaactctctgcacaatggttcaagaattttctcaggaaagaaaccaggctttatagctcttgtaaataatattaagaaatttgttttccaaataatgattgtatttgtaaataattatttgatattcttttattctatagaggtcctattggacttagagagtaaatagctatagagttatttgattattcttttgtcttaaagaggtcctattggacttgtaagaggggaaatagaaattatttaattattcttttattcttaagaggtcccatgggactttagagggaaaatgaagatgtagatctgttgataatagcaactattgttataataagaatgaaacaaacttttttcttgtgataaaa

SEQ ID NO: 74010 - DNA, 558 bp, Glycine max
  Clone ID: PAT_MRT3847_37846C.1
ccatcaccatttagggaaaagatccccttaatagggggggaataaaaaaggttcaaggcgccttgggaaaaacccatttaagtggacatgggcccccctataaataaaaaattctggggcgggggagaaggaaatcaaagcctaaaaaatttcaggagaggggggggagccatacacataaaaacttgggtaataaacccccttcaaaaaaaaagggggggggggggaaattgggtggggggaaaagaaacgggggaggaagtttttagccccttatttatttctttgggaaggcctttggtgggggtggtaccgcaatttttttaagcctaaaacttaaagcttcaaggggggatcaggaaatgcaaaacttggggggggggggggccccatgggggctaaactggcattggaacttggggcgtggcctaaataaacaaacacccgtttctgggggggctacgtgggttgaaaagtgccgcgggccaaaagaaatcacaaccttgttttttttttctcagggaaaaaccccggggggcccccaaaggggggttttct

SEQ ID NO: 74011 - DNA, 1916 bp, Glycine max
  unsure (1)..(1916): unsure at all n locations
  Clone ID: PAT_MRT3847_37847C.1
gaagctcggaantcggctctagaattctttcatcatcaatgatataaactccttgctcctcttgactcattcattcactcccaatatgatggaattggaagccaccgccgctacttctccaccttctcgcgttctcctcatctccgccggtgccagccacaccgttgcccttctctctgggaatgttgtgtgctcgtggggtcgcggagaggatggacagttaggccatggtgacaccgatgatagactcttacccactcatctcagtgcattggatgctcaacaaattgattctattgcatgtggagctgatcatacccttgcgtattccgaatcacgcaatgaactctatagttggggatggggtgattttggaaggttgggtcatggcaattctagtgatttgctcattcctcagcctattatagcattgcaaggtctaaggataaagcaaattgcctgtggggatagccactgtttggcagttaccatggaaggcgaggttcagagttgggggaggaatcaaaatggtcaacttggacttggcacctcggaggattctcttgtgccacaaaagattcaaacatttcagggagtacctatcaaaatggttgctgcaggtgcagaacacagtgtagctattactgaaaatggagaactgtatggatggggttggggccgatatggaaatttggggttgggggatagaaatgatcgctggattcctgagaaagtttcttctgttgattgtgacaagatggtcatggttgcttgtggttggcggcatacaatttctgtttcatctttgggtggcttatacacatatgggtggagcaaatatggccagttaggacatggaaattttgaggattctcttgtgcctcaaaagcttcaagccttgagtgataagttaatcagtcaggtatcgggtggttggaggcatagtatggcactgacgtctactggactactatatggatggggttggaataagtttggacaggttggagttggtgacaatgttgatcgttgctctcctgtgcaagtgaagttcccccatgatcagaaagtagttcagatctcatgtgggtggagacacacaattgctgtaactgaaaaggaaaatgtattttcttggggaagaggcacaaatgggcaacttgggcatggggataccgttgaccggaattctccaaagattattgaggcattgagtgtggatggatcttccgggccgcacatagaatcctcaaacactgatctattgtcagggaaaagtggtgcctccttatctgagagatatgcagttgttccggatgaaactgtctcaggacaaactgctagttcaagcagtggagataggcttgatatcagtgtcccagaaagtgatgtcaaacggatccgagtttgatgtggcaaatttccgttagacgagaatgatgcataatattgatatctacctcatcagttcaatggagccaccgctcagatgccactagtaatttggctttcaacatagtagtaaatgtaaattgtagtcatatgagaaataacagcaacgtattctttaatctacttttttttagcatacttttcactcttggctaaaatttgttgagactcaggaaattacgagtgatagtagttaaataaaaatcgagacccatgtcattttgtgataaaatttgttgagactcaggaaattacgagtgatacttgttaaataaaaatcgagacccatgtcatttttgagtcctaacaaattttagttagtaatagtgtcataaaaagtatatcaaaaaatatgtcctagcgtttgcggtggccaaatggatagtatgagaaacattgcatatgatctccttatccgtgtattatcaatcaatatggataaatttagcataaaaaaaaaaaaa

SEQ ID NO: 74012 - DNA, 1300 bp, Glycine max
  Clone ID: PAT_MRT3847_37848C.1
ctggattcctgagaaagtttcttctgttgatgtatgtcctcaaactgtgtgacaagatggtcatggttgcttgtggttggcggcatacaatttctgtttcatctttgggtggcttatacacatatgggtggagcaaatatggccagttaggacatggaaattttgaggattctcttgtgcctcaaaagcttcaagccttgagtgataagttaatcagtcaggtatcgggtggttggaggcatagtatggcactgacgtctactggactactatatggatggggttggaataagtttggacaggttggagttggtgacaatgttgatcgttgctctcctgtgcaagtgaagttcccccatgatcagaaagtagttcagatctcatgtgggtggagacacacaattgctgtaactgaaaaggaaaatgtattttcttggggaagaggcacaaatgggcaacttgggcatggggataccgttgaccggaattctccaaagattattgaggcattgagtgtggatggatcttccgggccgcacatagaatcctcaaacactgatctattgtcaggtgctttgttctgctcatcactaatttgtaatattgttcctttgtttttcagccattactgataataccatttgctagtgttactttgattcatatattttatttgtaatataatttggcatcatgctagctattttgttttctccttaaacagggaaaagtggtgcctccttatctgagagatatgcagttgttccggatgaaactgtctcaggacaaactgctgtttcaagcagtggagataggcttgatatcagtgtcccagaaagtgatgtcaaacggatccgagtttgatgtggcaaatttccgttagacgagaatgatgcataatattgatatctacctcatcagttcaatggagcccccgctcagatgcccctagtaatttggctttcaacatagtagtaaatgtaaattgtagtcatatgagaaataacagcaacgtattctttaatctacttttttttagcatacttttcactcttggctaaaatttgttgagactcaggaaattacgagtgatagtagttaaataaaaatcgagacccatgtcattttgtgagtcctaagtcctaacaaatttcagttaatggatagtatgagaaacgttgcatatgatctccgtattctatgtattatcaatcaacatgtatacaattagcacatcgtattttaaatgttttattttgtttttgctccctctcctaaatacacagcggaagttgaaaaa

SEQ ID NO: 74013 - DNA, 119 bp, Glycine max
  Clone ID: PAT_MRT3847_37849C.1
gatcggtagatagttttcatctggatgatctaaagatgatctgacatctatgaacgacaatcagaaagaacactgattcctattaccatcacactacttttactgtgcaggttgtttgc

SEQ ID NO: 74014 - DNA, 209 bp, Glycine max
  Clone ID: PAT_MRT3847_3784C.1
gttgatagagacatgtcttatcacactgtttaaaattttttcaacgactccctcgagggggttgtacctttaactaagcatgcccctctgcattcttggactcaattgagttcgcgcgattactacttctatttaaattatagtaccactgctccactgcctcccaaacatgtttcgaatgttatctcataactcgataaaatattttc

SEQ ID NO: 74015 - DNA, 319 bp, Glycine max
  Clone ID: PAT_MRT3847_37850C.1
ggggcagcattggccatggcatgcttaaacaaaacaaattgaacccccattcgggttttttggccgggcgattatacaaaacggaccccccaaattttgctccacccccagctcctggaaaggcccggggactggctgttccgatttttaccctccttatgccttttggggtgaaggttttttttccgccccccccaactaaataactccccatatgggggggatactgaaagggcccataacccctttttaccccaagggagagggagcccggggggagggggtacccaaagggtcaaccgccgggaacaaaaggaaa

SEQ ID NO: 74016 - DNA, 368 bp, Glycine max
  Clone ID: PAT_MRT3847_37851C.1
tctattggcagatgttgctaagtgggttgatctaattgaagcccatctacgtaaaggaaccatcaagtctgttgcgtggtatcgtgaccgcttgtgcgagttggttgatgatttcgaagaaatcaaagccagctatggccacgagccttggcaaactcagagcgacggcacagacatgcgcactactggttgtaagttgattggaattgtgccaaacgacagcccagtaaaattgtaagggctttcaaaactttgaaaaataagtcagcagagccttatttacggttcagagcatacatgggttttgcaaaaaaacaagaacccgatctatactcaccataatgaccttgcatttgatgaaaaaggca

SEQ ID NO: 74017 - DNA, 256 bp, Glycine max
  Clone ID: PAT_MRT3847_37852C.1
atttaatactgcaatgtttatgtttttaatttctttacatgtgccataagagacacgtattatcataaagttaatcgcaaaatacagaccaaaaaggaaactaaagatgaattgattctatttatgcattaattaactatgggtggtggagatataatttccgaagcttgacagctttaacctaattttaaccctcttaaagcagcacttgcaatgctagcttagattccaagataagaaacatcatcattaacta

SEQ ID NO: 74018 - DNA, 756 bp, Glycine max
  Clone ID: PAT_MRT3847_37853C.1
tgttaccccagcaccacaaaatgtcgaagcgaggacgtggtggttctgctggtaacaagttcaggatgtcactgggtttgccagtggcagctgtggtgaactgtgcgacaacactggggccaagaatctttacatcatatcggtgaaaggaatcaagggtcgcctcaacagattgccatatgcttgtgttggtgacttggtcatggctactgtgaaaaaggggaagcccaatcttaggaagaaggtattgccagcagttattgtgagacagcgtaacccgtggagaagaaaggatggtgcctacatgtactttgaagataatgcaagtgttatcgtaaactcagggagaaatgaaaggttctgccttaactgggcctattagcaaggagtgtgctgatctgtggcccagaattgcaagtgctgccaatgccattgtctgagagttttcaagctatcaaacaattttgaacttggttggcattcaaattattttttaggggaaccaattaaccattcaattttctatcatcttggaatgtgaagatgtgtttcagtgagagctatacgaatttgtttgtagtagtttaagtttcttatagaaagcaattcattggtacattatgagttggggtgtgcattggattgaaggttttgatttcagactcatgtttggttgtacatagtgaatcgttccactgaaatgatctaaggatcaaaataacaattattttgaaagatatcaattttttataaaaa

SEQ ID NO: 74019 - DNA, 279 bp, Glycine max
  Clone ID: PAT_MRT3847_37854C.1
aaaggctaacaaatacaaacgggatttattgagataggtcaacgagttgcattcatggggttatggggacacccaacataattttgcaagaaaaggattagttctttcaggtgatccaaaatcacatgcttatcggactctttgcacgtttgcaactttaacaatcattctggaattggcaaccaccttaaatattgggcctcgtgctgaaatgaaaagctttcttttggcctaaagaacggtcactctgaaaccactttgatatccaaaccctgggga

SEQ ID NO: 74020 - DNA, 475 bp, Glycine max
  unsure (1)..(475): unsure at all n locations
  Clone ID: PAT_MRT3847_37855C.1
ttctcgttactcgtccggnttgaggaatattgggttttccaaagtaataaatgcattattcgaatggtaattgcacaaactgacgctgaagtggctgcttattgttagccatttcgctttttggtcacgcattggttgatgacctcgcctccgttgggacactttcccgacgaggacggctgctggcaaattcgcaatttggttgagaaggactttgacgatgtcttcgaactgtgcagcaaggcatttccgctggattatcccttggattggtacaaatctgtggttgctggccaattcatcagtttcggcctctttcgtgacgatttgttaaccgcgttaattgttgctcaacggaaacaaattttcgagtgcgaatatgaagaccgaaatttgtacaaagacccaaatgcttctgccatttatattctcagtttggctgtctccgataggtatagacggaggggcattggta

SEQ ID NO: 74021 - DNA, 388 bp, Glycine max
  Clone ID: PAT_MRT3847_37856C.1
acttatggaacaaaaactcataatgggtgaaatcgtcaaaaaggaaaaacaacattgttcaattcccctacattactaaataataatactcaggatcttatttcataaaaattaaagaccaacttaaaagcttgatttgaaaacttaatcataatacaagggattaggcagcttaaaaatcctaatccctttgttgcttcccaagaagtcactccattggtctccaacctttccaatgattctgtatcccttcttctccaacttctctctctcaactgatttgtattcaaatgataacttaccaaaatactcagattgatccccttaaattaacttcttccatttgttgaatccaaccttctttaaattcttgggtgttacatcccct

SEQ ID NO: 74022 - DNA, 2273 bp, Glycine max
  unsure (1)..(2273): unsure at all n locations
  Clone ID: PAT_MRT3847_37857C.1
cacataataagttataagacaattaattaagttatttgacacaaaagtcagaagctagggtggtgaagacgcaataaaatggactcttgggttagaatgctgtttctcattgcttgcattgttccagctttagtcgagtgcaaagtgaggcactacaaattcaatgtggtactgaagaatactactaggttatgttcaagcaaaccaattgtcaccgttaatgggaaatttccaggacccactctttacgctagggaagatgatacagtgctagtcaaagtcaataaccttgtcaaccacaatgtcaccatccactggcatggtgtgagacaacttagaactggttgggctgatgggcctgcatacatcacacagtgcccaattctgtcaggacaatcatatttgtacaacttcacccttacaggacaaagaggaacacttctttggcatgctcatgttaactggctaaggtcaactctccatggtgccatagttatcttgccaaagaggggtgtgccataccctttcccaaaaccagataaagagttggttgtaatattaggagaatggtggaaatctgatacagaagatgttatcaatgaagctctcaagtcaggattagcaccaaatgtctcagatgctcataccattaatggccttccagggattgtgtctgtggccaattgttctacacaagatgtgtacaagcttcctgtggaaagtggcaagacctacctattgagaatcatcaatgctgcactcaatgaggagctcttcttcaaaattgctggccatccattcactgtggttgaagttgatgcctcatatgtaaagcccttcaagacagacactctttcgatagcccctggtcaaaccaccaatgcccttttaactgctgaccaaaactctggcaaatacacaattgtagcctctactttcatggattctccagttgtagctgtggataacttgactgcaacagccacattgcactacactggcactcttgccaccactcctacacttctcaccacccctcctccaagaaatgccacccaagttgctaacaacttcaccaattctctcaaaagccttaattctaagaaatacccagcaaaagtcccacaaaaagttgatcattcacttctcctcactgttggtttggggattaacccttgtccatcttgcacagctggcaatgggagtagagtagtggctgctgtcaacaatgtgacatttgtgatgccaaccactgcactgcttcaggctcattacttcaacatcaagggggtgttcaccactgatttccctggcaacccttctcatgtttacaactacacggcgactccgccggcggcagcttggcagaccacaaatggcaccaaggcttacaggctggcattcaactccacagttcaggttgttttgcaggatactggggtcattgctcctgagagccacccggttcatcttcatgggttcaacttctttgttgttggctctggtgtaggaaattatgatcccaaaacggatcaaaataactttaatcttgcggatcctgttgagaggaacacaattggagtgcctactggagggtgggttgctttcagattcagagcagataacccaggagtgtggttcttgcactgccatttcgaggtgcatacaacatgggggttgaagatggcattcttggtggacaatggtaaaggtcctaatgaatcactgctacccccaccaaaagatcttccaaaatgttagacttttcagtcatcgattgaacaacacacagacaagggaaggatacagagaagctaggaaaaacaagagaataaaggggatggtggttatttaataagcaggatgtcccacttgcctttttgagctaatgggagcatttcttcacagtaggttggagtcagcattttggttttctttgaacatacacttttttcttgttaaagcgattcagatcatattcatatgtattgagatcgaccctgcataatttggttatttactgaaataaatctgtcacgtacttcatcgttacatggttgatctttgggtgatttgagaacggtttgcattaccaggatatgatcatgtatcaaaactcaattaaatggtaagcataactgcattaatttttgttagtctaatattaggatagcttgctttatcacatttgaattatttgtaatatactacttttatactatatgtttgttcagttttttttttgtggtgtcnnnnnnnnnnnnnnnnnnnnn

SEQ ID NO: 74023 - DNA, 239 bp, Glycine max
  Clone ID: PAT_MRT3847_37858C.1
atgacactaatttagaaattcttacttgaatggggaattaacattatacaatccaatataattttccctttttccttacaagaaatataaaatttttaaaatttacctacaatatattgttagattaaaaaaccgtaccaagaaataacttacatataagccatgttaccatgataattcccaaaaaaaaatactttaacttaaatctggccttggctggtttaaccttcttttttaaa

SEQ ID NO: 74024 - DNA, 536 bp, Glycine max
  Clone ID: PAT_MRT3847_37859C.1
atccttgaaaaaccttctctctctctctcagttcccaacggtcatcaccacagctcgatcaacagggacatatttgctactgaagagatgtctcctgcttccaaatctaagtctaaagacaaaaaggctggcaaggaagctcaaaagtcttctgccaagtcttcaggatctggtaatgccgtggctggtgtaccagctagtgcatacaatcctttatcgggaacattccatactttggagatgtcaccaacatctacttcccaagtacattctaatggtcgttttcggaacatagatgagacggatgaacatcctgcaggctcagtggtagctggtgtggagtatgattctgtttctaacaatggtagttggtctggtgattcagaggaccataaagataaagcttctaatcctcctgctcgactagaagcagtaccaggagctgataatgacaaacgagagaaaatccgacagaagaatgaaaagaagcatcaacgacagaaggaaaggcgggcacaagagttgcatgatcgctg

SEQ ID NO: 74025 - DNA, 1734 bp, Glycine max
  Clone ID: PAT_MRT3847_3785C.1
tactccattcagagtctcggtggaaaccggttacttgtttccttgtagaatctctccccttccttctaagtagttccattattattattattcctaaccctaacctaacttaaactaaactaaaccctttcacacacttgttcttcaatcaagtttcttcccaaaacgaccatgccgtttccgtggaagaaaaaccgcgtcccccgaatctcccaattcgtcgccgatctccaatcgccaaaacgcggcggttccctcgtcgtcgagaccggcttccccacctccctcatcgacctcttcgtcaaaaaccaaagccgcttccaaaaacaccgctccaaaaaaccgccaccgccaaaatccctctccgccaccgatcctccgccgcctcctccacctccaccgccctctccggccacttctccgcctccctcacgcgtccccgccgtcccaaccactccagtagagcaagacgacaccgccgtttccgctccggatcgaattaccgaatgctctggctctcactggtctcgtgtgaacgccgtcgtcctcgttgcaaagattctgatggtgttggtcttagtcgcgagcgtggagaggctcaccgtcggaatcaccgcgtcggcgttcgcgcttctgcttctcgaatacgcagggctgcggcgcgccgtcgtttcgtgttctgtcgcagaatcgcggtggcggtggttccagaaggtttcgaggaaggagcgtgttgttgttgagagaattgaattcgaattcgccgaattgaacaagggtttgtcaatcgatgaaattgaggttgtgggaacaaccaacgaaggggggatttgttgcagtgaaattggtgacgtggcatcgaaggttttggagccgtgtttatgtgatgaagatgtttctgaatgcaagattagacctagccgaagtggtaggtttaggtcgaagatggtgaagcttgtttctaagaaatttcgtgggtctaagaaaaagaataaacacaatgagggtgagtcaggtagtgaaatttcaagtgctgtgggagaagaaaagttaccaattttagaaattgaagaggaagaggaggaagagaatggggataataagtcaagtaacactaaacctgattgcggaatcacttgttcctatgagaagaaagtgaatagagttgagaattcaggttcttccatggttttagttatgattattgcccttgttgggcttcttttgggtcgttttccagcattggtacttttgatgacatggtgttgcttgatgaagatacttgggattctatggagaacacagaaagtgcctatgaatatgatcaagtgttctgtttcaaactcttgatgggaacaagtttttgtgttttttactttttttattcccactttgtttctggattatgatacacagctggtaaaaatttcatgtttagtctagaaagactgaggagaggattattcccatgataggaactccaaccatttgttgggaatccaacttcatgcgttgtactttgaaatgtaaatttatagatagatagatactaatcatagtcaatacattctttctttgtctatgatgttaattagttattcttataatgcgttgttttagattgatggcaaaagattgaaaaggttgaaatgaaatgagatgacaaggaagaaaaaaaaaactaaaaatgaatgaaaactatagaataacaaaaatttaacaagactagtgact

SEQ ID NO: 74026 - DNA, 168 bp, Glycine max
  Clone ID: PAT_MRT3847_37860C.1
gcgcttaatgatttacaaaaataagaatgttaaagtgggtggagggacaagtaatccttggggggctgtgtatatggagccaccgtaggtcactcgtgagatcaacttttttgtgttttatagggccaccaaaattcaattcattgtccggggctttccaccttgagg

SEQ ID NO: 74027 - DNA, 216 bp, Glycine max
  unsure (1)..(216): unsure at all n locations
  Clone ID: PAT_MRT3847_37861C.1
aacgactgataaaagacggcagaaggggatacacagcctctgcagcaatagcgagtgaagagcagnggaagacgcagcaatagggcaaagaccagcgaggtgttataggcaaattaagaacgagccataccccgaatagaggtcttgaagtggtgttcatgatccctagatcaggatttacgatgttggtatgaagaagaagggtagtgatgagtt

SEQ ID NO: 74028 - DNA, 1521 bp, Glycine max
  Clone ID: PAT_MRT3847_37862C.1
cacgagggcgcggagacgaatgaaggggccccattacgcgatcgcccacgcgtccgcccacgcgtccgtacggctgcgagaagacgacagaaggggggagaaatgaattgatcccaggggctctgtgatttgatcagcagatagagattgaacatttgcagcgaaaagggaaagaaagagaaaatcatgtcaacagcagaagctcctccttctttccaagaagcagcgcgatgcgttgtctgcaattgcagtttcaacactttcagaagaaggcaccactgtcgatcctgtgggagaacattgtgtaatgaacattcatcaaatcaaatggctttaccacaatttggcctttactcaaatgtccgagtatgtgctgattgtttcaacaacttgcggtctgggaaggatgaaccacagacttcttcagacggagtaaacagtgtgacagatacaatttctaaattagatatcaacgcaaatgttgattcaaaatccatactaactgcagagactaagcttttgtcaggcattaaagagtgtaaatgtggaatgccactttgcatttgtgaagctccaaccccttcctctgatgcattcccccagcagaaacccaatccagttattgcagctccatcaaatcctaaacctaagaagacagatactgttccgaaaattagaagctccatttcaactagtaaatttagttctatgtttaacgttggtcatgtaactaatggtacctcagacagaccccagattgattatgaagttactggagagggtttaagagaagcaataaaaaatagtgacgttgctgctgttaagaaacttcttaatgagggtgtggatgcaaattacagggacaagcaaggactgtctttattacatttggctgcagtcttcaatcaaactgatatagttttcattcttatggattcgggggcatagcctggagtacaacaatggaccaaggagaaacacctatagattgtgtttatctgtcattgcaatacaaaatgcgaaagaagatggaagaaggtggaacagtggaccaaagcatttgaacaatctattacttttatctgtgttctttttatgcagtgcccccaatactaccactgtctaaaggtcctccgttaccagaacaaaaatttccggcttctgtataattgtgacagagatggagttcaattcatctttcgaatggcagactaagtatgcagacctttattagacatatctttgtcagccacgcaacttaggcagtattactattcagtttgtaaatttctttggtctatgacataataagagcatttttaagtatgcatctatgtattgttgagttgagcagctgtcttactttcttccaccacatgcagtcataaatgtggaattctaaattaaaaagggtttaagaaaaagaaaaaatgatgtggtataaaaatcccgtttcatgtcccggtcatttttttctctcttctgttgcaagcaatgagtcatagttgactatgatactct

SEQ ID NO: 74029 - DNA, 642 bp, Glycine max
  unsure (1)..(642): unsure at all n locations
  Clone ID: PAT_MRT3847_37863C.1
ctcgagccgattcggggcgagccatttggagaaatgaattgattcttgtaataatctgtgatctgatgagcagatagaaagagaagagaagttgatgtcaacagcagaagctcctcctccgttccaagaagcagcgcgatgcgttgtgtgcaattgcagtttcaacaccttcagaagaaggcatcactgtcgatcctgtgggagaacattgtgcaatgaacattcatcagatcaaatggctttaccacaatttggcatttactcaaatgtccgagtatgtgctgattgtttcaacaactcacggtctgggaaggatgaaccacagacttcttcagatggagtaaacagtgtgacagatacaatttctaaattagatatcaacacaaatgttgattcaaaatccataccaactgcagagaataagcttgtgttgggcattaaagagtgtaaatgtggaatgccactttgcatttgtgaagctccaaccccttcctctgatgcactcccncagcagaaacccaatccagttattgcagctccatcaaatcctaaatctaagaagacagatactgntccgaaaaatgaagctccagttcaactagcaaatttagttctattgttaaccgtggtcatgtaactaat

SEQ ID NO: 74030 - DNA, 166 bp, Glycine max
  Clone ID: PAT_MRT3847_37864C.1
cggacgcgtccgcccaatcatgcggggtattgaaagcacgattcccaatgccatgccgggggcccatattcaatatagggggggttgatgcaggaacataacatgacattaccatgcaaggcattataatcgctctgacataatagcacaatcaagctggaatgcc

SEQ ID NO: 74031 - DNA, 325 bp, Glycine max
  Clone ID: PAT_MRT3847_37865C.1
aacaggaggaaatgctgtctgctagggcaagtgatgtcagaactgcaaaggtgagtaaaaatagcaagcgctcaagcatactgcaatgcatgggggagcaatagaaattatcaatgatagttgcgcaagtcctgaccgcaacataggaggtgcaaagcttttggaagatacgtatcataccaagcctgaaaatgcagaacgtagaatttttggtgcgcctatcagaggcggaaggcccattcgggtggtcacatttccgaataccatcgtgcagaatgaaccagacatgaatccaaggtttcagcttgcgagtaccactaccaat

SEQ ID NO: 74032 - DNA, 307 bp, Glycine max
  Clone ID: PAT_MRT3847_37866C.1
tggactgaaccgaagacgaatagatgtttctcgccgtcggaatcgtcggtcttcatcgagaatggcttctacatgcaccgtgcattggactctaacaatgtcatgtacgctactaagtatttggcttatatgctctacgagctcaggacttgcaagcatttgcctcacaatcactactatctatacatgcgcccctgtgaacagttaaggaatccttagacgctcttagagtaacagactcgtatctgaaggtccattattgacctttatgaactcctacagaacaccggcaacattttgccccgat

SEQ ID NO: 74033 - DNA, 384 bp, Glycine max
  Clone ID: PAT_MRT3847_37867C.1
ggggacccaaaactctaatatattaaaatttcctgggcctcatacacatttttctgattcacaagtgtcgttacattagcgaaaatggagttaaacaccacggaactgcctaagggagcagacaattgcattgcatgataagcacaactcagtgagcagggacaaaaactggggacctagcccaagcttagacggcagcacgatcagcaacagggacttgaagggtctgaattgggcccttgcctgcgacactagcctgtacaaagaagcccaacttggagcacatatactagccaccgacgagagacacttggccttcaactaatggaacagcctccggagattaatgcaaccaagagggtcgcacgcaccaccccggtggat

SEQ ID NO: 74034 - DNA, 206 bp, Glycine max
  Clone ID: PAT_MRT3847_37868C.1
ccagattcacttcaattcttgcctaagcatatgccgaaactcacgctgtgggtgctcgaacttcccaattcccacgcttccaccatcatctcttcaaccactcgaactgtgcacaatgatgcatcccctcatacgttgaaacactcagaaaaaccctttcgtgttaggaaaggggaggaaactaccacaacaccagcgacttgtcc

SEQ ID NO: 74035 - DNA, 708 bp, Glycine max
  Clone ID: PAT_MRT3847_37869C.1
cccacgcgtccgtacggctgcgagaagacgacagaagggggaagcaaatatggcatactctcaacttcaaaaggtggaagctaatgtgcacatcaaggcttctgctgatcagttccataatgttttatgcaacaggacacaccatattgccaacattttccctggaaaagtacagtctgttgaaattcataaaggtgaatggggcactgagggatccgtcatctcctggaattatttacatgagggcaaagtttgtgtggctaaggagatggttgaaggcatagacatgaaaaacaataaaatgacctttaaggtcatagagggagacctgctgggacattacaaaagcttcaagtttttattgcaagttactccaaaggaaaagggaagcgttgtgaattgggtcctggaatatgagaaacaaaatgacaatactcctgacccttataccttattggaattgacagttgagatgagcaaagaaattggtgcctaccttagtcaagaccataactaaatttaatggcaaaataaacgtactgtgttttacgctattgctatcagagaattaaaaattgatgtcttatggggcttatctaccccttaattaatgtcatcaattatatgtatgttaaaaaattaaataaattagggtgaaatatgtttttcattctcataaatataaaaatgtttaaaatttacacattt

SEQ ID NO: 74036 - DNA, 465 bp, Glycine max
  Clone ID: PAT_MRT3847_3786C.1
atctaaactacttttacgctctctgtactattcatacaatttcattttttcttctttctcttctaccatgggtagtgctcttaaagaaatgggggggtggctataatcttcctaacacacaaataaagccactgtttcatctaaaatcttctgctataatttaaatacattcgaatctaaatcattttttctacgtaatttaatctgtaacaaaatgtgatcatattcgttgtatatgcaattaaccacaattaacctttgcttgactattcattttttttcatttcataactatcaatctaataatctgtgttcaatcattaattaaaaagattaaactaaaataacttttttttgatataaatcgcctccattctactttttatcttactttacaaaaaaactttttgacatactcacctatcttatttttttattttactccctctattattttccttcctt

SEQ ID NO: 74037 - DNA, 138 bp, Glycine max
  Clone ID: PAT_MRT3847_37870C.1
gtgatgagccttttattttatttttgtatgccgttatgatttcatgttcacattattttacacactaattctacccagataacagaagaccaaaaattggtgcaaaaatgatccaccggggcttcttgtcctcgagcc

SEQ ID NO: 74038 - DNA, 435 bp, Glycine max
  Clone ID: PAT_MRT3847_37871C.1
gcggattggaggaggagatctgcgacgccgagcctgatctagggttttcgaatctagggttttgaggaggaggaggaggaggaggaggcgtgccaatttcgatttcgaattgatgtttcttttcagggacgaggctcggatcgactcggaagatggcggattatgcatgggtgcggtcgtgaccagtcgaaacacaatcggcacatgtggcctgtacctgctaacgcgaccactgatggacgcaagattcgcgctggtgattgtgcacttttcaaggcacccagggactcccctccttttattggaataattcgcaagttaacatttgataaagaagaaagtccgagtttagaagtgaattggctataccgacctgctgatttgaagcttgctaaagggattgtactggaagctgctccaaacgaagttttctac

SEQ ID NO: 74039 - DNA, 1273 bp, Glycine max
  Clone ID: PAT_MRT3847_37872C.1
ctcgagccgctcgttcccatcgagcttctctcagtctctctccgagcacacttgaaaaaaatccccaaaattttgttctctgaacaaaatctcgccgtttcggttcctattctctttctcccaaccaatctctttctctctcatcggttgcgtttccttcgcacgaaatcgctggatttccgctatttctacctcgatcgctcgatctggagcgagacgaagaagaagaagaacccctttccttgataattgggaacacacacagaaacaccgaaactgtgccctaaaaagcaaaacccctctcacttcttccccgatggcggattggaggaggagatctgcgacgccgagcctgatctagggttttcgaatctagggttttgaggaggaggaggaggaggaggaggcgtgccaatttcgatttcgaattgatgtttcttttcagggacgaggctcggatcgactcggaagatggcggattatgcatgggtgcggtcgtgaccagtcgaaacacaatcggcacatgtggcctgtacctgctaacgcgaccactgtagccatcgatccttcaccgtctcaatttaaatgcaaagatggacgcaagattcgcgctggtgattgtgcacttttcaaggcacccagggactcccctccttttattggaataattcgcaagttaacatttgataaagaagaaagtccgagtttagaagtgaattggcttaccgacctgctgatttgaagcttgctatcgggattgcactggaagctgctcgaaacgaagttttcgagtgctgtccttccttcagggatatcggcatttgtctgtcgacgagtatatgacattgagaacaattgtttatggtggttaactgataaggattaccttaatgaacgacaggaagaagttaaccagctattagccaagacaaaactagaaatgcatggggctgtgcagtcaggaggccgttctccaaagcccttgaatggtccaacatcaacacagtcattgaaatctggttctgacaacgttcaaaatagttcttcttttggtgcacagggtaaggggaaaaaaagagagcggggtgatcaggtttctgattcatctaaaaaggagcggttatttaaggtagaagatggagattctggtcaatttagattggaaagcatgttaaagtctgagattgctaaaataactgataataaaggtgggcttgtggactttgaaggagttgaaagactggtacagcttatgcaacctgatagtggtgat

SEQ ID NO: 74040 - DNA, 158 bp, Glycine max
  Clone ID: PAT_MRT3847_37873C.1
ctcggattcggctcgaggtcttcgtcttcttcttctttccacctgtagctagcatggggcaagaagccgggttgggggttctttcatttcacctttatattaataaaagattggaggggtttaaggattttcatgatgttagggtcattacccatatt

SEQ ID NO: 74041 - DNA, 299 bp, Glycine max
  Clone ID: PAT_MRT3847_37874C.1
tcgtgggcggacgcgtgggcaccaactatgttgcaatgctttcggttgatacttatcataccaaccctgaaaatgcacttcgtatttttttttgtcgtcaacaccagaggctggaaggaccatatgggtggttacattttcgaataaaatcccgcttctagaaccattcatgtatacaaagagtgcgcttttgaggaccactgccactggtgattctgatcaaggaaaagattttgcaatggataaaggtaatgtagcatgagctgctggaggctagacataaagttacacttcaactt

SEQ ID NO: 74042 - DNA, 853 bp, Glycine max
  Clone ID: PAT_MRT3847_37875C.1
attttcaaaaaaaaagaaaaaaaaaaaaaaaaaaaaaaaaaaaaaaaaaaaaaaaaaaaaaaaaaaaaaccttgggtagcaccgtacggctgcgagaagacgacagaaggggacgttgagtaattttttttttcctcttccgcgtccccaccaacatcaccgagaccatgtccaccgacttgcacctccaccacgagctaccaaagctccgaatcgccgccgtcgtcaaaaccgacgacgacctcccctccgacgcccaagacgaccgcaacgccgtctcctccgccgtcacacaagccgaggccgaaaacgacggtgccatcaccgtcgatgtcggcgtcaaagtcaacgacgagagttgccgtactccgacgtcgaaggagagcaaaattccggcgacgatgacgtgtccgccggcgccgaggaagccgaagttcgcctcgtgtaaaagaaaactacttgaggagtttcagttcttcgatgtcacgaataaggaggacatggacgccttcttcagatccacttttcccaagaggggatgcactacttgtacatgatcaaaaaatttccaaccttagcttcctcgaacaaccataccttcgaccctgtcgaactacgtaaattacacaattttttttttctttttttaatccaattccacttctttggtcaatttctttcttctttctccctctccccccctcttattttggttttttttatatgttatatatatttccctttgtataagatgtgaaatattggatcccgaatagtatatgttcattactcgaatcaacataacattgaattgtaattccctcctgaaaaacataaaaaaaaaaaggcccct

SEQ ID NO: 74043 - DNA, 292 bp, Glycine max
  unsure (1)..(292): unsure at all n locations
  Clone ID: PAT_MRT3847_37876C.1
tgaagtgaggagtgtgactattagtgcgacgtataaggagtatgtcatagagtttagcgtctctatggactgtggtattgtggcactgaaagaggaagtggccgtaggatggaatctacaggcgggagcatttgatatctactgtctggatgatgatcatgaatgggttttgatagcctgtgatgcagacctgctagattgcatggacatctcgagatcatcacgctncaacgtagtcaggcttgtggtgcatgatgtactgcccattctctgaggctcttgtgagagctct

SEQ ID NO: 74044 - DNA, 1812 bp, Glycine max
  Clone ID: PAT_MRT3847_37877C.1
aatttcaagtcatcattctgaaaccaattccaccttatcctcattcgaacaaatccatcctctctttgcgttcttcttttcgcctcacaccatgaaaccccttctccgcttcggaatcgccttcatcctcctcctccattcctccctcgcttctcatatcccctaccccaaagcaatttccgatttgaaggatacaattgtgaagggatttgggttcacggcggaagatgatgttacgattacggggttcgatcctcgagacgccgaggtagggcattccgtggagtaccaattcgacctcgaaatcgatcacaaggttattcccttcaagctcctcgaagacgtcaaacactgggattacgtcgatcttcccattttccgggccgaggcccaatccggtttggtccctaaaccgaggcccaatcagggttggtccgtaaacgggttccctctgacggcgcttcccgctttggctcccttcgttctcgctgggcccatggagctctggattcacgacgcaagcgacatgtgcttctgccttgactcgagccgctaatttcaattcaaccccattttcattagtatcctttccggtagagtggaaagaaaaaggaattgaaatgaaatgagacgaaagttagttttgtatttaactaaaagttgtcgttttaaaacgaacgggccttaatgattttaatgtaatttctgaaactgataattaaacatttgatttggttgtgcagcatgacgtggatgctggtgtgttgaagaaagtggtgttggctgagggagcagcggttaccgtcaaaggtgcaagatccgttagtcttcggcaacctcttgatttccctcttccgttaaaccgaacggagaatggttttgctaacggtcttttaactttggctgagcatcttcgccatgcttctagaacccagggttctccgattctctcgctgagaatcgttggtcccacatcgctcacagcagcgccttcttccgacacaacaacctcaacctcaacctcgttgaagctcaaacgtcttgcacctggtctcgtggaattgtcatcgcccttgaagagcaaagagattgaaccattttcgagggttgatcttgagggtgaagcccccacggtgcttactccgacccagtttgcgacattgtggcctcttgcttcgcttaatgggtcgaatgctaacttgttggggtttgagaaactcttacattctgtgttgggggctaaggctgagaagaaaggttcctttaggttgttgaaggctgatgtttctgctcagacttacgtgaagatgggttttaaggcggagaagaaggtgaagaaaggggaattggagggttactatccttcgtggaggactaagcccgagactgtgacgacgcactttgaggtgctggctaaggttgatggggagaaagttgtgccggagaaagttatgccggtggagcctgttattgcggtggacagtgtggcgccgaatttgctcacccagaatgtgtccatgtccaagacacaagtagttcaccctccacccaaccccttttacttgtaatttgtggaaaggaaaagggattgactgaactctaccgagaggattcgtaacagagagaagagggaacattcttgtttcacttttgattttggtatatagtatagacacaacagttaagatacttgtttgaaattgtaattaatgagaaacttgttttatttgtccatcatagatttgctttcttagactattcaaattaactactttaacacatctattataaagcgctgggattcaatgctct

SEQ ID NO: 74045 - DNA, 713 bp, Glycine max
  Clone ID: PAT_MRT3847_37878C.1
cccacgcgtcggctttcgcctcacaccatgaaaccccttctccgcttcggaatcgccttcatcctcctcctccattcctccctcgcttctcatatcccctaccccaaagcaatttccgatttgaaggatacaattgtgaagggatttgggttcacggcggaagatgatgttacgattacggggttcgatcctcgagacgccgaggtagggcattccgtggagtaccaattcgacctcgaaatcgatcacaaggttattcccttcaagctcctcgaagacgtcaaacactgggattacgtcgatcttcccattttccgggccgaggcccaatccggtttggtccctaaacgggcttcggctgacgggcttcccgttttggctcccttcgttctcgctgggcccatggaactctggattcacgacgccaacgacatgcgactctcccttccccatgacgtggatgctggtgtgttgaagaaagtggtgttggctgagggagcagcggttaccgtcaaaggtgcaagatccgttagtcttcggcaacctcttgatttccctcttccgttaaaccgaacggagaatggttttgctaacggtcttttaactttggctgagcatcttcgccatgcttctagaacccagggttctccgattctctcgctgagaatcgttggtcccacatcgctcacagcagcgccttcttccgacacaac

SEQ ID NO: 74046 - DNA, 462 bp, Glycine max
  Clone ID: PAT_MRT3847_37879C.1
ttcttctcccagtcagcatgtgtctccaggaacaagggaaattctaactctcgcgcgcgtggctggctgggcaacttgctccgacatgcaccacctacccgaagtgccgcgatactgctaacatgggggcataaggggctagaccagatgaacgtcaaccgtctggtggttgtttaaggaaatggtctgcggaggacacgattgagaacaagacatttgcgctgagaacagatgaaagattgatgcctgcatccatagaaagaggagtaagagcaacaagggagtcgcagactgctaaagaggcgatgcgagctcctagctgccagagcgacgtgattgagggtggacagggtatgcatgaaaccgattatggggtgcacgaagaagactgtactgacccaccctatgttcccagctatgcgaagcattcaggtggtattattaacgaactttgccagttga

SEQ ID NO: 74047 - DNA, 677 bp, Glycine max
  Clone ID: PAT_MRT3847_3787C.1
gcaatccccttatgttgctcaagtacaactttgagggccaagctgatgaatttccagaagcagcaggtactgaggttgcaaccattgacagttttcaaggtcgggaagctgatgcagtaattttatccatggtacgatcaaacacattgggagctgttggattccttggggatagcagaagaatcaatgttgccatcacaagagcacgcaaacatttagctttggtctgtgacagctcgactatatgccacaataccttcttagcaaggcttctgcgtcatattagacactttggtagggtgaagcatgcagaaccaggtagttttggaggatatggacttgggatgaatccaatattaccttccattaattagtgtgcaacagtagcacgaaacaagttcctatttaatccaatattacttggaggatatggacttgggatggataggttttttctttcatgtggtcaaaacttgtatagttgtatagcaattcataaattcaaaattgtgtagcgtatcaagtacgtacagaaaagttcattgaaaccccaagattggtatatgacgtgatacatttaatgcatgtttggtttcacaattgattttgagtctaaatatttcgtatcagtataaattgtaaaaaaaaattgaaaagtaaatttgtaattttatttt

SEQ ID NO: 74048 - DNA, 257 bp, Glycine max
  unsure (1)..(257): unsure at all n locations
  Clone ID: PAT_MRT3847_37880C.1
annatgtnnnncttaccagnngagctcattcttcngtcgttcaactcctgntnnactagagtctcagttctgtcttgtgggtcctctgatcccagtttcatctcagcaaaaccagcttttctatgctggattcaagggtttgaaaagcaacaacatgacccttggatggggtagcagaaatagaggccaaatggggtactgaaactcacaaatggattccaagtaaagtgatggggtccatgctttttnatcccaan

SEQ ID NO: 74049 - DNA, 294 bp, Glycine max
  Clone ID: PAT_MRT3847_37881C.1
tcattaaatctaaatatctatccgtccaacatattgatctaacatctaccttactatcataatcaaccaatcatcaaaaactaaaaatctatacattatactatttttcttatactataaacacattcttaatatcatattttatttcacaaactattttatctttttaaactcctatctaatccctataattatcgtcaaaaatacaaattttccttcttcacccttcctttatacacatcaatcacctcaaaaactcaattacacatattattcaaacttatttccaaaatt

SEQ ID NO: 74050 - DNA, 538 bp, Glycine max
  Clone ID: PAT_MRT3847_37882C.1
ccacgcgtccgaaagaatttgaaaaaactagatccctaggagtgactgaggagctcgcttctacaataacaaaacgcacacacttctcctgcgacatttctctctagcttcacgacttcacttaccactcttcaagctgcgagaagaaggatactatagtgaaaggatttgggttcactgactaagatgatgacacgcacacgcgcgcagagaacaaataatgcgaagtaggggatgccgcggaggaccaatgggacctactatttgacacactgactttcgctgtaatatcgtcgaatatgcgatacgcatggaccacaacagatcttaccatacaacgggacgacgccgaagctggatctgaatcacaaacggcgttccgctgacggactgcaagtggagagttcgggcggtctcaatggctccatggaacttgggatcgacgacgacaacgacctgatactactgctatgccatgacctacatgctggccatcctgaacaaagcggcgccctctgacggaccaccgcttaccgcg

SEQ ID NO: 74051 - DNA, 550 bp, Glycine max
  Clone ID: PAT_MRT3847_37883C.1
ttgactgtcatagcaaagctactagacatgttcattatttatctaagctagactacaatacaaatttattttgcatttatctacactataatcttataagggcagctatcactactacaaaaagcggattcaacatcggtgtgttaacatcggttgttaaaaaaaccgatgttaacatatgcgcggtgacataattgtaaataccgtgtatatgttaacatcggttttgtgaaaaatcgatgttaacgaagttcattaacatcggtcattggagaaccgatgttaacatttattagttaacatcggttttttaataaccgatgttaacatatgtttattaacatcgggtttttagaaaaccgatgttaacgtttgatatgttaacattgtttttttttttttccagaaaactgatgttaacatcggtgttttttaaaaaaccaatgttgaacttatattttaaaaaatatggtgagccctatgaagctcgcgctctgtcttcttctccatctaagcttttgcgctctcttcttcttctaatctctgtcta

SEQ ID NO: 74052 - DNA, 506 bp, Glycine max
  Clone ID: PAT_MRT3847_37884C.1
cccacgcgtccgcccacgcgtccgaattgttcgaattattaaggggccctctcgccatacatactgcaccagttgtttatctctgagtaaataaggatcacgacatgggtagcgtgagtatgaacccagcgtgacgaagtagaagaccttgtgggtatgtactactagtcataataactacactgaacagaacaacaccatgctagagaagaggcaagatttcctgagaagctaccaagtctggagaaaaaagagtgtcacagaaagaatcacagggactgtggttcgagccaagaaaaaagttgggctaaggctaaagactgcttgcaaactcaggaggaacttgaaaagcgctcactatgaccgtatgaaaaggatcttacaccttttacacaatatcaacagccggagaaccaacatttattgatgtatatgggacacaacagagatatttgcatgtcatgacactcaagacaccaatactatatgatctttcgtgtctattt

SEQ ID NO: 74053 - DNA, 280 bp, Glycine max
  Clone ID: PAT_MRT3847_37885C.1
ccacgcgtccgcttttgtcgaacaaagcaatcagacaaaatcaataaagaaatagaggggcataatattcaatattctaataattcgagtattgacatgtttaattagagtatcttctaatgaaatttgaaaaacggggtgaattacatttttggattttgtttttgctgaaggtatttttttttcgaataaagtacattcaattcaaataaatcattgttattcaatattcatgggaataaaaagagcccgactaggtactggccaggctctttggctg

SEQ ID NO: 74054 - DNA, 536 bp, Glycine max
  Clone ID: PAT_MRT3847_37886C.1
ccacgcgtcacagtcactccagtagagagtagcatcatggggacgacaacgacacccctttcccacacggttcgcgtgtccaacatcccccaatccgcgaccgcgaaggacctcctcgacttcctcgaatcgacgttgggttcctccacggtgttcgccctcgaaatcttctccgacaaccccaactggaagtcccgcggcttcgggcgcgtccagttcgagaccctcgacgccaggtcccgcgccctctcgctctcccaactcaaccagctcctcttcaaccgccacttcctccgcctctccgaaaccgactccgacatcatcttccgcccccaacaccgcctccaaaacggcgtcctctacgccggcttcatgctatccgaccaccgcatgagcgtcctcgaatcgtgggagggcattgcggggtgggtcctgccccaaaggaagagacttgacttctggggggggcataatggtgactggtacagactcgagtttttggttgaggatattttggagtgttatggctattgttt

SEQ ID NO: 74055 - DNA, 249 bp, Glycine max
  Clone ID: PAT_MRT3847_37887C.1
tttttgatgataaacaagccttgcttaatacttctaatagaaaagtgataaagaaaaactcaatagcattaacattttgtcatatgcagcttttcagcttttacttaatcatgaaacttcagctctaggctaattgttagttgaatcttcccttagtaaattccatttttcccacacttttgtagtcttctttaatttctctaggagatatctaaactacttatcctgagaaaagtaaaggagagaaca

SEQ ID NO: 74056 - DNA, 325 bp, Glycine max
  Clone ID: PAT_MRT3847_37888C.1
gtaacctcttgttgggggaagcagttaaaaaatgaaccaaagcaaatgaaagtgccaaataatccgatcgaaatccaaaacctacttctgtacttccccttattaatcatttgtttttgtggctcataatcttatttttattggtatggttaaagcaaagaaatctgaagggaacaatagactttttacaataaaagggacatcccctatacattgcgatgcacgccgctttcgtacgaggtcgtgccgcaaccgcaactatttaaggataagggaatcccaaatgggtttgttgaaatggagaaaaggcaagaacgataaaggc

SEQ ID NO: 74057 - DNA, 265 bp, Glycine max
  Clone ID: PAT_MRT3847_37889C.1
ctcaggtcaatatggcatactctccacttcaacagctggaatctacacgcgagtctcgctgccacagctgtctagctctctgagggcctacgcgacaagactcaccatggtcccagaatcttccctgttcacgtactgaccggtgaaattctggcacgcgcatagggtatcgaaggatctctcagctcctgggctcgttgcttccatggagcaggatgcgtagctcaaggtgtgatgtgaggcctggaccaggaccaccatggtg

SEQ ID NO: 74058 - DNA, 301 bp, Glycine max
  Clone ID: PAT_MRT3847_3788C.1
cccccaataaactcctccttttaataaaatcccgggacaccaaaaaaaaccaaaaaaaggggataaatattttctgccaccacttccataaaaaccattgttaaaactggtctgactaaaatctataccccaggtcttgaacaaaccaatataaaaggcttacaaaaatatctttgcttaattggaaaatagaaataacaggcaacaagccccaaaagctagttttttggcccaatatccttgagggcacaaatttgttcctcccccttagcagacttgacagacacaacaagatccttgc

SEQ ID NO: 74059 - DNA, 204 bp, Glycine max
  Clone ID: PAT_MRT3847_37890C.1
aaagtttcttaggaaccgtggggttttgtttttgttcatcatgcttctcattggtagagctgcacgaaagcgttgtgaaccctctgaatttagcttcacacgatcaagttaggagagagtggtgatttcactgtttcaagtgtgatcatgatgatggtttggagttaatcaactttgttctgtcggaaggtttctgcttatcgt

SEQ ID NO: 74060 - DNA, 967 bp, Glycine max
  Clone ID: PAT_MRT3847_37891C.1
taagatttgaaattttgataaaccgcgatcacaggttgccgcaccttaaaaccggaaacaaaagcaatcgttacttgttctcaagaatcttcaaactttcttctgttttctctgcactcggttcttcaggaaaagaaaatcactctctgtattgattacagacttcgtgaatcattttcttttcaactttcagttcacttgctgaacactctcctataaatatataggacttcgtgtcagatttgaacttttcctgtctctttctcggttttctttcttattctcatcttctttaaattttaaggctcgtattttgtttctctaaactttctgttggactcatttgaaatacaacatgaagttttatccaggacaaaatgtctctgaaattgtttaccattttcagagtaatgagacagctaataggcttgatgcttattttgcctgtggctgtgaagaggatactgaagtcctcgctcgtttgaagcaatgtaaccctcggttactgcatttatcttatgctgctttctgtttggaaatgggcagtcattctgttgaagaaatagaatatgatgatggagagttggttttcttgtatttccaaaattttctactctccatagtgtccaattcttctaaaacagcaaatctgagagcatacatacgttcagcttttgcatatcattttcagcactttgttgaatttgatcaatatacaaatgattctctcaatgtgatggatacaagcgtatctgctcaaggaattgcagatttggctctgtccatggtcagatggattcctactcaaattaaaaaagttgtgaattttggggtaggatcggtcatagaatccttttcagaacatttcaataagctcataatgcaatattgtccaatagtgttccaagcttttagctgggttaacaatatttggaccatggttaaagaatggattgaggaggctgcg

SEQ ID NO: 74061 - DNA, 321 bp, Glycine max
  Clone ID: PAT_MRT3847_37892C.1
ataacaacattttatccaatttggaagaaattaattaacaaaaccgctcacacgaaagaacaaacacgaattacccgaccggtacccgcaggaattaccacatctgcccatagtgagacacaatatagcaaaacgaaaagatggacaaaaatctttcctgaaagaaaaagtaagccactcccaataaaacacagcatacgatcccgaagcctaaaaagagaagacccgggagcctaaagagagagctcacgcacaccaaatgcgctgcgctcacaacaccaaattcagaggggaaaaccgtcgttcctaacacattaaaaa

SEQ ID NO: 74062 - DNA, 241 bp, Glycine max
  Clone ID: PAT_MRT3847_37893C.1
attcattacaaatatgattactgggacatcccacgctgactgtgctgttcttatcattgattcgaccaccggcggttttgaagctcgcatatccaacgatggacagactcgcgaacatgctcagctttcatacagcctagacgtgaaacagatgatcggctagctgaacacaacggatgctactgcaccctagtgtgtctaggccaagtatgatgatatagtgaaggaagtctcttgctat

SEQ ID NO: 74063 - DNA, 612 bp, Glycine max
  Clone ID: PAT_MRT3847_37894C.1
acggctgcgtgaagacgacagaagggcgcaatcgttgggggtcctctctccgctctcttgcactctcccttgttgcccgtcttcggacacatgattttccaattgcatacaaatttaccccaacgcttcatccattttctttcgattcacacacaaacagatgagtgttgttaccgattctcctgtgcattcgtccagcagtgatgacttcattgcatttcttgacgctgaactagatgcaagttcaccggactcgtcgcctgataaagaagttgaaaaacaagatgatgatgagcttgagagtgtcagaattaaaagacgtaaatttgaaagcattgaggaaactccacggatctacttgtgagttaatcatctaccggagtttataggcacagaaggtgtgaatatgatgtacacatcccggctcgagtctgacatattcatatataacatcaatttagttggatggggagtggtttcgggctcagcggtacatagccactgtactggattgatatgtatgattatattttaggtatcttgtttactgacattcgtaaaatatcaaaatgagaggttctcattatgtcagggcatcctagatcacacact

SEQ ID NO: 74064 - DNA, 531 bp, Glycine max
  Clone ID: PAT_MRT3847_37895C.1
gtgttttttttttttttttttttttttttttttttttttttttttttttttttttttttttttttttttttttttggggagggccaaggacaattttttttttttacccccttacttaaaaaaaccaaatataaaaacggggtttccaaaataaaaaaaaaaaaaacccccctggcccggggataagggaaaatgggagaaactttggccccaatggggtgggggaaccaaaccctttattagccctttccaaaacaaaaaaagggtgttttttttttccaaaaaaacataaaaagcccccctgaaaattggcccaatggaaataacctacccttttgggaaaaaaacccccaggctcaataaaaaaaggggttgggcctaaaaacagccccttaaaagggcccccaaacaaataaaccccttcaaaattccttgaatttgaataaacccgcaagaaattggctcaccccccgggggaattaaagtttctgtaaatggaatggaaacaaggtcctttgtttaattttcaaa

SEQ ID NO: 74065 - DNA, 610 bp, Glycine max
  Clone ID: PAT_MRT3847_37896C.1
caatataatttttttacaatttttttttaaatctaaaccaagaacgagatactcaataccttatggacaggaatgtagtatcagtaacggatacatggatatattaaggaatcgaaatcaaaaatcaaggagacctgttccagtcctacccattaccatgtctagtggaacacaatatgaggcactaacgttgggataattattaacaacttgacttctccgtttgaagctgccattgccatcctccaagatcgtgaggatcagaattgtcatccaaatcgaaacacgttgctttgcctgtatagttgtagtagacattggctgctgcatacaacttggctaatctattatttcccgttactgagctgtcaatcgcctcgcacatctttttcaccggatatgcaggcaggggattcaggaaattggatggtgtcggataatctgtcatggcggtataaatccacgccgcccgaagccaaccttccaaagaatcaggcccaaaaatatcgctcttgcatattctgaatgttttccgcagcagttccattcctccggtttattggccgtatcgtctatcagatcccaagacccttttataactttgtaacaa

SEQ ID NO: 74066 - DNA, 390 bp, Glycine max
  Clone ID: PAT_MRT3847_37897C.1
aaaaaaaaaaaaaaaaaaaaaaaaaaaaaaaaaaaaaaaaaaaaaaaaaaaaaaaaaaaaaaaaaaaaaaaaaaaaaaaaaaaaaggggcagaccgtactaaaggaaaccaatgctaacgaacgcgatgcatagagaagtaataacttttttattagggacgccaaaaattaatccgcgggccgagtgtttacaaccgtggggaccgggaaatccctggcgttccccaacttatcggttttgcagcacgtccccttttcgccgggggccgtactagcgaggccggcccgccccgtgcgcctttcccaacggttgcgcaacctgattggcgaaggcgcccccccctgtagggccgcattaggcccggcgggtgggtcggctccccccggcg

SEQ ID NO: 74067 - DNA, 182 bp, Glycine max
  Clone ID: PAT_MRT3847_37898C.1
gccgcgccgaagctcgatttctgctgaggaaaaatatacagcgggagtgttgtgatttctaaatctgatactctgtatctgaagctacgatgagaagtctgtgttgaagaagcaaaatggggaagcagtcgcatgcgttgctgttgtgaattctaaatctgagattctgaatctgaatctac

SEQ ID NO: 74068 - DNA, 395 bp, Glycine max
  Clone ID: PAT_MRT3847_37899C.1
gaatcgacggaccggtccactcgtccgcatggtatactgtactcatgctctcatccaatttaaatctaatctcattggcaccagaaatgatcatgtatacacggggcgtatactcttactgccaatatcaggagctcgtcaagcacaactattgaaatggcgacattaataccgctatagaattactctgaagtggcagctgccatatcgaaaattgacaacagtaaacatatacctgaaatcccagagcatctttcgaacgatgcacaaaatttgatgacgctatgctgacaaagagacccataagctcgaccgacagcccataagctactagaccacctattgattcgacatcaatcggcatcaaaagctgcaaatgtgagcataaccagaga

SEQ ID NO: 74069 - DNA, 156 bp, Glycine max
  Clone ID: PAT_MRT3847_3789C.1
atcagattgacgagacaattttgatcctctcgaaaaccaaacttcatttcccctttttagttgtctctgtggcactctgtgtttcattattaccgcaggaagagaaaagaaaaaaaaaaaccctaatctctggaatagcgatggattggagcgttt

SEQ ID NO: 74070 - DNA, 364 bp, Glycine max
  Clone ID: PAT_MRT3847_378C.1
ttattttctatcacaataccagaggatataatattatagatagggaaacacacatgcgggaagaatgaaaatccttaatatttgtggcgcactcgggaggaggatacataaatacccgacatctaaaatggctccttcaaaggtaagaagaccctcctaattcgatagacagcgcaaatatgactacgagaatgcctagaaccatatcatacttttagcgtgttctacattagtgccttataggacagtatatgcactaatcataacttatagataaagacccagtacgttagagattcctaatcattccttttaagacacaatctatacttgttatggaggaagcgtttgtatgacaactgac

SEQ ID NO: 74071 - DNA, 527 bp, Glycine max
  Clone ID: PAT_MRT3847_37900C.1
ggctcgagaaatcatgccagcttaagtttattcatggaatgccaaacttaaaaggaaggctacagaaacagcattatgctctttttgttgtctctgaggatcagtcacaatactgtagtgatggaaaaccaggtttactatcattttataaccgtccatacagaagagatagtaagatcctcttaccaaattcagagagaagtcaaaacagcatattgtggtttttgggccctgcagtcctcgttgcgtccttcatttttccttcactctatttacgcaaagtgctatccatcatttttgaggactctttgttaactgatttcctcatattattcttcacagaagcaattttctattgtggtgttggggtattcctttatctactagaccatgtaagaagacccttgctagtggatatcgctgcaaacaatagtgatactctacccccacaattgggacagagagtctcttcttgtgctaccctggtgcttagtcttgtaattccaatggtgactatgggtttggtc

SEQ ID NO: 74072 - DNA, 731 bp, Glycine max
  Clone ID: PAT_MRT3847_37901C.1
ggcccgtcacgccacccttggggcatgcctgccatgccgctctccattggctgcttgctgtttcagcttcctgccctgcttgtcgtctctgtggctctgtcactgtgaacttatctcaagggttgtttgtcaaccaactaactggtgctcagttgcaaatgtacactaaagacaaatcatgccagcttaagtttattcatggaatgccaaacttaaaaggaaggctacagaaacagcattatgctctttttgttgtctctgaggatcagtcacaatactgtgagctcgaaacaactgctttagtgctagaaaacagcaatacagttgcagaagacatctctcctgcaagcaactcatattttcatttatcaggtagtgatggaaaaccaggtttactatcattttataaccgtccatacagaagagatagtaagatcctcttaccaaattcagagagaagtcaaaacagcatattgtggtttttgtgcataacttactctatttatgcaaagtgttatccatcatttggctgtaattcgtagtttgaggactctttgttaactgatttcctcatattattcttcacagaagcaattttctattgtggtgttggggtattcctttatctactagaccatgtaagaagacccttgctagtggatatcgctgctaacaatagtgatactctacccccacaattgggacagagagtctcttctgttgctaccctg

SEQ ID NO: 74073 - DNA, 179 bp, Glycine max
  Clone ID: PAT_MRT3847_37902C.1
cggatgcgagaagacaaccgaggggggccaacaaatactgagactaggcatcgcggaaattgggaacatgagagttccttgggattacaaaaatcagaatttggccgttcgaggtgaaaaatcaagcaagaagcctgattacttgggaattaaaattttgtaccaaggggggacaaaca

SEQ ID NO: 74074 - DNA, 504 bp, Glycine max
  Clone ID: PAT_MRT3847_37903C.1
attaattgcttctaacagatactgaaacaaatggcaagtagacaagtaagatgtaaccagtgtggatcactatgaatggtttgagcagagactcgtgtcgttgagtgcacagtgtgccatggcatgacccagattcgaccctccattacaggtgcatggagtgaagtagtctacaactcctttcatcagtttggaggtcgtctcagaagctttgtaaataccataatgcctggttctggttcagttaacaatagcaatccgcggggttattatgggacacctcaaattgcgtattatcctccacctcctcagtcactaaggccatcatacaatgcatatggcccaaagcgggctgtgctatgtggaatttgctatcatgggaaggataaccagctaaacggcaccgtgaatgatgttaaaaacatgaatatctttctggttaaggagtgtgggtttcctagggaatccattctcattctcacagatgatatggaggagagaaac

SEQ ID NO: 74075 - DNA, 475 bp, Glycine max
  unsure (1)..(475): unsure at all n locations
  Clone ID: PAT_MRT3847_37904C.1
tcgcccacgcgtccggcgagaggcaaatttcactgtttcttcgatgcattcggacatggaacaaaaggatcgcgacgctattatgaaatcattccgtgcaggggaaagtcgtgtattgattagtaccgacgtgtgggcccgtgggttggatgtgccgcaggtttcgcttgtcattaactacgacttgcccaacaatcgtgagttgtacatccatcgcattggccgatcgggtcgttatggacgcatgggagtggcgatcaacttcgtaaagaacgacgacattcgaattttacgcgacattgaacagtactattccacccaaattgatgaaatgccaatgaatgtcagcgaattgatctgagagttggtatgaaactcacacaaggaattggatcctaaacgtatttgtgttttactatcatcacgttcattgttgcagataaatggatactttggtgntctgaagacacaggct

SEQ ID NO: 74076 - DNA, 211 bp, Glycine max
  Clone ID: PAT_MRT3847_37905C.1
cccgggtacagacccacgcgtacggagcttttggctgtaccatcagcggtttctgccctaccggcgacaccgaaattgaggaaccgcaagaagaacactaaataggcaaacacaagatcgccccttccctccatgaaaggaaaaaaaaaagcacagcaaatggcaagaaacagagaacacaaaggagctaaacacaagccaaacagaacca

SEQ ID NO: 74077 - DNA, 923 bp, Glycine max
  Clone ID: PAT_MRT3847_37906C.1
tggattgttgcgcacattctttgaaggatcaggtacaagcccatcaagatgcatcagtcatcattggcgcccatggtgctggtcttattcatatagtatctgcattgcctaaaactgtgattctggagatcatttagcagctatttcagacgaccccattttgcatatatttcgcggtggaaagggttagagtatcatgcaatcaaccttgctggatcacatgcggatactggaaccgtgatcaaagagctggttgacataatgaaaagccttggatgttgagtgttttgggcttggaagtgttgatatctgagctcgagtagtggaatggaaggtgatctttaattttctgattcacattatatgtggcttgcaatgttttatctttaattgcagtcagtttggttactagaaagcgattcaaagttggggatattttgttggagcagaaatagcataactcttctaaactgaatttaacttgacaattctacaacacccttgaaggtgcagaatcaaagccatgagagaaaggtctatttgtcttggtttatatagcatgctggattgttagtaccagacacagtatgtggcatcttgctgtggattttgattccttcacttgctccttgtcccaagttgtatactgaaaaggggggtcccaaattttttatttgtatattgatttttcctccttaaacggctttgttgtacaataggtttttccactagcacattattttctgactaattttgacaggtactttatatttaagtaacacatacaaattgcatttgtaagtgagttaaacttttggctgacataatatttcttgagagactgatttctttttttgtgatttcttattagggttttgttggtgcatgtctgtactaaatactatttggaattttcagatgcc

SEQ ID NO: 74078 - DNA, 246 bp, Glycine max
  unsure (1)..(246): unsure at all n locations
  Clone ID: PAT_MRT3847_37907C.1
tctccattctnactttcantctcantntnagcctctatcctttgaaaatgttgntgatgctgtttnncaattcaatcgcatgctgtgtctgattcataccatacccatcgtcgnacctaagaagattttagattcctttgngnagatgatgcagtannccactgccgnttccctntctcagtgattggnantcaagggnattgttccnagccttgttactttgaacattctcantaatgtttctgt

SEQ ID NO: 74079 - DNA, 447 bp, Glycine max
  Clone ID: PAT_MRT3847_37908C.1
cagtttcttctcaaaaacccttttttctttcttctcaacatttccaaaactttggctctacaaatttcgcttttttgaaaccaacatacactttggcaacatggcgagtcataaacgacatgcccaaaaccagcaatggtccaagatctaaagccttagtcggagccactgtcgttcctcctctagatgaagctcaattacctccaatgaggctacgacaatgttgccaccgcctccgatgaggacgacccgtacaacgtgagctctagttcctggtgtaagaagaggtgaaacaaatttagttcacgaagcgacccaccacccaccaccatccctaacgtcactctggcatagccccacccaatacccaataatgtcgttgtggccatcaattgcgaatttagattcgggttttctaacagatcctttggtgatctcgaaccttgt

SEQ ID NO: 74080 - DNA, 183 bp, Glycine max
  Clone ID: PAT_MRT3847_37909C.1
cgacagaggggaggggccgttgatgcaaaacagcgacgaatcagcaagcgcgattagaaggcggggacctcaaaactagtggctggccccgaccatgcaaactgtgcacaggcgaaccgggggaaaagcctcctgggagcagcccgacacacaaggcatgcacgtaggtgggtcacgacatct

SEQ ID NO: 74081 - DNA, 428 bp, Glycine max
  Clone ID: PAT_MRT3847_3790C.1
ccaaccataaatgtttgttttacttccttataaaaaaaaacatttcaatttcaatttattagtaccaaccacaaagattggttgaataaatacttgagttccaactgtgaatgccccaacttgtttgctcctaccaccctattgaatgttaaaaggttggatgaattttctataacgatctcttcacaatagcggatgcataggatggttgatgactgaatgaaaaaaatgtctttttctttgaaggaagggctcctgcccaacaaacattgaatggctggcggggtgcggctagttacttgatttactctacctaggtcgtcctttgagggaggtgtattggaaaaacttctttccaccttttttgcttttttgcgagcttgcttggagcgaacacaggtgggtaggagaaataaattagcatgctt

SEQ ID NO: 74082 - DNA, 334 bp, Glycine max
  Clone ID: PAT_MRT3847_37910C.1
tcggcggccgccctaccactacagggggggattttttattatattttccccttaaaaacaggaatacataactgtttcagctagtttcagaccacaaatgtgagctctgcaaacctataaaatgcatgagcatgcattctctacagatgcccttaacgggatacatgctataaaatgcatacggtgttgcatcgccctcaaaaaagacaactcctctttgataaaatgagatccaatttcataaatcagaatgcaaacttcacgaaatcgaacctaattacacacacgctcgttaaacatcttggaaaaaaacacatccagaggggggttgtgt

SEQ ID NO: 74083 - DNA, 324 bp, Glycine max
  unsure (1)..(324): unsure at all n locations
  Clone ID: PAT_MRT3847_37911C.1
acttaanctcttaattgggtgcgagtacatctgggagatgactacagaatggaggaacaggaagtgacaggcgactgagcccttgggagggcctctaaaggggggggtaggtcatcgggaccggatttttgaatctgctgcacaaatgatggacctgcatgccaataataaagtggttcttgaggtggaatatgatgaataagtgggcactggtcttggaccaactttggaattttataccttggtgggccaggagttccagaaattctgcttggccatgtggagaggaaatgattctttctttacccctaaaacaaactttca

SEQ ID NO: 74084 - DNA, 271 bp, Glycine max
  Clone ID: PAT_MRT3847_37912C.1
ggctcgagttataattagttctctgtcccaggggaggggcaccatttaagagggatggttggtctcgaatgaagtgttggaacaacacaccaacacacgttgaactatgaaaagcataggcaccccgtaaagaaaatacgaaagagcacggccgctgtctaatgagctaggctgcccggagatatatcccagaccacctcgtacaggcctgccaactcttcctatacagagtcgtgtccgaaccggacaaaatcatgtacataggtaccac

SEQ ID NO: 74085 - DNA, 330 bp, Glycine max
  Clone ID: PAT_MRT3847_37913C.1
ggctcgaggggcaaagttttcttctcctctatggaacgcgtgtccgggtgcgggggcccttgcggatgatagtcgctatgctacaactgcttggaggagctgccggagacatagtttatcggtggcgccttacatgtaccaaacatatggggcgggaacacacgtcgcgcgtgctcggagaaagatctcatgatgaggggtgtagatggagccaatcgagaagaatgggatcttgcagcacatggaattctgtaagacgacggtgacggagaggctaatgttctgcactgtgcggatccacaaaacgcaggatgataagggcagcgacag

SEQ ID NO: 74086 - DNA, 2438 bp, Glycine max
  Clone ID: PAT_MRT3847_37914C.1
gcaaaaagcactttcaaattttacggctgcagaatggttggatggaggggagaaggagtaccattgtcaacggtgcaaacagaaagttaaggctctcaaacagctaacaatacataaggcaccttatgtgctaacgatccacttaaagcggtttcatgcccatgatactggacaaaagattaaaaagaaggttcaatttggctgtgcactggacttgaaaccttttgtcagtggctcaaatgatggagatgtgaagtactctctatatggtgttctggttcatgctggttccagcactcattctggacactattactgctatgttcgcacttcaaataacatgtggtataccttggatgacaaccgggtaagtcatgtaagtgagcgggaagttttaaaccagcaagcatacatgttgttttatgttcgtgatagaaaaagtattgttccaaggaagcctgttgacattgctaagaaggaaaatatgaagactaatttgaatgtaaatagagaatcttcaacttcaaaccatgtattgaaggaatatccaaatggtaccgtcgaaaataaagctgagaagggtgctctagttctgcaaaagcatagtgtcatattagcagaaaacttgatacaaagtaaaagacatggatctgaactttcttctgaggcacaggcacagaaagactcaccggatggactgtctgtagctaaatcagaacttggatgcttgtcatcattagatcactctggaaaagattatagtctccctcataatctgaaatctttagctgcaccagttggaaaaaataatttgcgcaatgagaatgtattttcaaaagagggcattaaagattctccttcaatagtgccctcatccactaatccccagaatggtgaactcactactgaatggaaatctcagtctctgaagaaaaaccttgtcaagatagttgatgttgctacacctcaagattcaagcacaaatatgaccaatggcatttgccctaagacatcactaattcatctgaaagttaaccatcagcttggaacttctgcaattggttcggtgtgtgagaaagcaagtagtgtggtgcatgaagatctggttggttctcagggactggttcttaataagtcagtaaatacatctttgaatacagagagtcttaatcaaaagcctttgaaaaaatcaaaaaagaagttccttaagtatcaggtatcttggatgcatcttcgcccaatcttctattacatggcatacttgggcccacggaagaagaatcacaaaagaattaaacgccgcactttgagtatgaagaatccaaacaaagacaagcttgataagcttgctttctcatcagaagatgccaaacctgatgtatttccttgtctatcaagttgttctgatagtaaagcaaccaaggctggttatagacctagtgctaattttaaatctagtgatgaatctctaatagagactagggctgaaggggaatttaggaagagaattgatcatagctgtgctgtgcttgcatcagcggcgcaaattgaaaatatatctggaagtggttcagtagtaagtcaatttgaagctagacaggctgatagtgcacaagatagtacaagagatcaaatgcataatggtttaatgagtatgcctaatggaggtccggaggagacagttgttgctcgatgggatgatatagaattaccttcatctcagcatttggagtcaaagaatgacaaaactgtcagcattggatatgttggggatgaatgggatgaagaatatgataaagggaagaggaagaagataaggggcttcaagcatagctttggtgggcctaatcttttccaagaaattgctgtcgagaaatcgaagtttaaaagggcaaagtttgaccaatcttgctcagggaaccctccatttaggatatgacatccagaagaactctatgccttctattgcttggaggcttcttttgtagcaattttgtcaaacgctgaaagtgtaatgaagagagcacctaccttattcttttctccagtaaaaaaatttgtttggtggttcacatcattgtctttgggacagagccgcagagggttgggtttttgtgcacctgtgttcctgttggacatttctcattttcagactgtattattgtaggagctgcacgccgtagctcagaagttttgttcatgattttaaatcattcaagacaatttgtatttcagttttatgttacgaagcgtgtttatcgtgtacccgaagttgtattttggtttgagtttggattaggtactaaatttttatgtactattaatttctaggaaaaattgtaagatagttaatttatattctaattcatgaatgtaagtctgtttttgtttggattacataaaaagaaatgttttcgtgtaaaaaaaaaaaaaaaaaa

SEQ ID NO: 74087 - DNA, 510 bp, Glycine max
  unsure (1)..(510): unsure at all n locations
  Clone ID: PAT_MRT3847_37915C.1
cccacgcgtccgcggacgcgtgggcgagcctgccgccggtcgctttctggggcacacccgcgagcgagacaattgattcgagcttccaattcactgctggtccacgcccgtcccacagcccgccgcattttcgagagcacccgcccttcgaccaccttcacctccgtaccagcaccaccgccgcccaattcaccctccacgccatcgcaaccatgcagaaggtcatccaacggacggcaatggccaagcgccaggcggcccgcaaggcacagaagatcgcagagctggacaaggccttcgacaagaggcagaatcggaaggagctgcagcagattaagagcatgaccaacaagaccatcgttgacgcccgcaagcgccgccgcgaggactggctactgggcccattggccccccgccgcgatgtccgcgagtggagggagaaatacgccaccatcgactccaggcgcattcagcttgccgncgccgatccggacaccaagctggagcttt

SEQ ID NO: 74088 - DNA, 333 bp, Glycine max
  Clone ID: PAT_MRT3847_37916C.1
gggggcctgactcaatctcaataccaatttcaaaccttaaccaatatccatgacttccttaaagaggcgagtgggatcatacatatcatcttacttcaaacccaacaaccaacagactccattccttgaccttttaacaaattttccttactgccacttaaacaaatctagaacattacccaaacaacacggttccttccaaaacattccccaatatcacctttattacgctcttcaaagagactacctccacaactaacactacctatcacactatctcactcaacatctggcggatcataatgttaaagacaaaatacaacaaacttgatt

SEQ ID NO: 74089 - DNA, 323 bp, Glycine max
  Clone ID: PAT_MRT3847_37917C.1
gattgttaaaagaatgaacaaaaaaacaggcattgtgatgtttattgaacgtggcccaatatctacaaccattaacatttaaatgacttgatggaaaatacaaagcatgcctctgatatttcaagtgcatgaaaaatctttatactcaaacactataataacactggtactacacacttttcctttaaaaacagacagaaagaaaataacatgctctctatgtacatatattggataactaaaaggaaaacagcgacaccaaactataagtttaaacggtcattagaataaataataaaatttgcctatccaataagccttgc

SEQ ID NO: 74090 - DNA, 686 bp, Glycine max
  Clone ID: PAT_MRT3847_37918C.1
acttagctttacttctacattgggcttatttagtaaaataacgttctcttgtgtctgacattcatatatagagagagaaaattaatggtatgcgaagaacacttatgagcttgagacagtatatattacttaaatataaaaaagaacccaaatttgtatttcacacaggactagtcccgttattgctccacatataatcgcatgcgatgagctgtttgttccacctccttggaccagttggtcttccaaataattgtaaagaggactaaagtctgaagaatactgccgcacattgtgcctccccagagacccttgacccctaaatgcagcttgaaaccaaggaaaattccaatagggagtccaacaatgtaataacatgctaggtttatataaccaaccataacttgccatccactttcaatggccacacctgacatcacctgtgaagcactattgagaacaattgttacaccaagaaggtatgctaaatcagcagcagctagtatcatatcctcactgtcggtaaagattttggcaaactcatctttactaaagaaaattacggtcatgaaaagaataccaaggaggaagagactggaacattgtcacacaggaagagtatatggctgctcttggatgcaacatgccaagcgtattggagacaccaacacttatggctgtattta

SEQ ID NO: 74091 - DNA, 178 bp, Glycine max
  Clone ID: PAT_MRT3847_37919C.1
aaacagggatttttatctttttattattggtataggtaaaaaccactgcacgataccacaaataatggcaaagaaataacctgtacccttactatgggcataaattaattcctcctgaatttattcagctaggcttttctgagtagaccagaacattgaaccagttgaaaatcagtat

SEQ ID NO: 74092 - DNA, 514 bp, Glycine max
  unsure (1)..(514): unsure at all n locations
  Clone ID: PAT_MRT3847_3791C.1
acctaagactcggaattcaggctcttagctggcggggggggggcggattggaacataatcgagccgagatcaaaaaataggcatccctctgcttgtaccaaacccatgcttgcccctctggccttgcaccgtcctctaagtgcaaaagctcttctccgtcataggtcatcgtcttacttcacgctccccccatacgccatctatcctaccactacgagagggagctctctcatagcctnctcaacgttgccttaagaaatgcaacaagcgttttagaaaacagggggacccgacacaaacctctttggcggagatccaactccgaggatgctcgggtctcctgagacaaaagcccaccatccccggccctccgagaaacttgggagaggcagggctcgacgttgttacgtgggcggtgggcacctggaatgcgcccatgagctctcacaggaggagctctgcacgaagatctcgtgctgtgacgctctgatagtcatgagcgcgaccaaggtga

SEQ ID NO: 74093 - DNA, 441 bp, Glycine max
  Clone ID: PAT_MRT3847_37920C.1
gcttaaacttttttttaattgtatctcctagtcaaagtcaaacattaattcttgaggcattgagatttatttaaggggttaatctcttctaacaaatattttttcatacactcaagttaaggattgaacccacaattacatctttaaggataaaattacctatcaatcatgttacattatgttgattgatttttgttaaactgattttaaaaagttaggactatattattagtattatattcagtaagatatttttagtttctaatgttttggctattttcattttagaagttttagcatacatggaaacttgttaaggaaaacatattaacctctaacatttgacttaacaaaaacgcaataaagtaagaccaataggatgaataaaaactagcaagaaaaccacatcaatcccatttactgataagaaagaaaaacaac

SEQ ID NO: 74094 - DNA, 252 bp, Glycine max
  Clone ID: PAT_MRT3847_37921C.1
gaccacattccaattcacagacacatacattgtagtatcacttttgtctcggaatttgttctttggagtcatggcaaccgtaaaagttgcatgtgtggttttgatctacatggcagtcaagaatgcactaacgctcgtgcaagccgtgtcatacaatgatctttctgtgaacgtaacatcctcccgatctaagctgactcagggtgcacatgttctacaatccttcagtaccagactgaggaacattctggg

SEQ ID NO: 74095 - DNA, 219 bp, Glycine max
  Clone ID: PAT_MRT3847_37922C.1
tttttgccataagcacccttataattgtattgatcaccggggcaaacaaatgccttaacgaacctgaagaatagcccctataaaagtggcagcttatattccacccctacccaattgctaacctatcttcgctattggacggcacaaacttgactctttgtaattaacaaaaaggtacaaggcagagccggagggtaccaactttagattacatagtga

SEQ ID NO: 74096 - DNA, 252 bp, Glycine max
  Clone ID: PAT_MRT3847_37923C.1
tgatgagcgaggtaactatttgtattagtatttgtatgctggttgtcatttttcaatatctggtgacggcatctagcgtggagaagtaaagtaaatatggttacggcctttagataaatctaagtgcacaactttattatacacctaataaaaactttgccttcttctctgtaaaaaaaaaaaaaaaaaaaaaaaaaaaaaaaaaaaaaaaaaaaaaaaaaaaaaaaaaaaaaaaaaaaaaaaaaaaaaaaa

SEQ ID NO: 74097 - DNA, 520 bp, Glycine max
  Clone ID: PAT_MRT3847_37924C.1
gtttcactacgtcctctgtttttcttcatgttgtactaccgcgagaggttgtcagaaggggattttcgcggtgagttagaactgataatcaagagagtgactactggtcggcgacagcgaactacttccgtgtaatggcgacctccgtcgcagtcgccggcgctttgacggcgcatgatcgccggattctgacagcggtgaacgtcggagcgtcgagcctgtcgttggccggttccagcttcattgtagtgtgctacctcctcttcaaggagctccgcaagttctccttcaagctcgtcttctacctcgctctctctgatatgctttgcagtttcttcggcataataggggacccgtccaaaggtttcttttgttatgctcagggctatagcacacatttcttttgtgtggcatcttttctatggactacaacaattgcttttaccctgcaccgcactgtcgtaaaacataaaacagatgttgaagatttggaggccatgtttcacttgtatgtctgggg

SEQ ID NO: 74098 - DNA, 466 bp, Glycine max
  Clone ID: PAT_MRT3847_37925C.1
acggctgcgagaagacgacagaaggggaatcaagagagtgactactggtcggcgacagcgaactacttccgtgtaatggcgacctcgcgcatcgccggcgctttgacggcgcatgatcgccggattctgacagcggtgaacgtcggagcgtcgagcctgtcgttggccggttccagcttcattgtagtgtgctacctcctcttcaaggagctccgcaagttctccttcaagctcgtcttctacctcgctctctctgatatgctttgcagtttcttcggcataatagggtatacatgctagatcaagcaagattttcttcaatggacccgtccaaaggtttcttttgttatgctcagggctatagcacacatttcttttgtgtggcatcttttctatggactacaacaattgcttttacccttcaccgcactgttgtaaaacataaaacagatgttgaagatttgga

SEQ ID NO: 74099 - DNA, 475 bp, Glycine max
  Clone ID: PAT_MRT3847_37926C.1
aaagcttaaaagaccccccccaccccattggaaaggcccccaacattggggccccaaaaaattttccccccccccaggggggccccccaaaagatttaaaaaaagaaaaattttacccccccaatttggcctggaaattaaaaacccaaccccggggcaagggactaggcctatgccgtttattggtcttaccgagcccccttggtataaaaacaaagcctaccaaggaaaaaaaaaaaaccttgcccccggaaaaaaaaaaccccgtttggggaacaaaaggggggagagggcgggccaaccccgccccaaaatttgaaaaaaaagtcccccccccaaaaaaaggaagtcctccaaacaaaaaaccctttttgggggccaaaaaaaaaaaggtcccttgaaaaacccccccccccaatttattgggcctttttgtgggccgccttggggaccttacctccagggggggcctttt

SEQ ID NO: 74100 - DNA, 914 bp, Glycine max
  Clone ID: PAT_MRT3847_37927C.1
gaaggaatacacaaaaccatgtcctctaactacattagatcattgatcatacaatacaatcttctaattaatacaattggtcctgaactgatccgtgtcagatttcacttaagactgtaaataataaccccaacaactacacatttccattatcaactaacaacagaactttttaggactcaaccatagaagatactagtaaatgatacaaagaaatgctgataaaaaaaaaacagatacaaagaaatggctgctttactatacacaacctcaccaccagtcattttgtcttgccatgcatggcatgtgatttcttttgacgttctggttgttcttccttattgttgcttgtgtttgaaccattcaccacagttgaattgcttaaaatctttgtttctttagattctgcccctagataatttgacaatactcttctcaccccgaagccacgacgttgaggtttgatattattattgttgttgtggttgttgccaaggaaaggggatctctctccccttgcaggactaattagtggtggtgcaggtgaaaagcttcttggtgtgccaattgctttatgaggagtgcctgagacagacactgtcattggaaccagaggaaacctatctgaatgttttgttaagtcatccacatatagcaaatcttctatgcgagccacgatgttaaatgccatgctctccaacactcttgaatagctctctagtatggattttccaatatccttgttgcactggatcttgctggtatccaaggtagtttgagtgagacctgggaatctttgcttcaatgaaagtagaacattttcagctctttctgctagtagttcccgctgctctccatcagccatgaagtccttgacaatttcccaggatgactttgtagatgaacgattagga

SEQ ID NO: 74101 - DNA, 289 bp, Glycine max
  unsure (1)..(289): unsure at all n locations
  Clone ID: PAT_MRT3847_37928C.1
ctaattaatacccggnttaacatanggttttgcttggctattactggtttcctcatgttttgttntcncnaaaatggagagtncncacaaaaaatgaatgagttcgaaagtttttatggnnnnnnnnnnnnnnnnnnnnnnnantacganagttggttctgaatgtggtgccantttgatgtgttatggttttgttaaaaatttggcatttatncctactcatccatatatagttacgtnggtagaacctaattgntacaggctanagctatnattcgnancttgcgtc

SEQ ID NO: 74102 - DNA, 440 bp, Glycine max
  unsure (1)..(440): unsure at all n locations
  Clone ID: PAT_MRT3847_37929C.1
ctctcgggctgcaattctcaagttcacaaagtgttccatcaacaatatgggagtgtcatgaatctgctcccattactatgctaacatgcgatagctagctctggttgtatcgatagtgcactgtgctcatacctcaaagcctcacccgganataaagatcttggaatccgcgtcggacattccattgtccacattttcagataaatagatgaggaatcacatgttcagagatggatctgtgcaataagtgttttctgatgcacgctatcgagaatcactctgaaatgacatcaggattctacgtcagaatgccacctcaacatgtgcaactggttgggacgcagaattgttcattggtcatatagactaatgagcatgcttatgaggccaatgttaaacctgttcgacatgcaatgtgcattcatctcaggtaaccatct

SEQ ID NO: 74103 - DNA, 2345 bp, Glycine max
  Clone ID: PAT_MRT3847_3792C.1
ccacgcgtccggttattctccttggaggcagtgcagcatctgagaaactaaaccccacaaaaatcctcgtccctccctcacgttatacggcagagccactgcaacaggaagccagagttcgccgctgctccgcgaccctaccctatcaattttcgtacttcttttcgtaattgcagcgaagaatggggaagaggaaggagcggattcagaacccggagccattcgatccgtacggcgccgaccccgcgaagacgaagaagcgctcgaaggcgccgaagcggcaccagcaggaggagcagttcattgctcccaaactcagctccaagatcatgaagcaggcgctaatccagcagaaggaggaggagaaggaggaaacgcacgagaacaacgccgccgcgaatttattcgaagaggttccgaacttcgaggaagacggcggtgacgacatcgacgacttcgccgggttctccgaaacgcagagtcagttcgccgaatatgatgaggaaattaatgaggaggatgagagactaatggaagcatctgcattgaaggagcctggtcagcagaaaacacttgctgacctcattgtccaaagaataaaagaaaaggatgcgactgttgcttcagaaaatcgacccgttccaaaattggataactccataattgacatatacaagggggttgggactcatctcagcagatatacaataggcaaaatacccaaggcattcaaacacattccctctatgcaactttgggaggaggtcttgtatataaccgaacctgagaattggtctccaaatgctctttatcaagccactaggatttttgcttctaattttggtgcaaaaaaggcagagcgcttctacaagcttgtgttgcttccaagagtgagagaagatataaggaagaacaaacggctgcattttgctttatatcaaactctgaaaaaggctttgtacaaacctgctgcattctttaagggcatactgttttcactatgcgagtcacgcactggcactctaagagaggcagtcatcataggaagcattatagaaaaggtttctattcctccacttcattcaagtgttgcgctattgaagctttctggaatggaatattgtggcaccacaagctatttcataaagcttcttctggagaaaaaatatgccttgccatatcgtgtggttgatgcagttgttgctcattttatgagatttttcaatgaaaccaggataatgcctgttatatggcaccagtcacttcttgcttttgtgcagaggtacaaaaatgagctgcagaaggaagataaggatagattaaggaatctactggaaaagcaaaagcataaattggttacacctgaaattagtagagagctagaccacagccgcaaccgaggtgaaaaggaggaagatcttatgtcaatttccagtccagtatatgtgataaacaagactattgaagaagatagatttgacattccagatgtaccaatggaggaggattaatttattgtggatttttcatcgctattcacttgggagggagaaaatgtttagagacatgtcctcgtttagtttcacaagggtgcagttttgagcgtcagcaatcttgtactgcaatgcatgggatttataattattatttggccattttatattttttcagtggttttttgacaaatgcaatctttttctgatgtattcttaccttaagtgcactaaaatacaattcaacttgctataatatttctagtgttttggtaaggatagattaaggaatctactggaaaagcaaaagcataaattggttacacctgaaattagtagagagctagaccatagctgcaaccgaggtgaaaaggaggaagatcttatgtcaatttccagtccagtatatgtgataaactagactattgaagaagctagatttgacattccagatgtaccaatggaggaggattaatttattgtggttttacattgtggagtgttttctgttagaggcagtagcagtaacaattggctacacggggactaaataaaacttctttgtccctgaacgaaagttgtccatccaattttttagggataatttcataatgtctcccttttttgttcgatatgtatgaaaccctgttgggcatgctaaatgccctgttctctttgggctctctgttgcaaaccatctgacacagacttgggtgtatttctggccaactcacaggctataacctttgtcactctggcacactgttgtatggtctgtattatgttcacgtcaaagagatcttttatattactgactaaaaaaaaaaaattatttctacattaataataaaa

SEQ ID NO: 74104 - DNA, 228 bp, Glycine max
  Clone ID: PAT_MRT3847_37930C.1
ggcggcacactgcattcactgtgtcggctatgtaacacgatattcttgatgatcgacggaggacaactatatggcgcctgagcgttgccggcgccgccactaggccctccgcctcgtcccccctctctccctcgcctcgaccccgtcgatcgcgatatgacgtgtctgttactgctgctactgttcactaatattcggagtcactattccatggtacattttgccgtc

SEQ ID NO: 74105 - DNA, 209 bp, Glycine max
  Clone ID: PAT_MRT3847_37931C.1
ttgagcgttgcatgcgacagcaaaactcacctagagtgccaccgcgaggcacactgactggccaaagttcaacgacggcccggcggtgaaaaccagcacgtgacccgaccaaatccaattgcacaacattcaacaatcgacagctggcggaaaaaagaaacaggccataccgatacggcatccgaacagaagggcatacatgaatggca

SEQ ID NO: 74106 - DNA, 369 bp, Glycine max
  unsure (1)..(369): unsure at all n locations
  Clone ID: PAT_MRT3847_37932C.1
ggagagagagagaactagtctcgagtttttttttttttttttttttaagccagaaactcaatatatattgtatggtgaatcgaaagcaaatcagatcacacacacacacacatatatataatatngatgcaanctctaaggtgaccacgaacttatattatataagttccattcgatcgtcatgccacctacaattgtatggtataacaagtgcatgacattgaccttagaatctttatatctatcaatgtacgggaatgccactccaatgcctaactcaacaaaactgaaggcttactaaattttgctgattttccccattttgttatattatggccttccacataaactcttctcattcatgggcga

SEQ ID NO: 74107 - DNA, 721 bp, Glycine max
  unsure (1)..(721): unsure at all n locations
  Clone ID: PAT_MRT3847_37933C.1
tcgacccacgnctccgcgcttcttcttcttcatcttgttgatgctgatcaatcggcacatgtacaaacgcaggggtctcttctgcagaagatagattgtaatggagcatgtgctgcgaggtgtcgtttatcatctcggccacgtctctgcaaaagagcctgtggaacttgttgtagacgctgcaactgcgtgccacctggcactgctggaaaccaagaagtgtgtccctgctatgctagtttgactactcatggtggcaaacgcaagtgcccttagacttaaaagttgtgtttggattgctagctgctgatatatcctccgtttatgtttaacctcagtttgaaggaagtatcatattccttatttctgtctcaaacgttgtgctgcagcaaatttactggagatccaaacatggatttaattggactaggatctatccataccactatcccatgcatggctttgatattatattgtaaaataatactatatataacatgttgcttaatatgtgctctgaagagtaaagaataacgtcatggaatcatacccctttttcaatacttgttgaatcatcgagtgtcttggtttgtaatttggaatttggatgtatattcacaaaattaataagtatattgtgatgtgattaattcccttctctgttatggtgcgttccttgtactgtccatcgtctattaataagtatattgtgattctgatt

SEQ ID NO: 74108 - DNA, 519 bp, Glycine max
  Clone ID: PAT_MRT3847_37934C.1
ggcactggtctctttgccgaacttcagcgttttggtttgggagggaaaattctaaaacctaaaaaaatttcaatctcaatcaactcaacgtctgtgatcccaatcgatcacatttaataccacccttcaggattaggtactctctctgtctgtttctctttttctcgtgcacagtctataccgtttgaatttcagctccccaaggaggaattccgaaccctttggtgtagtttatatatgtttggtgtagtttcaagtattattgctgtatcgatgcttctagatgcccaaatcgcggctccacctagctcataggcatgttcttcgacctcgattttttttggctgggattggggcaaattctattcaattctctgtgaatttcgctctgtttctagatcttaatttgcgaaatgactgtttatatgcgtatttcataatttttttgaatgttttttttttacgaattaacagtgcaatttgctgattgcctgtttattttcgtggattaagctcctc

SEQ ID NO: 74109 - DNA, 233 bp, Glycine max
  Clone ID: PAT_MRT3847_37935C.1
aacaaaataccggaaccacttggattcaagaactggaaccagaattagcttcttcacagtcttgaaaaacttggtccacatgcaccgattgcgaaccatggtgccattatcaaactggtcaaaaaggctatatcttatttttttaaccaaaccggtatgccactggctaaatacctactaccaaccttaaggttcaaccaaattatttccaattagccaccctgattcttaac

SEQ ID NO: 74110 - DNA, 196 bp, Glycine max
  unsure (1)..(196): unsure at all n locations
  Clone ID: PAT_MRT3847_37936C.1
cgcctcannncctccnannaccgatcccaagctgcgaggattagggagatttggagatctgggattggcgcanganannnnnnnctncnntgnggntacatcgttttttgttcttgcgggtgtncccaactctgaggagtataagatatactgatatgagtacccnnnttgtagcaatgggtgatatttccttgag

SEQ ID NO: 74111 - DNA, 1344 bp, Glycine max
  unsure (1)..(1344): unsure at all n locations
  Clone ID: PAT_MRT3847_37937C.1
aagactccctcttcttggttggttttttacatacctacacaaccaaccgaccaagaaccatgcacatctttttcttcgtccggactccctctccccacccccctttttctccacttgacatgcatgcacaagaaccatgcacatctttttctttgcataacctctctccccccaccccccacctttcgaacttgacatgcatgcatgtgtgttttaattcttcttcacttctaaatgggcttataaagtcatatatggttaatattaatatttgttctcaaggtaaagccaggatttagttgattccattgaagattgaatgcaccaccaccagcaccttttaattaatggaaggttaattaatttctggtgttaatatatcaacgagctttatctacataaattaatgccgactgatccatctggcctccttaaatacatattcaaaatattcgaagagaaagaagaagaatttcaaattgggttgccaactgatgtaaggcatgtggcacatattggatcagatgatccatcagcaaatgcaccaagctggatgaccgatttcaaacgaggaaaagaacccccatcaggaaaccctactcagacagttgaagaacgtgagaaaaaggcatcatcaaattccaaacgttccaaaattcgcaaccacttgattcctaagtctcggcacaattcaatcgacattgatcctgacgcacccaaaccgaaggccacacgccgccacaatcgctcttcagacccctccgcggactcctccaaccatgaatcctctagcggctcccgccaacgccaccaccgtggatccaaccacgacccagggtctctatcatcgcaagagatgccgccgaccggccccaaaaccaatcgaagaaaatcgaaggcctccgaagacggttcaacgaagaagccctcatctcggagatcgtccaaaggagattctctaactgatatttctatttcagattttggatctgactctaggcctgaaagtgagctcacgacccattagggtttaaattggagtgagtgtcagttagagagttatataaaaatatgctctaataatgatcagaaaaattcaaaacaagataacaagactttagggtgtatttggtttaaaggatgaaaatagagaatatgaaaatataagagaaattttttaattaaagtagaatgtaaaagatgtgactttcacataaaaagtacaaaatttctcttatatttctctcattccatcccaaatcaaccccaatcttagggagggagaggagaggtaaaagaaatgtttgttttgcagttgttaatttattacagtttttanncaag

SEQ ID NO: 74112 - DNA, 672 bp, Glycine max
  Clone ID: PAT_MRT3847_37938C.1
gatttggctctcctccggttagggggatggaggataaaaaaccactgctctctttgttttcacttttgagatttttccaacctgaagactccctcttcttggttggttttttctcctacacaaccaaccaaccaagaaccatgcacatctttttctctgcataacttctcccgcccctgccaacatgacttgcatgcatgtgtgtgttaactcttcttcacttttacatgcatgcttgaggttttgaggtttcaacattagatgggcttataaagtcatcatatacacactcacatatatatatatatggttaatataaatatttgttctcaagaaggatttagttgattccattgaagattgaatgcactaccaccagcacctttaagtggaaggttaatttctggtgtaaatatatcaacgagctttatctacataaattaatgtcgaccaaggtgaaaggcatccttaaaggacttagatacatatcccaaatattcgaagagaaagaagaagaatttcaaattgggttgccaactgatgtaaagcatgtagcacatattggatcagatgatccatcagcaaatgcaccaagctggatgaccgatttaaaggaggaaaagaaccctcatcaggaaaccctactcaaacagttgaagaacgtgagaaaaa

SEQ ID NO: 74113 - DNA, 424 bp, Glycine max
  Clone ID: PAT_MRT3847_37939C.1
tttctagatcactcggtccttgttcttggtactgcctggagctctctcttgttcactccccccgggggtgcgccgcggggtggagcacgtgggggactttctgggatacttgctgatgcctgtggtgctgcctatatatcggctgggccataggctgatccagagggctatgtgcggtgtgcagagcattgaacagaggatggagaggggattagacagccagatattaatactgacaatgctactatcatcgcaaccatttccccaagttactccgctagtggctcacctactggtgggtataccactgggtattatactctggaggataccctgaaggacctatctagtgacggagtatcctatggagcctacttgcgagccagccacgatgatggaaaccatactggagttgttactgttg

SEQ ID NO: 74114 - DNA, 172 bp, Glycine max
  Clone ID: PAT_MRT3847_3793C.1
gcctttctcagctgtggtatcaatacacattggatatgcagctatggatgtcctatccaaggctgcactgaacaaagggatgagcacttatgtgtttattgtatatcgccatgctgttgcattctttgctatggccccttcggcatgggttcttgacaacaaagtacatgcc

SEQ ID NO: 74115 - DNA, 577 bp, Glycine max
  Clone ID: PAT_MRT3847_37940C.1
gcaaaagaagatacaaattcattgagatagatctctcttctgcttatctcaaaacatcatgactgataaaaaaaatctcaacatttcatgaattacaaaggaactaagaaaattaaacgtatattttccatgtaaagtgttttcaaattttacaattacaaacagtttacattgtagcacttaggtaactgctgtttctagtggtttgaagaacttgacctccattgaaacaggctcctgattttctatcagaaaggtcactcaaaacggtaacaggatccatgtagattccaaagatatcaacgggtctgcgcaacttgtccacaactagcttcaaatactgagacttcagttttggaaaccgcaacagcctctgatatccaatggtggtgccatatacaactctcatccacacaccatctaggctcaaagcctcaagatgaaactctatcaccctctgtcccatgttaataggctcttgtaattgcaaaatattgaaggatactagttcttggagatctatgtacaatatccacttagtttggttctccccgggagcccaatatgtgtatatacc

SEQ ID NO: 74116 - DNA, 174 bp, Glycine max
  Clone ID: PAT_MRT3847_37941C.1
ctttattctctctatctctatatatgctgtgcattctggtggcatgacagattgagacacacttctaattagccgcctacttatctcaattcatctactttctcttcaattcttcaaaagggtcgactccaattcttcaaaacggtgtaactttgctggagtaaagatgggtgg

SEQ ID NO: 74117 - DNA, 522 bp, Glycine max
  Clone ID: PAT_MRT3847_37942C.1
actgatcataaggagatgatggccatgatgcttaacactttggtactttaaaaatgctcttcatgaaagaggaataattgtgttgcagctagttagcaccgaaattgacccgagaacgatggagccaaaactgagcaacccagttgaattggagtggttgaaatgctataaggtgggggctgagaggtccacatacaaagtagaatttgagatagattcagattttgggttcccggtagctattactgtgacaaacaaatacgacaaagagatctttttggaaggcttttccattgaaagtgttgtggatattgcctgcaattcttggattcaacctgagaaggttcatccagaggagagagttttctttagcaacaagcaggcatacttaccatgtcatacaccagcgggtctgaaaaagctaagaaaagaggaactgaagcagcttagaggtaatggaaaaggagtgagaaggggatgtgaaagagtgtatgactatgatgtctacaatgacttgggaaa

SEQ ID NO: 74118 - DNA, 164 bp, Glycine max
  Clone ID: PAT_MRT3847_37943C.1
cacatgaaaatactacttggaagaggggttttcgaaatttttggcccacacaattttttaattaaacaggtcccttgagtaccgtgggcaaagacaacaaaacaactcttaagccttggggatgggaatatgaagctttttggggccttgccctctgtttttta

SEQ ID NO: 74119 - DNA, 319 bp, Glycine max
  Clone ID: PAT_MRT3847_37944C.1
tatgggaggctgttcccctgcccgttccggcccgtacttcctgggccgacccatgcctcccctgctgcgagatgaccacagaagggggaggagtcttctgccgacatgggttagtatcgacgggtaggtggactggctcgacgtttttcacacctagagtccccagttggtggacctatcatgcttcggaccactcttcattcccctctaaagttcttgcttagattggttactacttgaaccttcagcacacaacaacatgtgccttctctgttgttgagaactctacacgcttcttctttctagcttgcataggtga

SEQ ID NO: 74120 - DNA, 315 bp, Glycine max
  Clone ID: PAT_MRT3847_37945C.1
ataagacaacaacagaaagcacgtctaacagccggaaactctgtcttttctgttcggtctttctccgatcgcatcactcccaacccccatcacgccttcccgaagaagaactcttttgaaggtcatcattctcggtgacaacattgtggagaagacagattcgatgaaccaggctgtcaataaacattttagttattaatgcagagcaaccattggagcggattgttctaccccagaagtgcaatttggaaataagcttttcaccttacacatttgggatacagcttgccaacaaagatttcaataccttggagt

SEQ ID NO: 74121 - DNA, 245 bp, Glycine max
  Clone ID: PAT_MRT3847_37946C.1
accaccctctgatcccacgctttttcagggtcaacaatcctggcagcaacaacatccacctcaaactcaacctcaacatttcaacccacagacccataactaccccaaccctcctccccctcccaatcaatttcctcatcaccataaccatcaatctcgccaacacaatgttcctcctcgtccatttccagaaaatggccgaaaccataatcagtggaacccccaacccacacacctcaaaatct

SEQ ID NO: 74122 - DNA, 296 bp, Glycine max
  Clone ID: PAT_MRT3847_37947C.1
aaaaagaaaccaaacccattctaaaagtatataaaaacctttaacagggccattgggttttaacaaaattgaccaaaaaaaagggtggatttctataaaaaacccaaccaaatctttttataaaggtcaggaccccactttttctaagaaaaataaaaagtgtgaaaccccccgcccccattttaaacagaaaagtagggcgaacaacttcgggctggggaaaataatgcccgtacttcgagggttgtaattattaaacaaaacccacgggtggggcccccctggggccataaaag

SEQ ID NO: 74123 - DNA, 409 bp, Glycine max
  Clone ID: PAT_MRT3847_37948C.1
gaaaaatggttccaaaattcggtggtggagtggatgatggaggaactgggcgtggaactaggcctatctgaacatcaacctccttttgaaactgaaaccaactttttgggagtcaccttctttcaacttgttatgttcaggattgtgtttcttcatttcggagtttagagtcatgaagtttcttggtcttgggtcttctataactgtgagatagatcatgtgtccaaccttctctgtggttcaaatggttgaaaagaaatgatcttgtaatagatgctactttggcttctggcaatggcaagtgagtttcaagttggaagttctttcagacgggtgatcgaataacagccccttgttgtaatcaaggagcagagaatgtgtgttaattggtttttactgttgaaaagca

SEQ ID NO: 74124 - DNA, 1001 bp, Glycine max
  Clone ID: PAT_MRT3847_37949C.1
attcgagctctgtacccggggatcctctagagtcgacctgcaggacacgtggatccttcagctttgctccatatcatatgaataaaacattccttagcctccacctaatgatggcttgtgcgttggattggtttgtttcttgacttgatattgaaacttgttgaccaagtgatttggctggagttccaccttttcagtttccattcttcatcgttgaattaagtatagaataacttgggaattggggtagttagttctccacaactttgttcaaacttgaaacttgagaagttaattacctgtgaaacagtttatttagaacatgttaaacatcctatatcaggaattcatgatcttgtttcttccttaaactttaacctaattttgttcatgccatcctcttcaattttgatctaactttcatagttttcatgtgtatgtgtttcaagattaaaaactgtatggtttattatcaagaaagataaattctgtgcctttatcttattgcatggtttcgtttttatcaaacatataggattatcgaccaggcttttgctcaaggagtccaagttgcagtttgcagcacttccaacgagaaggcggtatgcataatcagctatccaattccttaaatgaatcttttctgacataagggaaaattggctcactgatccttgtttcatagtagttggagtttcaattcctaatagttatagcctcatggttatgtattgacattactgtgtggtttttcaagaacgcaatccgggtaatttgagctgttaatgggtcaaacttcaaattattattaattattagattaattatcactgaatgaatcatattgcactggtgattggatccacatttatttgttatttcatcttcagacctaagttgtgagttgattttaggtctctgcaatagtatcattcttgctgggacctgagagagcagaaaaaatcaagatatttgcaggagacctggttccccgtaaaaag

SEQ ID NO: 74125 - DNA, 126 bp, Glycine max
  Clone ID: PAT_MRT3847_3794C.1
cccacgcgtccggtatggtcatatatgactgctataattctctaccataaccgggcgtgccgagagcattgaaagcacctgatgcaggtcacccaaatggaacaactggccacatgcaccacaact

SEQ ID NO: 74126 - DNA, 1046 bp, Glycine max
  Clone ID: PAT_MRT3847_37950C.1
ggttttgggctcaaggataacctttgttccatggaaatagccaacatctgcaactttgtagatgaaaccaacagggggagtttataacaatgcctgtagaggcttaccatgtggttctttttcagttgggactctagagtactatatttggtagcttaccatttttggactgtaaatgcgctgttgtgccatgtacatggtcataataggtaactttgaagataaagccagagggggttcttttcagcaatggccctggagatccgtctgctgttccttatgccgttgaaacagtgaagaatattatcggaaaggtgcctgtttttggaatttgcatgggccatcaattgctaggccaggctttaggaggtaaaaccttcaagatgaaatttggtcaccatggaggaaatcaccctgttcgtaaccttcgaagtggccatgttgaaattagtgcccagaaccacaactatgctgttgaccctgccacactgccggaaggagtggaggttactcatatcaatctaaatgatggaagttgtgctggtcttgctttccccgctcaacaacttatgtctcttcaataccaccctgaagcatcccctggacctcatgattctgactatgcttttagggagtttgtagagctaatgaagcaaggaaaaaacagaacaaaagaaagtctacaccaactatcagcagcacaggctttggatgcataagtggttgaagggagctgctcttgttcgttcggggcaaaaagaataatgcatctgctgaaaaattacgaagttatgagtccatttctatgattttgtagatgagtttattaaggttttctagggatctataagattaagattttctcatgttcatttcctttgcaagggtaagcacggccatgattgtcataaacctcaatgaggcctaatgtactactgctcatcgcagtcaacaccaaaattttggttgctggcatcaccaattttatgagagtaattactaatgattgtttcctgttaaaaaaaaaaaaaaaaaaaaaccccaaa

SEQ ID NO: 74127 - DNA, 740 bp, Glycine max
  unsure (1)..(740): unsure at all n locations
  Clone ID: PAT_MRT3847_37951C.1
gctgttccttatgccatcgaaactgtaaagaatatcatggaaaggtgcctgttttggaatttgcatgggtcatcaattgttaggcagggctttaggaggtaaaaccttcaagatgaaatttggtcaccatggaggaaatcatcctgttcgcaaccttcgaagtggccatgttgaaattagtgctcagaaccacaanctatgctgttgaccctgccacactgccggaaggagtggaggttactcatatcaatctaaatgatggaagttgtgctggtcttgctttccctgctcaacagcttatgtctcttcaataccatcctgaagcatcccctggacctcatgattctgactacatttttagggagtttatagagctaatgaagcaagggaaaaacagaacaaagggaaggctacaccaactatcaacagcacatgctttggatgcataagtagttgaaggaagctgctcgcgttcggggcaaaaagaataatgcatctgctgaaaaattacgaagttatgagtccattactatgattttgtagatgagtttattaaggtttcctagggatccataaagattatgattttctcatgctcgcgttcgggccatgattgtcataaacctcaatgaggtttaatgtacttattacttatcgctatcaacactaaattttggttgctggtatcaccaattgtaagagcaattaataatgaaaatggactgctaagggatatacac

SEQ ID NO: 74128 - DNA, 465 bp, Glycine max
  Clone ID: PAT_MRT3847_37952C.1
catacacattctaacatacaacttatttattgttctcatagtatacatagccttcttgtgggtgctacttaccaactcacactctatccatacctgttctttcaatctcaacatgtttaacccatttcaaccaaacattattctccaaaaagattctagtatttcatcctctctggttttacaactcaccaaaattggcagctacggcgtacctacactttaatctctcgatcgtaccctttacgcttctccaatccatattatagacagcgaatccttcattttttcttatcttttctacatcttttaaatttaacattttctcatctcacatattatatctatcttactgtcttgccttctttttggcacccttctgtttttactctaatttctactaatttattttttgtctttttaacattatcctaaaggactaattttttcaaatctttttattttttt

SEQ ID NO: 74129 - DNA, 146 bp, Glycine max
  Clone ID: PAT_MRT3847_37953C.1
tttttaacataattccttcacactgatcactcgtggcataaaaggatctctaactagataaaataagaggcaaacaaagaaacccattctactatgggtttctttgtttgcctctaactagataaaataagagctcgagccgaatt

SEQ ID NO: 74130 - DNA, 474 bp, Glycine max
  Clone ID: PAT_MRT3847_37954C.1
acggctgcgagaagacgacagaagggaagttgttttaactgtgttgggagttataaagtggtttggtagttggagggagagtgatatcaagattttggatttaaatctcccagtcccattaacataatatatttactactaatatttgtggataaaaaaaagttgcttaagtattattatttatcattgctcagtcaattatgtttctccttttttttaatctttagttatttatttttctataattaaaaaaaaaatctgactctatataaaacctatttagcactagtccaagaggaagtggaatatttggtgaggtacctagaatctccaatggaatcttgtaagtcgagctccataatgacatgcaaacaatcttaatgcaggaaattatattagagtgtgtgtgtgtgtacatggtgtcattaatgcttgcttatataatttcttcaatgctagggtggtgtactggtg

SEQ ID NO: 74131 - DNA, 117 bp, Glycine max
  unsure (1)..(117): unsure at all n locations
  Clone ID: PAT_MRT3847_37955C.1
ctcacttgttccgccatcgtttcattcnattttcttcactcacnnaccaangcnacacaaaagagaaaattacaagcaacgctctcccatcgttttcgtattttccacacaacatag

SEQ ID NO: 74132 - DNA, 356 bp, Glycine max
  Clone ID: PAT_MRT3847_37956C.1
ggctcgagcatatcaatgggttcttcttatattacaacatggtccgccaccatgaccatgggtggaaccgtgcttctgctaacggtctttgacgactgctactccctagacatggcgataatctcaatacaacagtgcccacgcgcgacaacgccggcacgtcgcgcaccgaagacgaacataagtacatgaactagctgtggctcgcgaagcacgggaaggagtgcaatgcgcccggcgagaaggataagcactgccagatctctaaggacatacctgccatgcattgacgaccacaactgctacataagagcgaacctacaaactccgactgaactcatgcggatgtctgacca

SEQ ID NO: 74133 - DNA, 513 bp, Glycine max
  Clone ID: PAT_MRT3847_37957C.1
tgcccaggtgcctgtgcaccaaaaaactgaaacaaaagttgcgggtttcagaaaaattttcgttcgatagccgtgccgtatctccagtcccggcaggcacagctatattctcactaccactaatcctcctcctcctcctcgctgcctcgtctccatcacggtttcgtccgcatccacatccgcaatcccgtctataacggtcgcagaaacccagatgtctgcctcaaccccagtccacgtccaaaatatagtctcactcacatcggtatccgaccacccgattacgccctcagagatggtgatttgcatcctaacaatttacaccataatgttcttgatcgtgttcgtggtagtctctgtcttgttcacctattcatcgttctctttgcgggcactgtatctgctgtcattacactcccaagcccaactataaccgctagacttatggtcagtctgtctgtcacactccttttgatatgtgcaaagattctcctacaagcgccccgagaacac

SEQ ID NO: 74134 - DNA, 507 bp, Glycine max
  unsure (1)..(507): unsure at all n locations
  Clone ID: PAT_MRT3847_37958C.1
nngggtttgggttttttttatttttttttnnntttttttttttttttttttttttttttttttttttcccccccacgaaaacaaattttttttaacaaaatccccaactacttttttcaactggaaaagttttccctttaagttttcctttttttttccaaaaggcgcgattgggataaaaatacttttttggggggggtttctttaacttggccctaacacccggaattgtttttcccataaaacaaaacctcgggggttcctttaatttaattggctagccccagaatgaaatttttccaaaaaagcattaaaatttttaggaaattccttttttttaaaaacttttttttcacttccccggccccgtttaatgtttgcccaacctttttttccaccaagggggctttttaaagaaccactttttccttttccccttttaggaaatccaggggggtttccaaaaattccttttaccccggggggggccccttttgtatcgatttt

SEQ ID NO: 74135 - DNA, 360 bp, Glycine max
  Clone ID: PAT_MRT3847_37959C.1
ctcgagccgatttggttcgaggggaaaattgactttcccccagggcactttccgaagtgttaagagaatgcctctttctatagggggaggagctggtgcaaagaatgctattctcatggaatatggccaaatgctgggtcttttccaatgtgggagaatattttcgtttggagatactcgtcgtttagaagtcttcttaagattgacttcttccctacattaaatgtacagcctctttcttcatagcatttgaaaatttggctgatgataccataaatttcgaggctttttcccacaagctggtgcactttgcaaagactcacgaaaaattgtatttgaatttttacacaaggaattttt

SEQ ID NO: 74136 - DNA, 350 bp, Glycine max
  Clone ID: PAT_MRT3847_3795C.1
ttttctttttcctttttgtgtgttttttttatataatttatttctgggttaaacttttctttctctcccttgcaaattcctccccctggaattagacggtttccgttgcccggaaaaaagaaagaaaccgattttgatatctttttgcccggctacgatggggaacacccacaacatcataaatccttagaagacccaccccccaagggggggaatggggataaggcgtttcttccgctttcttttcctccttggaacgctttttctgcctcaaacggggcggctgtgacccccacctcttctttttcgcccactattcttactccaccaccaccgtctctcccacctcc

SEQ ID NO: 74137 - DNA, 447 bp, Glycine max
  Clone ID: PAT_MRT3847_37960C.1
atgcccccgtacgtaagctcggaattcggctcgagtaaaaatcatgatgtgtttcttttaataagtagcatagttactcctatcaaatatactatttttaaaatcttgcatactgttttagacaagaagcaaaaaagtggaattggtgagttacctattctatgatgtatagggtatcattaaggtaaattaaattagattcgatgtaataatttgatatgatatgattgataaaaattggcgttactttagcatgcgatcaatgtgattagaggtttgatcctcatgtccacgcatatagaataacatttggtaggacttggagaaactaattccttaaatgcattttaatatttcgagggattaatttctgactctcaaccatagataccttgggttaaaaacagaaaatatgattggatccagtgtaaattagtggcatttcaa

SEQ ID NO: 74138 - DNA, 1138 bp, Glycine max
  Clone ID: PAT_MRT3847_37961C.1
atttaaagggctgacgagaaaatgagtgctggaggtaaaaaaagaaacactttgaaattcactaccacttgcgccgtagctgctggtagatctatgatcatagatgcttcatatgctggtgaaagggatcttcactatggagggaagattctcaagaggaagaatcagaagccactctatgaagccctgcaaaaaatcaaagaagagttgatgctgttgggctttatttctctgctactgacaataacacaaaatgggatcatcagaatttgtgttccagtgggttggactcaccatatgcttccttgcagtctaaaggatcatggaaaggaagaatcaacaaaaaccacatcacattttcagacttttttctctttctctgatatttctggcactgctaggcgccttttagctgagagtgagagtgagaatgaggatcaccaaccagcaacaggagaaaaacttggtccctggaagggcaaggttcctctattatctgtggaggcactgagatgtgctagtttaaaactcttttttacagtactaattaacgctgattccataaaaacaaaaaaaattaactctgattaacagatacgtgagtggaagcactgggaagactctattggcaatgacaataaaaatgaaacacaaccagttttggaaccaacagtgactcatgttcaccaacacgcttttatccagaatcgttttactggtcttggcaaagattctgctgttctgggttgggtgaaatcattcttcaagcaattttatggatctgtgaccaaattagattatgtgacattaaggcttgggttcattatgacccactgcaaaggaaatccaaagtttaatttccataaatacatgattcgtacccttgaagatgatttcaagaaagttgttggtataagctggtatctttggatctttgtggtcatctttatgttgctgaatgtccatggttggcacgcatatttctggatttctttcattcctctcattcttctacttgctgtgggtactaagttggagcatgtaataatccaactagctcatgaagtagctgagaagcattcggccatagaaggtgaattagttgttcaaccaagagatgaccacttctggtttaatc

SEQ ID NO: 74139 - DNA, 512 bp, Glycine max
  Clone ID: PAT_MRT3847_37962C.1
gcctaatcctggttgtttttttaactaatacaggaacttgaaatgattcacacgggctgactacccagacctgggggaggaaaacagcaaaaagatttatttatacaaaaataacattattgggatattggaatggccaaaaacatggtaattacattttaaaacatattccttaagggccaaaggggcaacccgggcaagggcagttggggccacacttgcacttcccatcatgctcaggggggggaacatccatgaaaaccggctgggggtaacccttctaaggctctacaataacaccataggggttccccttgctgggtggctttttagggagggatagaaaaacagcctttttttgaatcgggcaggctttacatgggatcggggggtacggggggcttaatatacccctatacagattaatcctttagcgaacaaattggggggttggaacccgaccctcctaggggtaaagattggcctgcacacctttgcctaaaaacggaccc

SEQ ID NO: 74140 - DNA, 1470 bp, Glycine max
  unsure (1)..(1470): unsure at all n locations
  Clone ID: PAT_MRT3847_37963C.1
gggctccgaggcgggtaagttttggcgctgaaagaaaaatggcggaagagtacgaggaaggtggtgaggttgaagaagagttctccgtttggaagaagaacactcctctattgtacgatttcttcatttctcaccctcttcaatggccttctctcaccgttcactggcttccctcctctccccaacctcactcccatccttccttcaatctccacaaacttcttctcgccactcacacttccgaaggcgaatcaaacttcctcatgctcgctgacgcatccctccccgtagacacctcacaacacatcgtcgccaccgatccaaacaaccccgttcttcccaaggtggagatttctcaaaggatttctgttgatggggaggtgaatcgagctcgatgcatgccgcagaaccctagtattgttggtgccaagacttgtaattccgaggtttatgtgtttgatttcaccaaggaacgtgggagtgcgtgtgaccctgatttgaggttaaggggtcatgataaagagggttacggtttgtcttggagcccttttaagaacgggtatcttttgagtggttcgcatgaccataaggtttgcttgtgggatgtgcctgctgctgcctctcaagataaggtgcttgatgcatttcatgtttatgagggtcatgagaatgtggttgaagatgtgtcctggaatttgaaggatgagaatatgtttgggtccggtggagatgactgcaaattgatcatttgggacttgcggacaaacaaaccccaacaatcagtcaaaccacatgaaaaggaggtgaactttctttctttcaatccatataatgaatggattttggctacagcatcttcagatacagatgttggcctctttgatacacggaagctggcagtgccgctacatattttaagtagccacacagatgaagttttccaggtagagtgggatcctaatcatgagactgtgttggcatcttctggtgctgacagacggctgatggtttgggaccttaacagagttggtggtgagcagatagagggagatggtgaaggtggccctcctgaactactattctctcacgggggtcacaaagggaaaatatcagatttttcatggaacagaaatcagccatgggttatctcaagtgtagctgaggacaattctttccatgtctggcaaatggctgagagcatttacaatgacggagatgatgacaacatgtggacggccgatgattaattaaccagacacatgatcaaaggcgatgatgctcttattaccattgctttattgttttaatggaatctttgaccatttggtgtcatgtgaatgtcttgtgatcattaacaactggaacagtgatggcaacatagtatctttgtcaaacatgaactcttttttatatgcagaattgatttctgaagcaaaaaaaaaaaaaaaaaaaaaaaaaaaaaaaggagng

SEQ ID NO: 74141 - DNA, 420 bp, Glycine max
  Clone ID: PAT_MRT3847_37964C.1
tctggcatcaaggccaaaggtgttcgtgcagaccttatcggctccatcatcacacactacgcctccaaatggctccctgacctctcggcaggtgacatggccgaaaggggtctaacccaattcgaggaatcgcccgaaagcgtgacagcttcatggatgaagaagagattcttcgtggaaaccttggtgggtgttctgcctcctgagaaggatgcaattccatgcaactttctccttcggcttctgagaacagccaacatggttggtgttgagggtacctacaggcaagagcttgagaagcggatttcgtggcagttggaccaggcttccttgaaggagttggtgattccctctttcagccacacttgcgggactctattggatgttgagttggtcattaagctggttaagaggtatgtg

SEQ ID NO: 74142 - DNA, 740 bp, Glycine max
  Clone ID: PAT_MRT3847_37965C.1
caatcaaaccacatgaaaaggaggtgactttcttttctttcaatccatataatgaatggattttggctacagcatcttcagatacaattgttggcctctttgatacacggaagctggcagtgccgctacatgttttaactagccacacagatgaagttttccaggtagagtgggatcctaatcatgagaatgtgttggcatcttctggtgctgacagacggctgatggtttgggaccttaacagagttggtgatgagcagatagaaggagatggtgaaggtggcccccctgaactactcttctctcatgggggtcacaaagggaaaatatcagatttttcatggaacagaaatcagccatgggttatcacaagcgtagctgaggacaattctttccatgtctggcaaatggcagagagcatttacaatgatggagatgatgacaacatgtggacggccaatgattaattaaacaaacacatgatcaaaggcgatggtgctcttactaccattgctttgttgttttaattttattgtaatctttgaccatttgatttataactacaatcgccttttggtttcatgtgaatgtcttgtgatcattagcggctggaacagtgatggcaacatagtatcgttgtcaaacatgaactctcttttatatgcagaaattgatctctgaagcgcatataaaaatcccccgatgataatccaactatgtccgtgcgcaacttgcttgag

SEQ ID NO: 74143 - DNA, 657 bp, Glycine max
  Clone ID: PAT_MRT3847_37966C.1
ctcgagccgattcggctcgaggtaacttctaatagatgaggccaaccaaagtagtaacgtagtagtagcaaccagcaacaatattcaatctcatacacagaaaaatgggtgctttggatcacatctctgagctctttgactgctcccacgccagctccaagctcaagaagaaacgcaaacaattccagacggtggaggtggaagtgaagatggactgcgaagggtgtgaaagaaaggtgaagaaatcggtggaaggggtgacagaagtggaggtggatcgacagggtagcaaggtgagtgtttcggggtacgtggaaccctcaaaggtggtttcacgcatcgctcaccgcaccggccttacgtgaaatcgttatgtgaatctgatgtgaacaccacaccacaccacacctcatcctgtcttattggttagtttctctttccttttgtttttctttttcttgtatcatatcgtagtagcaaaaaaaaaaaaaacaacataaaagtaaaataggtcacctgttcatgaggggaacgcttttggcaatggacatgtatccttaatagtgatgttttatttatttataatgtcatgttgggaaatttgatatctttgtattgtaattaatgattattttatgaatccatatattacaaatt

SEQ ID NO: 74144 - DNA, 618 bp, Glycine max
  Clone ID: PAT_MRT3847_37967C.1
tttataattttaataaacaatgagttaaaaagaattgttttaaagtaagtaaactacatgcaggcaattattaagaattgcattaattttagataatagtaatgagcaataataaaattaaaatggagaagtttataattaaaaagtttttaattaagaaaaatgggaacatcgtactgcaacgtagcataatagccgctattgtagaccttattttaaaaaacaatgagttaaaaataattgttttaaagaaagtaaactacatgtaggaaattattaagaattgccttaattttagataatagtaagaagaaataataaaattaaaatggagaagtttgtaattaaaaagtttataattaagaaaaatgggaatatcgtactgctgcgtaacataatagccgttattgtagaccttattttatataataaataatagaaaaatatttcttcgtcaagttaatttcaggacctctgcatgaataatgccctgctagcatagtaaagtttttactactagcacaataacgttttataatatatagttctgtaagattactccaaagctataggaatgtgttctgacgttagcatattacctaccaggccatgtacgat

SEQ ID NO: 74145 - DNA, 297 bp, Glycine max
  unsure (1)..(297): unsure at all n locations
  Clone ID: PAT_MRT3847_37968C.1
ggctcgagcgnctcgagctctanccttatcttttctttctgatcaagctcaatcaggaacccaggtttttcaacatcgaagaagtatatccatgataatgcaagtgacttttgttaataacccttcatgattgcttgaagtcattcgtgcaccctttacacattgtatgcatgggatagaaaactttatgatgaagtaaatgctgtttaattcatcaagaacgattatgaccgaaaatgtgacctgctaaagcatcaatttacaaaatttatatcaataaactgatttgacaaaacc

SEQ ID NO: 74146 - DNA, 520 bp, Glycine max
  Clone ID: PAT_MRT3847_37969C.1
tgcattcggaatggcgggctcgagctcgagccgaatcggctcgagcgcaatttcggcttctgtgtcaacaacggagccacacactcaaccttacagaaattccgtcaaacttggaagctccaaaaccttctcctccgcaagaaaagcagccacactcgaagttcggaacgcttctgatttggcctcagctctcgcataatagggtaggagacgcgttgacggtcaaagacctcaatgccgctttgtatcactttaaaaagtcaaacaaattcaaccatatctctcagctattttcgtggatgcaagagaacaacaagcttgatgccttgtcttattcccattacataaggttcatggcaagtcataatcttgacgctgctaagatgctacaactctaccacagcattcaaaatcagtcagccaagataaatgtgcttgtatgtaattctggtctcagatgtgtaatcaagaaagccaagttcaattccgccgtaaatctctttcagcagatgaaactaga

SEQ ID NO: 74147 - DNA, 289 bp, Glycine max
  unsure (1)..(289): unsure at all n locations
  Clone ID: PAT_MRT3847_3796C.1
gtaagataggaattaggatagaaatagngaagggtaggatagagaaagttaattaaaatagtttttaggaagaagaaggaagaggcaagnanagancgggaagcgtcaatgtcagttgagataattgatgtaagatttagatataaagaaagagagtttagaaaaattgaaaagtaaaagtttcaggataaaggaagagaatagagaaaaagaaaaaggtgttgttcattgttgtagttgtatgtagatgtagcaacaggaagatggttggcaagttggtagtggtgag

SEQ ID NO: 74148 - DNA, 299 bp, Glycine max
  Clone ID: PAT_MRT3847_37970C.1
ggaaatttatagtgtatgttataactatttgaaaatagatggttcacctgtgaaaggtgtattactgacctggaagtcgaagtccatctttctgatttgtagtttctcaagaattattattgttatccctgttcctagttcctacacctagttgattatcttgaataatatcttaaatatattacttatatttataatgtttattttaatatattaactatttttttctatcatttgacattcttaaatttttttttagatactataccttatgtttttatttataaatatatatattt

SEQ ID NO: 74149 - DNA, 285 bp, Glycine max
  Clone ID: PAT_MRT3847_37971C.1
cccacgcgttcgcccacgcgttcgatgatcttgaactttgtgttcgggggagtagacgactaggtgaactgctttaaggaacattatgctgaaggacgtcgagacacaacgctctgatagaatgtgacagtgggacataagtttttatattagtggcatgatgttagtctattttattttatttcactgatttaataaaatatctctgtaaattttgatggccttaattttgagccaaatatgttttaataagttttaattgataatagtgaagtgaatgtgaac

SEQ ID NO: 74150 - DNA, 573 bp, Glycine max
  unsure (1)..(573): unsure at all n locations
  Clone ID: PAT_MRT3847_37972C.1
aaaccaaaaaggcgcaaaagcgcggcaccgcggggaggaccanggaanacagaaccggagaacgcaacancacanccgcaaaggacancaagaacgggggggggggcacctgtggctggtgtacgccgncgnnacgctcnccggcgacccgggccgccgggagggcgccaccacccacgnccacaaagacgccggcagcaaccccacggggaacnaccccgngaaanncaccgncaacgaancgcnggccaaggagaancgnngggcncnngagancaagcncgncnccgaccgcacccncggcgacaccgggancggcaccgnccaggggccncncagggaacccagggacaancccggcgacgacggnnccnnccgccaagncagnnaccaggggaggaaacagncagggaaanccaaggganccnggaanngcnccnacaaaggaggcgaacaggggcccgccccggccccnaaagcacccaagacgggacaagagccggggaaggcnnanccnccgaccggggcggganccagnnncgagccnngagggacaccacanccncccccgcc

SEQ ID NO: 74151 - DNA, 194 bp, Glycine max
  Clone ID: PAT_MRT3847_37973C.1
tccattcaacattatattttttatatactctcacctaaattcaatacagtcacctttatactacaactatatcactcacaaaaccctacacattcccaacttaatcatccttcatcacatccccctatcatcatctaccataatatccaacactcccttaccaatcatccttccctacactttcacaacctcaa

SEQ ID NO: 74152 - DNA, 423 bp, Glycine max
  Clone ID: PAT_MRT3847_37974C.1
cccgtcccgacccgcgcgtcccgttcatctttattccactgaatacaacatgcacatattaacgtataccctatataatctcgatcgtcatctcatctatgacgggtgaccatatcccatgtgaatctattcattcaaatacctatccttatacatatatctcaataatctcaacattcctcattgtgaactacaaaaactaccctacatccatgcctcaccatggctgatcctaagctacaaagaccactcaattcatgataacacccttctgcgtgactctattataaattatctcgtccaccatggaatcaatgaccattcggaccaaaccgcttagatcttttcgtcatccattgcacgattacaaacatgaccattactttccaactaactgccatttcattaatttccctttcattt

SEQ ID NO: 74153 - DNA, 239 bp, Glycine max
  Clone ID: PAT_MRT3847_37975C.1
gggagtggctatggaggagatgttgtttatggatatcaaaggcatcatccaatgcaagcacaatacaaacagattgattatactgatggatcgtggtgacaaatcaaaaccatttgttctaagatgtaataaaaaatgttgaagatgtaaagcttgtctgtgttgtaataaaatgtaagtatgtaacatttgaatttgaagatgtgcaatgaagaaaatttcttgcttggttttctgcc

SEQ ID NO: 74154 - DNA, 192 bp, Glycine max
  Clone ID: PAT_MRT3847_37976C.1
gcacgaggtcaaactaccctgtaggggattgcttgcagctcaaccgaaaatctttatatatttttttttgtttgtgtaccgtcttccttactttgattatggcttgtttgtcgtgtcttgtcctgtattattggttcaagagtgtaccctattcttttcttcccgttcatgatgatgagaagaatcaatagc

SEQ ID NO: 74155 - DNA, 297 bp, Glycine max
  Clone ID: PAT_MRT3847_37977C.1
ttacaacaaggcatttaaatacacattaaaggcagcagctgacatttacattggggggggggggggggggccactaattaaaaaaaattcaatgaaacttacacttgataaggcaccttttatctcccctataaaacaaaatttaaaaactaggcacattgcttataaatagaccaaaaaaattctactttcctagtttaaaaatctgtctgtctaatgctccatgctaaaaatatgtctataaccatcatcatcctttttcattatctgaaaaggtggacttcttctaaaggtttg

SEQ ID NO: 74156 - DNA, 239 bp, Glycine max
  Clone ID: PAT_MRT3847_37978C.1
acaatggcatatttgtgacacatagtcattttattactctcaccatatctctcaaaacgagtggaattatttcaccttaattcattaaaacaaaaaacaatatccaaaacatataaaaaacaaaaaaaaccataaaaaaaaaaaataaaaaaataaataacaaaaaaatcatcaaagcaacaaaaaaaacaacttcatattctcaaaaaggccccccttctttaaataaacaaccctac

SEQ ID NO: 74157 - DNA, 288 bp, Glycine max
  Clone ID: PAT_MRT3847_37979C.1
ctgatcgcgagggccgacctttttttttttttttgtattgcgctatatttgtgaactagtgtggatgtggaatatgaacatcctagagaggcaacaatcataaaatcatccctgcctcgaaaaaaaaaataaaaaataaataagaataaaactaaactaaaaaaaaataaatagcacaagaataaaaagaacaaatcacttatttctagcattgaaaacaccacatattgcatgcaggtctactgatactgaaaaaccattagaatcctaccctaacttaaggatatt

SEQ ID NO: 74158 - DNA, 396 bp, Glycine max
  Clone ID: PAT_MRT3847_3797C.1
cgggtcgacgggcgtactactcagtggccgcttttctgtttttttttttttttttttttttggacaaaacataaatacgatattgtctgcgtaaagaaagggatcatccaattatattgatacaaactataccagattgcgacaagaaatcttttaataaaactaaaagctgtacacgagattaacacctcttaactaaacagtcgaatttagaattacaaataaagaactctcttctgtaaactattcacgatgtgaatagacaaccaatttacggagggagctgggaaatatttggtggaagcgggaattatgttaataaggaaatgaccataccttctacaacagatgatcaaaatcctcaaatcctacataaatgcaattttcattccatta

SEQ ID NO: 74159 - DNA, 727 bp, Glycine max
  unsure (1)..(727): unsure at all n locations
  Clone ID: PAT_MRT3847_37980C.1
ctggctcaaagcagacaaccagcgcccttttagctcggcactgcatccgcatctcacctaccgctctcgatccagatccagatcacccctgccttcctcaagctcaatacccatccgtaatatgtcgtccgaggctgcaccggagatcatcgctcgcacgcgtgccgccgcgagcggacagactggcgagtccgtcgagccgaggcagacgctgcccacggaggacatggagcccgacccatccaagagcatcccgttgccgccgaaccgtcagaagctcatcgacgacgtgatcgccttgtactcgtgtcaaccgaccgtcgagcgcgtggcacggtacgcccctgcgtgcgtgtacgacgatcagttcgtctacgccaacgaccggtataagatggccgggcagtggtttgggttgccgaaactcttcccggcgtccgagaacctcggctacgagatcgtccgtaacgacgacaccttgatccagttcaagaacaagcagcgctggtcgttccacctcatcccgaagaaggcgacgatcaatgccctggtcagcatcgtcctggacccagcgacgaaagactcgacttcccgctcatcctgtaccacaaggaccaggcgaacgagaaggactactcgcacgagggcttncnggttcaagttcaagaagacgcaggcagacctcgtctcgagctttatgagctccaagggagtcaagtggttcaag

SEQ ID NO: 74160 - DNA, 356 bp, Glycine max
  Clone ID: PAT_MRT3847_37981C.1
cgctcgtaagctgacttaagcggcccttttttttatatttttttttttttaacaaaacagacaggctatttcattgtctaagcacaaaacaatcaccccgttagacttttagaaccatactaattttgcttcattaccaaagacgaactgtgcttctgctaggattaagcttattgcccatgccaaactctggaaagacaattctcggacatggccggtgagttgctagtacaatgaccaggtggtgcctacaaagtaggaagatctcaaggaatttacaccaacaccaaaaaactctattggttacaagaggattgggatgtcacagccccttttgatctgcaaaaaacttaggt

SEQ ID NO: 74161 - DNA, 157 bp, Glycine max
  Clone ID: PAT_MRT3847_37982C.1
cgacctacgcacacgagaacatgcctctcgcaaaggatctccttcatccctctccagaagaggagaagaggaaacacaagaagaaacgcctggtgcagagccccaattgccacttcatggatgtgaaatgcccaggatgctataaaatcaccacggt

SEQ ID NO: 74162 - DNA, 470 bp, Glycine max
  unsure (1)..(470): unsure at all n locations
  Clone ID: PAT_MRT3847_37983C.1
agccgaaggaaggcaccggacaaccnnnncanagggaaacaaaaggacacagctcaggagcagaagcaagaaggcccatccaagaaagaccagagaagtccgaaaacagaaaccaaaagaacagcgaggaagaaagcccaaaattctaaaaataggcttgggtggagggagtggnacaacacaaacaaaaggggcgggggggaaaaaaaacccccggcgggggggggaggggggagaaaaatgggggctagcaggcgaggaaactgaggcactgcgccaggcgaacggagggaaatgcgacgatacggacgaagccggggagggacgcagacgcagcccctagaagccccggcaacacgggggaagcggaagggccgccaaacataggcagggagcaaggggccaggagagcccatggggggacccgggagaccgagggggggaaccgaacacaaaaccgggcgccaacc

SEQ ID NO: 74163 - DNA, 265 bp, Glycine max
  Clone ID: PAT_MRT3847_37984C.1
cacacacgcttccttaaaaaacaaaacaactttccctttttttcttcattcctagtacgtttattttccccatgtcggggattcacagattaagttttgcggttgcattctgaaaaaatataacagaggaactcgtgttaatcaatagaaatagaagatacaataataatttgtagtgatggtacagaaaaacgtattgttatcggcgttgagtgttggggtgggagtaggtgtgggaattggtttggctggaaaaggcgttacg

SEQ ID NO: 74164 - DNA, 374 bp, Glycine max
  Clone ID: PAT_MRT3847_37985C.1
gtccacgactcgtgagtgggacgtcttgtgttttggaaggatgagaaaaaaaggatggtcatagaatcatatgtgatgcggaatcctatgaaaagactctaaatacttactccctttgtgaccctactgcggagatatagaatcataacactggaagcttgctaaggagagcttatgtcactttacaagagcgcaatgaacatgtaacatggatcctactacggggagcaaacattcgatggattgtgtatacagatattgcttgcttgttattagctataactaaggcgtggctatacattggctttgtttgaagaaaaaaatcaacaccttcaagagaagttataagtttctctctaaaaaaataaaagggc

SEQ ID NO: 74165 - DNA, 357 bp, Glycine max
  unsure (1)..(357): unsure at all n locations
  Clone ID: PAT_MRT3847_37986C.1
ggggaagaacccacataaaacacatagggggggaacatataaagccaaggttgttactttaactgccacatcccccacccccaagggactttttataaaaggggggggggaaaagattttttttaaagatcccccaattctgggttttgttaaacatggggggggccctcacaaaatatataaatttnaaacacaatacctgtgacctgggaaggaaaataaaatactgggcgcccataacaaaaacaagaaggggaagggtttttggaccattttctcttaaaatgggggctgggaaatggaaatgaccccagagtttccggggtttaatttctgggcccgcgcctgggaatgcta

SEQ ID NO: 74166 - DNA, 519 bp, Glycine max
  Clone ID: PAT_MRT3847_37987C.1
ggtttttttaataaaggaaataatgattttcaataggcaagtgagtctgagattacagatctatatttatagatagatttacaataacaaaatcctaactaactttgtaattgtaaactgacatctaaccactatggttaaatctaactagacagttgcagttgaataactgcaagttagtgtattactctaataataaggatccaagtgtggtagacgaagtcactagctctggcagtagcaagagtgaattccaatgagcaacaagacctgcatacacatgcataaacactccaatgccaccattgccaacgccaaagaatgtaagagttgagtaatgaggttagcatctatatttttagcctaggcatgcatgaaatatcttatccaagttataaatggagaaaagttaattatagaccattggtctcgggagaagcccaatatatatctccttaacattcattttctcgtaaaaaaaatctaaattaattcaccatgtaacaatacataaagatt

SEQ ID NO: 74167 - DNA, 622 bp, Glycine max
  Clone ID: PAT_MRT3847_37988C.1
cccacgcgtccgcaggaagccagctggattcaaacaagaaagcaatgtcgattcaggtaatatggtgcttgtaatctctcacagcatctcgttttatttttctccgcttaagttgaatttctgacacggtttcttgtatagaataatgaacttcgataattaatattgcaataaatgatcaatttcgtcttgatgttttaccttctctactagatggatatttaatacttgggacttgggaggggactacacgggagaaagtaatacttaggggtccaaattgattgtttattccattattttgggtggagattgctgtatagatttgctaataaaggctgcatttctgttacggctaaaagagttctctgtgtagtgttttccattcatcctttgggactagggctgtttcattttttctatttttcttcatttctggaatatcttttgagtttatgttccctgttcatggaaaatgtggtatagtgttaatatgattcgtcagacatacgtcaaaagtggtcgccaattcttatttatcacctagttatcggcttttattttctgacttaaatatctcattacataaaactttttctgaactttaaatatctcagaatat

SEQ ID NO: 74168 - DNA, 193 bp, Glycine max
  Clone ID: PAT_MRT3847_37989C.1
tggcgctcgtggtttaggcatttataatttttttgggctatacaaaactaatttcatgcattattaatctcaatcgagacttctttattatccttgggatacttaacgagacttaatgggctgtaggaaactcaaaatcataggctgcaaccatatttttatttcattgggatcaaccatcatccaccacaag

SEQ ID NO: 74169 - DNA, 220 bp, Glycine max
  Clone ID: PAT_MRT3847_3798C.1
aaccaaaacgaacgttttaaaaataaataaaggcctcatggcccgggctttaacctaaaaatcaatttctccagtaaagcaggtactacctggtccaaaacctcaaaacagattcggatttggaaggccttaaccggtttaccctattaccgcccattccccaaaactttgaccacgccttgggtttagccactaaacaaagggtttccttccgaactcc

SEQ ID NO: 74170 - DNA, 262 bp, Glycine max
  Clone ID: PAT_MRT3847_37990C.1
agaacacccgctgaacttaagatattactaagcggaggaaaagaaatcaacgaagattgcctcagtagcggcgagtgaagcggcaatagctcaagtttagaatcggaggtcgtctcggtcttcgaattgtaatctaaagtgagtaacaaaaggggatttggaagcataagttccttggaacaggacatcatagagggtgaaaatcccgtatgtagcttccattgaaccgaatgttatttatctaagagtcgggtgtttggga

SEQ ID NO: 74171 - DNA, 680 bp, Glycine max
  Clone ID: PAT_MRT3847_37991C.1
aatacacaaaaatacagaagttgcagatgaaagaaaaaaaaaattttttgcaaatgaaagaaacatggatcaaactaatatacaagttccttcaatattctacaagagacattcaataatgttcaaagttctcttcaaaactaatcatttatgacacagctgaaacttggcaaatcaatgtttattattctcagccgcattctcttctttcccaagtgcaaccactactttcttcaagatggattcggttggttgatgagaattctcaacagcctttgagattgcttgccatttctctccatgttttggttcagcagcaatacatctcttcagtacatccttctggttctcctcagttccatgctgcagttcaaatttgtatagcaatgcccaaaaatccccaatatcaggcgctagtgtcacagccctactcaaccaagtcctggctttgtccaccttcctatcaagccaaaataatttggccacagcagcaataacatggggatcatggtcacatttcttgatggcatccgcgctcttggttttacgttggggacgaggaaccatctcaatcgatgctgcccacagaataccactgttaggacactcctgcaatgcttttgccatcaaaatatcagcttctttcttatatccatgcttcaattccgccggacgcgtgg

SEQ ID NO: 74172 - DNA, 430 bp, Glycine max
  Clone ID: PAT_MRT3847_37992C.1
cacacacaaacgttcaggatcacaccttttcctgcaactatgggttgcaaatcttaattggatcatgcatcctacatccattattcatcatgtacgctcttcaataataaaactgctgaatagctcagacggacaggcttgctactggtatgaggcagtggagctctaacacaagacaatctagcacattatccaggactactgcaccaacagcaacatgcttctgtcgtacactacgagcaatacactgtggaaggttattacttactgcacgaatcacatttaggccgatgctcccgatgacagaccctacgcggacgatctctatgcctgggactctgaattcatcaaggtcgaccatgctcacgctcttggatctcatcctggctgctaactacttgaacactaagatcctagctgaccttacatg

SEQ ID NO: 74173 - DNA, 316 bp, Glycine max
  unsure (1)..(316): unsure at all n locations
  Clone ID: PAT_MRT3847_37993C.1
ggaggnggcacngnggcagaaggcnnaggagngnaaaacagagacgcggaaggaagacgangcnagcggccgagaccangaanangggcgacggcgagagcancaagggncacgccaaggnaancgaggangagggcccncgnggaaaacacgcgcgagacgaccaccancngaacagggacngccaacagagnaccgacgacggcggcaaaaggaagcacaagacagaagacaggaacggcacacgcaaaaccgccgccgccaaccgcaccgcccacagccacgaagagaacnagaacaccggcgncaccaaggg

SEQ ID NO: 74174 - DNA, 386 bp, Glycine max
  Clone ID: PAT_MRT3847_37994C.1
ggagaatgttttgccccagaaaaaagttttattgatacagaacatgaagaagagcacactacgactacgatgactattaccatatttgagggggcgtgtgatcgggtccttacgtgatgatctgaggctgatggtgtttcttttctttcctccgacttcccaagatgatcgcttctatgttcatcaagtgcttacctgttggggatggtgctgtgggcaaaacctgcttgcttatttcctacactatgcacactttcctgctcgattatgggccgactgtctttgacaatttcagtgctcatgtggtgagtcatatgggagcatcgtgaatctgggtttgtggtatactggtggacactatgattacgactgattaggacctttgt

SEQ ID NO: 74175 - DNA, 629 bp, Glycine max
  Clone ID: PAT_MRT3847_37995C.1
ggccgtgatcatttttctgagttcctatcgtatttcatcgtggtatatttcaagtttgcacgaagcaatcatgggtacggtacctctcatgagcaccgaggtggttctcaagtcatgcaaggcgcgtggctcaaacctccgtgttcattttaagaacacccgggaggcggccaagaccatcagaaaaatgagcctgaggagggcagttaggtaccttaaaaatgttaccgagaagaaggaatgtgttcctttccgtcgttttaacggaggtgttggcagatgtgctcaggccaaggcctggaaaactacccaaggtagatggcccaagaaatctgccgagttcctgatccagcttctcaagaatgctgaatctaatgccgactacaagggtctggatgttgacaggctggttattgaacacattcaggtcaaccgtgccccttgccttcgcaggaggacctaccgtgctcacggtcgtatcaacccttacatgagctcgccctgccacattgaggtcatccttaccgagaaggaggatgttgtctccaaggccaccgatgatgagcctgcaaagtagaaggtctcctaagacaaagttggctaagcagaaggagaagatgatgcgcgaa

SEQ ID NO: 74176 - DNA, 211 bp, Glycine max
  Clone ID: PAT_MRT3847_37996C.1
gtgctaattagagcttgaaatgggtttttgctgtatttcaatattattaatttcttttgttttttctttcttttttctgtacacaaacaatatcttaagatagcacagtgtgatatttgacggataatgatggtatttaagtatgtgataattgtgattaaaggtttaaaaaaaaaaaaaaaaaaaaaaaaaaaaaaaaaaaaaaaaaaaa

SEQ ID NO: 74177 - DNA, 486 bp, Glycine max
  Clone ID: PAT_MRT3847_37997C.1
aacattaagtttcttatgttttgttggagtactataaggtctattggcaacaagctagcaacagaggagaggaatcagaattcagaactgaagcagacatggccgaaggaagaaatgaagccaaagacagaaccatggaagcgccttcttctcacaacaaattgtctcgtactcaccatcggcacctccggtgggcccctcgtgatgcgtctctacttcctccatcgtcgccacctcgtctgactctctagcttcctcgaaaccgtcggcttcccctcaaaattttccttttttccctttttctttaattctggcttgcggtgatgtgcatgtaggccactatcgtccccaatatgtctccacaaaatgaagtcgtcatccccgttttggtcagtcgtacccaataagtccacgacatttcctggctgtcttctggcatacccatccccccttctgtcgtcttccgcagccgtctcgagccgaatt

SEQ ID NO: 74178 - DNA, 1267 bp, Glycine max
  Clone ID: PAT_MRT3847_37998C.1
atggttatggcggtcccttgtatgcaggaactggttgctttcacaagagagagtctctttgtgggatgaaattcagtgatcaatattgcaatgactggaatagtgaagatgatcagtttaaagaagcaaacctgcaagaactagaacaacaatcaaaggttcttgcaagctgcaactatgaggaaaacacactatggggaaaagagatgggtttaaaatatgggtgtccagtggaggatgtgataacaggattgtctatacagtgccaagggtggaaatcagtgtactacaacccaccaaggaaggctttcttaggtttagctccaactaccttgcctcaaacacttgttcagcacaagagatggtctgaaggagacttgcaaattttgctttctaaatacagccctgcatggtatggttttggaaggatcaattttgggctccaaatgggatatagtgtttattgcttatgggcacctaattgtttagcaacactatactattctatcatcccttcactgtacctccttaaaggcattcccttgtttcccaagatatcaagtccatggttcataccttttgcatatgtcattgttggggaaactacttatagtttattggagtttttcttctgtgggggcacatttcaaggttggtggaatgaccaacgaatatggctatacaaaagaacaagctcttacctatttgcctgcattgacaccattttgaagctttttgggttctcagaatcaacttttacaatcacaactaaggttactgaagaagatgcttctaaacgccatgagaaagaaataatggagtttggaacctcctctccaatgctcactgtattagccactcttgcattgctcaatttattttgttttcttagtgtattgaaggatgcaatcctaggtgaaggtgacattggagcttatgagacaatggggttgcaagttctattgtgtggttttcttgttttcatcaatttgcctatataccaaggacttttcttaaggaaggacaatggaagattgcctagctctattgccatcaaatcaatagtatttgctctaggagtattcatatccttcatctttacatgaccacacaataaagtgtgtttattagcccattatttagttttgcccttgcctgcttcagagttttgtgacaagaaattcttaaggtaaaacattagtttaaaattttcagaatggaactcgaatccatattgaatataattaattatgtagggcatcaattt

SEQ ID NO: 74179 - DNA, 428 bp, Glycine max
  Clone ID: PAT_MRT3847_37999C.1
ctaatccccagtaattcggctcgaggggagctgatcatgtatatactgatcatcaagctgagttagcgtcagttgtgctgaattttataaaggaaacattgaaactggacaagcttaatgctagttaggtccttgatggaatctgcttcatgatgcaatattgcaacttggtaccttagagaactttgctcgtgctggagagagtcgtctttgattttattagagagaaccatttgtgctttgtggctgcaatatctatatcatatgataaataaggttggggacttggtgcctcctagttgtgtcctacgtttttaaagaatgaaaacattagcgtttgtttagtggatggactttgtagaatgatcctactcctacggtcgtaattagtcatgatatttttctttattatattaaaaaaaacaaaa

SEQ ID NO: 74180 - DNA, 471 bp, Glycine max
  Clone ID: PAT_MRT3847_3799C.1
aggaaggtttcccgtcatcactgtatgacgtcctccttctttggggggggggggggggggggggggggggggggggggggatggtttagcggaaacccatagatgacgaagaggacaatgatacaagccgcaggttaatttagctcggaaaaaaatagggcccgcggccagtgtaggtaagaacgttgaaaggatataaataagctgacgtccgaagctattgggaaaaagagaaccgaaggcgtggtgctcgtggtgttgtacgttgtactagtgttaacgccaaatcgcaagcacggtgggtggtccttaatagacaataacgcagcaacctgggtgtgttatacgaaagttttgtatccccgtttgtgcaatgacatatgtaatggcaatggtgcgcaacggctgaaagcgcaagccacaaaagttacagcgtagaaacaccggttgttagcccccgaagggggtggc

SEQ ID NO: 74181 - DNA, 213 bp, Glycine max
  unsure (1)..(213): unsure at all n locations
  Clone ID: PAT_MRT3847_379C.1
tctcgggttttttttttttgttttttttttaaatgcaaaatgttgattagtaaattttttaacctggaataccctttgagaagtgagactgggggaaagatccatgcctttnaagtttgaaccctcacaacagtaattgtgatccaattacgaacgaaatgttcggtggctatacggaaaacaatagttcaaaggacatggggtgatgaataa

SEQ ID NO: 74182 - DNA, 261 bp, Glycine max
  Clone ID: PAT_MRT3847_37C.1
ggctcgagcgcatacactgcttgcttcaaaaagattgcttgacccaagtaacgatctctggctattcgatccaatgaacctaagcctgttcctacgaagggcctgagttgcttcaactacaacccatcatccggtggcgagacgccgggataataattgttcaaccctcacatggatggcgcatgcaaaccatctacaacaaccgagaaggggatggattcagctgtcaactcaaccccaggaaacttttactattcaaag

SEQ ID NO: 74183 - DNA, 794 bp, Glycine max
  Clone ID: PAT_MRT3847_38000C.1
attcggcttcgcaaggtatgggacttgagtctcacattgaaagtatgggattctaactataatgactagcttttgtggttcaaggttcttattataatctttgaattttatttctggtttgtattttgagaaattctgttccttttggatggatttgttccggataacctggaattatcccaacaagcactctggctagtgaccatcatcgtagtagtaacgatgaataaagaggaaaattgggcttatggagccttctaattatggtctaacacttgggtattctaggcgctatagattgacagttacgttttgtcttgataatgaaaaaatatttcattttggaatttggacatccaataccaacgtgataacactgtgattctgtacttatataaacatatatttggatcacaggatgaatttagttgggttgatgaattggaaagtcttttgtagttctgtcaaaataaaagtaacccctctggattttcaaagcttttatgttgtttgcatgtgtgtgtgtgtgtgtgtgtttcataaaaaatgactcaccaaatatgcactttatttcattatagagcagaagtcaaaaggcggtatatagtttaactctctaagcgttgattactgcactggcttctactaaactgataccaccagctgagttcattgttgtattcttttactgtttctttgtgagtagtcaatctgctgtgacctgtccggttgtggctagtgccatcagtgttaggatctcggaacctaagctacctgtgctttcaggagtatac

SEQ ID NO: 74184 - DNA, 221 bp, Glycine max
  Clone ID: PAT_MRT3847_38001C.1
gccgtctctagccggccgggccggttagaattgcgcttgagagattatttgtgtaataatgatatatgtgaaatcataaattagcccgtaaaattctcagtgagaaattaagtaattaaccataatcgtaatgtttgcaacgccctattatctttcactagcatgctctggttctattccaccaagtaacaaaccataacaaaacttgatgtaacaattaa

SEQ ID NO: 74185 - DNA, 295 bp, Glycine max
  Clone ID: PAT_MRT3847_38002C.1
gggtattttcacatttgaggatgaaaccacctgccctgtggctcctgctaccctttacaaagctgtagttacagatgccgacaacgtcatgccaaaggctggcgaagccttcatgagtgtggaaaaccttgaagggaacggtatccctagaaccatcaagaagatcactttcgttaaaaatagagaaagcgattttatattgctcaaaatagaatcagttgacgacacggacttggaatacggctgtaacataattagtaaagtagaattgccagacgcagtatagaagatcaca

SEQ ID NO: 74186 - DNA, 300 bp, Glycine max
  Clone ID: PAT_MRT3847_38003C.1
ggcttgagtaatcgactttaaacaatggcagatagagtctcactttgtaaaaagctccatcttgtgaaccagacgttggggatgaaggtctggctcgagaccacaacacttgccatgacgattgctgcgaggagactcaacgaatttcataatgacaactctcatttgatggataatccattggagacaatgttcaacagaaaattcactgtgaactttaattgggatggtcaaggggccctacctgaggaggttatgattagcggtttgagtagggtactgcatgacgatttgcatcaa

SEQ ID NO: 74187 - DNA, 981 bp, Glycine max
  Clone ID: PAT_MRT3847_38004C.1
gtaagctcggaattcggctcggcggcaaataagttctcagttatcagcccttcctattgtgttcctaactctcttaacctacaaattaacacagagaaaggtgttacttacaacgtaaagggtaaccgtgtattttacataaaagatactttgttcacatttcacggtcgtcgcgtgttatgtgatgataaaggaagtcccatcgtcactctatacaagaagaatgtgacattgcacgggcaatgcaaagttttcaggggtaatagcaatggtccctctgagttgctcttttcggtgaagagatcgtcaataatcccgagtgggaagatgattagattagatgtcttccttgaaaacaagagaaaaggaagcatgtgtgattttagagtcatcgttcgtggaagtaaaaattcatgcactatttatgccggtgaatctccaactattgttgccaagatggagaataatggaggcttcaaagtcttggtctatcccaacgtggactacgcattcatagtgacactacttatgattattgatgacatcaaagattatgatgtgttggtaaatgcgacggtgagtggtgtcctaactgtggcgacggggggtatcttacctattctgacattgtttgagggagaaaatttagaagaagaaaccttagatggagaaaacttagaagacgaatacttacaagaaggagaaaacaactcaggtggagaaaacttagatggagaaaacaacccagaaggagaaaatttagatggagaaaacttagaagtagaaaacaacttcgaagctgaaacttagacgcagcttcgtaagtgagtgcttgtggtattgttctctaattggcattaatgtttatgtagtttcatgtcaataataatctgcataataaaggttttcattaaatgtcaatgcagattagtcagctggttaaattcttattatgtcgtcgaagttttattgttgtatatg

SEQ ID NO: 74188 - DNA, 312 bp, Glycine max
  unsure (1)..(312): unsure at all n locations
  Clone ID: PAT_MRT3847_38005C.1
nacatcncatntaaacgtacgtaanctcggaattcngctcgagcttcttccacacaacatananaatncaaaaacncaaanccnnnnnncaccannnnnnncnnannnnannanntcncannnntnanccncnnnnanncnnnacnnnnnnannnnnncncatnaanncaactntnaanntaaatntnacttnctccnatnntantttnncnanaactatnttccaantnntncatncacncnnattnatnanncactnnnaatannncanncannacatnacnacctttnnaannnnntatcaaanncttt

SEQ ID NO: 74189 - DNA, 213 bp, Glycine max
  Clone ID: PAT_MRT3847_38006C.1
aaagattcctcaatttttatctctttacatctttcagtatgattagcatgtggctagtaagtaataataggttgatggataattcaaagtaactaattaagcaacaaatacacagaaaccatactgaaagatgtaaagagataaagattcctcaatttttggtcattatcattaactattacaggattacttttgtaatttaggtcctgccca

SEQ ID NO: 74190 - DNA, 947 bp, Glycine max
  Clone ID: PAT_MRT3847_38007C.1
gatggaaagataattctaattaaattcttattaaaaaaaatactacaccataaaagtaatgaaaagatattgtaagagaatataaaattattcaaaataaaataacaccctagaacaacccaatctatattgactccttgtttttagccaaaacagaagtccgaaacatttatatttaaatttactctttggcacatttggcagcttaaagagctttgatgtatgttattacgatggtattagttggtggcaaaattttggcaacactccgaagaatatatttcctcttctcacatatcatcgcaattgccaattgcattaatcccataactctcattaacccgatgatgcttgctccatgtctaatgtggcttttggcatgtgctccctgttctttccccacaatacgctgtacagtcctagaatcaatacgaacccttctagaagacagcccaagctgattatcttgcccaacacagaggcagtggcgaagacatggctaatgagaggggttcgagctttcatgtgacccatcacggtaagtaatatgagacagcggtgaccataattcctcaatatagtacggcgaggagcctgacattccatcccaacttccattgttcaatgtccctttctcaggccaaggcaatgacaaaagactgaattgaacttaacaatcactgaatagctgtgaagagcagctttgaagggtacccttttataattacagtctgtagtacaagccatagcccgaagaacgtgttggagaggagcatgaggaagcaaccctttatccatgcaccggattgagcatgaccttgatgttgaatgcttatatggtaatccaaaagatgaaaatggcttagaaatttcaaagaagggcctttatccaaggcaaaggttgctgcaccagccaagcatgccacaacccctatcaacctcgagcc

SEQ ID NO: 74191 - DNA, 163 bp, Glycine max
  Clone ID: PAT_MRT3847_38008C.1
tcttgtacactggtggcttctcaacttgtggcttgtacaagcctcatttgtacaagccaccagtatacaaaccaccagtttataagcctccagtgtataagccaccagtatacaaaccaccagtttaaaagcctccagttgaacaacctcctatttacaggcc

SEQ ID NO: 74192 - DNA, 168 bp, Glycine max
  Clone ID: PAT_MRT3847_38009C.1
accaggaactatagagggggaaattgttgatatacactaccagggtactcatacacattgcgagcgtatgcataatatgaagagaaactcttcatctgaatatttatattcagtgttaccttcagagcctgtcacctttccagatcaatcatttgcctctcagggcaa

SEQ ID NO: 74193 - DNA, 558 bp, Glycine max
  Clone ID: PAT_MRT3847_3800C.1
gggaaaaaaaaaaaccattagggggacattatcgttttcccccctgggaattaaaacccggggaaaaaaaaaaaaaatccccccccaaaaaaaaaatggggaaaaaaaaaaaaaaaaccgggcccccaaattaacccagcgggcaattctaaatttcttaccccgcccgaaaaaaatggcctttttccaaattacccaaaaaaagggggtcccccggaaatccctaaaaaaaaaaaacccctttgacaaaaaaagcctttaatttttatccacaaaaaaacaggccaacccgaaattacaaaaacggttttcaggggaaaaaaccggaattccaaacccccttcgaaaaaaaaacattattacgggaagaattcccagggctaacgggggaattggcccaacccacggccttggaccccgaggggggggggggggatccaccccccggaaaggggccccccttttggcagggggcaacaacagaaaagggcccccggcccgaggggcccaaagagggcaaccctagccacgggtccccccccccacggggaacccggg

SEQ ID NO: 74194 - DNA, 404 bp, Glycine max
  Clone ID: PAT_MRT3847_38010C.1
gccatggcgcttcaaccaattccattaaattgttcttcttccacaccgcgtagctattcttctctgcattttctcaaattcagagtttcttgttcgaaccagacatcgcaacttgacactccacaacgagtgaaggtagcgaacaagacaaaaaacagcagccacaggccaagcttccttcatcaaattcaagataaatggtcactcaaattagggtcccaaagggaaaaattcccatggcaagaacaaaaacacgaggtggaacaacaacagcagatagaagaagaaaaagaagaaaaaaagcgtgagcagttccagaatcagaagaagccttcagcatcgaattttcagtttccaaaacgagtttcgccttgggcgcaagcaataaacccgaacagtgcact

SEQ ID NO: 74195 - DNA, 818 bp, Glycine max
  Clone ID: PAT_MRT3847_38011C.1
cgaattcgagctcggtacccggggatcctctagagtcgacctgcagaggcaaagattgtaataatgagagccaatggagttgacatggctagaaacacgggtcctttcttttctatgacccatgtttgtaagtaatatgagacaccggtgaccataattccctattatgataaattaattgtaataagtctatagattataaatctcttttcaccacatatgtatatatatagagatagagataaaagtcatgaactaatcaatttaattggaaagattaagaggattacacaatatagtacggcgaggagcctgacattccaacccaacttccattgttcaatgtccctttctacggccaaggcaatgacaaaagactgaattgaacttaagaaacactgaatagttgtgaagagcagctttgaagggtacccttttataataaaagtctggatatataaaatattaattaattagtaattaagaattattatgacttatgaattaattgatcgctaaattaaagaaaaattaataataaaaacctgtagtacaagccatagcccgaaaaacgtgttggagaggagcatgaggaagcaaccctttatccatgcaccggattgagcatgaccttgatgttgaatgcttttatggtaatccaaaagatgaaaatggcttagaaatttcaaagaagggcctttataaaaggcaaaggttgctgcaccagccaagcatgccacaacccctatcaacttagcattccaggggtcgtctttattttcaaactctcaatccctgaatgaaaaatcatatgtgga

SEQ ID NO: 74196 - DNA, 473 bp, Glycine max
  unsure (1)..(473): unsure at all n locations
  Clone ID: PAT_MRT3847_38012C.1
gcggtcttgcaagggctagtagaccatgaacttggttctcaaaccactgttttggcaggcacaatgggatacctagccccggaatgtgtcaccacagggaaatctagcaaagagagtgatgtgtacagctttggtgttgttgcacttgaaatcacatgtggtagaaaaccagtggaagttagagaagagcctagtaaagtaaggcttgtggagtgggtgtggagcctctatggaaaagggaaactacttgaagcagctgataagaaactgaattgggaatttgaagaacagcaaatggaatgtttgatgattgtggggnttgtggtgttgccatcctgatcataccatgaggccatccattaggcaagtgattagtgtccttaaccttgaagcccctttgccaagtcttccatccaagttgcctgtgccaatgtattatgcacctccaatggatatgtgcaaattctcctaca

SEQ ID NO: 74197 - DNA, 150 bp, Glycine max
  Clone ID: PAT_MRT3847_38013C.1
tactattatttcatcgagaagacaccttcctccgaattgactgcgacacaagtgtcttgagacgacggtgcatcttcacgctgtcgatgcgccaatcgcggcgttgttgttggtggtgcaacactcggcgagtgtggtgctggaggccag

SEQ ID NO: 74198 - DNA, 162 bp, Glycine max
  Clone ID: PAT_MRT3847_38014C.1
gtccggattcccggtcgaccacgcgtccgcggacgcgtgggcgttggtcttatcttttgctgaaacttgaaattgaatctctctcaagcttccttttttaaaaggttagggatcgaagcagaaggaactaagtaagaagagatgggattggatttgagacaa

SEQ ID NO: 74199 - DNA, 450 bp, Glycine max
  Clone ID: PAT_MRT3847_38015C.1
gggtaataattcaataggatagatagtcggattgataaaaatattaaagggattagttgagtaaaaaatcccatatttccatattcacactaacctagccttgccagtctgtcactaactagggagggggccacttctatactatatgtccaaacgttgtcattttttacaaaccacattcccattccctcaaacattttaatagccgttacacttttgtctcttgggtccacattttcaaacccaaatcaaacccatgcaaagtccaacaacactgttttctcctcactgtcccaccaacacactttaaaaattcaaccccttcctatcccaccccaaaccctaatgggttgctggttcagcccacccaccaagcaaacccaaaacaaaaacccaaacaaccaaaccacttagaaaaacccacccccatgaaccacccccccccttgga

SEQ ID NO: 74200 - DNA, 205 bp, Glycine max
  Clone ID: PAT_MRT3847_38016C.1
tttaaagatattagtggttttttatggttataagaatttcatcatgtgagattacatataaaaaacgattttaaaatttatgtaaaaattaacttttacacataaacctattatgacatttttcatggcctgggaaattaagagtgggacaaaattcttctaatatctgacctacaaaaccttctgccctttaaataggagaatt

SEQ ID NO: 74201 - DNA, 203 bp, Glycine max
  Clone ID: PAT_MRT3847_38017C.1
tttaagattgaaaggagcgtcaatgagcacattggtgattcactttcccacgtaccgatatagaaagagaactgctgctgaaataagccaaagcctcaaggatgcatgtgccaacaaagcgaggaaatggatgcctcctcgctagggacattcgcgactatcaaaaactaaattgcgcctgccaaacgggctttccgttggat

SEQ ID NO: 74202 - DNA, 256 bp, Glycine max
  Clone ID: PAT_MRT3847_38018C.1
cacacacacatacatagtagtatcactggttccacgtaactggttcttttgacctatgccagccttaaaggttacataaatggacgtgacgtgcattcctatgatgactgcacccatgatggtacaaaccgctctatgcactctatgcttctgctaacctagcatcgtacctatctaacatgctacactgctgagatcatccataatcagactttaacacatttagtaacatatttgattctggcagcaccaccta

SEQ ID NO: 74203 - DNA, 593 bp, Glycine max
  Clone ID: PAT_MRT3847_38019C.1
ggctcgagaataacttcattctatgccactgtcctggccattgttaaagcatacaccacacgtcttggctcaaactccctaagcagaagaagcacatgttcagagggagttttgtttcatcagtctctagctagcatatatttctagcttcttttttactttacgcaaaaaacagactttgccttaaccaaaagaaaatctcctcttaccttaacacagacaactcgtttggtgaaccatgaacaacagtattcctggatgggattttgagagtgatacatgtctcaccaaccaaagaaagctcatagggccggaccaagaacttgttgagctcctatggaaaaatgggcaagttgttatgcacaaccaaacacataggaagacacttgggaattcatctaacttgagacaggtgcagaaaagtgatcaatcagtattaaagtctaacggtccctatggaaactcaagcaacttggatcaagaagatgccgtcccatgggtccaattcccactcgaggacccattggaacaagatttttgttcaaacctcttttctgaactaccaacttgtgaatttgaatcttacaagccca

SEQ ID NO: 74204 - DNA, 562 bp, Glycine max
  unsure (1)..(562): unsure at all n locations
  Clone ID: PAT_MRT3847_3801C.1
cggaatgctnatgtgatactttatgaattgcttacatttttaaaacttataacttgttatttattattttataattattatttataggttttagatcaattgaagaatcaacttttactgatgagattgaatccgatgatgaaggtatattcacttttagttgttctaattttttttaatatcattatacatatctaatttttcaaattttttaaaatataggtggatctttggtcagtaacattactcaatgtttgcaagatcagtggacattattgttgatcggtaaagtaataactatacttatttactaatgtgatgtgtgattntaagatttgaaacatctaaaatatgatgtttgattttataaatatcaggttgagcgctcaagaagaaatgttgatgacatctttggtgaagtttggggttattttgatgatggaacatgntttcattttctatttatttctaaatttggtgtaatttgaactaatgaacatttgaattaatggtgtttatatttgacgtattttatttaccttaaaaaattattgaatcatgc

SEQ ID NO: 74205 - DNA, 327 bp, Glycine max
  Clone ID: PAT_MRT3847_38020C.1
taaagagaatgagacatacgggggtcctctgagcagtcacgtagggctcgcatttcgcgatcgccctatacggtcgctctttcctatccttgcatgcgatctaaaagatctaccattatgtaagtgcagttcaatacattgaccgtgcttttagaaactattaactgagaagcagttgcagggatttaacttacgctccttgcaggagacgtgtcttacgttaccctgctgcatatgtaacaagtcggacccaatgtatattcacaccagttgataaccccgaatggggattgaaaggcacctactttcgacaccttcatcacagcg

SEQ ID NO: 74206 - DNA, 238 bp, Glycine max
  Clone ID: PAT_MRT3847_38021C.1
aacttactaacactatccttagagcaatatggggaagcccggggggactctgtatcatgcttgcctttgcttgctactctagtcgagtgcatgctttgctatgaccttcagcaagttcaacgagtgccaactcaacaacctcaacgcgttggaacccgaccaccgcgtttagtcccaaggtggtcttattggaacattggaactatcaacaccatcagctgcaaaacgccggtgtcac

SEQ ID NO: 74207 - DNA, 390 bp, Glycine max
  Clone ID: PAT_MRT3847_38022C.1
gaactgcagaggcagatttggggaaactaaatgcaaaattacaggtaatcggatctcttttgttctctcattctggtggctctctgtaatgatttcagcattagaaaaagaaaattaaactctcaaactatactttgatctattgcgattctgtttgaacagttggaaaaagttgatgtgttcaacttaatattttcctttgtcagagcatacttgataaagaatttatctgtttcatatcccttgttacattatgaaatgtagagcaagtgatgatcttattaattacataattgaagtttaaacatttatggaggcatctcagctggtttttcctgtattattacattttccctttctgtaaattaaatgtgggtctgagattatttt

SEQ ID NO: 74208 - DNA, 157 bp, Glycine max
  unsure (1)..(157): unsure at all n locations
  Clone ID: PAT_MRT3847_38023C.1
ctctatcgttcattgacctcgggnggntnaggggctgattgtgactcccgaggccttccagcagtgaggaaggaagttgntgagtncatactcaggcgcgaaggttaaccaaccgatccagagcacatatatatcacatgaaggagcaagcaaagga

SEQ ID NO: 74209 - DNA, 377 bp, Glycine max
  Clone ID: PAT_MRT3847_38024C.1
tcgctctctctgtgtgtaattttcttcttcttcttcatcctgcacgtataatagctaaaccgcaggctctacagacgcacaattacaacgtggacatacccttaaatacggttctcacgctgctggttcacattttaccaaccattggggagatagggcagatccagccactcctgctcaggttcctcccagatcgagacatgaaggggctcctcaatataatgaggatcaggctcagatcctaacacattggtcaacattgcctcttgatgatcttgatacacctactggttacatgttggatctcaccgtttctaaatctagaagtgcactgaccaacaacacaggaagtacgaaccataatgcatactgatcta

SEQ ID NO: 74210 - DNA, 395 bp, Glycine max
  unsure (1)..(395): unsure at all n locations
  Clone ID: PAT_MRT3847_38025C.1
ggtgtgaaccatatccctaaaaccagttggggttttttaacatgatccatgtttatgctacagcagacactgcacatatgttgttcctttggtcgataacatctacccaaagaatcttatacaaatgctgaactgcattctagattttgtcacatttaacgcagtttactttatttttcttatcatgaatttgaatttgtacatttcctatttcagtcctttgcagatctgtgggttgattttcttctcaaggaaacagaagaaagagagaagaaggagtcagaaggaagagataaatccatcgatgagtcacatgataaaagttttgatattaattcttctccccacattccaatcanaggtttagcactggagcatcaattaactcacccact

SEQ ID NO: 74211 - DNA, 626 bp, Glycine max
  Clone ID: PAT_MRT3847_38026C.1
actcgagccgaatcggctcgaggcccaatatcctaaaatcgaaacccaagtccaaatgccccaatagcattggggttttttgaaaggttgtgccttgcgctaccggttgaaactcgagcacacagttgaagtcgaacacacacgcagagatgatggaagagaattcgcgtggttgggactcaggaggaatggtgttagaaaccctaagaaaacgaggttggtgtttggaagatacggaccgattgaaggccatcatcgacattcaatccgcactcgctgatgaccgttccagattggtagattctgttgagtcagagctcctcaattccgacctcagatccatcgccgccaagtccttgccccaaccctctcttcttcgcaacgcttccactttccttcacggccccaaagtccttcagataagttcagtgagggacatatctaagagcagtgtggatgagtttttgaaaaactcaggtgataggagagttctcagattgtgtctcactgatggtcactacgaaataactgctgtggaatattctcacattccttctatacccgacaatgtggttccgggtactaagattcgtttggaaaataaagttgcggttcacaatggtatt

SEQ ID NO: 74212 - DNA, 1421 bp, Glycine max
  Clone ID: PAT_MRT3847_38027C.1
attggatcaaactgccttggaacgaaacaagaagggccatcttcccgttcatcttgcttgcaaaaggggttgtgttgagatggtaaaagaattctttgaacctggatccggatggcccattaatccttatgttctcctcaatcaaaagggtcaaaacattcttcacattgcggcaaagaatggaagagataatgtggtagaatacctactaggaaattgcaacactggtcatctacatataaaccagaaagactatgatgggaacactccattgcatttggcttccaaaaatttatttcagcaagttatcagcttgatcacagaggataagaggactgatctgaatctcacgaatgaagacggtttaacggctggtgatatcagtaagacctttgaacatccaatgttacgtggaagagagattttatccatggagttatcaaaaggagctggagtccctgtaaatcacatgttgcattctcaacgccaaccacagcctgaaaaagacacctctgattttcaacgcaaatcactgtctgaaaaagacacccgtgaggcatttttgattgttgcagcgttgttgatgacagtgtcatttgcagctggttttactgtaccgggaggtctatatagctctgatgacccaaaccctaaaattagaggaactgcagtttttgctggtaattcaggattctggatattcatcatcttcaataccataactatgtatagctctgcaatggcatgtggacttctgtctgtgggaatagttaatcggtctaaattaagtcgtttttcggacttgtttttgacatgtgcctttctcgcagcatcagtggcctttttggctgctgtacttctagttgtggccaataaccgtttactcgcaggtgctacaatcctcattggagccttgcactatatcctctacttttttgtaataaaataatctcgagcaaatgaaactttgatgactgatgaaattaaatctaagtcatcacttccacttatttattccagtttgaggagttttttctcgagaaatataggtggtaagcccaaaaatcttcttcattctcagaaagcaaacaaggacaaggacaatggattagaagagcatgtgcaacaaggcaattgagtagaagtttttattgtttttactgggatagaataagaaagacaattcagatcttgttcatttaactttcctttatctatgacatgaaacttgggatttgtttgtcaaattgaatctgaaaaatttagtttaaaattaaggtaatgtttgatttgatggcttattttctgttttttatttcttaaaaaagatttttattttcaattttttataacattttaaaaatatatatcgagaaaaaaatattgttaggtgtcatcacgtacgttttgactttatcagg

SEQ ID NO: 74213 - DNA, 668 bp, Glycine max
  unsure (1)..(668): unsure at all n locations
  Clone ID: PAT_MRT3847_38028C.1
ccacgcgtccgaatttcttggcttattttacctaagattttgaattaatttaagacatgtttcttcggagataattaggcaccaaacgtaaatacctcttacagcatacattcagaccttttttgtcgccttgtgagagataaatacctcttcatattttattaaatttgtaataaaaggtaggtattcttctattttaaacactttgactatattttgtttcttcttctatcacatcatatagtttattatatttatattttttaaccatgtatctaattatttaattagatgttaggtgttaaataggtggtatgatgtccacaaattaattataatgcatagttggtaatttgtgataacaacatcagcataaaggtaatttgtgattgaaccatgaaattctagcacccaaattttggaaaacagcaaatactatctgcatagttggaagatgaattcactaatcacctgcaccgacttttcttttgttttattagtgaataatctgcgtagccataagttttgatattactctgntgntntaactactgtacagaaacatgagaatcaatggtttagtaatgatttcaaattacttaagaattatcaataacatcattgataaaaactcaaattgtgcgaaggctgaagcatgttcttaacaa

SEQ ID NO: 74214 - DNA, 348 bp, Glycine max
  Clone ID: PAT_MRT3847_38029C.1
ccaagcgggaactgcccccatatatcctcctttttgttcaaacccccaggcttgcattaaaaaaacaaaaattttttttccagccttctgtttatatttgcaatggatttttaatgagcccaaataaaccttccacctcccgcgctaaaaataacccttttctctttacgggtcacagctttttaaaaagttaacctcattaatcccagcttttgcaaggccaatatctattccccttcccccccccttatacaaaaaagcctctgttgctttccacttcggccagaaaaatcctaaggaatccctacctacccttgggaatctgccaaactacgcaacttcccactg

SEQ ID NO: 74215 - DNA, 377 bp, Glycine max
  Clone ID: PAT_MRT3847_3802C.1
tcccgaatcgaccgacgcatccacgcgtccgcgcaccagtttcatcgcactaatatcttgctgtttggagcgatccgagaaaaactctgcaggcatgttggtttaccaggacctccatacaggtgatgagctaatgtctgactccttccgttacaaggaaattgagaatggaatgctgtggcaagttgaggggaaacgcgcagttaaaggaacagttgctgtatacattggtgcaaacccttatgctgagggtggatgagaacatgaaggagttgatgatgcatatgttcaggttgatgacattgttgacacatttagacttcatgagcaacccggattctataagaaacagtttgttaccttcatgaagaggttta

SEQ ID NO: 74216 - DNA, 357 bp, Glycine max
  Clone ID: PAT_MRT3847_38030C.1
ggcattgtaggtgctgttacataatacatgttggatgttggttgccagttggataatcgttgatgcttattatgcagtagaggtcattggacaatattgtaatccttgttgctatctattgttatgatttatgaagcaccgtttggtatcttcatttgagaattttgatatgctagggggattattctttgatgttctgacatgaatgggtgctaaaaatggataaagattgcttgtacctccacattctctctgattttacagaataggaaaacattctacattttctgagctatccattgtttgttgatagcccttatgttattgggaattatattcaaagattcagcttcggaa

SEQ ID NO: 74217 - DNA, 3432 bp, Glycine max
  Clone ID: PAT_MRT3847_38031C.1
acgcctgcggttctggtccggattcccgggtcgacccacgcgtccggtctttgcactcttccatgtgacatctctaactaaagttgcttttactactaaactcgaagtactttcttagtggcttcactgagaattttgaattctcagtctttttcttttcagatcacatctcagatccatttttattttacaaacttttgggtcctctcccccattgtcctaccacacctgctccacattactgaaattctttattctcatcataattcccatcaaaaaatcttttcttgcaatcattatgccatgacaaatagcttttttgtttaaaagcttttctttgcaaattattagattctgtacaactggaaataattttttttaaaaaagaaaaagcaaagccaagaaagaccatggaatatggattattctgttttgtatagctctagtcagtgaaactcataccataccaataccatcttttgagcaatttaactgttgtatgattgtcatttcatttgtttcaactctgaactctgcagtagagtatgttgtgttgtgtgtgactaaccaaaccaaatccctatcttagtacaagtattttagcttcataacatgaagaacttgtggctttgtttcagttacttgtttcctgccaatcattcttgttctgcttactccttcctcagttgcacagctatcaccaagtgagggtagaattctattccaagttcagaagcttcttgagtaccctcaagcccttcaagggtggaatagatggaccaacttgtgcttcctcccttcctcaccttccctcaagatagtttgctccaatggtcatgtcacggaacttacaatcattggaaacaagacctctccatctttacacaatcccaaagaaagtgcttggacttcccttcaaacactgtctggaagattctccattgattctttcttcactgttatgacaaagctttcaaatttgaagatgttgtccttggtgtctttgggtttgtggggtcctttaccagccaagatcaacaggttttggtccttggaagtgcttaacattagctcaaatttcatttatgggggaattccacaatctctatcctctatgaggaatctaaggagtcttgttttggttgataatctcttcaatggaagtgttcctgacctccaaaggctaacttctctagaagagctcaacttgggaggcaataatttgggtgctcaattcccttcagtgggaaagaatcttgtcactattatgttgagaaataattcactgagatctcatatccctccacaacttgtgcactttgataaacttcaggtatttgatgtgtcttccaataatttttttggaaacatcccatcctttttgatctctttgccttcccttcagtacctaaacttggcttcaaaccatctaagtggtaacctctcagtgaatatggcatgtagttcttcactaacatttgtggatatctcacacaaccttctggttggaaaattgccatcctgctttggttcagtgtcttcaaaggccaaagtgctatattctgggaactgtttgtcaaccgaaaaaaggttaaatgatcaacagcatccattttctttttgcaagagagagggggctttggctgttaagcctccagctaaaaatctgaagaaggaatcgggttcgggtgcagaaataattcactgagatctcatatccctccacagcttgtgcactttgacaaactgcaggtatttgatgtgtcttccaacgatttttttggaaacatcccatcatttataatctctgtgccttcccttcagtacctaaacttggcctcaaaccatctaagtggtaacctatcagtacatattccacaggcaatgaagcaagctgcagttggactgccaccataccgtatcttcacatcagaggaaattgaagatgcaacaaataactttgacccatcaaatttaatagaatagggatcactgggacagctatataaaggttggctcagagatggttcagtggtccttgttaattgtgtaaaaataaagcagaaaggtttgccccacagcatcatgcagcaagtagaggtattacacaatttgaggcacaggcatatggtgagtgttctaggacactgcatcattactgaacaggagcatccccaaacaacaagcacagtcttcattgtgtttgagtacatctcaaatgtgtcattgagggatcaactttcagatgggagaaagagggaaatgctgaaatggccacaaagaatggcaatgagcataggcattgcaagaggagttcaattcttacacacaggagttgctcctggcatatatggcaacaatttaaagattgagaacattctgttggatgatagtctcaatgcaaaagtcagtagatacaacattccattgccatccaagattgcacatattgaacaaaatgccaccaatcatattggcagcacaaacgatgcagaaaaggaagatatctatcagttgggtattattctacttgaagttatcactggcaaacaaattacatcctcgagtgaaatagaggagctgaaggaagagctggagaatggttcatcagaagcaacatcagtaattagaagcgcaattgatccttcactgaggggaacttatgcatatgaatcaatgaaaactgcagttcagatcaccatcaactgtctctccaaggtttctagtcagcgcccttcaatagaggatgttctttggaatttgcagtacgcaatgcaagttcaagagtcctggaccagcagtggaaacctcagcacaaaattgtaaaccacacttgtcaataaaaaaatgcttgcttacatttccatatgttcattatcataatgaataaaatgttgatgtacatatgtaatttctttcataaggccccaaaatgcaatttggcctgcatttttccatattattgttgttactaaggttttataatactttgaattaggttcctatcggaagagctggagaatggttcaccagaagcaacatcagtaatcagaagtgccattgaccctacactgaggggaacttatgcatatgaatcaatgaagactgcagttcagatcaccataaactgtctctccaaggtttctagccagcgcccttcaatagaggatgttctttggaatttgcagtatgcaatgcaagttcaagagtcctggaccagcagtggaaacctcagcacaaaattgtaaaccacacttgtcaataaaaaaaatgcttgcttatatttccatatgttcattatcataatgaataaaatgttgatgtacatatgtaatttctttcataaggccccaaaacacaatttggttcgcatttttccatatcattattgttattaaggttttataatatttgaattaggttcctatcaaa

SEQ ID NO: 74218 - DNA, 454 bp, Glycine max
  Clone ID: PAT_MRT3847_38032C.1
ttttatctgtattggaagaaactataataatctgaatgaaatggctaactttttgccggaggagcaagtgatctatcatttctaataagtgtcacaataagaatttctaacgagtggacttatttatgtgtctcccatttgtgtgtcccttttcaaattcagtcctagacctggtcatcaggaacattttctgatgtgcatactttatcaactaagcaaaactctgttttgtcaataacaaaacctgctaaggatgtgatagagcagcagggaaatgatgcagttatgactcatgatgactcgcgaggaagccattcaatatttatgatggaaatttggcctaaagagacactttggaattgaaaagcaccttagcccaactaaaaatttatgcttggtttactcttaaaatgtgaagatagcagcggtacaggaaaatttaagacgtatgtgg

SEQ ID NO: 74219 - DNA, 326 bp, Glycine max
  Clone ID: PAT_MRT3847_38033C.1
ttttggggggatgtttttgaaagtgtttttttttttaccccacaggagggaaaaattccagttctagacgggggggaaaaaaaccatgggacggtaccacaaacccaaatgccggggggacccctcccaaagagctataaaggcttttcgagccaaacacccaaagacttaacaccttgttggaccacaacacctgaacccgacacccgggaccccgtgcgcataggctcaaaatcctgcccccaccgggtctgaaagacaagaaccccaagggagggggaaaatttgagggggggaccacaaaacatacaaaaattattaacatt

SEQ ID NO: 74220 - DNA, 1749 bp, Glycine max
  Clone ID: PAT_MRT3847_38034C.1
attcggcctcgaaattcactgagatctcatatccctccacagcttgtgcactttgacaaactgcaggtatttgatgtgtcttccaacgatttttttggaaacatcccatcatttataatctctttgccttcccttcagtacctaaacttggcctcaaaccatctaagtggtaacctatcagtgaatatggcatgtagttcttcactaacatttgtggatatctcacacaaccttctggttggaaaattgccatcctgctttggttcaatgtcttcaaaggccaaagtgctatattctgggaactgtttgtcaaccaaaaataggttgaatgatcaacaacatccattttctttttgcaagagagagggggctttggctgttaagcctccagctaaaaacctgaagaaggaatcaaatttgggtacaaaactagggctaatgcttggaataattgtaggaattgtagtaattggaggacttctggttctactcgttgtgtgcatcattaggaagtccaaagcagaaagatcacctcataaaatggacaaatctgttgctaataaatattctaccagtgtatctcctagaccaattggtacaagacatattcctcaggcaatgaagcaagctgcagttggactgccaccataccgtatcttcacatcagaggaaattgaagatgcaactaacaactttgacccatcaaatttaatagaagagggatcacagggacagctatataaaggttggctcagagatggttcagtggtccttgttaattgtgtaaaaataaagcagaaaggtttgccccacagcatcatgcagcaagtagaggtattacacaatttgaggcacaggcatatggtgagtgttctaggacactgtgtcattactgaacaggagcatccacaaacaacaagcacagtcttcattgtgtttgagtacatctcaaatgtgtcattgagggatcaactttcagatgggaggaagagggaaatgctgaaatggccacaaagaatggcaatgagcataggcattgcaagaggagttcaattcttacacacaggagttgctcctggaatatatggcaacaacttaaagattgagaacattctgttggatgatagtctcaatgcaaaagtcagtagatacaacattccattaccatccaagagtgcacataatgaacaaaatgccaccaatcacattagcagcacaaacaatacagaaaaggaagatatctatcagttgggtgttattctacttgaagttattactggaaaacaaattacatcctcgagtgaaatagaggagctgaaggaagagctggagaatggttcaccagaagcaacatcagtaatcagaagtgccattgaccctacactgaggggaacttatgcatatgaatcaatgaagactgcagttcagatcaccataaactgtctctccaaggtttctagccagcgcccttcaatagaggatgttctttggaatttgcagtatgcaatgcaagttcaagagtcctggaccagcagtggaaacctcagcacaaaattgtaaaccacacttgtcaataaaaaaaatgcttgcttatatttccatatgttcattatcataatgaataaaatgttgatgtacatatgtaatttctttcataaggccccaaaacacaatttggttcgcatttttccatatcattattgttattaaggttttataatatttgaattaggttcctatcaaagtatc

SEQ ID NO: 74221 - DNA, 382 bp, Glycine max
  Clone ID: PAT_MRT3847_38035C.1
agaaaaattcttaagggccccccaaaatccctgggaaccgggaaaacctttttaacaaaatggcaaaaaggcttttttaacacccgcatttaaaaaaaacaagttttggactatgaccccaattttagcttaacaggttatgaaaaaaaacccaaaaaatttccctgccaaacaaaaaaaaacccaaaccccccataattaacccctaaaaaccccccggaaaaaattgttccctggaaaaaaaaccccttccccttgaattccaaaaaaatttgggccctttaaacccgcccgggctttttgaccccccccaaaataaacggaccccaaaaaaaccttttcaaactcaaggggggggttccccacaaaaggggggccgggg

SEQ ID NO: 74222 - DNA, 545 bp, Glycine max
  Clone ID: PAT_MRT3847_38036C.1
ggcacgatatttcctggaaaatgctattcaattcctgctagagggctcgagccagaagaacttattacggttcattcgttggagcatattgaatctgtggaagttacaagtgaatcactttctagttatttcacgtctgatacatatgccaatgagcattcagcacttgctgctaggttggcagctgggttatgtgctgatctagcatcagcaattgtttctgggcgagccaaaaatggatttgctttggttaggcctcctggtcatcatgctggtgtaagacaggcaatggggttctgccttcacaataatgctgccgtggctgcattggcagctcaagctgcaggggctaggaaggtgctaattttggattgggatgttcatcatggaaatgggacacaagaaatatttgaacaaaacaaatctgtcttgtatatatcattgcatagacatgagggaggaaagttttatcctggtactggagctgccgaagaggtacatgactgcagacaaattttcaaattaaactgctgctgctggcaaac

SEQ ID NO: 74223 - DNA, 416 bp, Glycine max
  Clone ID: PAT_MRT3847_38037C.1
ccaacaaaacttgatggagagatggctgctgcgccatctggagctgtgttaaatgggttgcgatcttactttttgagtgtgatgaaacagggagccaaatcccttctggacctctgctattgctgtgcccatgtggtgctgctgttactgtttagccccgaagactcattgttgtatctgctgctgcgccttagaagtcgtggcttcctgtggttagagggcgggcccttctttttgtcccaaaatggcttgctgtgtcgctcccaattgtctataggttggttccactctgcctcttgctagaccctgcgttgcttgcgtgtctcatggaagctgttctccttcatgggaggtgggccttggctgcaggtctgggaatctttgtgtggcgatctccctgtggcgtgccatggttt

SEQ ID NO: 74224 - DNA, 171 bp, Glycine max
  Clone ID: PAT_MRT3847_38038C.1
ggctaagactgggaaaagctaaggcggagcgtaaggtagcaacgccgtacggaaaaacctaatgattttccgtacttgtatacgtagcgttcctcattcctccgtcgctatacatcatcagcttcacaacctggatccactgtccgccatccgtaactgatataagcgatg

SEQ ID NO: 74225 - DNA, 234 bp, Glycine max
  Clone ID: PAT_MRT3847_38039C.1
tgtcaaaagagaaagtctccatgcattatatttatagatgaaattgatgcacttggaacacagcgtttctatagtgaagtaagtggagacacggaggtacagcgaacaatgtttgaattgctcaatcaccttgatggttttagtagtgatgaccacattaatgtgattgtagcaacaaaccgtgctgacattattgatcctgcccttattcgttctggtcgattggatcgaaaa

SEQ ID NO: 74226 - DNA, 450 bp, Glycine max
  Clone ID: PAT_MRT3847_3803C.1
cacgcgtccgccagccctttctcctttcttcgattatcttcttttctattcactctctgatgatcacccgttccggtgttcgttttcatttgtcctcccaacattctatttctctctttttgcatttcattttcgatcatccgcagatcgcttgcgtatttgctctaccactctgatcgtatctttattttttattatatttttctttccttctgctacttcggttctttcttttagaaatatatatatttcttattcatttattttcgttgaactcctgctattatgcatatggaatttgtaagaatttgattcattaatgagttttgcaagtctagtttggagtcattagactgaactactgaataaccagctagtttgagtatttgcgaatatacatgataatctcgtgttacttacagtcaacatcatcggtaacttctcctattt

SEQ ID NO: 74227 - DNA, 871 bp, Glycine max
  unsure (1)..(871): unsure at all n locations
  Clone ID: PAT_MRT3847_38040C.1
aaaaagagagagcagaaaagtcacattgaatgagcattacgtcacatgtttaatcatttcccataaacctattagcaaccaaaaaagactgggctctttgggtgactaggaatatataataaaacttttgctaattcgtgttttgactactagtgtgtgacgagattcgtatatacacatagaatagaagataatgaagtccactacactgtccctgccacatattcattacttccaaactcgatcgtataattgagttggtgcagagaaatggcggatacaattgtggttttccggctagaaaagttgacgaggttgttagcagaagaagccaaactacttggtagcgcgcacgacaaagtaacatcgttgcgcaacgagctgaggttcatgaacctcttcctcaacaactcccaaggcaagcgcaaagatcacaacatggtcgcggaactcgttgaccaaatcagagacatcgcccacgaagccgaagacgtcatcgacaactacatcagcgacatgatcaagcagagaaggagaaacatgctggagaagtttggccgcggcgtagaccacgcgctcatgcttcgcaacttgaccgtcaaaatagacaggatcaagaccaccatcaacgatatcttcgacaataaggtcaagtacggcatcgaagctggaaggagagacagcgaggaagaagcagagcgtatacggaagcaaagaagagacgtggaggaacaagaggttgtaggatttgcgcatgactccaaggttgtaattgagaaactcatggcatcgggttcgcgccttaaactggtttccatcgtcggtatgggtgggttgggtaagaccaccctagccagaanaatatacaaca

SEQ ID NO: 74228 - DNA, 723 bp, Glycine max
  Clone ID: PAT_MRT3847_38041C.1
attttaaatagattatttaaaaatattttcagttaaatcaatcttcatttaaaatccacggtaacaaaatttatatgattgaaatatgacagaatatttatcaacgcactggcaaacacttattgatactgtcaaaaaagcaaatttagctggcggtaccaaataccaacgaaaatttagaatgagtatttgctcaagacgacaatcatagtactcaaatatctctagcaagagtagaaattaatacataacaaagtaacaaactatcatgggtgtctactgttgcttaacttcaactttcttcttctgccacaagcgatctagggcactgtcagcatcaccctgagcacggatgaagccgcagagggcaaaagtggagaaatggccattgtagacgccattctcatccacatgcccaatgttaacctgaaccgaagcatggtccttagcggtaatcaatcggtttgtggcagagcacttcctaggaatgtaaagctcggtgatctgtccttcctcgttctgcatcttaggttgagtgttataaagcgccttcacaaagatctataaaccagaaccaaagacgaggagaacgaaaacgagtgccgtcgccctctgtcgtcttttcgcacccgttcggacgccaagcgtgacgagcaaatttcattaaagaaacccaactggggatttctccttacatgttagaggctcatcaccgctacccgg

SEQ ID NO: 74229 - DNA, 429 bp, Glycine max
  Clone ID: PAT_MRT3847_38042C.1
tacggctgcgagaagacgacagaaggggttcaatttattttgtcctaattaatctactcctctcttggaagagtttttcccctcaaaaggttaaagccttttcatggagattgatgatcgacaaattgccctctaaacttggtctctcaaaagacaagttttttccgacctcggggatacactttgctccttttgtcacaatcaacaagaatatgccaatcatttgttctttaaatgtttagtaaattctcaggcacggtatctgatatatgtttggtctggatttcatagggttatttctttttctagagaggctcactttcatcaacagtattatgctcttcttataaaaggaagaaatacaaagaatgcttggtatattgtgtgacatagtgacaataagaggtttgtacctcaaaaagcctttat

SEQ ID NO: 74230 - DNA, 785 bp, Glycine max
  Clone ID: PAT_MRT3847_38043C.1
cggccgctcgaggttagcgagtaagaacgtgtgagaagaaggcagggtagatgttgggcaatgagaggatgggaatgcagggttggtgttgagcggtgagacgatgggggagaacgagaaaggagagcgatggagcggagcgatgacaaatctgacggagatggcctccaatctcgactctctccagaagcttctcctcaccaaagccgtcttcgtcgacgacgacaccttctccaaagcctccctcgccgccgaccaggcccgcaccatcaagctcctccagcaacgagtccagaccttggagagagaggtcgacgccgccatcaccaccgccgcccgcgctcgctccgagaagcgccaggccgaggctgctcagaaatccgccgaatcgcgcgctcatcagctcaccgccgaactcgaaaacaccacaaaggtgtttgagctgcacatggaagagctgcgagcgaaacaagaagagatcgagaagcgcgacgaggacatcaaacttctggaagctataattcgaacgcttggaggaaaggaatcactctcttcgtctcagtagaagaaatctttgtttaaagtgtggttaatactcaaaaccctaaccattgccctcttttgttactttgtaaattgaattatacactagtgcgtgaaagattcatatcttaagactgtagtaaatgctgttgtttttctatatgaatattaattggagtaattctttttacatgattaaaaaaactaaaaaatcactggcgccaaatcaaagatattgtggg

SEQ ID NO: 74231 - DNA, 724 bp, Glycine max
  unsure (1)..(724): unsure at all n locations
  Clone ID: PAT_MRT3847_38044C.1
gggcagcagaaagttaaagtgaattaacgagtgagaagaagcagggttgatgttgggcagtgagacgatgggggagagcgagaaaggagagcgatggagcggagcgatgacgaatctgacggagatggcctccaatctcgactctctccagaagcttctcctcaccaaagccgtcttcgtcgacgacgacaccttctccaaagcctccctcgccgccgaccaagcccgctccatcaagctcctccaccaacgagtccaaaccttggagagagaggtcgacgctgccatcaccgccgccgcccgcgctcgctccgagaagcgccaggccgaggccgctcagaaatccgccgaatcgcgcgctcaacaactcaccgccgaactcgaaaacaccacaaaggtgtttgagttgcacatggaagagctgcgtgcgaagcaagaagagatcgagaagcgtgacgaggacattaaacttctggaagctataattcgaacgcttggaggaaaggaatcgctctctacgtctcagtagaaagaagtctttgttttgaagtgtggttaaatatttaataccctaaccattcgcctcttttcttactttgtaaattgaattatacgctagtgagtgaaagattcttatcttaagactgtaacaaatcttggtntttttcctatatgaatggtaataggagtaaatttttttttacatgattaaatttctctggcg

SEQ ID NO: 74232 - DNA, 802 bp, Glycine max
  Clone ID: PAT_MRT3847_38045C.1
tacggctgcgagaagacgacagaaggggagggttgatgttgggcagtgagacgatgggggagagcgagaaaggagagcgatggagcggagcgatgacgaatctgacggagatggcctccaatctcgactctctccagaagcttctcctcaccaaagccgtcttcgtcgacgacgacaccttctccaaagcctccctcgccgccgaccaagcccgctccatcaagctcctccaccaacgagtccaaaccttggagagagaggtcgacgctgccatcaccgccgccgcccgcgctcgctccgagaagcgccaggccgaggccgctcagaaatccgccgaatcgcgcgctcaacaactcaccgccgaactcgaaaacaccacaagtatcatcatcatcatcatcatttagaggtgtttgagttgcacatggaagagctgcgtgcgaagcatgaagagatcgagaagcgtgacgaggacattaaacttttgacatgattaatttctctggtgattcactggcgccaaatcaaagatattgtgggaagtgcgaggtagattgcaattttgcgggtgttgaattgtttgttatgacatgaaacgcatttcctttgacgaatacaaccattacgttatgatcgatcataatgcttcaaatttcagaacatcaagatgtatagtttcctcccaattggagtttgtgtttgagtaaataatttaagttcttgtggaattagtgtatcgggaaaagaattatggcatataagttgtttatgtaatcaaagaagaaatctaccgtttagattt

SEQ ID NO: 74233 - DNA, 843 bp, Glycine max
  unsure (1)..(843): unsure at all n locations
  Clone ID: PAT_MRT3847_38046C.1
gttccataaagaggagtgcgaatgcagggttgttgttgagcggtgagtcgatgggggagaacgagaaaggagagcgatggagcggagcgatgacaaatctgacggagatggcctccaatctcgactctctccagaagcttctcctcaccaaagccgtcttcgtcgacgacgacaccttctccaaagcctccctcgccgccgaccaggcccgcaccatcaagctcctccagcaacgagtccagaccttggagagagaggtcgacgccgccatcaccaccgccgcccgcgctcgctccgagaagcgccaggccgaggctgctcagaaatccgccgaatcgcgcgctcatcagctcaccgccgaactcgaaaacaccacaaaggtgtttgagctgcacatggaagagctgcgagcgaaacaagaagagatcgagaagcgcgacgaggacatcaaacttctggaagctataattcgaacgcttggaggaaaggaatcactctcttcgtctcagtagaagaaatctttgtttaaaatattgtgggaagtgcgaggtagattgcaattttgcgggtgttgaattgtttgttatgacatgaaacgcatttcctttgacgaatacaaccattacgttatgatcgatcataatgcttcaaatttcagaacatcaagatgtatagtttcctcacaattgggagtnttgtgtttgagtaaataatttaagttcttgtggaattagtgtatcgggaaaaagattatggcatataagttgtttatgtaatcaaagaaagaatctaccgtttaatttaaactggtagttgtctctatcagttatctaagttcttgga

SEQ ID NO: 74234 - DNA, 243 bp, Glycine max
  Clone ID: PAT_MRT3847_38047C.1
atccataacggactcgataatgcatgcattatagcaaaataattaatcttactctttttaggatacgatcagacagcctgaacgaagacttatgtccaacactctttaaatttgacagctcaaaacacaaatcttgccaataatactttacgtagaatgacaaatgtattctattgctcggttcttttacccatcctatacttgaacaacacagcgatgctgctgattcctacgggatggctg

SEQ ID NO: 74235 - DNA, 276 bp, Glycine max
  unsure (1)..(276): unsure at all n locations
  Clone ID: PAT_MRT3847_38048C.1
gaaaagtggatgtatttactgttttgcaagcataaaaacatttaacactttctttgtttaatattgaaaattattagatggatttaaaattatattttcatttgactatattctaaggtagttatactttttgttataaattttggtccctactctctgtaccttgatcgccactgcctgaacttgaaacactagctagaatatgtatagcacttggtgttataatataccactggcattataatnttttggtccttcctcttccctaatcaacct

SEQ ID NO: 74236 - DNA, 242 bp, Glycine max
  unsure (1)..(242): unsure at all n locations
  Clone ID: PAT_MRT3847_38049C.1
cagcccttttattaggggaaggggtccgagtgtaagatggggttatcggcgtcaaagagagtggagaagaggctggcgaactccggcgattttgacttaacatgcgacttaacctttttccactggcttggttttacacagaacgcctttgaaggagtgtgtcccttaccaacttaaaaccgcgcttgagtacatncacacccacacacacacacactctcatattagattgggtctccaca

SEQ ID NO: 74237 - DNA, 496 bp, Glycine max
  unsure (1)..(496): unsure at all n locations
  Clone ID: PAT_MRT3847_3804C.1
gcacgagcgacgatcgagctggtggagaagctggcggctctgcctgagatcgccgagatcagcgaggagatcgtcatccccgcgccacagttcgagcttgcctccaactcgacggcaaacgccggcgtgctcgccaacgagtggggtgtcacgaanattcaggcgccgagcgtctgggctgctggctacacgggccanaacatcgtcattggctcgcttgacaccggcgcgctcgccacgcacacgtccatcgccgccaacttccgctccacctacaactggtacgatgctgtgagcaagaagacaacgccgtacgacgacgtgggccacggcacgcacacgatcggcacgatgctgggctcggacggtcttggtgtccccccggtgcccantttattgcctgcaaaggcttcacaactccggcggtacgcantcngcgttgctctccttgccnccgttcatcccatgccccncggacccncaggcaccaacaaga

SEQ ID NO: 74238 - DNA, 232 bp, Glycine max
  Clone ID: PAT_MRT3847_38050C.1
ggagcgaagagtgaagagaatggctggccaaggtttaacctttctggctgtgttaaatgcgtttcaccactggcacttgattcctttggttgcggggaaaggccaaataatgggcctggtattaacctctaccagggatcatgcccttaagcttaagaccttattaccgaaccaggcaagcttctttaccagcgccaccagaacactgtgttcttctggcttaagaaccttt

SEQ ID NO: 74239 - DNA, 281 bp, Glycine max
  unsure (1)..(281): unsure at all n locations
  Clone ID: PAT_MRT3847_38051C.1
tcccagcactccagttgaagctcgaaaccgattagnttagaggcttcaaatcaagaggncccanaanccaanccctnttctggttggcttgcgnttatggcgtctgagagngctnctngatcganntcagcggccgattcgtacnttggggaggttnataagcntgncctctnngagtgagatcaggtacganggtntgctctncagcatcgtcagtgaaagngtncnntattggcctcggnncgtggntcntttggntgnggncggaggataaggtgtct

SEQ ID NO: 74240 - DNA, 529 bp, Glycine max
  Clone ID: PAT_MRT3847_38052C.1
aatcagttgagtgaagcagcgtcactgcatcagcatggccatggcatttgaaacgactcattttttactatcgcgcccaaccgcgtccacctcaacgctcttcttactctcttcgaatctcacacgacccaaacctgcttcgcttccttctcgattcttccattgccgatcgaaacgcctcgtcttgacgcctcgattcgccgtgaaagcctgcgcggtgaacgtcgaggagaagaatgtcgctgcaatatcgggagagtggggtaaggtttccgcggtgttgttcgacatggacggcgtgctttgcaacagcgaagagccttctagaagagctggcgttgatttgttcgccgagatgggcgtcgatgtcaccgtcgacgatttcgtaccgtttatgggaactggagaagcaaattttttgggaggtgttgcttctgttaagggagttaaggggatttgatccagaagctgcaaaaaaaaaggcttttggaaatatatttggataagtatgcaaaaaccagattctgga

SEQ ID NO: 74241 - DNA, 304 bp, Glycine max
  Clone ID: PAT_MRT3847_38053C.1
ccagctaattttcgaaccagccagatccagctttttcattttcccctataaattttatccgaatccaaacggaaccgtgatcgctacttattccttttttgattgtttgatgtttctttctctctccccgccaggttcaagagacttttccgtttcctggaagaagagaagagaaaacctaaattacagattcatggcggaagaacacctgatttggacctcccgaaggtcaccgactcttgtgtaacaactgcagcttcttcggtagcaccagcacgatggacctctgctccaatatgctaca

SEQ ID NO: 74242 - DNA, 435 bp, Glycine max
  Clone ID: PAT_MRT3847_38054C.1
cctaaatgtggttgttctcctttttatcgaaaaaactggcccaccctttacagtagatgtatcggatgaatcctacacccgcaggctcatgcctaagatcaaaaccaacgcttaaacactgaaacagtccaacagctgggttggccttgtacgatggtatgacccttaatgggaaaagaaggggcttttgtccactatggaaatatgtgggcggcaacaaaggaagcacgcactttttacccccccaccttaacgggggaggaggaaaaactgactacatacgccggggctggcggtgatcccaccgaaaacaatttaaaatgctcttaacaggggaaaggtccctccgtggccgctaagacccggaaactgaccttgagtggggaactgggaaggcaacggatacttcgaaaggaagatatttataggccagca

SEQ ID NO: 74243 - DNA, 274 bp, Glycine max
  Clone ID: PAT_MRT3847_38055C.1
gattaatgggggcagttccaaaatccattttgtccgaaccaggggaaaaatccgtgggttcataaccggggaaaaggttacccaatggcaggctttccagggcaggattggaaggaggggatgggaagaagggccaccagggccttggcaaatttaattcttttaaatttttttccatgccttaaagggcattagatggttggttattaagtttagggcccaactttcttttttggggttggccactttaaggtaatcctggtccccttttttt

SEQ ID NO: 74244 - DNA, 427 bp, Glycine max
  unsure (1)..(427): unsure at all n locations
  Clone ID: PAT_MRT3847_38056C.1
gctctcctacctcacctgaaggaagctctgaagatgacgcatcaaagaactcgcaaagctttgatacctcttctgtgagtcgcttctcttccaccgtacccttcgtgcaaatcagtttgaactttgaagttccatttttattctttattttgaatttcgtaattttatgtatttagtcataatgccatatattgtatcttatgtgtcaagctggaatcccctcgtgggttgggtccctatgcaaagaaacttcacatacttgaaacaganaagcttaagaaacctgattaagaggatttctatgggtggcttcacttgatgtcataattcttgggttttgtgacagcattaattccatcttgttgatgcaataactactcgtatgggcagtacttgctgcatntggaggaaacaacgtaggagtaga

SEQ ID NO: 74245 - DNA, 334 bp, Glycine max
  Clone ID: PAT_MRT3847_38057C.1
gctcaagcccatcctatataactatttcaattttgtttaaacacaaacaacataaaattcgggtttttttaaaaaacggcggcgcccaacaaccaatactaaactaaacacccaaaacaacttcctccaacttaatatctaaatctacaacttatttataatagaactaatcctccttataacctatcatatcctactcttgcaccccaaaaacatcccactcatcaattcctcatttcatcaaataactgaccttcacaacacatatacacctacacttaatattctttcctaacaatcatcaaccttattacaaacatttacttcaatcccc

SEQ ID NO: 74246 - DNA, 455 bp, Glycine max
  Clone ID: PAT_MRT3847_38058C.1
aggaagctagaattgtggaaagaagttgagtccccccctattgatatgatgatagaagaggttttctctagggaccaatgtaggtggaagaaaaatgatgagcacccaaaggagctagctgtggaagttgaacttgccattttttgctttctagtggaggagctttcagaggaactactaatatgttaatgtgggtaaattttgatgcagctgaagaatttcgaatgagttattattattattattattatctttattcttttaattagaagagtacagtctaacttgcaccttatttgattaggctagttagataaaaagggacccaaaaggataatttgggttagaggagggagaacttgggggatatgtacatgactcgtgtatgtaacttgcagggaatgctgtaaattacctttattattagttataaatactataatttttgcagttaa

SEQ ID NO: 74247 - DNA, 259 bp, Glycine max
  unsure (1)..(259): unsure at all n locations
  Clone ID: PAT_MRT3847_38059C.1
agcggattgctantgatactgtanatcacttnnaggtaccgccagaagctcgtaattcggatggagaatttggatttcaatgcctctcgttgcaccttttaatagaatctctatggcataacaaccgggaggatttatataccactgcacgaccgaaacactactgcttcatcgaaacacccggaggtgtttctcagatgctaaaaaacgacacggggatttacacctggtacggacgcgaactttttggtgaaactca

SEQ ID NO: 74248 - DNA, 431 bp, Glycine max
  Clone ID: PAT_MRT3847_3805C.1
ggttattttgtcacgtacgtaagagaagagagaaaaaagtgaaacgtcattttcatgccttctatttgcatggacatgcagtcaagtgtgattttatagatgtaagtttctcttgaactaaattgcaagacaaactgcatgctttattttttatcccatttttctatagagtaactgcactatatcttctattaaaaaaacctctctaccagcgttacatatggtctttcctatttacaaattgtttattagtgacttttacaattgattgattcttctctcaattttttattttctttaaaaaagtcatcaatcagatctaatatgcagcaggtaattcatgccatgccatttttaaggggacaaactaagaaagagaaagagtatagaaataaattgcagaatcgagaatcacgactattgccaaactc

SEQ ID NO: 74249 - DNA, 182 bp, Glycine max
  Clone ID: PAT_MRT3847_38060C.1
ccttccttagcctcgaatttcggttcaggccaaaaccccaaattggttgtccaaaggcaaaccaccgtccacgtccttgttctgccataccttgcccaaggccacatcaaccccctcctccaattcgaaaaaagattacctgcaaagggcgttggtctactactcctttttcccgtgggctc

SEQ ID NO: 74250 - DNA, 2828 bp, Glycine max
  Clone ID: PAT_MRT3847_38061C.1
gtttgttatgcgagaaatttttttgaaaaaggaaaagagagagaggaatgataatataagcgttgaagcgttcatctccgtttagattctccagtttctgtttccgattctatttctcgtcttgtgcgcgtgcatagtgaatactcgtgcttgaacgagaaattaattgttaatttcgaagttgaccagtgtggttggtgggagagcgatgccacgatctagttccgccatgcaccaccaccgtcagagctccgataacttcatgttcgacgctcacggaaggtggttacactcttcggcttacgcgcaggagctcgggactcgatcttcgagcttgaggagaaacgacgatgatcgcgttttaaccagtggcttgcttgatctgcattctttcgataccgagcttttacctgagggacaaagttttgatggctacgagtcgattctctctggcaacaaacttgtaccaaggtctcggggcttgcctgagagccatctccttaaaagtgtctcagcagataaagagagagcaaacaatgttgccaagatcaaagttgtggttcggaagagaccactaaataagaaggaaatagcaaagaaagaggaagacattatttacatagattcaaattttctcacagtgcatgaaagaaaactcaaggttgacttaacagaatatattgagaaacatgagtttgtttttgatgctgtgctgaatgaagatgtttcaaatgatgaagtgtatgctgagactgtggagccgattgttcctttgattttccaacgaacaaaagcaacctgctttgcatatggtcaaactgggagtgggaagacatataccatgcaaccattgcctctcaaagcatcccacgatattttaagattaatgcaccacacataccggaaccaaggtttccaactgtttgttagtttcttcgaaatatatggggggaaactttttgatctcctcaatgaacgaaaaaaaactttgcatgagggaggatgggaaacagcaggtttgcattgttggcttgcaagaatatagagtatctaaagttgagacaatcaaggaatttattgagagaggtaattccacaagaagtactggtacaactggagcaaatgaggaatcctctcgatcgcatgctatacttcagctttgtatcaagagatcagctgatgggactgaatcaaagcctacccgacttgtgggcaaactatcttttatagatctggctggaagtgaacgtggtgcagatacgacagataatgataagcagactaggattgaaggggcagaaataaataaaagtttacttgctctgaaagaatgcattagagccctagacaatgaccaagggcatatccctttcagaggaagtaaattgactgaagttctgcgagattcttttgttggtgattcacgcactgtaatgatatcatgcatttcacctagctcaggttcatgcgagcatactcttaacacattaagatatgctgacagagttaagagcctgtcaaaagggaacacctctagaagggatcctctttcttcctcaaaccttagagactctactgtgttgcctggctcttcagttttatctcatgatgataccttggaggatgaaacaacatatgtttccagtgacaagaatcgatttggttggcccaaacagctagaaagggaaccctctcctccgaataatgtggaccgtgttccaagtggtagaatggggggaaatttgataccatctgtgtattctgatccacaaaatggtcaaagaggcagtcaaaaggccagaactgcaaatgaatatgattacctaggaccaacatatgaacaggatagaacgagaaaaacaagtaagagggtggataacaaccaattatctgccgtgggggacaagaggaagatagaatctcgtgttaaacttgtggatgaattgcattttgaggctaatcattctgatcctgacgataatttaaatgccctcctgaaggaagaggaagatctcgtaactgctcaccggagacaggtggaggaaacaatagacattgttagggaggagatgaatttacttgttggagctgaccaaccaggaaatcaactggatgattatatttccaagttgaatactattttatcactaaaggctgcaggaatctttcaattgcagacacagttggctcaatttcagagacgcttaaatgagtataatgttgtcgtaacgtctggtaattgatggtgctaatgggcaaatgattggtgtgttgtggatgaggaattctccgttctcttaggtattgcttctatgatttcattgccgtggattgtttctcaattgtgaagaattttgatgttgacaagattattgtgggttttggagtgcagaagaaataggaatcaaacccaccatctttgttctacacttgattgattgcttagacgagtcactattgtgacttgaaatgaattgaacaacatatacaaatgtatctccacttgctcagttgacatactattgttacatgtggagagtacaatgtgaagtcaactgccctgattgcttgtagtttgcaaccgaaaatctttatatatatttttttgtttgtgcaccgtcttccttaaattgattatggcatgtttggagtgtcttgtcctgtattattggttcatgagtgtacccacttattttcttaccgttcatgatgatgtgaaagcaaggcaggtgttgtggagtgatctcaggttgttgatgagtgaagaatcaatagttggatataaataatgaagggtcactttaatcccgttgaaatgccctgatcaa

SEQ ID NO: 74251 - DNA, 522 bp, Glycine max
  Clone ID: PAT_MRT3847_38062C.1
tagggaggagatgaatttcctcgttggagctgcccaaccaggaaatcacctggatgattatatttccaagttgaatactattttatcactaaaggctgcaggaatctttcaattgcagacacagttggctcaatttcagagacgcttaaatgagtataatgttgtcgtaacgtctggtaattgatggtgctaatgggcaaatgattggtgtgttgtggatgaggaattctccgttctcttaggtattgcttctatgatttcattgccgtggattgtttttcaattgtgaagaattttgatgttgacaagattttccgttttacacttgattgattgcttagacgagtccctattgtgacttgaaatgaattgaacaacatacccaaatgtatctccccttgctcagttgacatactattgttacatgtggagagtccaatgtgaagtcaactgccctgattgcttgtagtttgcacccgaaaatctttatatatatttttttgtttggggaccgtcttcctt

SEQ ID NO: 74252 - DNA, 792 bp, Glycine max
  Clone ID: PAT_MRT3847_38063C.1
gttctggtccggattcccgggtcgacccacgcgtccggtttgtttcccgagaaaattttttgaaaaagaaaataagagagagaggaatgataataaacgttgaagcgttctccactgtttagattctccagtttccgattctatttctcgtctcgtgcgcgttcatagtgcatactcgtgcttgaacgagaaattgattgtgaatttcgactttgataagtttggttggtgggagagcgatgccgcgatccaattccgctgtgcaccaccaccgtcagagctccgataacttcatgttcgacgctcacggaaggtggttactctcttcgacttactcgcaggagttcgggactcgatcttcgagcttgaggagaaacgacgatgatcgcgttttagccagtggcttgcttgatctgcattcgttcgataccgagcttttacctgagatgtatggtgttcacaatgaatatttaaccaatcacactgttcggggtcagagttctgatgactacgagtctattctctctggcaacaaacttgtaccaaggtctcggggcttgcctgagagccatcttcttaaaagtgtctcaacagaaaaagagagagcaaagaatgctgccaagatcaaagttgtggttcggaagagaccactaaataagaaagaaatagcaaagaaagaggaagacattatttccatagattcaaattttctcacagtgcatgaaagaaaactcaggttgacttaacagaatatattgagaaacatgagttttgtttttgatgctgtgctga

SEQ ID NO: 74253 - DNA, 215 bp, Glycine max
  Clone ID: PAT_MRT3847_38064C.1
tcgttttattgcacgtttgacacgaatatcgcactcagtcctgatgaaagctgcgaacgaacttatgtgactgggagcacagccgccctctcgaaggaggagcatattacactggatcgagggggtaaactgtatccactggtccctagcatcgactgtgacacatacacaaacctgtgacaccatgttgtatattagggctggggaaaattatc

SEQ ID NO: 74254 - DNA, 236 bp, Glycine max
  Clone ID: PAT_MRT3847_38065C.1
accaactgaaggagccaaatcatcagcaggctttatagtggcgttatgtatggaagtgcctgtgttttggtttgggtctgttctgccttgtgctgtgatagcattgaattgtccactcatgggaaggcgaggatataggttacatgtttggagaacaacagcggcatttccaaatatgaagtcaacggtgccatagatgtcacattcacggtaaaactgtctaaaaaaatgcgtgt

SEQ ID NO: 74255 - DNA, 331 bp, Glycine max
  Clone ID: PAT_MRT3847_38066C.1
gccgaacgcctgggccggaccaccaaaaactcgtcaccaccggggaaccgacacgagaggggaccatgaaggagcaagcaccgccgaagcagccggccgacacagagaaggaggagaccagacaaaaggggaagcaggggccccaagaggcaaacgaccggccgcgggggagcccacgaccacaaaagaacggagaggcaaaccacgcacagaaggcgaacgacccagccaagacgaccagcaggcggggagcaaagaacaagtggcaccccaaccaacacaccaagaagagcaaggagaagacagaagaaccccccccgaaaccggaagg

SEQ ID NO: 74256 - DNA, 523 bp, Glycine max
  Clone ID: PAT_MRT3847_38067C.1
cccacgcgtccggatggattcgccaaaagtatacctcaatggactaaaaacttcagtgactctgattctcataatttctctcacgttatttccttctaattcagtagggtcagcttcagcgaaagatggtggcaaggttctgaagcaaaagaaattagtattggggtcaaggcctccaaagtgtgtcaacaagtgcttgagctgcaagccatgcatggctgctttggttatctctcctcaccacagggatggtcacactcacaaggcaaaaacagttcaaagagacgaaggctactatctctctcatggaaatgcaaatgcggtaacaagttctttcagccctgaaagttgataaacatagcctttggtcagatcgacactcagtgcctaagatatatagtggcttacccatagtttatgcttgagcaatttcagtgtacttggtgtctaatgtgtaatatgaactaaaattgtcgatcttcaatcaatcctcatattaaattgactatatatatataaaagt

SEQ ID NO: 74257 - DNA, 282 bp, Glycine max
  unsure (1)..(282): unsure at all n locations
  Clone ID: PAT_MRT3847_38068C.1
cnctgaaacgcgtacgtaagctcggaattcggctcgagtacggctgcnanangacnanagaaggnggggcactgcaactgnaaccctntccctgtnncannggnctacttcntntnntnctgcntcngtgnncatgatgtntnntcttcatnncgatcncctcaantncanatatacgnngcngatccnnnccanantangatggngagtctcnccgntantcngcanganagngncaagngnntaantgcagggagnncatccnttggtntggnnancagt

SEQ ID NO: 74258 - DNA, 403 bp, Glycine max
  Clone ID: PAT_MRT3847_38069C.1
cagacacgtgcatcgacgcatgcagaagaggctatactcgcaggtgcaaatgcgccaatcggtgaagcaagtagacctatgtacgcagttcaaggctggtgaaaggaacatcatatgaggaatgtgaatggcggaaggctcttcgtgtgccataaggctcgcaccaagttctataatacccttgaggcttaatgacgacgacaactcataactatgaaaccaagtgacatatctaaaccataacccattgactgggattactatagaatatgaattcgcacttgcttataggctatgtacaaggagcattatcatagcattgcagtgcgcaagtttgttgacacagtaactggtcaatacatgactaaatttgatgccctattgatcgagcttaaagaagcat

SEQ ID NO: 74259 - DNA, 181 bp, Glycine max
  Clone ID: PAT_MRT3847_3806C.1
cagtggggagtttccaaaccagcttggtgtttgcaagaagctgcattttgttgatttaagctctaacaatcttacaggggagctttctgaggaactccgagttccctgtatgagtgtgtttgatgttagtgggaacatgttatctggttcagttcctgatttctccaacaatgtttgtccc

SEQ ID NO: 74260 - DNA, 327 bp, Glycine max
  Clone ID: PAT_MRT3847_38070C.1
acttcggattccggttgagatgaaccttttttaccaaggtaccaaaatttgaccagccttttagccttttaacactttggaaaggcaccatgggcttttttattaaccgggattccatggaaggccaggtaatggattactccaagcgtggttgcctttcccaattaaaacaaatggggttctccatgaatgggaaaggtgctccagggtcggccggttttggtggctccttctatcagcacttttggaacatcatccaatataatattttcaactttgtctcccagtttttcttatagtcttggctttcccctacttttaactcca

SEQ ID NO: 74261 - DNA, 208 bp, Glycine max
  Clone ID: PAT_MRT3847_38071C.1
ctcaaataatcaatcactcctcatcggtctcccaaataacaaagccataaccctgcgggtcctttacaacatcacatatcctccatccactgtaaaatattcttctactttaaaccaaaccaacacatcattcttgtgcaactagctacgtcccagcaataaacccaagacgggcttatatatcttcataccacttcctcaaaacttc

SEQ ID NO: 74262 - DNA, 333 bp, Glycine max
  unsure (1)..(333): unsure at all n locations
  Clone ID: PAT_MRT3847_38072C.1
cgggccgaccgacgcgtccgaccgggggtacaaaaccaataaaaggggttttagtggagagtcttggaccctacacggggggggtgattaaaagggctgggggggtacngtacctcatactaagccgttagagaagtagagctatgatgtgaggattagtggaggacggcagttaggatgtgaggagccaaccgaacgtcataggagggcagacacgcgggaggcagttgctgctgggacctatcctgatgggaataggccggcttataccatggcacatgatgacagagagcgggtcgactgtgctgatgaagagaatcctaggacgtggtc

SEQ ID NO: 74263 - DNA, 2228 bp, Glycine max
  Clone ID: PAT_MRT3847_38073C.1
tcggacgcgtgggcggacgcgttgattttgattcgttgttcctctcttctcctgaatcatatgcagtgcagattttggtctgaatcggcgaatccccaaaatgggtaacagcagaaagaagcaccgtcgtgtgcaagactcgccgtcttcctcatcctcttcgtgctcggactccgacgactcttcgcggcggcggcggcggaggcggcgcgagaaggagatgctcagaaagagcgaggaaaaggaggagcgaaggaggaagaagagagacagagagaggaaaaagaagaaaaagaggctccacgattccgatgactcctgctcttcggaggaggaagacgaacaacctagtgttcagcctgaaactgtcataactgaaatgatgaaagagtttccaaatgtcggcaacgatttgaagcagctcttgcaaatgattgatgatgggcaagctgttgacataaagggtatatcagaaaagtctttagcgaagcatttgaaaaagctgttcctttcgttaaaccttatggagaatggagatagggttttcttactgcattctaaagctcgccctactttggatgttgttttccctctcattcaatcctatatgaatatgaatcccatgaatgagcaagctgatacttccgcaccagtgcctgaatcaagttcagttccaatagatactggaaataaacagatggtggatgaccatgcaacagcagctccagaggatcattctgttggtcctagaagaaggatgattggccctgcaatgccatcagttgaattacttgctgctgctgcaaaattaacagaggcacagactgagctcagagatgccgaattggacgatgatactgaactatttgtaggacctccaccaccagctctagtttctgaagcagaatcagctaatgaagcagaacgctttgaagaggtaaccaggatcatggaagttgaggcagacagcccgtatgatgttcttggagctaaccataatatgtccagtgacaacatgaagaaaaagtactggaagatgtcactattggttcatccagataaatgctctcatccacaagctcaccaggcttttattaagttaaataaagctttcaaagagttacaagatccagaaaagaggaaagcaatggatgagaaaatcaaactcaaacaagaacaagagcaatttcaggctgaacttaaaaccatgcgtgaggctgcactgtggagaagatctcaaggtatttccatggagggtgatgaagagcttctggcacaaacagaggttaaagtagaaccaaaaagggatgagtggatgacaacactacctccagaaaggaaacctggtggtatgactatgcaatcaaccacttttagccggggcccaaaggaaggtagaggtgatactagtgtttggacagacacccctttggacagggcccagaaagcaaagatgaattatttggaagcatacaatgaagctactgcactagcttcaaatgaagaggataagaaaagggctagtgcggatgcagaattggtggacaaatacaataaagcaaaacggtcaaaaacattggtgcagaagtatcaagaagaggttgctagcaaatccaagaaaaagtccaaggaactgaaggaagtgaagcaacagccggagaaggaagactgggtgggtcaacatccatggaagccatgggaccgtgaaaaggatctgacagctggaaggaaaactgtaaattttgattcagaaagcatgactaagaacttatcttcaaggttttcttctggaaattttcagaggaacttcctttgatttgattgagtttacgtttcatatgatgagcccttttgcctggacacatctgtttgatctttgatgagcttctttgagaaattgaatttttctttttcctgatggttagtttctgtcattcttcacgtgtaatatgttgattttcttttcttgattaactatatcataggctaactgattctcttttctacgcatggatgcagtagccagtaggtgctgaatacaaacatgtgcttcaaatgctacgaagaattataattatgcaatcgcatgactgacaaatattgtttgaatagtacccatttattttgtacaataaatggtataattcttattaacatataaagaattttgaatatacaattatctttcaaaaaaaaaaaaaaaagggcggccgcctcgaccaagctta

SEQ ID NO: 74264 - DNA, 254 bp, Glycine max
  Clone ID: PAT_MRT3847_38074C.1
aactagttcaatatcctagtataccttaataaataatttaagataccatgctgagagctcggttcccattactgttgctgtggacttgttttcctggcttcatgtttctggctcatttggcattgtttactgggttaaatagtactccatacacgtcaagtgtctccagagtggcattagcgagagtgactcgtacaggtaccaagcatgccacgctcgttgcaatctccttaaggtgtagaaactaagaatgt

SEQ ID NO: 74265 - DNA, 466 bp, Glycine max
  Clone ID: PAT_MRT3847_38075C.1
gaccaccggtcgccgaaccttaaaaccggaaacaaaagcaatcgatactggatttcaagaatctctcagtttcttcttacttctgtgagtaccatttcttaagggaaagaaaatcactctctgtgctggccacagacttcgcgaatcattttcttttccactcttagtttattcgctgaacactctcctatttgatatacgacttcgcgtcagattgaaactttttctgaatctttctcagttctctggtcaatattaagttcacgctggcgaaattctggattagcgcttacactctcctatctggtataggacttcgagggtagaccattctatttctctccgttgtttcactctcttatactcactgatccgcattgccggacaaagtggtcttatttgaaaaacacttgggcgtgggcgccaatgtgtgcttcgataagatctctggagacaacaggctcac

SEQ ID NO: 74266 - DNA, 135 bp, Glycine max
  Clone ID: PAT_MRT3847_38076C.1
ttcccgctcgaccccgcgtccgcgaacctgaggttttgtgagtggcgaaatggcggtgattttttaagtgcaataccaggaggggcagtaccagcagcattcgagcaagtgcagcgctttggtcggcggacgacg

SEQ ID NO: 74267 - DNA, 401 bp, Glycine max
  unsure (1)..(401): unsure at all n locations
  Clone ID: PAT_MRT3847_38077C.1
ccggaaaaacggggaatacccaccaacngaaaaccggggaaaccccgggaaaaagggggagaggaaaccatggaaaaaaggggaacccgtttccaagggttttaacaaacccccggggcacaaggtttaacaaccataaaagggaaaaaaaaaagaaaaacccaacccttccataaaaagcaaaacggttcctttttccaaaatgggaaaaaacttcccaattttggtaggggataccccagaggggttttcccagggtttccccaaattgccccatttggcttcctgggaaaaaaccccctttgctcccttaaataaaccttcccttccctctccaaaaatttcccaaccttaaaaaaccctcaaagagggggaactcccaaaaaaaacgcgggggtccc

SEQ ID NO: 74268 - DNA, 251 bp, Glycine max
  Clone ID: PAT_MRT3847_38078C.1
cagctcgagcagctcgagcggctcgagctttattctgcatacaattctgctcttttgttcactcagttcttctgactgaagacttggctgaacttgactctttcttcatccatttatttgggaaccacgataacacgatgggagatgttgcaaaggtcctatcagctgggactgttggaggggcagcaccattgatagttggacacccatttgacaccatcaaggttaagctccaaagtcagtcaacacca

SEQ ID NO: 74269 - DNA, 517 bp, Glycine max
  Clone ID: PAT_MRT3847_38079C.1
tttttttttttttggacttgtggacgctattgtttgggaacgagcattttttaaaattggagcaattgaatatagttacgtaaacgataaaatgacgagcgaggagatgggcgtgactgagtggtgaagatttggaaaaatataataataaaggtcagttacgaagttgagatgaagtaataaaaaagtgtgaatgagagcagacctttcatattgtttgcttcccacttagatagatgtatttcacttttttattttcctatgcttttctaatttgtcgtttaggaagagttcatgcttaacaagaacacaagtggatgacaactagcttttaagttgcatgtgccgcttgtttatgttttcctttctttggttcttttttgacatgtcacttcagttggatatatatattttatataaagtctttttttttaatgtagacgcataaagtgtgtaacaaaaaatgttataaaaatgttattcagtactcatcctgtctgccagtagacggctttac

SEQ ID NO: 74270 - DNA, 334 bp, Glycine max
  unsure (1)..(334): unsure at all n locations
  Clone ID: PAT_MRT3847_3807C.1
aaaaaaaaaagcctgcctgatcatactttaacccaaacaatgggaaatgccttcctttaccggctaaatcaacctaaccctaccccaaggggggacattttaaaaagggcccgggttacagcgtttttttttcctgaacaaaattgttttttggggagcaaactcacaagcggggggggggggaaacttattttanctcccggccatacatgaaacaaaaggggctttctctaaccgtactaaaattatgactggnntttttttcaacaggactagcaaatttttgtttatttgcaacccgngtgnttcaataagnatataaataacttttttt

SEQ ID NO: 74271 - DNA, 369 bp, Glycine max
  Clone ID: PAT_MRT3847_38080C.1
ttctagattgttttgttctgtatatttgtgaactttcaaatgaataagggttttaagatcatattgtgtgttttgcaacaatggctaatttctttgctgctatgatcttgtcactctatgccatttccatacttcaaacaattgtaatggcttctaatgaacaaagatgccacttgtatgacaacaatatcaaatatctaagttcaactgtcaagaattaccaatgcccatcacaatactctacgagatgtatccagacccaataccacaatccctgcatgcttttctgtcataaattcttcattacatgcctatatcttccccacctgtattattgccataaaacttttttccctttttacaacaact

SEQ ID NO: 74272 - DNA, 364 bp, Glycine max
  Clone ID: PAT_MRT3847_38081C.1
ccagaatagttgctcagatccagagacggaaaaaatagaaaagaatgcctcaaggcagaattctttgaaacatgtgcttgcaactgagatggatgtcaatgattattctaacaatggggtcttccacgatactggtgatgcaagcggagaacatgatcgatctagatctagcaaaaggcgagaatcatttttagcaaacattatcaagaaagataatggcaaaagtaatgctactgtaaacggacatcccataccagatcctatgattaagaaggctgaaaagctagccgggccaatccagccagggaattactggtatgattctcgggctggattctggggtgtcatgggaggaccatgtctc

SEQ ID NO: 74273 - DNA, 513 bp, Glycine max
  unsure (1)..(513): unsure at all n locations
  Clone ID: PAT_MRT3847_38082C.1
aaaaattacgagtctttattagaaaaatattgactgattgatgcctttaattttacgaatactatagttaacatatgcttcaatatcaaacaaatgtataattgattgatatgatgagattatagtaagatggccatacctagtttctatatgctatttcaaatttaattttaaagctgctactgcattcattccaatacattgacaaagctgctactgcattcattccaatacattgacaatgtatccaaaattgatttttttttttaaatttagtcaaattttcttgtccctatgccctcgtaactaacttcaaaattattggaactcatgcatatgatttgttaatggatatatgaagtgtcttctagcaattacctgcaaatttgaatttatattgaaagacacttgcttccagtgaagatctcctggtattaacaattaaaatagcatggttactgacgttaggaatgcaaatngctntaaacannttagcattttcttttactcttt

SEQ ID NO: 74274 - DNA, 932 bp, Glycine max
  unsure (1)..(932): unsure at all n locations
  Clone ID: PAT_MRT3847_38083C.1
cccacgcgttcgagcacatggtggtggatatggaggtgctggtggggcacatggaggtggatatggtggtggtgaangtnntnnnaaanganntgntgtgaatattgtttttaaatatttggaatatgtaagagttaatttaaataacctcaactaactatttaactttcaactttatattgatttggaatgtcacttttttcttaatgtaaataaaatgccatgtttgcattgataggtcataatcacctacaagtcaagattcaatgattcaagtaacagaggaatcatacaagagctgcaacattaaagacccgatattgtacatgaacaatggcaacactttgtttaacattacatcaaagggccaatttttcttcactagtggtgaacctggtcattcccaaaaaaatcaaaagcttcatgtagctgttggtgaaggaataatggaaactatggatacagcacctggtccaagttcgtcattgcctgcatctgcaccctcctatcccacagtatttggcaatattccagtagctccttctacctcaacctcaactcaactcatttcaacttctcaacttctcatcattggatttgtgatatgtgcgctcttctcttccttaatgtgaaattaaaatgtccatgtctttgccattgagagtgtacatcaatcgacccaagattattctagcttgcttaatgagtaattttgagttacagttttaaatatgcatatgtataaaagtcattcatcatcattctatatcattctatccgactcaaataagatattatcctaaataaaaataaatgtgtcaaaagaataaattttttatttaattctctaaaaaatataaaaatatttatattttttatgtttgtgtttgattttttgtgttttttgtgggggggtggccctttttttaggg

SEQ ID NO: 74275 - DNA, 195 bp, Glycine max
  Clone ID: PAT_MRT3847_38084C.1
ccattcctttatccccttatcatagtcgaattgcacggtaaaacactctttttacaatggtgttggggtcttaggtattaagggatttcgttaattttattcatgtgtcttcctctttgtgttccgaaaaattgagtaggtatatttatgattctactggtgggtggttatttaaagcgaatggtaaaccaattt

SEQ ID NO: 74276 - DNA, 466 bp, Glycine max
  Clone ID: PAT_MRT3847_38085C.1
gggggcagataaagatttttcgttaagcgagcgtttaacaaggggtcacagaaatgcctagccaacattaccaatgtttaatctctgctaaaaataaaggtaagacaacaccgactgcactctagctgaactatcaatcccacaaggtcctaaagaggtgccaactttgctttgcacttcaaacggatttcccaagtaaataaaacacaatgcttgaatcaagtataactgtgagcttattgcttccagctcactattttctgaacatgtgagtggctaatgtgagcttgtaccccgaatactcgctagagaattgccttgacaacatctccgatataggttggaaagggagcccccaatatttgacggaaaatcgtttcattatctaactgagattcattccattccatcaaagacccaacatattttggaccatacccctgtataggcttatttatactaacac

SEQ ID NO: 74277 - DNA, 637 bp, Glycine max
  Clone ID: PAT_MRT3847_38086C.1
attctgatgagctttctagacacaaactgaggaatgtggaacatagagagattgaaagaggaagtggtggatggtatggaggcacctctctaaaagtattagaaaaccacatttcagaggaaagcaaacaagctggaccattaaaggttgtagatcatcatggcatgctttcatctgatggtagttcatcatatggtgagacttgtggacgtgtaattcttaagaaaattgatataagatggagaagtatgggggttctgactggcttgactcagagaaaagtggaccgcattttgggagagacacatccgtttgcttggaacttgcattgtctgggatgaaatttcagtatgatgtatttccagttggtgggctacgtgtatctaagatgtctgtctctgttcaagatttttttctgtatgacagaagccaagatgcaccttggaaactggtattaggatattatcactcaaaaggccatcctagggaatcttattcgagagcatttaaatggacttggaggcagtgagaccagatcctcttacttccccttgagagtacaggttaaatggtgctattttacctatgctggtacacctacatcaaagccagcttgaatttcttggtaaattctttt

SEQ ID NO: 74278 - DNA, 259 bp, Glycine max
  Clone ID: PAT_MRT3847_38087C.1
tacggctgcgagaagacgacagaaggggttgataacatctttctagattttgtaatttattatatcttttttttcaatttggattctgtaattctgatgctgattatttgtggtagtaagttttaatcaaagctgaatgtggctacacatggaaagttttcaccttctgttactggaacattcttttatttattttttattttttttatgtttatttgcatttcaaattcctgaatcaactcaataccggttgagggag

SEQ ID NO: 74279 - DNA, 380 bp, Glycine max
  Clone ID: PAT_MRT3847_38088C.1
acgcgctactagtcagtggccgcccttcgtccttttttttttaaaataaaatgttgctgttacacaaaaataactgtcggctgtggactaggcagtattgaaaccgcgacatcagggtactctacaaacatgccattttaaatattacaggaaccgtacccgaccttataaatttgtgaacaaatgacccaacgcgatcactgatattggcctgttacttttgacatatacttggcttttacatttgaaacatatgcttcctgcttggattagggcgccgcttgaacccaatatgtccaatgcctccaaaagggccatcaaacagaaaaaaattagcctgtacctgcttagtgacattgagctggggaaataactccttt

SEQ ID NO: 74280 - DNA, 373 bp, Glycine max
  Clone ID: PAT_MRT3847_38089C.1
gaattccatggccgacccgacgcgtcagcccacgcatccgtcgcgacgcaaggggacggttttgcgcggtagatgcggctcagccgctgtagactccgagctctgctgtgatgaacgtgaccgtcggtaatatccacggagcgggatctgcggtcacacggaagtcccatccctagaagcagttgtgggccgacatgtcatacggcaaatcgtatccgtggtcctgatgtaaaatgcccttttctggtgcatgccgtgccaacggacttgtcctttggcatagaggtcatgccgcaaaactgcgtagatccgccattcgtatatgtgccagggtacaacttatcatcagacggaagaacattgccgcatttgt

SEQ ID NO: 74281 - DNA, 646 bp, Glycine max
  unsure (1)..(646): unsure at all n locations
  Clone ID: PAT_MRT3847_3808C.1
ttttttggaccaaatcaaaaccaaaaaatatagataagaaaacctaaattataatctttttcctcttacaagtactattgaagaaatttattcaaatacaattaaatcaaaatctcacacggttacataaatgcttccacaagctggcaaagagtggctttgcccaagttccattcattaaatgggagtaataccgaattagaggggctccacagcacttggcatacaataaaatgcaggtacagggtggtttctcacattggtattatgtcactggctacttggttaagtaagaactgaggcacactaattcactggcatgccaaaaaatcttggctccttggaaagctagtaataactctctgatcatagagcccgagcaacatttttaaactcattcaagcaagactgaagtatcttctgacgcttcgcaagagactctcgttcactttctagcacatctattgcaccaggagcaacaaacatgtccatgaatttctcatctttcacggcaaataaatctaagccaagagccaccaatagtcgatctcggcaaggggttaggaatccagaatttaatgttgatgtcacgcctctctcaacaagactccacgaatacgtgcaaaatgcntggcagctgatacac

SEQ ID NO: 74282 - DNA, 543 bp, Glycine max
  Clone ID: PAT_MRT3847_38090C.1
ggaggtttgtatgtatatgcggttgtttccattttaatttactttaggataaaacttgtatcaaaatttttatgtctgtaccatgctgttctcaaattaaacaatggtatgtggatttatctcttaacataaatagcttccattaataatatgtagttcaattggaaaatgtaataattgcttgatttgagaatttgatgactaggatataaagaatttcatctaagtttttcccttagtttaatggcatctggttcattctaaataaaatagatagcaaaattaagatgagagttcaacattaatccatatttgtatgactcagaaaacaagtatctatggtagggcaagatctaattaatatagtgaaagtttacaattaagatattcattcatagacaagggttagaaaagaaactacaaacacaaacacctgatcattttaacttgttcgacataacataagatataaggcataaataggattcacttcttgcctttactcaaaaaattctagctcaatggcttgcctgatgctttggt

SEQ ID NO: 74283 - DNA, 1462 bp, Glycine max
  Clone ID: PAT_MRT3847_38091C.1
cccaagcgtcactctactcgccggcacctccgtcatcccaagcgtccggccttactgatattggttggtcactataccttctctcttcagtcttcattatcacactcatcattctctaatttctctaacatggcttcaaccgcttctgaggttagccaacaagtccaatccaacaacaacagaccaattttcaaaagcgtgaaagcactaactgaatcaccagaactcactttcctcccaccctcttacacctacaccaccaactcagatgatgaaatagtggcagacccagatgaagatgatccaattcctattattgactattccctcttggtcactggaacacctgatcagagggccatgaccatccacgacttgggcaaggcttgtgaggagtgggggttcttcatgctcatcaaccactttgtgtcaaagaccatcatggagaagatggttgatgaggtttttgctttcttcaatcttagagaggaggagaagcaagagtatgctggtaaggatgtgatggaccctgtgaggtatggcaccagctccaatgtttctatggacaaagtcttgttctggagggattttcttaaaattgtggtgcatccagaatttcactcacctgacaaaccacctgggttcagagagacatcagcagagtactgtagaagaacctggaaagtgggaaaggaactactaaaaggaatatcagaaagcttgggattggaagccaattacatagaggatacaatgaacctagattctggttggcaaatgatagcagcaaatatgtatccaccttgtccacaacctgagcttgcaatgggaatacccccacattctgatcatggcctcttgaaccttctcctgcagaatggggttagtggtcttcaagtgcttcacaatggcaagtggatcaatgtcggttccacttcaaactgccagctagtctttgtgtctgatcaccttgaggttgtgagcaatggcaagtacaagagtgtattacatcgagcagttgtgagcaacaaagctacaagaatgtccttagctgtagtaattgcaccatccttggacacagtggtggaaccagctaaagagtttctagacaatcaaaggaatccagcagcgtatgttgggatgaaacatagagactatatgcaactgcaaaaaagtaaccggcttaatggaaagtctgtgctagacagagttaaaatctgaatttgaatcatatagtgttggcaataggctcaaaagttagagtttgggatttggttctgtaaagtacaattagctagccaataagggatttggttttctatggtggtgaatcaaattaattagaaggaaaccttcatttgatttcacatgcacagactagacaaattcaatttttaaagtactagtaactttacctttataatataataaaaacatactactttctctttttatatttaaa

SEQ ID NO: 74284 - DNA, 371 bp, Glycine max
  Clone ID: PAT_MRT3847_38092C.1
caccatacccatcaaagagagaaacttccctttccaggctgaggttttttattttatccgcactaggcctcaactgagatgttccttgggtttcctttggaaacaggattacccagggcctcaaaaggagcatcgctaaccttcaatcccatcagagtaggggttccccggagtccgcccgtgcccttcctcccaggttggttggtcctatctgtatttatgccccttccgcgcgttcctctttggtcgtccctcgcttcactatatgttgtttcagctgtgtgtcaacaagtcatgtaagagacttcactatgttgttttctctttcgtggctttaataaattatgcgccaaaaaaaaaaaaaaaaaaag

SEQ ID NO: 74285 - DNA, 556 bp, Glycine max
  Clone ID: PAT_MRT3847_38093C.1
cttttttttttttttttttttttttttttttttttttttttttttttttttttttttttttttttaaaaagagatatggattttggattttctctttttcttgcttttttagggttttatatataattaaaaaattttatatcaaaatggaaatggcccaaaggggtcataaaattatttaaaatttgggcattgaaagcttactttgatattggggattcaataggagggaggccaccttatatatatagggggaggtatttatattaaaaatttagggaaaaaaaatgggaaaggggtataggatgatcccaaaaattattaaggggggggggtggaaaatattaggggtaaatttgaggaacatatgggggggggcccctatgaatacccttaggaatggtatgaaaagattgaggggatgttatgaaaagttaaaggggggccatgatattcgattgggaataaggggagggggtaaacactggggggtcccttaattatatggggagctgtgaattatacaataacccgaccagggtttatgcccaatgtt

SEQ ID NO: 74286 - DNA, 172 bp, Glycine max
  Clone ID: PAT_MRT3847_38094C.1
gtcttgcaaagtccaaggggacgacgggttcacagccgctgcgctcaattgaccctcccctcgccggcgtccgggatcgcggtatccgagcgatggatcacgccatccacgtgatggatcagacagcatcttctcctgtcccccctgcgggcgatggtgcacagcgatcgga

SEQ ID NO: 74287 - DNA, 647 bp, Glycine max
  Clone ID: PAT_MRT3847_38095C.1
tatgtaagattcttgaatatattaagataacatttctcaggtataaatcaaccgtctacaaccataaaactaaagaaaacaattcaactcggtcccacaatcaaaacttgtaaaatacagaataagcggaggaaaaaaaaactaagaaacataacagttaaaatttggatcaagatcaagcatctgcaatggtcacctcaacctccacaccaggttcgatcgtgatagaggtaatctgcttaaccacatctggggaactgtagaggtcaatcactctcttgtgcaccctaagttcaaatctgtcccatgtgttggtaccttcaccacagggtgatttcctggtagtgatgtgaagaaccttagtgggcatcctaacaggtcccttcaccctgagtctcttatccgttgcaccgcgaaccaaatccgcacaaaccttctcgaggtttttgacgtgcttggaggaaagggtgatccttatcttgtggatctgttcttgggactcctccaacccgggctttgtgggcttcatcgcagcgtatgtagccattgttcacaccgatgcagagaaacggaagaagaagacgctacctcgctgcgtgtgaaagttagagagagggaggagtaggcgaaagaaggattagaagaag

SEQ ID NO: 74288 - DNA, 316 bp, Glycine max
  Clone ID: PAT_MRT3847_38096C.1
aaattcacaatttttggttaaacttcatctattgaccgtactacacccgcgagaactgcaccgaactcgtggaataaatcactgcaccgtcccactccgtaaaaccctaattcgttcacacctaaacccttttccttttgttgtttttcttcacttccaaggcttcactttctcagaattaaaacaaatgcttttcttttttctttttcttttttggtttcttattcagctggttatttattctccttcatcttcacgccctgttccttgtcgaggaaaagacccattccatcacccatgtatgatgtaacaaaca

SEQ ID NO: 74289 - DNA, 248 bp, Glycine max
  Clone ID: PAT_MRT3847_38097C.1
tctctctcttcttcgccaaatcccaaaccccatttcaatgatccccctccctccaacaatgttcccacacccttaaaaaacgacaaaaaccaaaaaaaaaaaaacccccaacccatgtttcccttccctcacaccatcatcttcaccctggccttcccaatcattatttctggctccggggcctcgccgttgggcctgagtagcattgggaggaccatctacggggccctgagcgagcaggggttgcc

SEQ ID NO: 74290 - DNA, 748 bp, Glycine max
  Clone ID: PAT_MRT3847_38098C.1
ccccgcccttttttttttttttttttgagcaaataacaaatgatttctaatttgtaataatttcaaaacaaatatatgtaagattctagaatatatcaagatggcatttctcgggtattcatcaatgtctacaaccgtaaaactagagaaaacaatccaactcagtcccacaatcaaaacttacaaaatacaaaaaaagagagggaaaaaactgggaagcataacagttaaaatttgaatccagatcaagcatctgcaatggtaacctcaacctccacaccaggttcaatcgtgatagaggtaatctgcttaactacatctggggaactgtagaggtcaatcactctcttgtgcacacgaagttcaaatctgtcccatgtgttggtaccttcaccacaaggggacttcctggtagtgatgagaagaaccttagtgggcatcctgacaggtcccttaaccctgaggcgcttgtcctttgcaccgcgaaccaagtccgcacaaaccttctcgaggtttttgacgtgcttggaggaaagggtgatccttatcttgtggatctgctcctggggctcctccaagccgggctttgtgggcttcatcgcagcgtaagtcgccattgttcacgccgatagacaaaaacggaagaagaagccgccgcgtctggaaataagagagggctttggcgtatctctctctctctctctctctctctctctctctctctctctctctctctctctctctctct

SEQ ID NO: 74291 - DNA, 684 bp, Glycine max
  Clone ID: PAT_MRT3847_38099C.1
gtggaaataataaactatttctgatttgtaataatttcaaacaaaaatatgtaacactctagaatatattaagatgacatttctcgggtattcatcaatgtctacaaccgtaaaactagagaaaacaatccaactcagtcccacaatcaaaacttacaaaatacaaaaagagagggaaaaaaaactaggaagcataacagttaaaatttggatccagatcaagcatctgcaatggtcacctcaacctccacaccaggttcaatcgtgatagaggtaatctgcttaaccacatctggggaactgtagaggtcaatcaccctcttgtgcacacgaagttcaaatctgtcccatgtgttggtaccttcaccacagggggacttcctggtagtgatgtgaagaaccttagtgggcatcctgacaggtcccttaaccctgagcctcttatcctttgcaccacgaaccaagtccccacaaaccttctcgagatttttgacgtgcttggaggaaagggtgatccttatcttgtggatctgttcttgggactcctccaagccaggcttattgggcttcatcgcagcgtacgtcgccattgttcacgccgatgcagaaaaacagatgaagctgccgctgctgctgcgttgggaaatccccttctgtcgtctcgcagccgtacggacgcgtggg

SEQ ID NO: 74292 - DNA, 308 bp, Glycine max
  Clone ID: PAT_MRT3847_3809C.1
gggcccccaaggaaaaaggccccaatggaaaaattttgggtttggccaaaaccctggtttggggggaccccctttttggccaagggccccccccccgggttggaccccagggtaaaaatttttccccccccccaaaaaaacatctaattcggggggcctttatgggaccgggaaccgggatattggggccccaaacccttttggcttaggttttaaaaacccccaaggggggggggtaaaaaaaccccccgggagggccccctgggccctttgggcaagccccgaaaaaacccgcccccgggggcccc

SEQ ID NO: 74293 - DNA, 312 bp, Glycine max
  Clone ID: PAT_MRT3847_380C.1
tcccactcgtcctcccactccttttattttttgaacaaaactactaaaccaacgtcttcttaatatgtatccattcccagttccaatttccttccaatcatctcttaaacaaactaatcctcaatacaatactatctaatctcataaactagtacagatacttataactaacctaccttcatatcatatccaatcacaattttgtctacaacattccatatatcacctaataaccattattaattaaccatacactattcaaaacttgccttaatccttacttcaatactccttcttctaacacatattacc

SEQ ID NO: 74294 - DNA, 998 bp, Glycine max
  Clone ID: PAT_MRT3847_38100C.1
gaaccttaaaagaacaagagtggggcaaaatgggaaccaccgaaccaaaccaactcaatctgatagaacagccaatccggctcaacccgtgaactcatacaattggggtaccaaagttccaaccttttaaagatccaaccaagaacgaaattccattctatccattaacacgttcaaatagcatggagaatcggcctttgattccatcaagtcccaaattcgtttaaataccatttcaacaaaataaaactaacttcaaaagattaaacagaaaaatcttgatactatggaattaagtcatgataaaccatacgtccaaaatcatagataggcaactcaaaatcaaatgcgcaacaacaaacaaaatctcttataggagttgaaattttcttcagaaccactacaaactaaaatgtagcttcccagtaacagttttcacttaagaggaataaacctggatgagtgagtagcaccaataccaggtctcccgtgcttaacgggtttgtatgaaatagaaaactctgccagataatgcccaatcatctcaggtttgatttcaacctgattaaaggtcttgccattgtacactccaataatgctaccaatcatctcaggcacaataatcatgttgcggaggtgggtgcggacaggttctggcttctcacctggtggagcttctcttttcgctttgcgaagcttcttgatcaaggccatgggctttctggtgaggcctctctggaaccttctacgtgcgcgagcactgaacatcttcacgagttcatcggtggacatgtccagaagcgcatcgagatccacgcccctgaaactgaacttcttgaacgttctcttcttcggctgccctgctgctgctgcagccgccacatcgacctcaacgtctgccattgttccgcttgctagggtttctttccaacaacaagaagcagatctatctccatcacgatgaaatttcaaagattacccggacctgtcggccaagg

SEQ ID NO: 74295 - DNA, 450 bp, Glycine max
  Clone ID: PAT_MRT3847_38101C.1
ggccgaccacgcgtgcgtccaaaagcacgggcttttcgcttcagttcttgacaacccgtcctggacttcaaatggatgtgcttgtaaagttgctgctgctgttttggattgggccagagatcacaaggctgctgtgtgcacacactggttccaacctctcgctgcggctggtgtccgtgaaggtcagacaggacaggtccacacttgcatggtgaattttggcccagatggaacacccatctgggagcttgaagggaagactttgctgaaaggtgaaacagatggaagttccttccccaatggtggtcttcgtgccacccacactgctggaagatacacgattttggacccttcctctccaatttttctgcgtggtgacacaatttactttccttcaatttttgtcacatggaagggtcactttgtggatgaaaagacttcttttcttcg

SEQ ID NO: 74296 - DNA, 809 bp, Glycine max
  unsure (1)..(809): unsure at all n locations
  Clone ID: PAT_MRT3847_38102C.1
tgcatgcctcganatatagggcagtgtataccagaattgctaccaaaagaatcttacctcagggtccacatgattactagctatatttgcagcatccaaaattaccgcgataccaacgcgattattgcttaatgttacatttacaatcatcttacgactgctaggtactaatgtaacaatgtgcagaacacccaacgcatactgaagcaaatcatgcagatatcgctccacaggtggggcctacaaacaaccaagagaactataaataaataaattgcaagatatggggaacgcgtaaaataactgtcatacctgacataattccaacatagtaatatgtccattagatgccaagaacttctcaactgctagccaacgtgttctcacaaatgcaggacctaacttccgatccttttgtaattgtaggaatactgcatccattgcctcgttactaatatcaagcggcttgtacacagcccttacacttggaatatttctagcagcactacgattgcttttgtttggacgaatggaatccactaatacaaggagatgtgccctgaaatattgccgcaaagcaacacaagtgtgataggctatctgcttctcagatgatgtcagcacttcagcggatgatcgatcatttcgaagtgatcctgagttagataaactcaaaggctccagaattactcctgatcttactgaagcagcatcatttagaaagccaagtnatttttgtaatccatcaggggaatcaaaggcatcaagaactgctctaaagacaaatgcagcagcaaaaaacatgctgc

SEQ ID NO: 74297 - DNA, 1604 bp, Glycine max
  Clone ID: PAT_MRT3847_38103C.1
ggcttgaaaacatttccaaacatgttatataaatggggctgtcacatctgcgagggctgaacaagagttgggaaaataggaacaccactgaaccaaaccaactcaagctaaaagaacagcagccaatccggctaaccgatgaacccattacaaattggtgtatcaaagttccaaccttaagatcgaaccatgaaccaagttccattctatcgattattccatcaaaaatcggtcttcgattctatcaagtctcaaatacgcttaaataccatctcaacaaacatgtcaataaataaaacaaacttcaatggattaaacagtaaaatcttgatactatagaattaagtcatgataaatcatgtcaaaacatagatagacaactcgataaaatgcgcaacaacaaacaaaatctctgataggagtcgaaggttttcctcagaaccactacaaactaagaagtagctttcccaataacagtcttcacttaagaggaataaacctggatgagtgagtagcaccaataccaggtctcccgtgcttaacgggtttgtatgaaatagaaaactcagcaagataatgcccaatcatctcaggtttgatttcaacctgattaaaggttttgccattgtacactccaataatgctaccaatcatctcaggcacaataatcatgttgcggaggtgggtgcgtactggttctggcttctcacctggtggagcttcccttttctgtgaccaaacaaaaaggatatgattgttaaacagagaagctaattcctacaattaaacttcacagaaaacaaatatctataatccatctcaaacaacagaatacaacttgtcatcgagtaagtgaaaactgaacgaattaacagatattcacggtaataagtattaacaaaaacaccggaagaaattaagagagcgcttggtttcatggtgggactcatgaaaattgactttgaccgaaatcaaatttgatattataaaaatataggtgtttgattattgctaggtaaattcgattttatctcaaaaccttggttcaactagaaatcatataaaaaaaacgtaactattttattgtgttaagaaatttacaataagttttatagccctaaatttcagggtaaaagcatccaaaacaaatcagttcactagacaatcaattttacaaagccaaactttaccgtcatctggggaactgtagaggtcaatcactctcttgtggacacgaagttcaaatctatcccatgtgttggtaccttcaccacagggggacttcctggtagtgatgtgaagaaccttagtgggcatcctaacaggtcccttaaccctgaggcgcttgtcctttgcaccacgaaccaagtccgcacaaaccttctcgaggtttttgacgtgcttggaagaaagggtgatccttatcttatggatctgttcctgggactcctccaaccctggcttggtgggtttcatcgcagcgtacgtcgccattgttcacaccgattcaggaaaacggaagaagaagccgctgcgtgtgaaagttagagagagggaggattaggcgaaagaaggattagaagaagacctaaatggaggaagtc

SEQ ID NO: 74298 - DNA, 329 bp, Glycine max
  Clone ID: PAT_MRT3847_38104C.1
gaattgctgcataactgaggaaacggaggaagagaccgcactgccatcgatacgatatacgtcgattaagtatactgtggatcttgggagatgctgatggcaacaatgacctcaaaaagcctgttcatggccgcagcaaagaatatccataaccaagacggtgtcgttctgggcgatcatactcagaaccatgtcatctaaatgtctcacctttgacgttttttacttcaccaatatcctatactttttccttatgttcactgatgatctaaaacgactacttttgtttgcttccgatttacgttttgaaattctcaaacagacccttc

SEQ ID NO: 74299 - DNA, 256 bp, Glycine max
  unsure (1)..(256): unsure at all n locations
  Clone ID: PAT_MRT3847_38105C.1
gatttcagattttatctaanngggtaacaatctatctcccnnntttcgttccaatttccattcagcctctttagggatcgagagttggggctcgctggacctcaaccaagattattgcctnnnnncattgattaattaaattccgggaaaagaaccggatcttagtttttttcctcatctctacttgggatgatccattcttcgagagatgctatttacgaatcaaccctgctaattccaatacgcttgaccggag

SEQ ID NO: 74300 - DNA, 298 bp, Glycine max
  Clone ID: PAT_MRT3847_38106C.1
gggtcgacccacgcgtccgagaacacatgcgcattggagcacatgttaccacatcctgaagaatgtcatcaaggagaaatatgggaaagatgccaccaatgtgggggatgaatgcgggtttgctcccaacatcctggataataaagaaggcctggagctgctgaacactgctattgggaaatctggctacactgataatgtggtcatcggcatggacgtaacggactccgagttcttcatgtctgggaagtatgacctgtacttcaagtctccctatgtccacagctagtacatctcg

SEQ ID NO: 74301 - DNA, 336 bp, Glycine max
  Clone ID: PAT_MRT3847_38107C.1
agctcgagtacggctgcgacgacagaaggggattgtaaaaaatttcatttattacacgagagaatggagcaaaatctggaaaggctttttaagaggaaaaaaagggggagaataataaataaaaagtaaagaaaagaaggaaggaaatggtgtgtgtatatgtgttggtgcatctgcatgtcaccaaataagagaagaaactgactaatattactgtcaagccaaatatctgatttataacaagccagcctcacgaggaaaatcacatcaaggagtactcatggaggaagggatgagtttttgattctgataataatcatattaccacctttcttt

SEQ ID NO: 74302 - DNA, 1056 bp, Glycine max
  Clone ID: PAT_MRT3847_38108C.1
gaatctacaatcccacgcgtccgcccacgcgtccgtcggctgcgagaagacgacagaaggggagcatctagctagttaattcacaaacttgagttggattttggtgatcttgtgaattgatctgcgatgtcggacgaggtagttctgttggatacatgggctagcatgtatggtatgagggctaggattgcattggctgaaaagggtgttaggtatgaatacaaggaagagaatctcatgaacaggagtcctttgcttttgcagatgaacccaattcacaagaagattcctgttttgatccataatggcaaacccatttgtgaatctgcaataatagtgcagtacattgatgaggtctggaatgacaagtctccactcatgccctccgatccttacaagagatctcaagccagattctgggtggactacattgacaaaaagatttatgatacttggaagaaaatgtggctttctaaaggagaagagcatgaagaagggaagaaggagttgatctctatctttaagcaattagaagagacactaactgacaaacccttttatggggatgacacgtttggctttgttgatctttgtttgatcactttctctagttggttttatacttatgagacatatgggaacttcaaaatggaagaagagtgtcctaaactcatggcttgggtcaagagatgcatggagagagagactgtgtccaatactcttcctgatgctaagaaggtgtatggtcttattgtggaactgcagaagacacttgaatcgaaatagaagatttcaataaatcaacccattaaataatattttcatgttaaatatgttgttgtaaggtcttgtgtacttttcctctatggttgtgtgggttgggtcagtcatttatgtggtttactagacactaatacatcttctctattgaagattaaggtatctaattatttttcccattactatatattgaatattatcgtctttgacattgaaaagaaagaaaacgtagaaaaagcaaagacttgtattattcattaaaaacggaattctctc

SEQ ID NO: 74303 - DNA, 217 bp, Glycine max
  Clone ID: PAT_MRT3847_38109C.1
ggggtgggtcgcgagcatcgaatttcaagggttaccggaaggccggattgatagtatactctctcgcactaacccgagcgacgtgcttatgctttgcgtaccatcaaagatcttacgataaggcgtttaatctgacactttgtggaaaccgtttctcacttgtgattaccactgcatcatttgggagagtccttggtctctcaactattcttccaag

SEQ ID NO: 74304 - DNA, 236 bp, Glycine max
  Clone ID: PAT_MRT3847_3810C.1
cacataggtagctgatcgcactaatacagcattcttcctaagggctcacatcggcagtggacgatggccagaaaggcagcataatggctaagatcgtgacttgtgggaatgcagcatgcaaaaggagtgattcggactcatcggtacaacgtgtgtttaacatacagcgaccgtacacaccattttgttgcatgtaagtagacaaaatcagaaccacactgctgagaattgatcta

SEQ ID NO: 74305 - DNA, 697 bp, Glycine max
  Clone ID: PAT_MRT3847_38110C.1
cccacgcgttcgcagcactgtatcttctcccaaaataagagaacaagcttcaaccttcctctcttgttattctttctttctttcctcttcaacggaaactccaatttacgccgttttcccattgaaaaccccaccaattgaacgttttctagaggcaagttgaggtatgtacaagtcaaattaatctcaatcacaacttaattggtgacctggcctaacaccaatatcaatctcctatattcctttccatagccagtttcaacctggaacttgtcactactcactacaaagttggattcatcaaattaacaagatcgatcttccagaaaaagccaggccagcatcaagacgagagagtgctcactgtcactggtcaaatataacgcatcgtattacagcgttggatccaatctcggcacatgggcattctctacgcgctggtttacacacaagagatctccatctgcatgaccagcaacaacaacaccagttcccaagcttaaaccaagccaccgaggacgagaacagcggcagcagcggcgcgcaaaaaagggaacgcgaagaaaatagcaacaacaacgaaggtgcaggtgaggctgagataacaagaagacctcgaggaagaccagcagggtccaagaacaagcccaagccacctattatcatcacccgcgacagcgccaacgccatgagaacc

SEQ ID NO: 74306 - DNA, 343 bp, Glycine max
  Clone ID: PAT_MRT3847_38111C.1
acctgaagaaataggagctggtgagcggtgtcacatgtttggctatgccactgatgaaaccactgaattgatgccattgagccatgttctagcaacaaaactcggtgctcgtctcaactaggttcgaaagaacggaaccggcccttggctgaggcctgatgggaagacccaagagacactggagtatgacatgacaatggtgccagagagactgagcgagatcacagcggggctaatctccacccaacacgataaaactgttacaaatgacgaagttgttgtttaccgttaatatcatatggtcaacgctgtgatcccggataattgcctagatgagaagacg

SEQ ID NO: 74307 - DNA, 231 bp, Glycine max
  Clone ID: PAT_MRT3847_38112C.1
ccacaattaaaacgggcccatgcaacttccaaattgttcctttttttttaaaaaagcccctcatccccatgtagattaaaagatccgtttgaccccatcccatcaagaacatgccccattggggggaactttttttgcctttgatgaacaggggatgaaaaaaatccagatcctttttccatgggggcaataaaaaaaaaaagaactttgtcgggggatacaaaaccaaaa

SEQ ID NO: 74308 - DNA, 498 bp, Glycine max
  Clone ID: PAT_MRT3847_38113C.1
tacggccgaagacgacagaagggatactttcatagacagagcactaactcgacacgttaccagaaacttgctaagtatttattagagtcttccttaccaaatttctttaggagaaaacatttagtataaaaatcatacgaaaataataaaaaaattataaatggtgtaattttccttatttgaataaatacatttctaataaaaatttaactaatgtcctaacaataaatacatttctaataaaaacttaactaatgtcctaagaaggttggcatttacttatattataaaccttttgtcaaatattaaccaagagaacaaaacattatggaaactaattaagaaagttgaagtattcgaaccacagagctaaccattttttttattattttaataatactataaggaaccactactattagtcttttggtggttgtacttaaaataaatctggaactttgaaatcaaaataactactaactaaccgcgtcttttggg

SEQ ID NO: 74309 - DNA, 292 bp, Glycine max
  unsure (1)..(292): unsure at all n locations
  Clone ID: PAT_MRT3847_38114C.1
ccacgcgtccgaaattggttgagagggaacgctgctcaaacatgggtttttcatggatgatacaaattattcagtacatggagcatcaccagtacaaaaattttgattacgcctctaatggaatttgcaagaatttaaagtgttgctcttggaaatgaaataccaacgtggttcgacaatcaagatttgggcaggttaatggccatagacgcatcacccgttgtggatgacaatgattggatcggcgggctgtgttgtatgtggggtacatcatgaaacanttttagctatg

SEQ ID NO: 74310 - DNA, 395 bp, Glycine max
  Clone ID: PAT_MRT3847_38115C.1
ggaaaaaaaaaaataggcgggggacccaaatcacaaatatagggtaaaaaccgtaggggggggggtgaaacaaaggttaaatttttccaaaacaaagggtttcctaaaaggattccagaccccacaaaacctaaaatttcatgggagcttccataggaaataacggggggaacaaattaacccgggacctggacaaactttggggggactggaaaacaaaaaaggggaagggggttaaacccccaaggccaggatttcagccataatccttggctttccccattcggggggacccaacaataaacacttgattaaacaaaagaggaaacccaggatcccctaaacccggcttttaaactttcccagggcccggggagctaaaccaagggcataaa

SEQ ID NO: 74311 - DNA, 599 bp, Glycine max
  Clone ID: PAT_MRT3847_38116C.1
gttgacaatttttttgtttgatttaagcaaaaacacgagcaccgagtttttgactatgcatgcaattgaaaaagaaaagggcccataaagaatgtcgtattgaaaggaaactggacacggggttctaatgaaggtatcaatttggaccatcctaggattctttaaagaaaatataaaggcaccatgactaatttatatcctttaacacgcttaaagagagctatagaaagccatttcatatccattcaaaaatctgtttcatttcacaacgagccgagttaccattgaaccttcagcgcccacacctggattcttgaaggctcacaacttccaattcgtggaaaatgagaatggtgggaaaacaggggcacctttatggggaattttagatatctggattgagctgaccgcagacctatcttggttttaaagcacacccatgcatttttccagtaacttgacgccctgttcaaaggccaagatttcatgccactcatcacggagaattgggctaccgagatgatttccaagccctgatgctacatggctgtcctcaaaattaatgccggtcatgttaaccatgccaggggacttgtgcc

SEQ ID NO: 74312 - DNA, 539 bp, Glycine max
  Clone ID: PAT_MRT3847_38117C.1
gcctcggacgcgtgggttccaataactttggtgctatgatcatggagatcaatgcatcccccgacaacattaattcagtcaagtacaacgtacatgaaaaacagccttaccgaacttggtaccactttcagcccccacaaaattggatgaatggtatcatccttactccatggcactctcttatactgtcctttcacttctagcacatacgcttatgctaatatgttctaaatcactactgtctatgtctaattattttctctgccatttgacatgttttgctgatgaaaattgaacatggttgccttcatcatgcagatccaaatggtatgctagtgaacttctcctacttccagttaaattagtatttatctctggtccatgttacccccctcccccaaatcccaatgagaaattatttggagaaataaacaatcactccttgttcatgttaaccccccattagattactatatgatgtgtaaccatcatgtttctattggtctgactaaatcttatgtgtgacattgtagtggatt

SEQ ID NO: 74313 - DNA, 436 bp, Glycine max
  unsure (1)..(436): unsure at all n locations
  Clone ID: PAT_MRT3847_38118C.1
gggctcgaggcagcaaaggtgtatggtgcagttccaagtgcagcagcatcggtgagtcccagcatcggaggagcaattgaatcgttgccggttttggatgtcgtgcctatatcgcaacaagccgaggctgctaggaaagctttgcttgagaatgtgaggaggcttaaggaatctcatggaagaactatgtcatcattgagtaaaactgatgaaaatttatctgcctcccttttgaacatcactgctcttgaaaactctttagtagtagctgatgagaagtaccggtttatgcaaaagctccgaaattatgtcacaaatatatgtgactttttacagcataaagcatgttacattgaggaactngaagagcagatgaagaaacttcatcaagatcgtgcatcagccatttttgaagaagagcccactacatgatgat

SEQ ID NO: 74314 - DNA, 222 bp, Glycine max
  Clone ID: PAT_MRT3847_38119C.1
aggggtgaggtttaagtttttttagtgttattaaaaaggacagtcgagttcaaacgttggatgtccaagaaaccacaaacaaagacggacctcacggaaacaggggagtgaaaaaaacaaggacctgaagaggaacaataccccagactggagaagacaaaattgggggcataaatctaagaaccagattaggaaagggagaaccacgttggcaaaaaacca

SEQ ID NO: 74315 - DNA, 894 bp, Glycine max
  Clone ID: PAT_MRT3847_3811C.1
gaagaatcatcgaatcagtttaggatcatgagtgttgggttggatgggtacttgaaggtgtttgattatggatcattgaaggttacacattccatgaggttccccgcgcctcttttgtcagtcgcttactcgccggattgttccaccagggcaacgagaagacgacagaaggggatctatgctagcaagaagaagataagggaaaaggaaaaggagagggagagtgaggctagcttgttttggaaaatagcacctgtggagaacactgagaagaaagcgatgaggccttcgcatttcaggtatttccatagagggcagggaacgaagccgtccgagggggatttcttggttatgaagcccaagaagaagaagtgggctgagcacgacatgctgttgaacaagtttgagcatggggaggctctggtatctgtgttgcaaactatgaaccccgggcatgtggtggctgtgcttgaggaattggtggctaggaagaaattgcttaagtgtgtctccaacttggatgtgaagaatttggaactcctcttggaattcttgcataagtattgtaccatgcctagatattctagtttgttgatggggttcgccaagaaggttcttgaaatgagggcggatgatattagagcttctgattctgaagccatcaagagtcatatcataaatctcaagcgggctgttgcccaggagattcagattcaacagtcattgcaagagatacagggtataatttctcctttgttgaagattgctggaagatgaaattttgggcttctcatccatgagctggttttgttaggctatcctcttcctctttttttttttttttttctctctctctctctaatttttatttaagaatgtatgtgttattcttgt

SEQ ID NO: 74316 - DNA, 469 bp, Glycine max
  Clone ID: PAT_MRT3847_38120C.1
ttctctaaagcggccgcttggggtgttgttttttttttttttttttccgaacaaattcaagaattagataaatcctatgtcttgcccagaacaaataccaggaccctcatcaaaaagggttcaacatttaatccctaaagatggcataccaaatgcataaactatttttctttttgcaggtatgcccgcgggctaattgaaccctacaaaagaatcttaaagctacaaaacctattccacatcaccagatctacaatatggcatgaatgtatgggcctttgcaacattcctcctcctccttttctcaacaaatgcttgaagtttgccatatgactttaaacggttatatttttcaataaacctttgcttccgtattttaaatttcttgagataaaagggacgaaccccctgctttggtgattatatttctttctttttgagcttgggcaatatttcagccacaatatgc

SEQ ID NO: 74317 - DNA, 249 bp, Glycine max
  Clone ID: PAT_MRT3847_38121C.1
tgcgatttcaagcttgtctgtatgatttgtatgtggtgaatatagaaaaatctattcccctgttcgccgctactctgctttgatatccatctgtatttgtaaagaaagaggtagtagataatgcaaggtgctaatggaggcgatgccagagctgtgaacaacactttggagactatcaacgctgctgcaactgtcatcgcttccatcgagaatcgccttaatcaacctcatcctcacgtccagaagaaa

SEQ ID NO: 74318 - DNA, 1008 bp, Glycine max
  Clone ID: PAT_MRT3847_38122C.1
cttgctaatactcatttattaaaaaatatctcttccaccccaacggttcacattcccaacgtgcaaagactaattaaccacagtaatgggttgtttgtattttcttagaaaggacacgatggaagaaaaggtaaataaggagcaccaggtttgcacatcggatggagctattgatagccatggtcatcctgcagttcgagagaaaacgggtgactgggttgctgcaattttgattttagtgaatcaagggcttgctactttggcattctttggagttggagtgaatttggtacgttgtttttgacgagagtgatgggtcaagacaatgctgaagcagccaacagtgtgagcaagtggacagggacagtttacctcttctctcttcttggagccttccttagtgactcttactggggaaggtacatgacctgtgccatcttccaggtcatatttgttattggtttggtttcattatcactatcatcttacatatttctactgaagcctagtggttgtggaaataaagagttaccatgtggatcacactcatcataccaaacgattttattctatgtttccatatacctaatagctctaggaaatggaggataccaacctaacattgctacatttggggctgatcaatttgatgaaggagatcccagggaacaacattcaaaaattgtatttttcagctatttttatttggctttgaacattgggtcactcttctccaacaccatattgaattattttgaggatgatgatggactatggactttgtggttctgggcttcagctggctcgatgctgctctggcattgattttgtttctttgtggcacacgaaggtatagatactttaagcctaatggaaaccctcttcctagattttgccaagtttttgtggctgctacaagaaaatggaaggccaaggtgctacaagatgataaactttacgaggttgatgagttctcaaccaatgaagggagaaaaatgttccacaccg

SEQ ID NO: 74319 - DNA, 651 bp, Glycine max
  Clone ID: PAT_MRT3847_38123C.1
tttactttgtatatcattccgctgtaaatataaggatcttatcctatagatctattgtggtcttgaaactttataattctaataatggaaacagcaaccctaattgccatctctatcagctagttagctagccgctctttccctagtcttagctagtctcattttccttcggcttcgcttcttgtaaggctcacttcacttctggcttctggccaggcatagaattctttgaccggctttggtcgagcaaccggaacggccactgcctacataacttgctcttttcaagtatcagaccttctgtagttatcggtccttttttatacagttcctgacaggtgcgtggccagccctgaagtattctgtgagcccaatctgtttcacccccgttcccacctcttgatttttttgactttctttaaaaaaagattggaagaagagatggcattgataagaaccttatagggttggctccggtgggtccctaattcgacttcttttacatatgagtcatatgttttcatcgaaagaagtttcccagtacggtagaacaacaaggtccttctttcatctcgtttgctcctttgagaaagctcatcccgggaatacccgtcggagagcagagctttctcatggccctttcgatttgac

SEQ ID NO: 74320 - DNA, 410 bp, Glycine max
  Clone ID: PAT_MRT3847_38124C.1
acacccccaaaagcccccctcgcccttgatgaaatatttgctggaaaaaggggggagaaatgggaagtggaaaacaccggggaacctggggggggacctagatggcggacaattccccccgggaaaccccgggagatgaataggaaaacctaagggtttgaaggtggccagttggtaaaccggcctttttgggccccacgttaacgggggatgggggaaccctctgccccgaagaggaattaggcattagggatggggaagctggaaatacggctctctgcccatgggggggctctgggggctttagatggtcgctgcccactgaatacgcactgacttccttgcgggggagagggggagtgttgagattgtcgacttacaaaatcgcatcccctcgctagggacatagg

SEQ ID NO: 74321 - DNA, 340 bp, Glycine max
  Clone ID: PAT_MRT3847_38125C.1
gacgatgaacaacgagcatggacatgagcatgggcaggacagcagcagcagccgcgtcagtgattaaactgctgcatcagctatatatttaaaaggtttatgcggaccatacttccgaaggctatgcctgaacaactgtatatgtctgtgtatctgtatctctatatctgtgattcctttttacctatctagcgatcgatttatgagtgagaaaaccaagggtgtgaaattgtgcgtgaatctggttgctaatacgagtgctattagactgtgcctagactggtttgaaaccccgatactggagttatgtatgattgtctattatactatagaaacaaaa

SEQ ID NO: 74322 - DNA, 386 bp, Glycine max
  Clone ID: PAT_MRT3847_38126C.1
atacggtttttcattattaaaaaggtttattatgctaacattattcgtgtaacttctggtgtaccggaacaatgtcgcaagcctcacatatgtctacaaaaatctacatcacaaaagctatttctttatttctatctgctataccctctaattctcctcctatatacttttaattgcgctaccctgaatagccatcttcaccgtcttcttcttcaactaaactcccaatttctcgaaccaaacccaaatcccttctcacctctttcaccattctcactcctcttaaccccatcttcctctcctctccttcttcataatatatcggctgtgatcactcttttaccaatatttacaatggtggtcgaatcacttccatgagacatttt

SEQ ID NO: 74323 - DNA, 215 bp, Glycine max
  Clone ID: PAT_MRT3847_38127C.1
gtgaattctactacaacccaccccttggatacatattcccctcctgcataatcttacataagtagtccttgactactatgattcagaacacaaccatgactaagcacggcacacaccatctcagtatattgaccgactagcagcaacccatggcatgtacatgtcgctcaccaaccagatcgttaaactaagcactgaatccaagcacacacatg

SEQ ID NO: 74324 - DNA, 233 bp, Glycine max
  Clone ID: PAT_MRT3847_38128C.1
gcttgctagacatgcccatgaggaagggtgccgggagctgcctttgcacgagcagaccctaatccttacgctacggagatatcagagaccacgatgccctggggaacgctgatcaaatgcaagagatgatcgtgagctgtggctatgcccgggccgatcaaaggcggcttatttgccactgcagacgctataaatgaaatggtctgccagccctactgcaagaagctggacca

SEQ ID NO: 74325 - DNA, 154 bp, Glycine max
  Clone ID: PAT_MRT3847_38129C.1
gtcggacccttatatcacccgctctatcgcacgcgaacacgaatctgtcataacgctcagtacgagggatttacatagcatacccagtttacggaattccatcactttaatgggcagcaatctatcacgtagaacctagatcttcggctttcaa

SEQ ID NO: 74326 - DNA, 430 bp, Glycine max
  Clone ID: PAT_MRT3847_3812C.1
ggggccgggattcatataatttaaccttataaataataataacaataataagatgggctttactttcccttttcaccattatcaaccatttttcacttgccatataacaagagggtcctaaacagaatcacaaataatcctacatcggggctgggatgggaaagcatactgaaactgaatccccaagggtaatacaatataacatttatttaccattttgacagatacccagcactttaagcacttgcagcatttggaaaatcaatccggtgttgcaggcctaaaaatagtcttttttcacatttattcatacccctcccacataatcattcagcaacgtgatgcatggctccacttaaaaagggcaagaatatgcattacaaagtcctgggttggcgcttttataggggaacaaggcaacagggcgagt

SEQ ID NO: 74327 - DNA, 314 bp, Glycine max
  Clone ID: PAT_MRT3847_38130C.1
ccttgctgatcctcatgatgggaaccaccacttctccggactgtctctatacactcctcagcatcaaaccatgaccgtgaagaatcctcttggctccctttccgcaccccaagtcaaaatatttctcttgctccaaacccattgatacaagtctcagaaagaaccaacctccatcttccagaccttgatcggacacacgctggatggctcatgctcaacagggcctagcagcttaggctatctcctaggcactcaaccatagcccacgattgatcaatggcaatgcattggcacttgagtttgatgtgcttaat

SEQ ID NO: 74328 - DNA, 387 bp, Glycine max
  Clone ID: PAT_MRT3847_38131C.1
attttgaaaaaaaaaaaattttatttaaaaaaaaaaaaaaaaaaaaaaaaaaaaaaaaaaaaaaaaaagaaaaaaaaaaaaaaaaaaagccggggggccccccgccaaaaaggccccagcctaccgaccccggccgggcaccctcatcgctttggtgtggggcccccaaaacaccgtcccgggcccgacatctaccaccggtgggaggggaaaaccctggccctcccccaccttatcccccgggggcaccatcccccttcggcccggggcggaaaaaccaaacaagcccccccccgaccgccttgccaaaaggtgccccccccgaaatggcaacgggaccccccccggtagggggcattaacccgcgggggcgggggggctaacccc

SEQ ID NO: 74329 - DNA, 111 bp, Glycine max
  unsure (1)..(111): unsure at all n locations
  Clone ID: PAT_MRT3847_38132C.1
ttgagggtgctgaagatgcaaagggtagaggaaggcatgttatnagtactgcaagaacatgcgattgcatttagattgcccttgaagcaaagaagccaattttttataagc

SEQ ID NO: 74330 - DNA, 245 bp, Glycine max
  Clone ID: PAT_MRT3847_38133C.1
actcgagccgattcggctcgagcatctcactacaccaaaaagaacaaaaaaattaagaagaactatgaacaagagctcaataattccaccactcccatcttgtgttgttgttgttgttggttgaagaaagaaaaaaaaaatacaaacacaaaaaaaaggctagccaacatcatcgatatccttacttccctctgagaccattgttcctagttcctaaccgaacaagggtatggtactgtctctct

SEQ ID NO: 74331 - DNA, 445 bp, Glycine max
  Clone ID: PAT_MRT3847_38134C.1
gttgtcgcacattgaaacatccttaagaaaggtttttgttttttcttgtccaaggccaagggataggatttgaaatctaaaaaagaagaagaaattgtcgttgccgacaatcacctccgatagtatcacacagtgagccaatgacgaaggctgcaggagagagttaggaaaagaagaactaattaagcttggagggtgtaagataaaatgatgcaccataaaccatatgaatttgtggctaaccataacatgctccccaactattttatttaaagttcaaaaaaatctcttaacatttgctttgtgcttcatttatgttagaccaaccttgatcataatgatatatatatatgctccctccatttctttttaaaattttaaaatcatgtcttaaaattaaaaatgaatggtgtattggaagaacaatattaacttaaatttgaga

SEQ ID NO: 74332 - DNA, 379 bp, Glycine max
  unsure (1)..(379): unsure at all n locations
  Clone ID: PAT_MRT3847_38135C.1
gcaccagggcaaattcataagcccgcagcaatgcttactgcatatttattaatactactatatgatttcatcatttgaggaaaaaaaaaaaaaaaaaaaaaaaaaaaaaaaaaaaaaaaaaaaaaaaaaaaaaaaaaaaaaaaaaaaaaaaaaaaaaaaaaaaaaaaaacctgggggggggccccggacccaaattccccttataggggggtttattaccgcccctaacttggcccgtgttttaacaacgnnggaatgggaaaaccctgggggttcccaaattaattcgcttggaagcaaatccccttttccccagtgggggaaaaaggaaaaaggcccgccccgatcgcctttccaaaaagtggccaaccttaaaggg

SEQ ID NO: 74333 - DNA, 553 bp, Glycine max
  Clone ID: PAT_MRT3847_38136C.1
ggctcgaggccaaaacgcggttgtatactgttttattcacggggtgtttttcttttgcctctatgacttgaaaccttttctctctcacaccaaccaccaatatattaacccctccactctctttcattcttcacacaacatcaaaagcaacaacaacatgcaagtccaagaggaattacttgtggcttccaaggatcacacccaccaaatgatgatgatcaagggcaagcgaaccaagcgtcaaagggcaccatcccctcttagtctagccatgccttataataattcaacctcaagtagcaccaacaattccattgatagtgccacaacctcaccctctcccaccaacacaattgaattgagagaagacgaagacatggcgaattgtcttattcttctcgctcaaggcagacaccacgtggcagcaccaacgtcgtatcacaacaatgacaacaacgataaccacaagtcaacaagcctatacctttaccagtgcaagacttgcaacagatatttcccttcattccaagcacttggaggacatagagccagt

SEQ ID NO: 74334 - DNA, 923 bp, Glycine max
  Clone ID: PAT_MRT3847_38137C.1
taagtttcaccctgtcctacaaggtttcgacatcttatgacctgaagtcgctttgttactgcatttcaccatgttaattgaattcaagtttacactttgaattgagtatacatatactttattaattagatgttaaatgaaaattggcatgtttggttttagaaaatgttttttttttcatttcttgttttcactagtaattacaaagttttggggacacatagtaatggcttatgcgtttaccttttggacttgctatgttttgctaaaggagtatgggaaggttgcaacaatgagacttggctttcttgcagcagaaaagcgtcgtcctgatcaatttacggtgcttgttagaaatattccaccagaccctgatgaatctgtgagtgaacttgttgagcacttctttctagtcaatcatccagatcactatctgactcaccaggttgtttatgatgccaacaaacttgctaagttggttgaaaagaagaagaagtttaaaaattggcttgtctactatcaaaataagcttgaaagaacttcaaaaagacctgaaataaagactggtttccttggtctttggggaaagaaagtggatgctattgatcatcacatcactgaaattgacaagttgtcaaaagaaattgttgaggagagggaaaatgtcacaaatgatcccaaggccatcatgcccgctgcatttgtttcatttaaaacaagatgggctgctgctgtttgtgcacaaactcagcaaaccagaaatccaacactttggttgaccgaatgggctccagagccacgagatgtatattggcgaaacttgccaattccatatgtttccctcactgtcaggaggttaatcatagcagtgacattcttttttctcactttcttttttatgatccccattgcatttgttcaaa

SEQ ID NO: 74335 - DNA, 577 bp, Glycine max
  Clone ID: PAT_MRT3847_38138C.1
gtgcaatcaaactcagtaataactggatgtaaattcagagggatgatccacaatatagcttccaaaagtattttgctccgggagttatgtggaatgcactgaaaagaaaagagaaaggattttgtaatgagccccaaagaagcagcgttttggaaggcccaacaaagtgttttgacccttttcaagcagtgttcgagcatgaagcatttgaaggagatgcacgctcgtgtagtccagagtgggttcggcaagaccccgcttgtggtgggaaagatcattgagttttgcgcggtttcggggcagggagacatgaattacgctctgagggtttttgacagaatcgataaacccgatgcgtttatgtggaacaccatgatcaggggatttgggaagactcaccaaccatatatggccattcatttgtacaggagaatgcagggaaatggtgacgtgccagctgacactttcacgttctctttcgtgcttaaaatcattgctggattggaatgtcacttaaatttggaaagcactgcattgaccatccttaactcgactcgattctatactacgtaagaac

SEQ ID NO: 74336 - DNA, 250 bp, Glycine max
  Clone ID: PAT_MRT3847_38139C.1
cactatgatacaagacaaggtttcagtggtctgatctgaaactctaatcctgccacatcagagtacactatcagagacagagcaagcgttcttaaacgccatccttgatctcctcaatagcgcctccattgatgcaaaaagatctgatatatacaccgtgggtatctatgacggcgagaacatcaccaggccgtacgggataaaccacttcgtaatacttgcgcatctcggcctacaggatggagtaaat

SEQ ID NO: 74337 - DNA, 634 bp, Glycine max
  unsure (1)..(634): unsure at all n locations
  Clone ID: PAT_MRT3847_3813C.1
ttttttttttttttaaaacataatagttaaaattataattaattttagaatttgttacacttgtatttgattgttatcaatcacaactgtagtttttaatttacaaaaaacaattataagtaatctcgtcaactttagaaaagtcgtatcatatttaatttagtgactaaacacttgagggctgggggagaatacataaggtgatgctttcattatttcttatacaaattttaaaaaacagaaaatgaaacaaaaatagaaatattttctagcaaactaggaccacgaagtgtggctcaaacgacaacttggagttaccacaactttcaaatttcaatgcaccctaagggagaagtatgcctcttgttgctgtgaattgaacggacatttgagctgattcaacgtcaaaacaaacatgctaaaaatctcactccttcaaaggacagaagaccaaaatcactaagacaactcgtttgtgcccaaactgaatactgaaaaagttttttaaagataaggttcaagaagcaacagtatagaagcttgaacaaagggactataacggttcttatgtggaccaagcaaaaataangcaattatctttgtttctaccaaaacaaacaaacaaggaatcaat

SEQ ID NO: 74338 - DNA, 273 bp, Glycine max
  Clone ID: PAT_MRT3847_38140C.1
atagggtaagctgagccgcctccccggaccggaccggaactgcagggccgacccaacccacccgggctttttctttcggactcatgagtgcccttcaaccatctcagactgcggaaccatcgatcgctgtacgcctattgaccaaggttggacataggactatttcagagccagtgctgccacccagcgaacgtatcttgtataaggaatgtttaacatgcgggcctctttgggtaatactgggtgtgcagacctagcaatggactgggctat

SEQ ID NO: 74339 - DNA, 290 bp, Glycine max
  Clone ID: PAT_MRT3847_38141C.1
ttctaagataatcaaaaggaaacaaccgttcaacatttatctcacaccatttcgtgaataaaaaaaatgttatggttttcaaatattctcaatataattccgtgaccattggtttttaaaaattgttcaaaggttattaatgcaaaactttctcctatctcaagttccttataaagagaaattatattaaaaaatgttattttatcatccattcttgttactcttaaatggtaacactataccaactaaattttgtcacatatcccttaatcatttcatttacttaattt

SEQ ID NO: 74340 - DNA, 298 bp, Glycine max
  Clone ID: PAT_MRT3847_38142C.1
cggaaacgggacaacatactgtccacagggaaataggagggcctttattgcttaatgaaggaaatatattcgtttacaaaaaaagtaacccctctcactgtatgtcatcggcataactcatgcaatattttgagatgctctatcacaggcgacaaagtgtttcaaacatttgattttgccaattagaacactctcaagcatatgaggtcattagacaggatgattatccatagctcttggcatgaggattgactggacacattccacccaacatcaggcttctttctcttacaaacac

SEQ ID NO: 74341 - DNA, 149 bp, Glycine max
  Clone ID: PAT_MRT3847_38143C.1
ccctaattgcgttcttgattatactctgcaaattaatttttgggttccagagtcttatattataaatggcctttgccgcattcatagtgttcaggaaattggggctattagccagaggttgtggagaaaaatcgcttgtacctgtagat

SEQ ID NO: 74342 - DNA, 489 bp, Glycine max
  Clone ID: PAT_MRT3847_38144C.1
acggctgcgaagacgacagaaggggacagagatattccaatatatacattgtttttcttaaaagaaaaaagttatgttctttaaatacgaaaattccaaatccaccttcatggttttggtagatgggtaggttacgggtctaagcaaatggctaattacagcttgagcagacaagacgcgctttatttgctttcattagcttttcaactttgagtttgaaatgcaagctaggttgcacaccattggctttattcttggaaaattggaatattgaaccctcgatttccttacaaatttcccgttgcaagccgtgaatgagttggaagcgccgggtgtttaagtcttcaccagtggcatcaaacaatagttagatcagatgtgtaacagaaggtatgaaacaaatcaccagtaacttggacttttttaacattttctttataagatatagtcaataaatttgatcaaaattccattattaattatacaaat

SEQ ID NO: 74343 - DNA, 720 bp, Glycine max
  Clone ID: PAT_MRT3847_38145C.1
acgaggtcacctacatctcgagccgattcggctcgagccagaatttgggaaagaatatacaagaagccaattaacatgttttcttttaattacctattcaccaccattttcttagtgctaacattctttctttatccatcaaatgctcaactgagttcaaccttctactccagcacatgccccaacgtgtcttccattgtgcgcagtgttgttcagcaggctctgcaatctgatcctcgaattgctgcgagcctaactcgtcttcattttcatgattgctttgttaatggatgtgatggatccattttgttagacgtaggtggcaacataacactgagcgagaaaactgcaggtcccaacaataattcggctcgtggctttgatgtggtcgacaacataaagacatctattgaaaattcatgccccggtgttgtatcttgtgctgatattcttgcccttgctgctgaagtttcggtgtctttgggaaggaggtccttcatggaacgtactactaggaagaagggacggtttgattgcaaaccaatctggtgcgaacacatccattcccaatccaacagaaagcctggccaatgtcactgccaaattcgctgccgttggcctaaacataactgatctcgttgcattatctggtgcacatagttttggtcgtgcgcagtgtagatttttcaaccagagactgttcaacttcagcggcacagg

SEQ ID NO: 74344 - DNA, 227 bp, Glycine max
  Clone ID: PAT_MRT3847_38146C.1
acgcttacacttccataacttaatctatctcaatactgatctgcatccgactaccattaccccacggtcagctccttttgcttattaactctctagaaacatgccaagacaatccaaaaagtttggctccaacctctaactaaattttaaacccaataacgttccttatcactcataatgacattaacttcatcaaccaaaacttctaattaatcccatataacatt

SEQ ID NO: 74345 - DNA, 855 bp, Glycine max
  unsure (1)..(855): unsure at all n locations
  Clone ID: PAT_MRT3847_38147C.1
ggaattcggcacgaggagtgttcttccacccccgtaccgtctctgcctctctgcaatccacagccgaaatggtgattcctcttcctctcttcactctacaccacttgttctctttcaaattctcgtattcttaatgtgttttctctgtttcttgttcagcctttcaagaggtacgttgagatcgggagggttgctcaaatcaactacggcaaggaatatggcaggctcgtcgtcatcgtcgacgtcattgaccagaacagagtaacccctccaccacccaatttcttacctttgatcacatttaagcatacccatttgcatgttttcttagaagtagttgttttttgttgttgatgataataataggcacttgtcgatgcccctgatatggtgaggtcccaagtcaatttcaaaaggctttcccttaccgacatcaagattgacatcaagagggtccctaagaagaaagatcttgtcaaagccatggaggatgctgatgttaagaacaagtgggagaagagttcatggggtagaaaactcattgttagaaagagaagggcatccctcaatgattttgataggttcaagataatgttagccaagatcaagagggcagcggttgtaaggcaagagcttgctaagctgaagaagagcgcttaggcataacttcacattatagtcttcaaattttagttatgaatttgcttgccttggttgttatgagatttcaagtatcatcattgaaccacgtttggtttactgttagggatttatgtcagtactccaagtttcaatactttgcattttcttgcagattttataatattatnttcaatattaacttatattcccaga

SEQ ID NO: 74346 - DNA, 489 bp, Glycine max
  Clone ID: PAT_MRT3847_38148C.1
gaccgtaccgtgttgcctctctgcaatctacagccaaaatgcctttcaagaggtacgttgagatcgggagggttgcccaaatcaactacggcaaggaatatggcaggctcgtcgtcattgtcgacgtcattgaccagaacagagtaactccccaccaccacccaagttcttacctttattcacatttacgcacacccatttgcatgttttcttagaattagttcttgctttgttgataatcctaataatattaggctcttgtcgatgcccctgatatggtgaggtcccaagtcaatttcaaaaggctttccctaaccgatattaagattgacattaagagggtccctaagaagaaagatcttgtcaaagccatggaggatgctggttcgttgcttttctatcgattattgttattgttaattttatcattaggttataattgaaaatatttgtttatgttacttgctaatgaacagatgttaagaccaa

SEQ ID NO: 74347 - DNA, 445 bp, Glycine max
  Clone ID: PAT_MRT3847_38149C.1
gctggaacaatgagaccatttatcctttagaaccagcaggcgcaccggggagaaaacgcaactggaccagttggactaaaaactcactattgattcaagacacccttttttgtttgggccgattaactgtgtttagccacccccttgaactccggacatgacatgcaagctcacaatgttttctatgaacgccattcctagtaagattcacaattttacactaccttcctcaatggtgtacttcagactccagttgtccacaacgggggaatactaaacacgcttgtagttatacaactgtgcaatttccagtatacgcagttcatttgtgcatgcgttctctgggcaatgctccagctgaacaatgactcttaatgatatcgtgtacaagggaggactgataatcaacgctactacatatccagcggtcggagatgaagataca

SEQ ID NO: 74348 - DNA, 545 bp, Glycine max
  Clone ID: PAT_MRT3847_3814C.1
gggggccaaacgtagccctagagataagtccttttgcaataaaaacattggttatcctcgtagtgccgcaatcgccgttgctgtgctgttctgttcataactcctttctgcagatcatcgtcactccccccaaaaccaaccgttcaattcacctctctttttctctcttttgagactgttcctaattggtcataaatggggaagcccacggggaagaagaagggtaccgttactccaggcgctgcaaattcacacgccaagcacggaaaatcttccaaagccttcgatgaagacacggcggtgttcatcaccatgtcacaagagttcagggaagaaggcaacaagttgtttcagaagaaggaccacgaaggcgccatgctcaagtatgagaaggctctgaagcttctcccgaacaaccacatcgatgtcgcgcaccttcgcaccaacatggccacgtgttacatgcaattgggtctcggggagtaccctcgagcaattcaccaatgcaatttggcgctggaagtgtctccgagatacagcaaagc

SEQ ID NO: 74349 - DNA, 731 bp, Glycine max
  Clone ID: PAT_MRT3847_38150C.1
tgttcttccacccccgtaccgtctctgcctctctgcaatccacagccgaaaatgcctttcaagaggtacgttgagatcgggagggttgctcaaatcaactacggcaaggaatatggcaggctcgtcgtcatcgtcgacgtcattgaccagaacagagcacttgtcgatgcccctgatatggtgaggtcccaagtcaatttcaaaaggctttcccttaccgacatcaagattgacatcaagagggtccctaagaagaaagatcttgtcaaagccatggaggatgctgatgttaagaacaagtgggagaagagttcatggggtagaaaactcattgttagaaagagaagggcatccctcaatgattttgataggttcaagataatgttagccaagatcaagagggcagcggttgtaaggcaagagcttgctaagctgaagaagagcgcttaggcataacttcacattatagtcttcaaattttagttatgaatttgcttgccttggttgttatgagatttcaagtatcatcattgaaccacgtttggtttactgttagggatttatgtcagtactccaagtttcaatactttgcattttcttgcagattttataatattattttcaatattaacttatattcccagaggttgcaagtgagagttgcaattggttttttccataaaaaaaaaaaaaaaaaaaaaaaaaaaaaagcggccgctctagaggatcca

SEQ ID NO: 74350 - DNA, 1189 bp, Glycine max
  Clone ID: PAT_MRT3847_38151C.1
ctagtctcgagttttttttttttttttttagagtcagatttaaccatattcatattaacgacaacaataatacattttggccaaaggcctattcaaatgtaaatttattagataacatatagtctatggtaaccatactgataggcatagtttgcagttgaaatcatcacatcacaaacaagaattaccaaaaaaaaacaacaaaaaacttgcatacagttcttaaagtatttttggtgccattttctgataagaatcagagttttaccttgataatccggtactatcaagataaaactctaattttgattaaaaaacaacaccaacatctaagaaactgcatctaaatttcgttgtacaagaaaaagaactagaaaatagtacggtacacataaaaaggggtgttgccattctgagatgtccctcaagagcccaaatcacagtgtgtgaggtgagatggagagccaccgtaccgtgttgcctctctgcaatctacagccaaaatgcctttcaagaggtacgttgagatcgggagggttgcccaaatcaactacggcaaggaatatggcaggctcgtcgtcattgtcgacgtcattgatcagaacagagctcttgtcgatgcccctgatatggtgaggtcccaagtcaatttcaaaaggctttccctaaccgatattaagattgacattaagagggtccctaagaagaaagatcttgtcaaagccatggaggatgctgatgttaagaccaagtgggagaagagttcatggggcaggaaactcattgtcaggaagagaagggcatccctcaatgattttgataggttcaagataatgttggccaagatcaagagggcagcggttgtaaggcaagagcttgctaagctgagaaagagcgcttaggcataacttcacattatagtcttcaaatttttgttatgaatttgcttaccttggttgttgtgagatttcatgtatcattgaaccgcttgatttaatgttagtactccaagtttccaatactttgcatttgcttgcatattttataatattatttgtaagattaacttatattctcaggctgcaagttagagttgcaactggtttttctcccataattttatatttattaagttggctttgtgattagaatgttcggcattgtagtttcaatttgcgtaacactggta

SEQ ID NO: 74351 - DNA, 144 bp, Glycine max
  Clone ID: PAT_MRT3847_38152C.1
aaagtctaaagcggacgtttgcaaaaatttgatgctgtggaggaggaccacgatgaggagtagaatctaaggacggggggagtgagtgggtaagagccatgctggagaaggtcaagacgacagaatcagaccattcactactgg

SEQ ID NO: 74352 - DNA, 137 bp, Glycine max
  Clone ID: PAT_MRT3847_38153C.1
acggacaatgaaaaacgaggtgaacggcttaacaaaaatagatactccactggctcttggcttagaggataccaatgtcattaattccacaccccctcacacattgttttgattaatgtcacctaaattccatcgaa

SEQ ID NO: 74353 - DNA, 211 bp, Glycine max
  Clone ID: PAT_MRT3847_38154C.1
atcgagcccaagcctttcgatagtacggcggaagaagaagataaaaaaggaaaatctagtggtaaccaaagagctaaataaattcctatcaaacccaatcctactagaccacttcatccaatccagcatctcccgcttactcaaatccgacctcgtcggcatcctagccaagttccagagacagaatcaattcttcctctgcgtcaagtta

SEQ ID NO: 74354 - DNA, 538 bp, Glycine max
  Clone ID: PAT_MRT3847_38155C.1
gccgcccttttttttttttttgtagaaaagtaataagcaagacattagttcataaaatgttagtattcaccaaattgttaaaatgcttatggcaaatgaaagttatcctatttcaaaattaggacatgccacaggcctcaactaacatgaattgaattcaacacctcacagttaaccaatttaggaagcacattgccaaatgtgctactcctctttgaactttagtatgagaacataattctgagaacagcatcctttgtggggagagaaggtatggctcctctacctgtcactgtgaaagcagcacaagcatttgcaaaatcaagagcctccctcaatcttttctcatccttataaatgtgattgtgagcagccacaatgctcaaaagtcctcctacaaaggaatcagctgctccagttgtgtcaattgcttccacctcaaaaccagcaacccatcctttaaagtccttggtgtagtatctacagcctcgtgctccttcagtgacaatcagaagtttgagattgtaatggtgcaact

SEQ ID NO: 74355 - DNA, 1599 bp, Glycine max
  Clone ID: PAT_MRT3847_38156C.1
tcgtattataaatgcgatgtggcaatatctaatgacatatagacttgcagatgaagaaaagttagatgaaacatctgtatggtatgtgatggatgatctaggttcagctctgcggcatagtgatgagccaaatttcagagtggcaccatttctgttcatgccagagggcaatctaacatcagctgtgagcttttctattctatggccaacacagaatgtttgtaaaggtgatgagtgcacacgtgattttcttcttggtattggggaggataaacaacgttctgccaggcttacagcctggttccacactccagagaactattttatccatgcatatgaaaagcaccatcagaaattgttgtccacaagtttaatgctgcccacctttcagtcttctgaaactagaagcattcatcaacctggtgggcgtccattacgtgtttacacagatatacctcatgtagaggaatacttgactcatccgaagtttgcaatcacaaaggaaccaaaagatgcagatataatatggacaagtgtgcaggtagatgaggatatgaagaaggccacaggaattacagatcaacaatacatcaatcaatttccttttgaggcatgtcttgttatgaagcatcatttagcagagacaattcagaaggcacatggatctcctcaatggttgcagcctacttataatcttgaaacacacctatctcagcttattgctagaagcattgtacgcaaaaaggggcgtccattacgtgtttacactcgtatacccctggaacatggcccgaactattgatactactgtaaccgataatttgcctgcaataatccggctcatggaaactggtcccaagatttgccagaagtatattgaacaacctgctttgttccaggggagaaagtttgatctccgttacatattactggttcggagcatgcaccctctggagatattcctgtcagattgtttctgggttaggattgccaacaaccaatattctttggacagaagtagtttgtttgaatacgaaactcacttcactgttatgaactatcgtggagcaataaatcataagaatgctagcgattttgtgagggaatttgaggaagaacatcaagttaaatggttggatatacacacaagagtaaggaaaataattcgatcagtgtttgaggcagctgctgttactcatcctgagatgcatagtccaacatcacgggcaatgtacggtgtagatgtcatgttggacagctcttttcaacccaagttactagaggtgacttactgcccggattgtacaagagcttgcaaatatgacatggatattgtggttggcgagggaggcgttgccaaagctagtgatttcttcaacaatgtgtttaggtgtctctttttgaacgaaatttcacaggttagcccattgtaatcataaagaattgaaaatttaggtgcttggctatataataattcagtggtttgtgtaatgcccctttctcatggaccaagtggtttttgtaatgtcgcacgtgccataatttcccttgtttattaatggtaaaagtaaacaattttgagcacaaataaatgactga

SEQ ID NO: 74356 - DNA, 347 bp, Glycine max
  Clone ID: PAT_MRT3847_38157C.1
gtgtattctgatatttgttggtacaaaactttttcccttcaaaggcggtttttgctacaggaaggggctagcaaaatagatagtattgtaaataaaggggacccacattcttttgagcctagaggcccccccccccctttgtgttgttttttctccccccccgggggccttttttgatgggagaaaccatgcatgtcaactaccgtgggcgggagactctccccaaggctttgaggtctgaaggggggctcatctttggtatcagacgaggcaaaactcttgccacccccctaccttgtagaacgagggacgaaatcttttgtggcggggggatccaaataccaaat

SEQ ID NO: 74357 - DNA, 275 bp, Glycine max
  Clone ID: PAT_MRT3847_38158C.1
aacagacaaaaactgaacttttactacacacccagtgtggccactcttaaaagcttaattcatcggtgttggattacatgtctaaacagacgtctgttcctatgaaagcaaactgaatctagctacttgactagcccagaaatattaaagggcggataaagtgagtccaaataagggtggatactgacaccctttagagcaactatggcgaacgctctggctccttgaatagaagacatcccaagttaggccgccatttttttctgacactagac

SEQ ID NO: 74358 - DNA, 375 bp, Glycine max
  unsure (1)..(375): unsure at all n locations
  Clone ID: PAT_MRT3847_38159C.1
cgaacaanccctaaataacacttttatttcttctacaacacanaaccataaggtacctgtttcattttaaaggaccccaccccacnaaccaaatcgattccaagttctgtaaagtgatctacgacgagcacatcatctatcccaccggaaagtacaactattaattcaacagcagcatccaactctaaaggatcaatgtttattacaactaatcctcttacaaaaggtacgttccccataccctgcttattcatctccaacctgcaaccatggacagcatcatatacttcccctactgcaagatcttcctccccgacaactttctcttcggccaatcctgccccattaacaattttaccaaaaatcattatactt

SEQ ID NO: 74359 - DNA, 269 bp, Glycine max
  Clone ID: PAT_MRT3847_3815C.1
actgacccgtggccacgcagtgaatcagaactatggggcgaaagttcttatacattctgaggattttgcctatcataatgcatttgatctgatggaaaaatacacttctacctattttgatttcaatgttgatttacctggttcagcatttgtggctttagctgcattgcttgcatccctaaaattagttgctggtaccctagttgaccatacctttttattactgtgcgctggagaggctttaactgctatatctgagctgatagctt

SEQ ID NO: 74360 - DNA, 368 bp, Glycine max
  unsure (1)..(368): unsure at all n locations
  Clone ID: PAT_MRT3847_38160C.1
acgtcgcatggcacccgcgtacgtannagctcggnannattcggctttcgaggctgcgagcncgacatctacttcgctgtagacaatcacccatcacaccttagttgatcttttgcgatctgataactgcaaggcgctttctttcactctatgatcatctagctttccccttgaactaaaacaaagacctcgatctttcatctatgtatgactcctctgaaaacatatcgagatctatctgtctacccctaatctttggacttatacggacaatgggataacttgtacgagagtgtgcgcttgattgattgctcagctactcgaactattacaaggtgtaagtgttaccaactggtatggcactggaa

SEQ ID NO: 74361 - DNA, 447 bp, Glycine max
  unsure (1)..(447): unsure at all n locations
  Clone ID: PAT_MRT3847_38161C.1
aggcctcatctgggatcaataacagtttacattatatgttatgctaattgtgtttatttttggtgataattctctaggatgaggtatgaactgaatatatatgggtattgatgtttggattaatgatatgtttgaaataaattcatggttgatttccacactgaaggactaatctgtcattttttctcctcctcttgtcccctgcccaaaaaggaataaagaaaaaatgtggggttccaatctgttgcactgattggcttgattttgttattgtgatttccaaggttgcttcattttgtaataatagatcataatgtcaattgatctttctaactgtttattgcttagtcaatgtgatctttagatttctgcaatagcaagaaagaatggtacttattacattgtggttgggaaatgaactatntcagcgtaaatcactcaagcggc

SEQ ID NO: 74362 - DNA, 165 bp, Glycine max
  Clone ID: PAT_MRT3847_38162C.1
ttcctctcccctctcttgcccctccccctgctgcctaattactcctttttttctcaaatcaaactcaaccggcaaagttatacccctgaatctttcctcgcaacatctacttctgaacctacccttgcaacagggtttgccgagacccatgcttctctatcccac

SEQ ID NO: 74363 - DNA, 390 bp, Glycine max
  Clone ID: PAT_MRT3847_38163C.1
cacgcacgcttacctcagtcccggaactcggatcgagcgccaatcctttttgttttgccatctatagcatcgaactggggcccagttcttctgtgcctgacataacacacattgcaattttccattgcacgcacaggatcatacatgctgctgattcacctattaatatcgaccgactgcccatcattgatttgccacgctactgggatctttttaagcttctccaatctcgattgcactttattacaagcttttgcagaatcacacataggcaggttctccacgcaataaaccatctgattatagacatccatttactgtgaaacgttctaatactgtactggaatttacattcacaagccttaattgactatcttacatgcgctatta

SEQ ID NO: 74364 - DNA, 254 bp, Glycine max
  Clone ID: PAT_MRT3847_38164C.1
gtgagaagcccgtcaccggtgtgggtttctgtaaccctgaggaaattccatggggtgaggttggtgctgattatgttgcagaggcaactggtgtattcactgacaaggacaaggctgctgctcactcgaagggtggtgccaagaaggccgtcatctctgccccaagcaaagatgcacccacgttcgaggttggggtcaacgagaaggagtccaggccagagcttgacattgttgccaatgctagctgcactacc

SEQ ID NO: 74365 - DNA, 1407 bp, Glycine max
  Clone ID: PAT_MRT3847_38165C.1
ccccgccatcctcaacagtggtgcagatatcgtctctgtcggcccaacttcagaacctctctgcactgatctctgccagcggcaatgccacaacagctacagcacggcctccgagagggcggccctgggcggttcacgcggcgtcgtcggacactaccaccgccgcgcaagcgcagttgggtaggtacgaagaagggaagcctggagcgacccaagtgggttggggagacccctctttcacgtctcgttcaagctctcatctccttcaagcccttgttctctgtcctcaagcttggtgctagaagggctttgataattacagctgagaagaacaatataccttggaggaaaatggcacaagagattttagagtcagaagtgtatagggagctggagagcattcaaaaccagtctttagtgtatcctgattattatttgaatccatttcatgcatatgaaagagggctaaatcttacatggctggcagcagaagaagcagtggctgctacaattttaatggccagacgtgcatttcctgatgcttcttcattacaggaagcaaataagatactgcgtggcaattggcttacagcaaataatcaccaccatatgcagtattcagaatcatgtgtgatcgatgacattctagatattggatgctctgtaggtataagcacaagatatcttgcagacaagttccccacagccaaagtcaccggatttgaaatgtcctcttattttgttgcttggaatcagcaaaagcaagagcgagcaatgcctagaaaatttcctataaaatggatacatgcaaatggcgaagacacagtcctgccttctaaatcgtttgatcttgtctctattgcttttgtgcttcatgaatgtcctacaagagttatagtgaatttagtaagagaggcattccgtctccttcggcccggtggcacactagctttgacagatttttcgctgaagtcaaaggtccttcaggaattgtctccggttctgtttacattggttaagagcacggaaccctttctggatgagtactacttgactgatatggatgaaacacttagggaagctggttttgtgaacataacatcaattcttacggaccccagacacgtgacaattacagcaacagtgcctcaatgaaacatcacatcttcttgagatattttatttgtcaagatgcttaaaaaggattttatttattcataatgcatggttgttcctatacccttatcagtgtactggtttaatgtggaatctcttctttctgtttttcttaactgtagcaagagcagctcacaaactttgccttcaatttgaggcatgcgtatgctgtggtacttgataaatcagagcaacaggtccattttatttaggataaagttcaactttatt

SEQ ID NO: 74366 - DNA, 435 bp, Glycine max
  Clone ID: PAT_MRT3847_38166C.1
ttattaatttctatcacaggctgccgcaccttaaaaccgggaacaaaagcattccgtacttgattacaagaatctatcactttctttcctacttctttgtgtacgacttcttaagggaaagaaaattactctctgtgctggccacagactttgtgaatcattcctctttccactcttagtttattttgctggacacatctcccatttgatataggactcctttgacacatttaaacctgattccgcctctctatcagttctctgtttaatcccaagttcaagctggtgatatcttggattagtactcccactctcctatctggtataggaatgcgtgggtagactcttctatttcatgtctttctttcactgatttcttttcactgatccggattcgccgttcagagtgggtcttatatgaaaaacacttgggcg

SEQ ID NO: 74367 - DNA, 311 bp, Glycine max
  Clone ID: PAT_MRT3847_38167C.1
ggctcgagctctgacccaactgaatatggatcatgtgcctgacgctgcactggtgagccgtgtaacagcgcatttgcttgcatactgcaggctggtggaatacaggaagaaaaggactatccatagcaccgggagacatggcacgctcaaagctgtcaagaccaaaggctgagctactgcatctaattacagagaaggatcccttgaagaagaacagatcgctgcatgcgtagcgaagaatggccctattgcagccgctatcaacgctaccagcatgcagacatgtggacgaggcagtgtcatgcccatac

SEQ ID NO: 74368 - DNA, 382 bp, Glycine max
  unsure (1)..(382): unsure at all n locations
  Clone ID: PAT_MRT3847_38168C.1
ggtccggnattaccgcgtcgacgcacgcgtccgcacttttggggaagaggtcgagtttcacagcatgcaatggggtacgtcaaggctcataaatcaaaagcctacttcaagagatatcaagtctacttttagataataagagactgtgaaatggatttcattcccaggtttagctctttgctctcttttttgcttttctcatgcactgtggcgttgatgggggtgggggtgggtacggcagcgtttacccttgttttcctgagttgttgcgtggcgggtttgatggtgagtatcggttgtgtggctgtcgcggattgtgtggtgttgggggggtgtgttggtgacggtggggggtggggtgttggggttggtggtggtgtgg

SEQ ID NO: 74369 - DNA, 544 bp, Glycine max
  Clone ID: PAT_MRT3847_38169C.1
ggcgcccgacgaccccctactttaaaaatcaaagacgaaatgggggtacaaagggaatttatcctaaaagaaaaaaccttccctacccaacacagggttttttttttgtttttgctgctaaaaagttaattcaacaggggcccgacattttaaaccaaccccactcctttaacaagtaacaatttttaattttccccatttttttgaacagccgcacctgcaagcatccatggggaaacatttacgggggcctttttttggaaaaaaacccctttaagggaaccccccctttaagggaacccccccttttataactacctacggggaaggccaatccccatacccaaaatattatttaccggggcccccaagggggaaaaaaagggtcatgaaacaacttaggaccacattttgggtattctctttagcaaccaactttcctcctttttaaaaacaggggggtcaaaattactaaggttttaaacaaaacggggggcctaatgccggggggcgagcttacaataccaaacaacaagggggttaa

SEQ ID NO: 74370 - DNA, 331 bp, Glycine max
  unsure (1)..(331): unsure at all n locations
  Clone ID: PAT_MRT3847_3816C.1
ccggaaacccacctctcaaagtaccggttaaaccgggctcaaaccggggctcctggcccgattgaaccaccctaatatcaaacctccgaaccaacgccaaaacaacggacttcatctccatcaaagccaagtccttccccaaacacacccctaccccagcctgaaaaacagggtacttaaaaggacactctggggccaacactccatcacccatccatctttcgggccttaattcgagacaatccggcccccaaatggtccccattcggcccctctcggaaaggtggnaaattaccctactaccctttctcaaaaaagtgccatctgacaa

SEQ ID NO: 74371 - DNA, 332 bp, Glycine max
  Clone ID: PAT_MRT3847_38170C.1
tttacgcgagggaggacgcgtgggcggacgcgtgggaaagaagcgaaactaaagtcagcattcgaaaaagaggatgtgcagtatggtacaggttacgatctataggtcagcactttctgcggtgatgggcgcgtattccagattgagtatgtctctaaagacggcgataacagcgggactgttattgggatcaagagcaaagatggggttgtgttgggcgttgagaaggttattcgcgataaaaggatgctaacgggtttcgatagaagaatacaatcgcgtcagtcgttactctgggatggatgtgggaggattagcaaatgatggcggac

SEQ ID NO: 74372 - DNA, 419 bp, Glycine max
  Clone ID: PAT_MRT3847_38171C.1
cgggtcgaggggagagagaggcataggcgcatgtgtaatggccgatatcgatattcgattgatgcgcatgcggcgcggccttcgaagcccaatcattaaaacctcgctgctgaatctgagccctgcatgtcattaagatctaactgggcgaggagaacctgcactttttcttctagatcgtaaatggcggtcatccacaaccacagcaatagcggcagcatcagcgaaaccggactggcgagacgctttgggatcaaggtgacgcgcgaatacatctttggcatgtacactacgttcgtatcgactgggctacgagaacttgcacattgagtccttgcaccgtgacatcggccaagacgttcatttcctacgtgcctgtgctcaagcgtatgagtcggctgaagagtgtgctgatgacg

SEQ ID NO: 74373 - DNA, 883 bp, Glycine max
  Clone ID: PAT_MRT3847_38172C.1
aagaggaaaaataattcttgttttttattcaggaataaaagatttacatttataggcaaggctgccaatttcattataataaatgccgaaaggaaagtaaataaaaagggatcagatcaaattagagagatttgtttctgacccaaaataataatctaatcagatcaaatcggaataatctggtcttgatcctaattattcaatcttctagcaaattaattccaaaaataaacatccaactggctaattaattcttaatatagacatacagctgtcaacaccccccctcaagttggtgcatagatgtccaacatgtccaacttgcttacaagaaactcaaagttgggcctaaacaatccttttgtaagaatgtcagcaacttgttgtgaagaaggaacaaaaggcatgcaaattaggccagtatctaccttctcctttatgaaatgtctatcaatttcaacatgcttggttcggtcatgttgaacagggttctgggagatattgattgcagccttgttatcacaatacaatttcattggaagagtcataggaagctgcaattcttctagaatccttttaagccataaaatctcacaaacaccttgggccattgccctatactaagcctcggcactgctcctggccacaacatcttgttttttgctcctccaagtaaccaagttttctcaaacaaatgtgcagtaaccggatgttgatttccgatcagtaatagatcttgcccaatctgcatcagtgaatacttcaatagcttgctgtccaatttttttagaaaacaatcctctgcctggagtacttttaaggtaccttaaaattcggtgaacaacctccaaatgttcttcgtgtggtgattgcatgaattgac

SEQ ID NO: 74374 - DNA, 226 bp, Glycine max
  Clone ID: PAT_MRT3847_38173C.1
gtcttgctattttattaagtaattatttcatgcggatgtgtggggccttgataatagtgcataatatacaagaatgcgataaatggtgcatcaagaagtgcaatcagaaaattccataagaagattatgttgggaagtttattttttgtacaacttgctaaaatttgattaaattctttatttggtaaaatgtttttttactcaaggttataaatttatcatacaa

SEQ ID NO: 74375 - DNA, 259 bp, Glycine max
  Clone ID: PAT_MRT3847_38174C.1
gggtttactatttttgaacgccgtaggtggcggcaccagttctggctagggctcacttctcttgaagcgttagtccgctgactatggaaaaaagtcaaagctcgattacaccggttgtccatcccctcaggtctcaacctcggtcgtggaaccctacaacagcttcctttcagcgcattctctcctaaaacacaccagtgttactgagcttttctacaacgaggcagtctacgacatttgcaggagatctctgaacatc

SEQ ID NO: 74376 - DNA, 1741 bp, Glycine max
  Clone ID: PAT_MRT3847_38175C.1
ggatctctttgcctttccattgcgatctgtcctcctgccgtgatgcagcgctgggatgatattgtgggagcacacattacttaataagatgctaatgatgatttgacatcttgatatggaataaccaggaacaattcatattttttaagattgtttactaacttgcattaattcagaaaaaccaattcctgatacaaagaaaggacggacatctttgagccaggtagatggttgtactttgtaaaaggcagtgtttgttttgaattttatgttctatgaaagcctcctttgttcttattttgccttatcttgttacaggataagtggagagggattcctactagactaaataacattccacattctcgagaaatcaggaaatatttctatgatgatgtgctacaagctacacagagggctattagtgatggaaaaactagggtgaaggttgacatcaacattcctgaactgaacccggaaatggatgtttatcgaataggtaccttgatggaacttgttcgagctcttgccctttcttttgctgatgatggaaaacgggttaaggtttgtgtacaagggtcaatgggagaaggtgctctcgctggaatgccattgcagcttgctggaactcgtaagattttagagttcattttttggggtgattatggagcaaaaggaaccttcatcaatattggttctataggagctgcagaggttgaggagcaagatgacatgtttatcttggtggctcctcaaaatgctgttgggaattgtattattgatgatctaagagccatgaccaatgctgctgaacacagaccagttatactaatcaatgctaggcttaaggatttgcctggttctagtggtattatgcaaacaattgggagggaccagagactcaagtatgcagcatcatttgaaagttgctacttctttaggcttctgtattatgcaggaacccagtatcccataatgggagctatcaggatgacttatccataccaatatgatctgtacaagagggtagatgaatcgcctggaaaggagaaatatgtaattttgtctacctttccagagaggcctactacagatgaaattaatgatgcttttcaaggaaaaccaagcaaggatcctaggaaaacctcagggatttggggcttcttgagtggcatactctgagcagaatgaaaagcaatgaggaagcgtctaagtctttgattttctttattattattgaagaacgatggaaatcagctgtgtgattgtagatagtatcaaagtcagagcttgtagttcaacttgctggtggtggagcagcttgtttaaaattgagtgtagatgactgggaaatgatgatttgacaaaaaagacttatcaaataataaatgatccaagatttaagggacaggaggaacaactttgtttataaacaactacatcaatatacatatatatattatggggctcaaaggatagcacttgtattgactttttgtacttatgaatcaattatttttctcgtggttacgtgaagggtgaggtatatgtacgagtattataacttctggatagttaaatactcaatttaatgcaagttgctttccaactagtatttctttatagcttgggtgactattttggcttggttgtgatttcttggtttatgaattccctctattagagaaataacatttcatcacatcttgtatgtaaaaatgtttcgtttctttttcaaaaa

SEQ ID NO: 74377 - DNA, 530 bp, Glycine max
  Clone ID: PAT_MRT3847_38176C.1
tgctaggcttaaggatttgcctggttctagtggtattatgcaaacaattgggagggaccagagactcaagtatgcagcatcatttgaaagttgctacttctttaggcttctgtattatgcaggaacccagtatcccataatgggagctatcaggatgacttatccataccaatatgatctgtacaagagggtagatgaatcgcctggaaaggagaaatatgtaattttgtctacctttccagagaggcctactacagatgaaattaatgatgcttttcaaggaaaaccaagcatttaagcttggcaatgtgcaattccatttaattgtttctctgacaatttttcagcaaggatcctaggaaaacctcagggatttggggcttcttgagtggcatactctgagcagaatgaaaagcaatgaggaagcgtctaagtctttgattttctttattattattgaagaacgatggaaatcagctgtgtgattgtagatagtatcaaagtcagagcttgagttcaacttgctggtg

SEQ ID NO: 74378 - DNA, 172 bp, Glycine max
  Clone ID: PAT_MRT3847_38177C.1
aatacccggtcgcggacgcgtccgctacttgtactaaccttacttctcaaacctttaaccttagcctccctataccaaaccagggctacttacgaaggttgtctagcacttccaaccctaactcttcgaactcgacaaccactccgttctccccaaagcttatccacatccc

SEQ ID NO: 74379 - DNA, 341 bp, Glycine max
  Clone ID: PAT_MRT3847_38178C.1
ggaaacccctccatatagcattttttcaatttttgatatacctttccaagaaaattttaagggggctcccaaaaacatatgaaaggcccccttttgatgttttgggaatttcacaaacgaaaatattttttccccgtgtatgtttttatgggtgctagggaccttgtcaacaaaaagaaaaaccaccctttgtaaggaagaaaaactccaaattgcggaacttaaaaattgggaaaacattggttccacatggggggcggggcttggcctaggggggcattaaaaaggcccggccccttgtaggggaaacccaaaccccatactatgttcaacttttgggg

SEQ ID NO: 74380 - DNA, 699 bp, Glycine max
  Clone ID: PAT_MRT3847_38179C.1
tccatctttctctcactactctctttactcttctgtacaagcggcaaagcttaagcgcttaagtccgcaaaaaagtttctgcaatccaaagcgatctgttcttaccttttctgcttggctttttaaccgcttcatctttgtttgttactttctgagaatttccatctgggggcctctctttggcactttccatacttgtgatcttgctttcgtgtcaccgattcaccctttgcgttctaaccaaacttcttcactgtggagtagtagtcttctgctatgagctcagtgtgtggttgaactattattcagattctgctgttttgagcatgcatgccttgttgcagaataaataaacaaacttgtgaaatccaggaataaaaaagccacctttgaggttcagatttgatatactcttacaaaagagcatagatttgatttttctattggtgtttatcttggttcagtttttatggaattgatggtgtgtggaaagcttagggggtgccttgttcttgtgttctttgctgcactgttggtgggtttagtgaatggaattggtgttaattggggcacacaattaacacaccctttgccagcatccactatagtgaaaatgctaaaggacaatggtattcagaaagttaagcttttttgatgctgaccctgatattcttaatgctcttaagaagtctgggattc

SEQ ID NO: 74381 - DNA, 237 bp, Glycine max
  Clone ID: PAT_MRT3847_3817C.1
ttttcccacaagaacgacggcgtcgaggtctagatcaacggccgcatcacccgcggctggcgcgtgctggccaatttcggcacgggacagctcgtggacttcgatcgctggcagaacactcgcgcctacgtcgaaagccgcaaggacgagatgctggaggtgcttgtcgcggccggcggcaagctcgacaccaccagcaagcccttcaacgccgggcgttccgtggcggaagcaatt

SEQ ID NO: 74382 - DNA, 380 bp, Glycine max
  Clone ID: PAT_MRT3847_38180C.1
ctaactttggttgatgcgatatgaattattaatttaaagatataaaagctaatcactatatattttaaatctataataagatagtcgaattattggttatctgttcacaattatatatgcaagtatatttaaaattataaaagagattaacaggaaagtgttataaaaaacataggatgagctttgttaagtagtgataatgttccagcccctataaaaaagtaatggtaaagttgtcaaaacaataggacaaacttaacctaggcccgtgggaaagggacttggaataaattgccaaaagggtatgcctctttctttgaaagaaaaggccagttgtcgcggatggctttgccgaaagcaatgaaccgcgttgactctac

SEQ ID NO: 74383 - DNA, 623 bp, Glycine max
  Clone ID: PAT_MRT3847_38181C.1
aaatttttgtgggcatccaagacttgtttgatcaaccaaatctttttgcccctgcccagacggagggtttttttttattcttccaggatccagttgagtacaaaaaaaaagtccgccaccagtcaaaccaatatcccccttttgtttagtgttatatctgccccctttaggaactgttatagtatgttagttgttgccagttatttcttgttctgggttaaaactgttatgtgattgttggctgccataatatgcagcccccatggttttaacaatttttgcttactctcaggtttggaaaacgtgttaatatataacaatgtgaaagtccaccaataatacttgttggcaacacttgctatgcctgatgttcgctggtgatgatgaaggtttttcttctgacaatttgcttcagtggcatatgctgtgaaagctgcttgattcctcccccaagcaatattcacaaaatttcttatccattaaggtgtaaggatgacttagttgcactcgttatatgcttgtatgttagtttttcacttttttcccattacgttattcacggtgtagtggagaggtagagttggcttatgtatgatgtaaatttacgtgttgatatctgaaaa

SEQ ID NO: 74384 - DNA, 280 bp, Glycine max
  Clone ID: PAT_MRT3847_38182C.1
gacacaagaatctcatcatcgaggtcaatttcaaaagccccatgatcgtcaccaaagtgtatatctcttcacatatccttattggatcggagtgcctactgcagttgcataatcaatgtacaacattataaatactcctgttgttgccgtttctattattcacaccaacaccttggtcaaccaactcgaccacatgcctaggacattctatcttgctgtgaaccaagagcaataatttctaacatatcagcatcaacaacatggatgttcccacaccaac

SEQ ID NO: 74385 - DNA, 1230 bp, Glycine max
  Clone ID: PAT_MRT3847_38183C.1
cacggctgcgagaagacgacagaaggggggtgtatttcctttcctcatattctctattgagcacgagcactttgggactcacagcttcgtacttttcttctttctctttcccctcgaactcaaaaataaggtgcatggacgccggcggcttagattccgatggccgtgaattcaacaccgccgaggacatgtggagggaacaggcgggtgaccctagcaagaagacccagtggtatcgtgacggcgtctcctactgggagggtgttaaggcaaatatggatggggtattgggagggtttgcaaatgtgaacgagcctgacataagttgcagtgaggatttcttgaacattctcttgtctgaacgttttcctcctgctgctgatgctagacgccaaccacttgttgctcttgattgtggttctggcattggcagagtcaccaaaaatctggtaataagatacttcaatgagtctgatcttctggagctcttatcacatttcttagtgactgcacgtgaaactttggcttcgggatgtcagtcccattccttcatgaatgtagcagttaatttttactgtgttcctcttcaggattttacaccagatactgcaagatatgatgtaatatggattcaatggtgtataggtcatcttacagatgaagattttgtttcatttttcaagagtgcaaaggttggcctcaaagcaggtggattttttgtcctgaaggagaatattgccagatctggattcgtgcttgataatgaagaccgaagtgttacaagatctgatttgtacttcaaagagctattttctcgttgtggattacatgtttacaaatcaaaggatcagaaaggattccccgaagaattatttgctgtgaagatgtatgcattaactacagaccctccaaagaaggctccccgagcaaaatccaaaacatcaactaatagacctagaaccattatgtgatcaggttttcaattgctcttgaatattcttcgtaaaccattttttgcttccaattgggagatccatgttgtatattaggtattgatttgtttgagtcataagccattaaatcggcttgtatgtgaaatgcaattttccgttatctcttcctacccaaagatttatccaaaggtgaattttgagttgttttaccaccattttgatgggacttattgatgaatcctattcgtgtaacatttctactagtacttaaagatat

SEQ ID NO: 74386 - DNA, 1515 bp, Glycine max
  Clone ID: PAT_MRT3847_38184C.1
cggctgcgagaagacacagaagggtacggctgcgagaagacacagcagggtacggctgcgagaagacgacagaagggggagaaaaacgagccaattcatcattttctctcttctctgcttcttcttgttcaaatcttaggagctgaggagaatcaatcgagagaaatatgtctggtatcgctcgtggacgccttgctgaggaacgaaagtcatggcgcaaaaaccatccacacggtttcgttgccaagcccgagactctacctgatggcaccgtaaatttgatggtctggcattgcactattcctggcaagaccgggactgattgggagggtggatatttcccactgacaatgcacttcagtgaagattaccctagcaagcctcccaagtgcaaattccctcaaggtttctttcaccctaatgtgtatccatctggaactgtttgcttgtctatacttaatgaagatagtgggtggagaccagctataacagtgaagcaaattcttgtgggcatccaagacctgcttgatcaaccaaatcctgctgaccctgcccagacggagggttatcatctattcatccaggatgcagctgagtacaagagaagagtccgacagcagtcaaagcaatatccacctcttgtctagtgttatatctgctcactttaggaactgttatagtatgttagttgttgtcagttatttcttgttctgtgttaaaactgttatgtgattgttggctgccataatatgcagactccatggttttaacaatttctgcttactctcaggtctggataacgtgttaatatataacaatgtgaaagtccaccaataatacttgttggcaacacttgctatgcctgatgttcgctggtacatttctatatgaatgataaatttactgtgatggattatatgatattatgactccttccctggaacctttgctgtttctattatggagatcaaacctagacctagtagccaattgatttgtcatttaacacctttatccatgtcccatggcagcataaattatcactgaaaattttgcatgctaggtgatgatgaaggtttttcttctgacaatttgcttcagtggcatatgctgtgaaagctgcttgattcctcccccaagcaatattcccaaaattttttatccattaaggtgtaaggatgacttagttgccctcgttatatgcttgtatgttagtttttcccttttttcccattacgttattcccggtgtagtggagaggtagagttggcttatgtatgatgtaaatttacgtgttgatatctgaatgtgatatggatcctaaaaggaaatggaattctgcccatttttggggaaatgacttggcctttcagacatatgggtcatcatcattatccatctattaagttcgtgaggagacattgtaaaataatttttgatttattgattgatgctaaatttaactactacggcagttcattttttaagaattgaataaaagatattttgcttccc

SEQ ID NO: 74387 - DNA, 263 bp, Glycine max
  Clone ID: PAT_MRT3847_38185C.1
accggatttcattgtgatatcagttgtgtcagtggatggactgacaatccaatgcagtatgtacaggttacaattgattggtggatttcctctcaagaatgtgttcccaggacctattgtgttgtaaatccacaatatcctatatggttagataggtggatgggaaaactggctttccctcaaggcacttcccgaagtgttaagagaatgcctcttgctatagggggacgatctagtgcattgggtactattctcatgaatat

SEQ ID NO: 74388 - DNA, 286 bp, Glycine max
  Clone ID: PAT_MRT3847_38186C.1
cacgcgtccgaggccgcaaatgtctgtcctcttctttttcttcattctatttcaaccatgaaagagagcctgctcttaaggggttgccaatgctgtaacgaaatcggatccaagttctgatacgtgatattctactagcacgtcattgatcctaccggaaagtacaactactaaagcaacagctacatacaactagagaggatcaatgtctattacaatgttgcctttgacataaggtacgtatcaagagccctgcttatggatcttgaaccttgtaaccatggac

SEQ ID NO: 74389 - DNA, 1632 bp, Glycine max
  Clone ID: PAT_MRT3847_38187C.1
atggctttaccagccaatgaaacctccatggcagaaaggtctcagtgggtgctcaatgctcctgctcccccatccacgtggcacaacctcatggcttctagcattgggtatgccactttagcaaagcttgatcctgaatatggactctatacgagtgtggtgccacctcttatctatgctttaatgggaacttcaagagaaatagcaattggacccgtggccgtggtatcgcttcttttgtcatcaatgattcagaaattaatagaccctgccattgatccaaatgggtatagaaagcttgttttcactaccactttctttgctggcatatttcaagctgcttttggactcttcaggttggggttccttgtggattttctgtctcatgctgctattgttggattcatggggggagcagctataataattggtctacaacagctgaagggactatttgggatcaatcattttacgaacaaaacagacataatctctgtcatgaaatccgtttgggaatcggttgatcatcccggtaaaaggaataagaaacttttctggctgccagcaatatcccctcttgtgtcagttatgctatcaactcttattgtttttctgacaagagccgacaaaagtggagttaatattgtgagacatataaaaggaggattgaacccaagctctatcaatcagatagacttgaacagcccccatattggagcattggccaaaattggactagttgttgctgctgttgcactcactgaatcagttgctgttggccgatcttttgcatccatgaaaggataccatctagatggaaacaaggagatggtgtcattagggttcatgaacatcataggatgcttcacctcatgctatgttgcaactgcgggttgtgaaacattagcgtcgaacattgtgatggccattgtggtcttgatatcactacaatgtttgacaaagctattgtactttaccccaactgctattctcgcttcaataatcctttctgctctcccgggactcattgacatcaatgaagcttacaaaatatggaaagttgataagcttgattttcttgcttgtgttggagccttcttcggggtgctctttgcgtcagtggaacttggtctgctagtggctgtgggtatatcttttacaaagataatatggatctcaattggagcaggcacagaaactctgggaagacttcccggcacagatgtgttctgcgatgcacaacagtatcctatggctgttaagattcctggggttgcaataatacgcgtcaagtcttcattgctttgcttttctaatgcaaattcagtcagagaaaggatcctgaaatggatatcccgggaagaagccaagggaaacatagaagacaacaccggaagcataattcagctcgtaatccttgacacctctaatttggtgagcattgacacctcaggaattgcttctcttgaggaactgcacaagagtttggtctcaagtgggaagcatctagcaattgccaatcctcgttggcaagtgatttataagctaaaggcgaccaactttgtcacaagaattggaggaagggtcttcttgactattggagaagctattgactgcaagctggatttctga

SEQ ID NO: 74390 - DNA, 443 bp, Glycine max
  Clone ID: PAT_MRT3847_38188C.1
tcggcggccagccccctctgggggttttttttaggtcttctcgctttttcccccctcacccgttttgtgagctgctattcccctgttcgaatgcccgccgtatttcctttttttttttttggccggggctctaatttttattttggcggaccttttttccagaaggggccctttgcctcacgttttataaaaaaaaaaaggggggcccccggggtttatccccccccccaagggtcaaaaccctgtaactttgctgaagagggcaacccttccccccttttttttaggggggtgtggtataacccacaacccccctgggtgggccgaaaccctctcccggggcttttattcctttggggtgttggggcccccccctaaaaagggggtatcaattccccccaaaaaaggggggccctctcggggtgggaaggtgggtcttccca

SEQ ID NO: 74391 - DNA, 795 bp, Glycine max
  unsure (1)..(795): unsure at all n locations
  Clone ID: PAT_MRT3847_38189C.1
gtccggnattcccgggtcgacccacgcgtccgcccttttttttttggtgtcgtaggggagggattgacctttttaacgcatattcagtcgtaccggcatggccccactgatttgttttcgatcggagcatcaagcagcgcaacccggttctacttgactaagccccgtgctcgtccaaggagggagtttgctttacccaactccctttttgataacagaggcagaaacccccgacccgacattcattagtttcgaatgaagaatgaagagtgccctgccccagcaagcacctactcctatcaaaatgaaaagcgtgactttactaaacaagcaagaaaagccctttgttattaattagtaaagagcttttctcgcttgttgctttcttcgcatgcttgagcgcattaatagaatacatatagatagaataaaaaatttacttgagttttcaataaggtaggtttcttacttagtgcttgtgctaaggagcgctaacgagcaagaaaacggatgcgctaaggtttgagctcgacccaaacaacggctaacgagcccctatcagagaaagccttggttaagtaaagcgcgttagctcttttaagttaaggcgcgcatcctcttgctgggagaggggctaatgccactcgccctaatgaataaataaacaggagaggggtgaagcttgcttacttgttagagtaaggagtttaggctttcgaaagctcaatcccttgctttgntctatagtaaggggccctttcaataaggctcgcgtaggggcgctcacgttttttg

SEQ ID NO: 74392 - DNA, 290 bp, Glycine max
  Clone ID: PAT_MRT3847_3818C.1
tcacgcatcagtaaagcttccatactacatcatagggcattcatacatgtcacctaaattctcttcactggccctccttttataacgtccatcatcgttcattgctctcttgctcttttgcgggttcggcatctgagacataccttcatcgatagctggcttcatactcaataagcatgcgtagcttcttcttcctggtggttacacttacttcatgtcaaatcatacaccatttgtatggaataatgaagccccaacggtaaatgagttatgcctctcactgtggtgca

SEQ ID NO: 74393 - DNA, 2506 bp, Glycine max
  Clone ID: PAT_MRT3847_38190C.1
tggtgtgttaaatttttttttttttttttcacacaaaccatatagttcttttattacatcataggcgcaaaccaatagagtaaataacacaaattccactttgtgagtggctaaacaggaatgcgaagacttattgttctgtcccagaactatattgtacatgaagtactccggggcaggaaatctaaacacacaaaagaagcatcatacatgagtaaaattttacaacattccaattcaaaccagccatgaaaagctaagattttatttccacacacgagttctattaacaaagacagaggtacaacactcggttcaatccgtagcaattcagaaatccagcttgcagtcaatagcttctccaatagtcaagaagacccttcctccaattcttgtgacaaagttggtcgcctttagcttataaatcacttgccaacgaggattggcaattgctagatgcttcccacttgagaccaaactcttgtgcagttcctcaagagaagcaattcctgaggtgtcaatgctcaccaaattagaggtgtcaaggattacgagctgaattatgcttccggtgttgtcttctatgtttcccttggcttcttcccgggatatccatttcaggatcctttctctgactgaatttgcattagaaaagcaaagcaatgaagacttgacgcgtattattgcaaccccaggaatcttaacagccataggatactgttgtgcatcgcagaacacatctgtgccgggaagtcttcccagagtttctgtgcctgctccaattgagatccatattatctttgtaaaagatatacccacctgatcaacactattagacctaatcaaaagcacgtaagttaaagttgctagagagtggggctttctgttgaagtgcggcccaacaggagagcgtggataggacccagccactagcagaccaagttccactgacgcaaagagcaccccgaagaaggctccaacacaagcaagaaaatcaagcttatcaactttccatattttgtaagcttcattgatgtcaatgagtcccgggagagcagaaaggattattgaagcgagaatagcagttggggtaaagtacaatagctttgtcaaacattgtagtgatatcaagaccacaatggccatcacaatgttcgacgctaatgtttcacaacccgctgtgaaattaaccaccgtgcgggagaacgaaccagttgcaacatagcatgaggtgaagcatcctatgatgttcatgaaccctaatgacaccatctccttgtttccatctagatggtatcctttcatggatgcaaaagatcggccaacagcaactgattcagtgagtgcaacagcagcaacaactagtccaattttggccaatgctccaatatgggggctgttcaagtctatctgattgatagagcttgggttcaatcctccttttatatgtctcacaatattaactccacttttgtcggctcttgtcagaaaaacaataagagttgatagcataactgacacaagaggggatattgctggcagccagaaaagtttcttattccttttacccagaaatctggtaaacaggatgaaaatgaagaatgaacatccaaggacaaaattgcgaggattccagggatgatcaaccgattcccaaacggatttcatgacagagattatgtctgttttgttcgtaaaatgattgatcccaaatagtcccttcagctgttgtagaccaattattatagctgctccccccatgaatccaacaatagcagcatgagacagaaaatccacaaggaaccccaacctgaagagtccaaaagcagcttgaaatatgccagcaaagaaagtggtagtgaaaacaagctttctatacccatttggatcaatggcagggtctattaatttctgaatcattgatgacaaaagaagcgataccacggccacgggtccaattgctatttctcttgaagttcccattaaagcatagataagaggtggcaccacactcgtatagagtccatattcaggatcaagctttgctaaagtggcatacccaatgctctgaggaatgcagagacttgcaatggtaagacctgcaagtaagtcgtttctgaatttggttggtgaataattacgaccccaatgaagaataggaaaaatgctccgcaagaaggaaagcacaactttgggtccaggttggcctcttatataagaacacattttttggtacgatgaaattgtgttcctcacagaagccatgaggttgtgccacgtggatgggggagcaggagcattgagcacccactgagacctttctgccatggaggtttcattggctggtaaagccatgtttgattgaagtgtttgggagaactctgttctttgcataaaagcctaactaactagtctttttcttttctagcagaaaacttgccatgaacaaggtcgctcaaagtctgtgatcgtgaattgtttttgcaagcaatgtttcgctcgagcc

SEQ ID NO: 74394 - DNA, 341 bp, Glycine max
  Clone ID: PAT_MRT3847_38191C.1
aaacaacatttgtttttttacggtagtaaagatgaagtagctgttctacactgggccggatcaaccccatatgattccttttatcatgtcaacgccacgtccgatgatgagcccaccaattgtgttctacctaggaaccataggcctcggaacctgtttctcagaagtaaattattctgaaaaataccgctgtcatggcaggggctgtgccatatgctacgtgcacatatgcgaggctctgacacttcgtacgaatatactactattatgcaataggacacacactgctaatgccattggtcctatcataaatcggactttacgcaaggtgaaggacgaac

SEQ ID NO: 74395 - DNA, 435 bp, Glycine max
  Clone ID: PAT_MRT3847_38192C.1
cccacgcgtccgcccacgcgtccgctttgtcggctttttactctgaaaaagtaacgacgaggtccactgcagagcaccgttgtcaccgcaacaatcatcgacaaaacgccgtcgtttgaagcagctacggagatccactgcgatattcgattgaattccgcgctctcttacaactagaagaatcaggttcaattttccatcgcaatttcggtatcttctcttcctccaatttaaactcgcgttgcaatattcagggtaattcctcaatcgtttctcctgtagcttcagtttccgttttcctagaacttatcattgttaaattgttgctctgttattttattcgcatgactgctgcaaaggtttctgctcagtgtctcggtgctcgggttttgcagtagtcgtcagaattgggcaactgcaaagagggtagtatcg

SEQ ID NO: 74396 - DNA, 781 bp, Glycine max
  Clone ID: PAT_MRT3847_38193C.1
gaaaagcgaaacatatcgaaatctctattctgcgatcaaacgcaattaaattatctgtattttgcaaagtaaagatcatagtggttgattcatcgttcccactgtctgaaaacagagacaacaatcataagccgtaaaattcgaatgaccttcacttgaagggtactacatcgagtagttggggggagccatcgaaattgaaatcccagcttcttccccgtgtgacgctgtaagaaacctgagaaatgccatcgtttgcacttagcagacagcagtcacagcacaagtgtggaacaaagaacacagctttttgaagttcacaaatttctgtagaaacatgacgttatatattatataatgcaggacagaaagagcaacaagggttcagcatgaggcagacaagtgacaccagactgcaaggccaggttgagaacattttaggctcttcaaatgcctctcccctgactcatcaggcttcaattctgaatgaatttctgcttaagtcttaaattctagttggtagcgccaaccccagtttggaccttccagcttgaaaacatgaatgatagtaactggaatttaaccttcaccacttccatatacagggaaaagtcttgaaagcaaggtgactgaggtgcatgcttgagagcatgaagaatacatgaagtactacaaactcgtatcgttttccatctgctttgttaaacagcaatgaacattattattcctacatcagcatcaatgaccagcaaattgaaaagaacctcaggttgtgagggaa

SEQ ID NO: 74397 - DNA, 402 bp, Glycine max
  Clone ID: PAT_MRT3847_38194C.1
ggaagagtcaccggaaaggtggcttcgttttttggtaatgggatgcatatatgacacacacacacacatatatatatgctttatattaatatcctcgtgaaaatttctctgcttttggtgttctcaattgtttcaggaaatggatgagtgcaatttatttggtcacatgcactctcttgtggaagtgttcaagggggagaatctagtgcaacaagaaaaatcttgcaaaagtcacccttgtgattcaaatatcactaaagaaagcaccaccatccttcttaggaaccctataaatgattcatcatctttggaaaagaaccctggctttgataaccgtagtagtctcaaacaacatgcatctcaagatgaacctctcttctcatcctcctcaatgccctacac

SEQ ID NO: 74398 - DNA, 139 bp, Glycine max
  unsure (1)..(139): unsure at all n locations
  Clone ID: PAT_MRT3847_38195C.1
cacgtcgcangcnngcntacgtaagctcgaaantcagctcgagcctccttntnactnctgcngcaggagnaacgggngcaatnngctgttcagntaggcananntagcaggnantacagtgcgttgnaacttgtggagg

SEQ ID NO: 74399 - DNA, 281 bp, Glycine max
  Clone ID: PAT_MRT3847_38196C.1
aattcggctcgaggggattgaagttttctcactgcaagaaaatggcagtggagtcccattaggaggcactttatacgggccattattattcttttgtaccctgaacgaatcaatgtttcacaagctttgacgcttgcataattgtgaacgatgaggcttcagcctgagcttcacataggtacatgattgcctatgttcaaaaaactctgcacaattaagcaaaggaatacctgtcattcgtgccacacttcgttggcatagacctattgcgttctattgct

SEQ ID NO: 74400 - DNA, 567 bp, Glycine max
  Clone ID: PAT_MRT3847_38197C.1
gaaaaacaccgtcacttggtgttcacagacttcccaggcggctccgagacctttgaattagccgcgaaattctgtttcggcgccaaaatcgatttatcctcttccaatgtggttcctctacgctgcgccggagagtttctcgaaatgacggaacaacactccaaagaaaacctcatctccaagacggagacctttctctctcactccgtgctcaacagcatcaagaactccatcatagcattaaaatcctgcgagcgcttactgcctctcgctgataccttagccatcacgcggaggtgcgtcgattccatcgtctccgaaacactgttcaggttgccggtgagcgattccgcttctacgctgcttctccccaccggcggaagaagaagcagaagaaccggtgaagatgattcctggtttgaggagcttaggcttctaggcttacctatgttcaagcaattaattctcgccatgaaaggatctgattctgcgctaaagtcagagataatcgaaacctgccttttgcaatacgctaaaaaacacattccagctttatcgagatccaat

SEQ ID NO: 74401 - DNA, 165 bp, Glycine max
  Clone ID: PAT_MRT3847_38198C.1
ccacgcgtgcggacgcacggtgacccagaaggaggggcccaagaaacccaaggagggaaggggccgaagcgccccacagagggggggcacacccgacaggcaaaaaagcaaaggccacgaaaggcaaggaccaacaagcaacagtgccctaaccaacccaacaaa

SEQ ID NO: 74402 - DNA, 636 bp, Glycine max
  Clone ID: PAT_MRT3847_38199C.1
gggttctttgtttatggggggtgtagaaatttagggggctaattgccacgttttcccttcatttcgggcaaataacattttaaacaaatgccttacaagtaaaactacaaatattcctttgtttaatcggtatccaaaatcctcagtttcaaattcttgaaaccaccattttttttaattctagatgaatcagaggattagtgtccaaaattccaattagatttaacagttttaaaccaccaaaaaataaacccatgtagatctacatattctgcacgaagatgaactgggggtgttctgatgtgtgagatgacatggttaacaaactttacaagaaattctttactgcttagttgttgaagcataagggataaatctcatgaggaagctggatagggaccaaatgcaaatcacaccaaggaattgtaggacatttagaagggtacccaaagagctgtttatagccatgttgtgtgaggtcatttcagctcctctaacagtaaatgataaagctgtcaccagttgtgctgctctatttagttggtgcaatctatacacttgaaagattaatggaatagcagaccatgaaggagactttcgaattgagaagggagttataagtttgacttggtgaac

SEQ ID NO: 74403 - DNA, 164 bp, Glycine max
  Clone ID: PAT_MRT3847_3819C.1
cccaacaaaagcccaaacataatttataaaaattacattcttattcacaaaaatatctcgattcatcttgttctcatatttgccccctttttactactgctctccctaatcataaaccctaatcattgtttgggatttcacaggaaagaaatttaaacacaaca

SEQ ID NO: 74404 - DNA, 490 bp, Glycine max
  Clone ID: PAT_MRT3847_381C.1
ggctcgagatgtgaagggaaagtttgctaccaaccacggctacactcaagaagaagaaaccttattacccgctcccgttaattcctatctattactacttcttattgaacgggtgatatgatcctcctgttgcaagagtcttatgcatgctactttcttctctattctcggggaatcgaagcgttgcggtccgattgtttgctagatcaagcatattaacctgcctactggcttatatatcaccaccttgcaccttgatctctctctgtttatctttctctctttatatatatataagggtcaaatctattactgtctttagctgtccactttgtttcagatctggtatgatctaattacgtgcctaaaatagacccatttgggtttgaatatatagttcggggggtatcgagcttggcgttgtagatttcataacctgatgatgaaaaacaaatctagcctctttattttttttgctggtgcggtggag

SEQ ID NO: 74405 - DNA, 468 bp, Glycine max
  Clone ID: PAT_MRT3847_38200C.1
cttggggggggggggggggggggggggggggggggaataaaggggagtgaagctaggtagatgaaaagaaaccaggagagatcggaataaagattaaggcgtggacagaaaaggagacaatgcgcatactgcgtggtggctgaattgaatagcgtagatttaaagagggagaacctggcaacccaaacgcctgtggagtacgccgccgctgactccgagaccgcaccttatgctaacatgtggtgtgaactagccactatatcggcgcagactgcagaggtaacatcagggcccgtgtgtgtgggctaaatatggccaagttctggttgagcgttaggctcagcgtataaatcaaaatcatcggtaaaatcttcggaatatactcagggtttgtcacttcaaggttcactggatcgatctcgctagctcatcgtagactgtggtgagacgcgtattgaaaggtaaggt

SEQ ID NO: 74406 - DNA, 762 bp, Glycine max
  Clone ID: PAT_MRT3847_38201C.1
tggaacccccgggctacaaataggaatctccttttgatttcattgttccgttgagtttacacccccacctgcacagtccgaaaaagcctccattacagatgtattccaattaccaaacgctttttgggtttccactgtctgtggaaaaactgaagattatgaagataaacaaagtggtgtcacttccttcagcggcagctcttaaatctttctgttccaagacctgttgaggaaagctagctagcatattgaaagatcctgtgcacagacttgaaatacgttcagaaatatggacatggtaaataatgcaaactcagcagcaacatcatcaccatcacaaacgcaggtggttgttcctatggcttctgctcaattttcaagcccttccgttgaattaacaacatcatcaccaccggcacatgtggttcagatggcttctcctcaacctcgacacccttcccgtcacatactggaaaacaaaagggaatacttagaaaaatgtatacccctttataagctagcattgaggggtgattggaatgcagccagacgcatgatagatgcagacactagtctattaaacgctgctataacaaaggaatggggtacactacttcatgttgtggcaggaacatgatcaagaaaactgtttgcatctgcaaaatccgatactgagaagggatgacttctcttttgaaaaatgccttcggaggaaaaggtgacatggctgcgcatctatctgatctgacttccgaaatttta

SEQ ID NO: 74407 - DNA, 452 bp, Glycine max
  Clone ID: PAT_MRT3847_38202C.1
gaacggtgtagaatcagcgataaccataataagatctcatctctgcattgatgatgactcgaacactgacgaagaatgctatgggcccaatgaagcacttcctgaagttgaagcaagagtcttaggaaaggaagtgttaatcaaaatttactgtggtaaacaaaagggaattctgcttaaaataatgtctcagctcgaacgtcttcatctctacatatccactagcaatgtcttgccctttgggaatacccttgacatcaccattactgctcagatgggtgacaaatacaacttggtagtgaacgatctagtgaaagaactgagacaagtggctatgatgaagtcatgtgatgtgcaacaatgatgcgagctaattacgaacaagtccagtaattttagtttaaggacttgagaatgagtcataaatcatttcttttcaatagcctgttttg

SEQ ID NO: 74408 - DNA, 1061 bp, Glycine max
  Clone ID: PAT_MRT3847_38203C.1
ctgatgtgttggatccacatgttaggaaaattagggatgagaaatatgggtggaagtatggttgtggagctaagggctgcacaaagctttttcatgcagctgaatttgtgcacaaacatttgaagctaaaacaccctgagattgtgatggaactaacatccaaaatgcgcgaggatctttattttcaaaattacatgaatgatcctgatgctcctggtggaacgcctgtcatgcagcaacctcagaagagtatacctctaaagcgaagataaggaggtctagggggcccatagaaggaggagattggcaaccggctacaccaggacagaagtgacaaaatgaacggcgataggaatgaaggtatcacgtcccaggagagccagatgggaaaccatgttgaagagatgtatgatgcatatggatggctctgtgtacctcaatttacccatggatatggcccctccgccagttttgctgcgtcatgggcggatagactctttaggaccctttgtccctgctccaccagaagttgcaatgcagatgttcagggagcaaggaggaccttcgtcatacgatgcctcgggaaggaagatgcgatctggtcctcatatgggtggaccagcacctataattgctgttcctccatcctttagacctgatcctcgacggatgcgaagttatgaagatctagatgccccagaagacgaagtcactgtgatagactataggagcttgtaggtgtgaattccactaatttcaatgagattggtttgggtggcatgcctcctattacgctttcttgacgagagctgcagtctagccttaatggggttaggcttcatttattttgtgaatttgttttgagaatctttttttttttcccttccaatatggtgaaatttgagccgagggatgtatcatgtttactttgatgttgtactagagataatatttgtagaattcagttacagaatgtctcttattctgatatgaggataattttaaaaataatgttagctgatgatttattatttagaaatgatgcattttgcatcaagcga

SEQ ID NO: 74409 - DNA, 441 bp, Glycine max
  Clone ID: PAT_MRT3847_38204C.1
cccaaaaaagggggttttttacaaaaaacaggggtgggggctaaaaccccactaaggggcaaacaaaaaacaacttaaaaattcgaacccttcctttgagggaaacaaaagcggtttttttttttccatgggggaaaacaagcggaaagaaaattcatctttgggattaaaagagggcaaaattaattaatcggttttaaaaggaaaatgggtggggtttaaagcggggccctcccccccaaaatttgaggcccccaaaaactggagtttttttttcatcgggccccccctaaaaaaaacctgggggggcctccttgaaaaggggaagctttttggcggaacaggtggctttctcaaacaagggtttgcccacggggggatctggcccagggggcgcccccccgggaggggtgaaaaaggggaaaaaaacttttttcaggg

SEQ ID NO: 74410 - DNA, 917 bp, Glycine max
  Clone ID: PAT_MRT3847_38205C.1
ccaaaatgcgcgaggatctttattttcaaaattacatgaatgatcctgatgctcctggtggaatgcctgtcatgcagcaacctcagaaggatagacctctaaagcgaagattaggaggtttagagggccgattgaaggatgaccgtggtaaccggcgagaccaggacagaagtgacagaatgaatggagataggcctgatggttccccatcccatgaaaggcagatgggaaaccatgatgaagcaatgtatgatgcatatggagggcctggtgtacctgcatttacctcagatatgccccctccaccagttttgatgcctgtacctggtgctgggcctttgggaccctttgtccctgctccaccagaagttgcaatgcagatgttcagggagcaaggaggacctacatcattcgatgcctcgggaaggaagatgcgatctggtcctcatatgggtggaccagcacctataattgctgttcctccatcctttagacctgatcctcgacggatgcgaagttatgaagatctagatgccccagaagacgaagtcactgtgatagactataggagcttgtaggtgtgaattccactaatttcaatgagattggtttgggtggcatgcctcctattacgctttcttgacgagagctgcagtctagccttaatggggttaggcttcatttattttgtgaatttgttttgagaatctctttttttttccctttcaatatggtgaaatttgagccgagggatgtatcgtgttgactttgatgttgtactagagatacgatttgtagacttcagttatttttctgatacaaggataattttaaaaaataatgttagctgatgattgcattataatctagaaatgatgcattttgcatcaagcgagggaaaagtaatttggtagatt

SEQ ID NO: 74411 - DNA, 110 bp, Glycine max
  Clone ID: PAT_MRT3847_38206C.1
caagggcataaaccactgctgatctagaaggtgatgttgaacctaccctatcagatgaaggtgtacctgccctatcagatgaagctgaaccagagccagttgatccttga

SEQ ID NO: 74412 - DNA, 269 bp, Glycine max
  Clone ID: PAT_MRT3847_38207C.1
gaattggctcgagctcgagccgggttcggcctctttttgatctcttaggaaaaaggtttcatttgtaaaaccactattcctttctgttatttttcttacttaaattgctctgtaggagaaaggaatttatgttatgattttataatatcgaaattatgtatgtttcacaaactccttcagagttgctagatgatggtaaggtagattctattggttttagttgctgttgcctttgatctcagaccgaataggtctaaaactcaaatttt

SEQ ID NO: 74413 - DNA, 556 bp, Glycine max
  unsure (1)..(556): unsure at all n locations
  Clone ID: PAT_MRT3847_38208C.1
cggacgcgtgggcggacgcgtggcctcgcatttagtctttgcatctccgtcncattcggaatggtaaatccctttgcgggcacacatcgtagaagctctggcagtgccttccgtttggtgttaaagttctcgcacaggtgcgagaagatggctgattgtgatgatgaacacgttaatcgaattggcgacttaccgatgaatgtgattgttagcatcctacaacgcctgcccttccaagacttagtgaagaccagtgtactggcaagggcatggaggtatatgtggtcgtcgaccccacggcgtgaatttagagatgacttttttgagaagtgtaaccatcttggataccttgaaacttccgccattattacggaagctcttcttttccacaccggccccatacacgtctttgctgtcatccctccttcgcactatcctatcaaattagaatgcctcaacaagtggattctgtttttgtcgaggaaaggggttaaatatattgggcttgcgagtgaacaagaagatccctattgaatgccaactcatattttctctt

SEQ ID NO: 74414 - DNA, 387 bp, Glycine max
  Clone ID: PAT_MRT3847_38209C.1
ggttctagtgtgtgattgtttgttgttgtaacgcgttcttcatccttcgtggttctgtgtttgtgtttggtttttctcgcacctgagaatgtcatgctgcggtgataattgtggttgctgaaactcctgcaagtgcggcaacagctgcggaggctgcaagatgtagccagacttgagctacagtgagtcaaacaccacccatacatggtcacgggagtggcacctgttaacgctcaatttgagggtgctgaaaagggtgtgctcgctgagaacgatggctgcaaatgtggacgaaactgctcctgcaaacgctgcacttgcaagtgaggtgttgggagaacaaacttcaagcatagataacccttaattacgaataatgataaacta

SEQ ID NO: 74415 - DNA, 166 bp, Glycine max
  Clone ID: PAT_MRT3847_3820C.1
tctggaagagggtgaggaggttaacgatcatcttgaacaaatgggacacaatattggaatccgactgattgatgagatataagctaagtctaatgtctcaagacgcaacgagttcagagagactactgatgtaatcgcaaaggctggctttaaaatgctccttggg

SEQ ID NO: 74416 - DNA, 261 bp, Glycine max
  unsure (1)..(261): unsure at all n locations
  Clone ID: PAT_MRT3847_38210C.1
attgcagtagtgctaagtgctaacacctgcagtgaacaatggcctctgcatcagcatctctgctcaagtcntcacttgttnttgacangtctgagtgggtgaaggggaaacccttcggcaaccttctncatnagntgtgagatgcaagcccaannncccancangcctaccatcatanctggtnnntangctgtgagctcgttangacnggcangcnntggcttcatcangngngggtntnttgncctggatnagtncatg

SEQ ID NO: 74417 - DNA, 421 bp, Glycine max
  Clone ID: PAT_MRT3847_38211C.1
ggaaagcggctcgaggggtacctgactttattacattgctggatatatgagcactttcctaatgtctatgactgtgtcactaacgatgcgtacgatgagacattcccacgtgcctgccggtggcttacgacgaagacttatatgaagggattaccaatagcgctgtatcggacacgtttagatgctttgacgatcactgacgtgtgctggatgccttatggtgaccacagaggagtgagggggtttgacctcagttcgtgcttctagggccagcttagatggggtcctattgtggtcatagtttgaccagagagggtggtacgacagtttgactacgttcagaccatccctccaccgcctgttagtgcctgcttgtcatatgaggatatcgacgacagatagatgcattactcgaaccatc

SEQ ID NO: 74418 - DNA, 789 bp, Glycine max
  unsure (1)..(789): unsure at all n locations
  Clone ID: PAT_MRT3847_38212C.1
attctctctctctcccccctgcttcaatggagggttttacgtaggtttaaccccaaataaactcgaaacaaacgaaagctcttcaactcaccaccatgagaaaactctggaattcgctgtctctcctcgctcgtcggagatcaactttttccttctccaaatcgtattcttccgatgcacccttcaaccgctgcaccaaaacccacggtttactcatcagacccaacaacaaatttgcgaccaccccatttcgaaacatggaaaccctcgtccagaaatcctctccaatcccctcgaggcagcgaaaaatcatggaaaaatcgcagcttgacgaagctttcgagtccgcagaaaccaccgaggaaatgctcaaagtcttcagcaacatggaaggggttttcgacgagagagaacttggtttggcttctttaaaaattggccttaaacttgaccatgaaggtgaggaccctgagaaagctctttcctttgctaacagagctttgaaagctttggaaaaagataacaacaacaacaacttcccttcttctttgcctgttgccatgtgtttgcagctgttggggtctgttagttttagcttgaaaaggtttagtgatagtttacggtaccttaatagggctaatagggtgttgggtaggttgcaggatgagggtggtgttagtgttgatgatgttaggcctgtgctgcatgctgtgcagcttgagttgtccaatgttaagaacgccgtggggagaacggaggaggctcttgagaatcttangaagtgtttgg

SEQ ID NO: 74419 - DNA, 201 bp, Glycine max
  Clone ID: PAT_MRT3847_38213C.1
aacgagtaagcacaaaacaattttgctcaagataccgaacagttcactaccttaaggaagaaaagacccatgggggacccggtatgctctcttacccaacgataaggacctgcttaatagaactgacctatatttacattatacaatactttatttatatccactcgcgggacctgctatacttttaaaaattaaaacccc

SEQ ID NO: 74420 - DNA, 329 bp, Glycine max
  Clone ID: PAT_MRT3847_38214C.1
accgggcccccccacctgtatcgataagctggctcgagatagtggtggaagcttccttttttgcaataatatatttgatttgatgtttcaatcctggggtattctttaatctaccaagaattaaatgccagcttgttcttgtgcatgacctcatgcaatctccgtcttttaatttggaaaaatggatccagggtctcttgcttcctggattacagattggcacaagtttgaaaaaagtggtgcttgactcttatgaatgctgacctgcttgttactctttcctcctagtgtaaggctttttcgagaaagcaaaatggcgctacaattca

SEQ ID NO: 74421 - DNA, 374 bp, Glycine max
  Clone ID: PAT_MRT3847_38215C.1
tccaaggatggatttgtatgcaacctacaaaaggcttttggtttccctattattgcatttcccttgtgtgctactttaaagggtgagaataccccgtcaaaggttgggttcgagtagaaataggtgctttgggttacatcttgggttgacatttgttcgtcgtgggtttttgaacttaaatcacaggtggtccaaaaatgccaaaaaaaagttattcggaagaggttcaaagatggagtgcttaattggaattcaaatcttatagcgagacatgctcaattgcattttagctttagggaaattgctctattgtcgtattgttttgatgatgattataatcacatagttgacgtgcttgctggagagcattcaaa

SEQ ID NO: 74422 - DNA, 912 bp, Glycine max
  Clone ID: PAT_MRT3847_38216C.1
ctcgagccgaatcggctcgaggggcaattcgactggggattcatttcatttcattgtctccaattcttttttttcgtgtcgttatttttatctctaactcttcttcttctgcatcattcctctgttgcagcaccggttaagaattttcgtggaacctattgtgttgagctgcgattgcatgtgggaatcgatttctgcagattaatcttggaagtttgatgtgattgcttggttttggtttgaagtggttttaatggggaatatactgaatctaaacaattcaaagactagacggaatgattcccatggggtcttgcaaggtgaatcctgcaagagacagaggttgtcaccaaactcttgtgaggacaacccaagactgattccgtcccttcctgatgagatatcaatacagattctagctagagttcctcggatttattatttgaatctgaagttagtttgtcgtgcttggaaggaaacctttgttagttctgaactattttgtgtgagaaaagagcttggaagcatggaggaatggctctacattttgacaaaggtcaacgatgataagcttttatggtatgccttggaccctctttccagaagatggcaaaagttgccgccaatgccaaaagttgggtttgaagatgaaacaaagaaaggtttgatttcctttccccttcggatgtggagcatgatgggttcaagtattcgaattgttgatgtcataatgagctggcttgggaggagagatgccctggactggatgcctttttgtggttgctccataggagctgttgatggttgcatctatgcattaggaggattttcaagagcttcagcaatgaaatatgtttggcagtatgatcccattaaaactcttgggctgaggctagtccaatgtcagttggc

SEQ ID NO: 74423 - DNA, 397 bp, Glycine max
  Clone ID: PAT_MRT3847_38217C.1
agaatcttgctggagatatgtctgctgtacgcattgctaacacaatagctatgttcaggtcccagcgtattggaatggttcaaacccaggaccagtacattttctgctataatgctatcatagatgaactggaagaccttgtatctcagcagcaataggagtagaagggcagggaatttgattattttgttagaattctattggggaacagaatggcataatgactacaaattgtccctcctgttgctatttttcattttctaaataaacccctcccctcccctcaccctccacgcccccacctccctctttcattttatgatgaagatcataacttttaggatgtttttggcagaactaatttgcagtatatttggatttatcttataagctttct

SEQ ID NO: 74424 - DNA, 317 bp, Glycine max
  Clone ID: PAT_MRT3847_38218C.1
aatcgcatcaaccttttattttcgaccccacgccatgcgtgcttcaaccccattcccttttttttaagcttttcaatttccctttttttttcaatccttggccatttcatttttaccatggttcttttttcattccattacttttccccctggaaaatggcttaatctttttattcccttccttggttttaattaattaaacttctttttttttccttttaacttcattccttttaaccagaccactggaaaagtggggcctggtccttccaaaagaaattggcaggcttggccgggcctaaaaaaatgggcctctt

SEQ ID NO: 74425 - DNA, 563 bp, Glycine max
  Clone ID: PAT_MRT3847_38219C.1
tgtcactgcagacatggcggttcatatctttggagaggatctgatttgtacaaggtcttgcaagtattgacggagtccataaaagagcgccgtggttgaatcctcttattgaaatggcattcattaagtcattcattcaaggatttctaccgggtattgcattgaagctttttctcatctttttgccaacaatattgatgatcatgtcaaaatttgaaggctttggatctatatcatctctggagagaagatcagcttctagatattatcttttcaattttgtgaatatattccttgggaacatacttactggaacagcatttcaacagctgagctctttcattcaccaaccagccgaccaatatcctgtaacaattggcactgctattcctttaaaagcaagttttttcattacttatataatggttgatggatgggccagtatagctgcagaggttttgatgttgaaaccgctaattgtttatcacttgaagaatttcttcttggtgaaaactgaaaaggacagggaagaggccatggatcctgggagtattggtttcaac

SEQ ID NO: 74426 - DNA, 1255 bp, Glycine max
  Clone ID: PAT_MRT3847_3821C.1
tcccggggtcgacccacgcgtccggttggcgtttccgtttcaagtgtttgcgagagaatggagttcctggacgaggacgcaaggccaaggttcgtgttccagtccggtgcagctgcgaggagcagcgagccaccgcacccgatccacaaacctaccaagccattcctcttcgccaccgtttccctctcctcactcttcctcactctctccctcttcttcctcgaagcggagcccttcaaatcgctcctcttctggctcgcactctctctcctcgttggccccttcgcccctccctccatcactggcggcgacgtccgcgtcggccgcggcgaggtcgtcaacttccccgatccggagcccgagcccgacgaggacgccagtaggaagtcctcacaacggcgatccagacagcggagggccgaggaagcctccgccgccgtaggcccggtggtttccgtcagcgcggcggagaagagaaaagaatcttctggaatcgagaagcgtgcgacggtggtggaggaggagaaggggtggagcgaggaggatgtggaggtgctgaagaagcagatggtgaagaatccggtggggaagccagggaggtgggaggcgatagcggcggcgttcggggggaggcacggagtggacagtgtgataaagaaagcgaaggaattgggggagaagagagtggatgattcggagtcgtatgcgttgtttttgaagaagaggaaagcgttggataagagggttgtggaggagaatgcggatgagggtgagaaagttgttgataatggttggagttctgctgaggatatcgcgttgctgaatgctttgaaagcgtttcctaaggaagtttccatgaggtgggaaaaggttgctgctgcggttcccgggagatccaaggctgcttgcatgaaaagattcgccgaattgaagaaagggtttcggactgcaaaagctgcagccgagtgagcactgaacactctcaaagggatcatttttttgtttgattttgatatgttaaggtaaatggattcgtcgacttgtaacttaaacataattttttgtttctagctattttgagttatgatttatgttggcctccttctaggtgacactcaaattgtggttgtgtaactttataaaatgcaatgaaccgatcgagattgtgtattcgggatctcttatagtgcgaataaatatttaatatttcgacttgaaaaaaaaagaaaaaaacaagggcggcagctctagagga

SEQ ID NO: 74427 - DNA, 482 bp, Glycine max
  unsure (1)..(482): unsure at all n locations
  Clone ID: PAT_MRT3847_38220C.1
cccgcgtccgctctattctattcttggtatgcagcttggtttacttgcagaacctaatagagtagtaatacaacaaagccaccatgcaggacttcgtggggtgtcttgcaagggagaatactcactctaaaggccgggccagaagaccaggcgcaagcccatgctcttctagggcgaccaccccaacggatgctggggctaccatgattcaggacctatcttccatgacggcacataaaactggagccgctgcaagaacacaagcaatgatcacagcttgttcttggaaattccaggatgctacacacgaaatacatacaccagctaagcaagtaattactccagtgaagaagaacaccatgccttctccaaccgctgattgttcaaccaatgcatcatcaaaggactcttgtcccagatgtcagcatggtttcttttgctcagatcatggctcacanagcaaacctggcaatattattgga

SEQ ID NO: 74428 - DNA, 552 bp, Glycine max
  Clone ID: PAT_MRT3847_38221C.1
acaaaattactccatgctcgtacaagtcgtatgtggtaaagcagttcaaagaaataattgcgcgtaatgatgcatcacacacacttacatttacatgaccgagcacgcatttggattttcatcgctgaagagctcgaaggaatccgacggctgcgatgaagcatacgattccctttcgtacgtgtacggtggtggaggctccatttcgttccctggacgcaccacgtgggcgtacgaatacggttgcggagaggtgtaatacgctgtaccgtagctgctgctaggatgcgccgtgtgataactcatgaccgtatgaacagcaggggtagtaggaggaggaggaggaggaggaggaggagcatagtaatgcggtgggtactgacggtaaatgttatgatgacgtggtggactctcattggctgggcttgaaaatggaagccatggcccatgaacatgtacatgaccttgcccatgtgactggttaccggaagaaggtccggaaccatcgtttgctttagcgtgttcaacagtaacagtagcagcaccagcacc

SEQ ID NO: 74429 - DNA, 518 bp, Glycine max
  Clone ID: PAT_MRT3847_38222C.1
ggcggtgatgcttctgaatccgacaaagatttgcttggtagaggagagatggaaacacaacatgattattactctaggaaaaggtcaagacacagaagaagatcaggtcttcaggatgagtataaataccatgagaatgaaaatgacaaagtttatggagattggtctcgtaaggactgttcccagcgagaagagcatcatcacaaaaagaagacatcaaaacattagtagagattgattccatccatggttagttagaactcgagtggggggagggcatcatataaacaagggaagtgacaatcaattgttactcactataaaggtactggatctcgtatcatacttagaagattggctgaccttagtattggtggaaataaataaattgaatgaaaaatatttttatatcaaaaaaatatttaaattttaaaaacttgtaaccttttattacattattttttcttagatgtattttttaaatttgttataaaaaactatttgatttttaagaggct

SEQ ID NO: 74430 - DNA, 1378 bp, Glycine max
  Clone ID: PAT_MRT3847_38223C.1
attcccggggtcgacccacgcgtccgcaatttcttgcagctgaaaaacgccgacctgatcaatttacggtgctcgttagaaacattccaccagatcctgatgaatctgtaagtgagcttgtggagcacttttttctggtcaaccatccagataactatcttactcaccaggttgtttataatgcaaacaaacttgcaaagttggttaaaaagaagaagaagttgcagaattggcttgtatattatcaaaacaaagttgaaagaacttcatacggctgcgagaagacgacagaagtccttggtctttgcggaaacaaagtagatgctatcgatcatcacaacactgaaattgacaaactgtcaaaggaaatagcgttagagagggataatgtcagcaatgatcccaagtccatcatgcctgcggcatttgtttcgtttaaaacacgatggggtgctgcagtttgtgcacaaacccaacaaaccagaaacccaacaatgtggttgacagagtgggcgccagagccacgtgacatctattggtcgaatttggcaattccatatgtttccctcaccgtgagaaggttgatcatggctgttgcattcttttttctcaccttcttttttatgatcccaattgcaattgtacaaggtcttgcaagtattgagggaatccgcaaaagagcaccatggttaaatcctcttattgatattcctttcattaagtcgttcattcaaggttttctacccggtattgcattgaagctttttctcatcttcttgccaacaatattgatgatcatgtcaaaatttgaaggctttggatctatttcatctctggagagaagatcagcttctagatactatcttttcaattttgtgaatatatttcttgggaacatacttaccggaacagcatttgaacagctggactctttcattcaccaaccagccaatgagtgagtcattcaagataaaaggggtttttttctcctctaaaaattatttacttttttaattgtcattatgtttgctttgttttgattgcttacatatgttctactatgccaataagtttacatgtctttgtaaatttgttgtatctgtggtcaactatttcatcatgttacatgtgcgaagggggaaaatcatcctacttttggatatactttatgattttagctatttacgaaccatgatgttagtgctcttgtcttaatttacaccatgttaatatgattaagaattctttttatattcatgtcagatatcctattacaattggcactgcaattcctttgaaagcaagtttcttcatcacttatataatggttgatggatgggctggtatagctgcagaggttttgatgttgaatccgctt

SEQ ID NO: 74431 - DNA, 1115 bp, Glycine max
  Clone ID: PAT_MRT3847_38224C.1
gctgcagaggttttgatgttgaaaccgctaattgtttatcacttgaagaatttcttcttggtgaaaactgaaaaggacagggaagaggccatggatcctgggagtattggtttcaacactggagaacctcgtatacaattgtactttttgttgggtctagtatatgctgcagtgacacctgctgttcttcctttcataacagttttctttggcctggcctatcttgtgttccgtcatcagatcattaacgtatataatcaggagtatgagagtggtgcagcattctggcctgatgtccatttccgtatcgtgatggcactgattgtctcacagatagttttgatgggactcctcaccaccaagaaagctgcttcatcaactccttttctcattgtgctcccaatactaaccatatggttccataggtactgcaaaggcccgttttgaatcagcatttgttaaatttcccttacaggaagcaatgatgaaagatacattagaacgaacaacagaacctaacctgaacttgaaaggttatcttcagaatgcctatgttcacccagtttttaaggacagcatggatgacgatgatgacgaggaagatagactcagtatagacttggaaactgaaagtgtgactgtgcgcacaaaacgccaatcacgaaggaatacaccattgccaagcaaaaataatgatgcatcatctccttctctgtctgatggtattggaaatcatccagagccttaaggcaaaatgagataactgtacattcgaatttaggtcagtattttctcaacagactaggatgatgtgcaagtgcaaatatagtaagttgcatcacttgacaaagttgaggaagatgggctatctcttgtagtgacttctgctgaagcaattgttttgaagttttttccaggccgatgtaatcgctacatgtagactatctggaagatatttttgtaatgcttaggattttgttgaatactagtgaatttgcttccttattagatgaacagaagaggttgtcttttaagacctgtaaattatattgcaagttacatagattatatacatatacattatattacacttgggaaaaatgaaagttacctcg

SEQ ID NO: 74432 - DNA, 404 bp, Glycine max
  Clone ID: PAT_MRT3847_38225C.1
gcattttaagagagagaaagagagagtcagagtgggagacccattcacttatttcatgtccacaccttcacacagcacaccatatcacaaaatcgcgctttctaatatctagagacaggttatcctacacactcacctgtcagagcgcgtgcccttcaaacatgatcatgatcttcgtcaacctacgaccagtttcagattctttgtaaaggatttctatggctcttcactggatcccgaatatttcatatgtcttgatggatgtaaataacatacaccctcttcataaccgactcaatcaagtccatcgtgtcccacttgcacgatggccactctgttgccttttgcgccttattaaacggaaacatgaccttccttcagagcatcgattacgtaattaatca

SEQ ID NO: 74433 - DNA, 556 bp, Glycine max
  Clone ID: PAT_MRT3847_38226C.1
tagcttttctaaccgccacttcatcacggcaagcatatgccttctaatattctaggaaaccttcgctaataaattcccctcttaaccccctccccccctttttttgtaccttcatcatcatcatatttcatatcacaccaacccattttaatttgcatttgatcttcttcatagacatatatacactatcataatattagtttcttccttaaattttggttgtttttaacgttatgaagtttgggaagagactcaagcaacaaattcaggaatcgttgccggagtggagggacaagtatttgtcgtacaaggaattgaagaaacttgtacggctcatatcggcggcgccgcctaccttgttgaatgggtcgttggaatttggcaagacggaggctgagtttgtgtacttgttgaacaatgaaatagacaagttcaatgggttcttcatggagaaagaggaggacttcattattcgccacatggtaatgttctatagtttaaattcgatagttgtactaaaatttcttacacttacataggaaatctttgtattttt

SEQ ID NO: 74434 - DNA, 469 bp, Glycine max
  Clone ID: PAT_MRT3847_38227C.1
tcctttttttttactttttttttttttttttttttttttttttttttttttttttttcaaaaaaggtggggaaagttccaattttaatatctcccggaattaaattccttcctaaaaataattgccgcattttaaaaatttttttttgcccccggcttccgaaaacttcttgtccataaatcccccctcccggaaaaaatgagttactgtttttgaaatcataaaaacaaatccttttaacaaaacaaactttgtctgcaaaaaaaaagaaccccttggaaggggattaattttaaaaaatccctgcccacggaaggcaaaacccttcagggggtgcctttttttacccaaaaatgataaatggaaaatttgaaccaaggggcaaccttgaataccccgacccccctttttttggtccccccgtttttctacaaaaaccactttttacccttttgggggatttaatttc

SEQ ID NO: 74435 - DNA, 138 bp, Glycine max
  Clone ID: PAT_MRT3847_38228C.1
ttttgctggaaattgttcctttcccatgcaaaaaacaaacgccctaccaacaattgaggttaatattatttgggaaggaacccaaagggacacccctttttgcattttgatcccccacttttaaggaacttggagagg

SEQ ID NO: 74436 - DNA, 280 bp, Glycine max
  Clone ID: PAT_MRT3847_38229C.1
attgcgtcccttacttttgggtggtgatctctccatctcctttcccgttctcatacccatctctgtcacgcttgcgcgccctcttgctgttcttccttctgcttctcatcctgatctctatgatgattttcacggactttatcattcgcacgcttcttcttttgctcgcctcatgcacggtcgttctgctcctctactcttgcacgtctgtctcctatcactcttcgcccatggtcgtgctctctccataaatctctgtgtggatcttgtctctgtgcgt

SEQ ID NO: 74437 - DNA, 415 bp, Glycine max
  Clone ID: PAT_MRT3847_3822C.1
ggacaatccatccagttttttttttaatttgagaggatttttttttcacaccaaaacagggggtttttagtcatcctcggcatcctcaaaacccttgacagggggtttacgtaaataaggccaagcaaaacctgaatgtcctcgggctttgggggccaaaaatttttcttccaattttttttttttttgggcagttcctttagcttcaccacttttttttaaaaagtccactgaatctgttggaaaggagtatcaagctggttttgattgggagccccacttgactttttcttggcccttttcattaaaagggggaatgtaaggataaaactttcaattttcccgataagatcaggggcaaaaacttttatttttgaatcatcaggcaattcatgaactgaaccttggtttttaa

SEQ ID NO: 74438 - DNA, 600 bp, Glycine max
  unsure (1)..(600): unsure at all n locations
  Clone ID: PAT_MRT3847_38230C.1
gaagacaatgtgcaattttaaccagttgaaccttctatgtacatgagataatgaatttacgatctttgcaatcaatgaatatgcaatagaagccacttattaacctcaacaaaatgtaagtcgaccacttccaagcatcttagcctttattcaatttacactggaggagtactcatgcatgcatgttgctttacccaggttaggttactggagacatagtcttcataaaagtcgggttttattatggatccatgtgtgatgtgtcactgcaacccgacccaatccggcggcgggcagaacaactccgaaaacccggcacactccgacaagggcgagatcttaccatcatccaaacgaaaaacccccattccatttaaaaccctattaaaacccaacccatcatctctannngccacgcaattccctctcccaaggttcaaatccttggcagaagccgagaaagcacaatcatcccccaagaacaacaccctctcccccaaatcggtcaattccacccacttcttcccctcctcgtcgagnctgaacacgtcaaacttcaccgtcctctcccaccccatcccggcnacatcttcctcgtcg

SEQ ID NO: 74439 - DNA, 396 bp, Glycine max
  Clone ID: PAT_MRT3847_38231C.1
aacgaacctcagcttctctcttcttccatgctctttctctctctacaattcgatctcctcctcaatcctctggtcaatgcagatacatttcaagtatctgattactcgtacttgtttatggtttaatggcttgctgttaagagatcctttactgtttgagttgctaagagaaagtatggtggaagacgctggatatatgtttagttaacactgtcgtatggcaggaaatactagatttgatttaagtgcagctaaatcagacgaattggctttcaaggggagttttacaaatgggcagagagggaatttgacgaatggcactttggacaggtctacaagctttcgtgagggtaatgaggggcagatgtttatttcgggtgctaatatgtcgcgggg

SEQ ID NO: 74440 - DNA, 298 bp, Glycine max
  Clone ID: PAT_MRT3847_38232C.1
tttatatcacaatgcacgagtgtgatgaagggggatatctcctgtacaatgagtcaaaaaagctgcgatatggctactttcgaacactctaaaagattgaaactggtattatgagctaaacaccatccgcggctggaccggcgatgtattcgtcaaagaaaagctttgaaaatggctcaggagtcactctcagaaacccccgatatctcgccccctttgtctactgcacaatcgcagccagatccacctgttcaaggaacgttgctttagtccgtttaatcacaggcaccagaatttg

SEQ ID NO: 74441 - DNA, 488 bp, Glycine max
  unsure (1)..(488): unsure at all n locations
  Clone ID: PAT_MRT3847_38233C.1
gagacacaaaggttccaccatgggaaacattcccagtggcaattactctgagcggtttcctcttgatgattcctccgtggctgtcctactcaaaacaaatagcctcaaagggtctgatgaagaagttatggaaactttggagtgcagagtacttctcatttggaaggacaaccagcgaactagaattgaccaaaaccaactacagcagcaagcacgaacaagagtgggtccatcacaatccttgatcacgcatcaagccatgaaaaaaagaaccttcattttcagatgaacatgagagtcgaagatcaaggtcttcttttagcaaacattagtctagatggaccaaagtgaatgcagcaacttccagagaagagaagccctattgagcaaggcggggttctcaagtcctactccttcttttatggacgtgacagtggccganagaatcttatagtcaccttgaggacaaagagaagtgatgatgatga

SEQ ID NO: 74442 - DNA, 469 bp, Glycine max
  Clone ID: PAT_MRT3847_38234C.1
gattgttaaggcaaagaaaacctgcacaaaacctatagtaaaaaccagatcagaagaaaacatcaaattaaggtgggccattataatcacataccttgaaaacctctccaaaagttgctttcccatgttgcacaagaatagatcctatgtagaaacagaaagcatttgtgcagtatagaacaacaaaagagaaacctaatcctgcaccactaacaagccccaaccgaacaccttgtttttctggccctgaacatttcttcctgtacatttccatcacctttggctcagcacagaatgatgcaacagttctaatgctaccaacagcatcagttgccacctgatttgcctcctcatacatcacctataaaagacaaaggactcttgtcaacatatgcttactttctaatttctattgatggaatcagcataactaaatttagaccaacctttgcatctgcactgaatcctt

SEQ ID NO: 74443 - DNA, 117 bp, Glycine max
  Clone ID: PAT_MRT3847_38235C.1
ggtaccggccggattctgggtgccacgcatcactaaccggccggggagaccaaagaaggcgcgtggttaggagggaccacctccaatcaaacggggagataccggggaacaggccca

SEQ ID NO: 74444 - DNA, 670 bp, Glycine max
  Clone ID: PAT_MRT3847_38236C.1
gacgcatatagaagaacccagttgaaaacaagaaagcagtttcttaatcaaatgaggttgcaattgacattgaattcctttacatgtaaccaaaagtgattattaatctcagctttcagattcctccattgaaatgaaaacggttctaacgtcattttcacagtccaaactgaaaacatcaagccccaaccaaacactcatcttcgtttcataaacatcgatatactctttttttttctccccagatctgacacttagatgatcatttcttcgacaagaagaaatgcgtagccggggatcacagaaccggctatctggtgactcgtttggatcacgagtttctgctctcatgctcgccatgattgctaccatggctaccgattatgttgctggcaggctatggcaggatgcggaaagtagggcatattttattgaagagcttgaaaaaagaactggtcagggtcaatctgctgtttctgttgatgatacactgaaagttacagcctgcagggaacaacagaagaagttgtctgtccttgagatggaactagctgcagctagacaggaaggttttgttccaaagcgtttgccaggaaatcatgggaagcatcctacaaagaaggaacttttagttgtaggagtcatgacaacctttggtcggaaaaagaac

SEQ ID NO: 74445 - DNA, 633 bp, Glycine max
  Clone ID: PAT_MRT3847_38237C.1
ctcgagaattcagacactgactgagatctcgtctccctcttacttttcttatttatttccatgtatcttcaatagcctttttttttttatagacaaagttgggattttgatttcattttcttgcacccaattggattttgatctgaacccagttaatcattaagtcactgtattgtgagtaagctgtttgtcgttgtttctaatttgaagtactggagctgctacattaggtgggcttttgagtggtgaatttgacgttgaatgtccggtgaaacgagatccttttagtctgtaactgaacagtgaaagttgcagtttgtatttactttcaactgataaatgtcgaggggaagatctgatggatcacaaaaaaaagcgtttagttgcttccatctgcgttgtggcaacttttcttggtttcctgtatgtgtatggcgggtctatctttggttctcaaaatagtggttcatctactcttgaatatggcagatcattgaaaagacttggctcatcatatttgggtgcagaagatgacactgatggcaagcaagatgaatcttcatcaagtttcaggcagggagatggggaggacaatattgttccaaagagttttcctgtctgtgatgatcgtca

SEQ ID NO: 74446 - DNA, 548 bp, Glycine max
  Clone ID: PAT_MRT3847_38238C.1
gtcacaaacgcacgcacataacacaattcagacagtcaatgagatctcatcttctctgacttttcgtcttatttatttccatgtgtcttctatagtccttttttttagacaaatttgggattttgatttcattttcttgcacccaattggattttgatctgaacccagttaatcatttagtcactgtattgtgaggaagcttgtttgtcattgtttctaatttgaagtactgggtttgctacattaagtggggttttgagtggtgaatttgacattgaatgtctggtgaaacaggatccttttagcccgtaacagaacagtgaaagttgcagtttggatttgtactttcaactaataaatgtcgaggggatctgatggatcacaaaaaaagcgtttagttgctgcgatctgtgttgtggcaatttttcttggttttctgtatgtgtatggcggatccatctttggttctcagaatagtggttcatctgctcttgaatatggcagatcattgaaaagacttggctcgtcatatttgggtgcagagatga

SEQ ID NO: 74447 - DNA, 496 bp, Glycine max
  Clone ID: PAT_MRT3847_38239C.1
tgttgttttgatacgcctaggaacaagaaaaacaattatagagaatcatgaattttcaggtttatatcttaatcccatgggccacatttaacagactcggctcactttaggatactcctgcttaagaacactcattaaatgaaaaataaccattggctacgtatttggagttaccctcaattgtgacactgttcaaataataacttgtaccactgccactaggggtactcacgcgcattagcttagcattacgagcactgtctggtacaacctgttgaaggtgcatatgcgtttagcacaacgccatcctataatgactaagtgggcgtattggcacaatagcagtcgtgtacaatatgacagggctgaactcatctttgctgcttgatctaagagaagttgcccatcaaatgttgccgattagaccagtcttcgatactgaaacctgcgcttgatgctggactgattatggctctgaggggcacactggacctgc

SEQ ID NO: 74448 - DNA, 370 bp, Glycine max
  Clone ID: PAT_MRT3847_3823C.1
aatcaatctactcaacactgtataaagtcaaagtaacctctgcatactgagggcacatacaagattacaggctttatgaaagtccagattgtttaaatatctgttatctagatgttcggcagtgagataaaacaaaaatattcatcattgttacgtacccctatgtgaagataatcttatgctatgtttacacaacgatatgtagatgatcatgtacaaaatacaccgcccatcttatacattgtgtaagaggcttatgcagctatacttcattagacgcgtggagggatcatacaatacttgaccggaaagctaacgtttatactctatccatatggggagtcacttattatcttggcgaaatatgggt

SEQ ID NO: 74449 - DNA, 2529 bp, Glycine max
  Clone ID: PAT_MRT3847_38240C.1
gcaaacccactttgtgtgtccaaatggaatctcagtggtaaccacaaaagtcttgccaccttaatcacaggtcaatttgctgtccacagcacactgctgcaactctcgcaaactcttttaggttaatcattaagtcactgtattgtgagtaagctgtttgtcgttgtttctaatttgaagtactggagctgctacattaggtgggcttttgagtggtgaatttgacgttgaatgtccggtgaaacgagatccttttagtctgtaactgaacagtgaaagttgcagtttgtatttactttcaactgataaatgtcgaggggaagatctgatggatcacaaaaaaagcgtttagttgcttccatctgcgttgtggcaacttttcttggtttcctgtatgtgtatggcgggtctatctttggttctcaaaatagtggttcatctactcttgaatatggcagatcattgaaaagacttggctcatcatatttgggtgcagaagatgacactgatggcaagcaagatgaatcttcatcaagtttcaggcagggagatggggaggacaatattgttccaaagagtttccctgtctgtgatgatcgtcattcagagttgattccctgcttagatagacatcttatctatcaaatgaggatgaagctggacctgtctgtgatggagcactatgagagacattgtcctcctgcagaaaggcggtacaattgcttgattcctcctccatctggatacaaggtccctattaagtggccacaaagcagagatgaggtatggaaagcaaatatcccacatactcaccttgcacacgagaaatctgaccagaattggatggttgtaaaaggtgaaaaaatagtatttcctggaggtgggactcatttccattatggagctgataagtacattgcatcaattgcagatatgcttaacttttcaaacaataatctaaacaacgaaggaaggttgcggacagtgcttgatgttggctgtggtgttgcaagttttggagcatatcttgtatcatctgatatcattgcaatgtccttggcaccaaatgatgtgcattagaatcaaattcaatttgctctagagagaggaattcctgcatatcttggtgtcctgggaactaagagactcccttacccaagcagatcttttgagtttgctcattgttctcgttgtcgaattgattggcttcagagagatggattactacttcttgaactagaccggttgctcaggccaggaggttattttgcatactcatctccagaagcatatgctcaggatgaagaggatctaaggatatggaaagaaatgagtgaccttgtggggcgtatgtgttggaaagtagctgcaaagaggaaccaaactgttgtctggcaaaaacctccaacaaatgactgctatatggaaagagaacctggtactcgccctcctctttgccagtctgacgatgactcagatgcagtatggggagtaaatatgaaagcatgcataacaccttacagtgatcatgacaacagagccaagggtagtggattagctccatggcctgcaagattgactagtcctcctcctagattagctgactttggctattcaaatgacatgtttgaaaaggacacggaactatggcaaaggagagttgagaagtactgggatctcttgagtccaaaaatcacatcaaacacattgaggaatattatggatatgaaagcaaacatgggttcatttgcagctgctcttagagacaagaaagtttgggtaatgaatgttgtacctcaagatggaccaaacacacttaagctcatatatgacagaggccttataggaactactcatgactggtgtgaagcattttcaacatacccccggacatacgatttacttcatgcatggactgtcttctctgacatagaaaataaaggttgcagtaaagaggatctattaatcgagatggatcgcatgcttcggcctactggtttcgcgatcatccgggataaacagtcagtgattgattttataaagaattacctaagtgctttgcactgggaagcaattgattccagttctaactctgtccaagatggcgatgaagttgttcttatcatccagaagaaaatgtggctaactagtgaaagctttagggacactgaataggacaaccaatgaattttcatcttcttataacttattacctgctgctacaactacaagggatcaaagcacgtcccaaggggtgaagcattaaagtaaacaacttcattttgtagcattacatgttgttttcttttcatttaatttccttcttttgattctcatttttgggatgatgattattcatgtgattaagacatatacataagcatcatgcttttataggcggctattcaaaattttgcctgcatttggggattatgtaagctacataatattcaagacatggaagtcacttatataagttatgtacttatgtaatatatatacgtgccttttctgctcaaaaaaaaaaaa

SEQ ID NO: 74450 - DNA, 360 bp, Glycine max
  Clone ID: PAT_MRT3847_38241C.1
agcattcaactgcagatagaatgcaactttatgatgtcacgaaacccaaatttatatgcaacactaagaggcattcaacttataaagatcaacaaaaagggagggaaacccccttttttctcaaaggggaaaacattccattattcatggagaatcctatgaaccaaatgagctttttgttggcggcttgaactaatcaacactccttagagcaaaaacttatttcatgctagcaagatgcacaattaggtcacaccctaaaatcgagaatattccaaggcctccacactaaaatcttgctcacattgcgagaaacacattggaggcttgatcctaaaaacatcgccacgaaagcctcct

SEQ ID NO: 74451 - DNA, 2720 bp, Glycine max
  Clone ID: PAT_MRT3847_38242C.1
ccacgcgtccgatttcacctctccatctctctagcagataaacttgtctttctttttgtttattttttaatcaaccctgttccacaatttgacctttattcaaattatcgcataaaataaagagcaccgactggcaccagagttgtaaaaccgtgtgcatagcgtgacatgattgctgagtgttaagtgtaaatccactttgtgtgtgtccaaatggaatctcagtggtaacccatcttacccacaccatatcatatgccacaaaagtcttgccaccttaatcacaggtcaatttgctgtccacactgctgcaactcttgcaaactcttttaggttaatcatttagtcactgtattgtgaggaagcttgtttgtcattgtttctaatttgaagtactgggtttgctacattaagtggggttttgagtggtgaatttgacattgaatgtctggtgaaacaggatccttttagcccgtaacagaacagtgaaagttgcagtttggatttgtactttcaactaataaatgtcgaggggatctgatggatcacaaaaaaagcgtttagttgctgcgatctgtgttgtggcaatttttcttggttttctgtatgtgtatggcggatccatctttggttctcagaatagtggttcatctgctcttgaatatggcagatcattgaaaagacttggctcgtcatatttgggtgcagaggatgacactgatggcaagcaagatgaatcttcatcaagtttcagacagggagatggggaggataatattgttcctaagagtttccctgtttgtgatgatcgtcattcagagttgattccctgcttagatagacaccttatctatcaaatgaggatgaagctggacctgtctgtgatggagcactatgaaagacattgtcctcctgcggaaaggcggtacaattgcttgattcctcctccatcaggatacaaggttcctattaagtggccacaaagcagagatgaggtgtggaaagcaaatatcccacatactcaccttgcacacgagaagtctgaccagaattggatgactgtaaaagctgaaaaaatagtgtttcctggaggcgggactcattttcattatggagctgacaagtacatagcatcaattgcaaatatgcttaacttttcaaacaataatctaaacaatgaaggaaggttgcggacagtgcttgatgttggttgtggtgttgcaagttttggagcatatcttctatcatctgatatcattgcaatgtccttggcaccaaatgatgtgcatcagaatcaaattcaatttgctctagaaagaggaattcccgcatatcttggtgtcctgggaactaagagactcccttacccaagcagatcttttgagctcgctcattgttctcgttgtcgaattgattggcttcaaagagatggaattctacttcttgaactagaccggttgctcaggccaggaggttattttgcatactcatctcctgaagcatatgctcaggatgaagaggatctaaggatatggaaagaaatgagtgaccttgtggggcgtatgtgttggaaaatagctgcaaagaggaaccaaactgttgtctggcaaaaacctccgacaaatgactgctatatggaaagagaacctggtagtcgccctcctctttgccagtctgatgatgacccagatgcaatttggggagtaaatatggaagcatgcataacaccttacagtgatcatgacaacagagccaagggtagtggattagctccatggcctgcaagattgactagtcctcctcctagattagctgactttggctattcgagtgacatgtttgaaaaggacatggaactatggcaaaggagagttgagaagtactgggatctcttgagttcaaaaatcacatcaaacacattgaggaatattatggatatgaaagcaaacatgggttcatttgcagctgctcttagagacaaggatgtttgggtgatgaatgttgtacctcaagatggaccaaacacacttaagctcatatatgacagaggcctcattggaactactcatgactggtgtgaagcattttcgacatacccccggacatacgatttacttcatgcatggactgtcctctctgacatagaacagaaaggttgcagtccagaggatctattaattgagatggatcgcatgcttcgacctactggtttcgtgatcatccgagataaacagccagtgattgattttataaagaagtacctaagtgctttgcactgggaagcaattgattccagttctgactctgtccaagatggtgacgaagttgtttttatcatccagaagaaaatgtggctgactagtgaaagctttagggacacagaataggataaccattgcattttcattttcttataaattattatctgctgcttcaagggatcgaagcacgtcctaaggtgtgaagcagtaaagtaaaacaacttcattttgtagcattacatgttttcttttcatctaatttccttcttttgattctcatttttgggatgatgattattcatgtgattaagacatacataggcatcacgcttttataggctattcaaaattttgcctgcatttggggatgatgtaagctaccaaataatcaagacatagaaatcacttatataagttatgtaatatatataaatgccttttctgctatgggtttctttt

SEQ ID NO: 74452 - DNA, 140 bp, Glycine max
  Clone ID: PAT_MRT3847_38243C.1
gccgggtgccagttgatgaagaaacgactactaaacgtggatcaggttaaggcctgggagaagatctttgtagtagagaacatactggaacctcgaccgaaaggtgaagctaccgcgagatctacttttgcaaccaagac

SEQ ID NO: 74453 - DNA, 338 bp, Glycine max
  unsure (1)..(338): unsure at all n locations
  Clone ID: PAT_MRT3847_38244C.1
gagcggccgctttttttttattatctttttctttttatactcaccgcncaccacaccacgcgggtgaattttataaggaaaattctcaccctcaaatcttgaatggccagtacacaactttattcgtaaccatttctttttaatcactcataacctacaaactatttttctctttcaaaaatataccccccatcatttaaggcctctacgagagaaatattaaggtgcgagcggtcaacctttatcaaataaagttccctaactttttttattcaaataacaatgttatacaataatctttttattaaatataaaaacaccctttctttactttttgc

SEQ ID NO: 74454 - DNA, 248 bp, Glycine max
  Clone ID: PAT_MRT3847_38245C.1
attttgataaaccgctgatcacagggtgccgtaccttaaaaccggaaccataagcaattgcttcttggtttcaagaatcttacaatatcttcctactactttgtgtacgagttcttaaggaaagaaaatcactctctgtgctggtcacagacttcgcgaatcatggttcttttccatttctaagtaatttgctgtacactctcctatttgatattaggacttctgtgtcagaattaaacttcttctgc

SEQ ID NO: 74455 - DNA, 194 bp, Glycine max
  Clone ID: PAT_MRT3847_38246C.1
aatcaccaaaaatgaacacctgccctttcatttggaatcatcaaaaggcctaaatggaccttattggcaggacctaaaaatctgctctcttacctgagattccatttaaagaaaaagggtttccgaaccagaatttccctttttttaccggtgtgcttccaaaaattttccacccccattgggggcctggggca

SEQ ID NO: 74456 - DNA, 481 bp, Glycine max
  Clone ID: PAT_MRT3847_38247C.1
gctgccccttccatacatctttcaatttgctgctatgaagttctctgtcacatcgcgcatcgccattctggcgtccgttgcatattcgcagggcgccacttccacaacaactgcaactggatcaacaacgggcaacgcgacaccaactaccagtggggcgggtacaacgcacaccgttgctgttggcggaactggcaacaggttcgagccgcataacacgaacgtggaagttggtgatgtcgtgatcttacaattcagaaccaacacccataacatcctccaatcggacactcaaggcggctgcacgaagtccaccaatcctgccgtgaagcaattccctgcttacggactcgccgctcagggtcagacctggacttacacggtagccccactaacgcctaccgctgaaggcatctggatctactgcgcgccgcactgcaaaggaggaatgactgccggccttttacttgtaacgcaactg

SEQ ID NO: 74457 - DNA, 290 bp, Glycine max
  Clone ID: PAT_MRT3847_38248C.1
ctcacgcgttcgcagaattacccaaattgtgctctttggtgtcttttttaactgacatgcgaaactgaatggttcttaactctcattaacctgctattggaaccaaaatcctcaaaacggaattgcctgcataatctcctcctaaatcatttgggcattaaccattccgaacctgccttgaattggccaatcctaccctggtttaattgggaaactttaaacttggaattcacattgttgaatgacttgaccttaaggcattacctgatccaggtttctttcacctgttg

SEQ ID NO: 74458 - DNA, 635 bp, Glycine max
  Clone ID: PAT_MRT3847_38249C.1
agcaagtgttgttggtgttggagcaaacctgcaagagatttccatcagttaatttccttaaggtggagattgaagaccatccatacttggcaaaatcagaaggtgtgaactgcatcccagcctttaaaatatacaagaatggatcaaggattaaagaaattccaggaaacaaccacgatttgttggaaaaattagttaaattatatagcagctgaaggtaatcacacttcttcgaatcacaacatataggaagagacgaggaaggttagatttttaagaatggaaaggaagattgccaaaaataaatcaagctgattatatctgcttcataaatttggtcaccttgcttacaagacagaggaaaccagagacgaaacatagcattgttaaaagctgtagaaaaatgtataggaaaagtgattctttgtgttagtaattgactttcttaatacttttggatgtttgagaggtctttaattcctcacattcagtgcataatggtttggaaaaacgtaaactttttttttttggttgttagataagttatgtattctttacaggagtgattatttaggttgtcattctaagttatgagcaatatagtaaaagaaacccgattgttttacctttaaaaa

SEQ ID NO: 74459 - DNA, 1941 bp, Glycine max
  Clone ID: PAT_MRT3847_3824C.1
tttttgtgcatgtcatacctttttttgtttgttcatttgaaagaaaccagaccatgccacatctgctttaaaagcctgtacttttgaacctctctcgtgatcactcttcttcctttctttaaatttgtttccttcacacttttcagaacacccagaagctctagcctcaccagcaccacatattgctagctagcgactccgagatgccaagcaaagaggattcacctttagtagaagcaaagcttccactattagaagctcaccctttaacagatgaaagagaacaagaccaaagtttcccacgaaggttttggcttgagtcaaagaggctttggcacatagtaggcccttcaattttcagccgtattgcatcctactccatgttagtcataacacaagcctttgcaggccaccttggtgacctcgaactcgctgccatctccattgccaataatgtcgtcgttggcttcgacttcggcctcttgttgggtatggcaagcgctttagaaacgctatgcgggcaagcttttggagcgaagaagtactacatgttaggcgtttacatgcagcgttcatggatcgttcttttcatatgttgcatctttcttttgcctttgtacttgtttgcctcgccggtgttgaagttgttggggcagccggaggagttggcggagctatccggcgcggtgtcgatctggatgataccggtgcactttgcctttgcgtttcagttccctctgcagaggttcttgcagtgccagctgaagaccgcgcccatagcgtgggtgtctctggtggcgctcgtggtgcatgtgtttgtaagttggttgttcgtgttcaagcttcagtttggtgttgttggtgctgctgctactattaacttctcttggtgggtcctcactttggggctttttggctacgttgtttggggtgggtgccctcacacttggagtggtttctctgttgaagcgttttctggtctttgggagtttctgaaactctctgctgctgctggagtcatgctatgcttggagaattggtattacaaaattctgattgtaatgaccgggaatcttgagaacgcggagatcgctgtggatgcattatccatatgtatgaccatcaatagtttggagctgatgattcctctggctttttttgctgcaacaggagtgagggttgcaaacgagctaggagctgggaacggaaaaggagccaagtttgctactatggtatctgtggtgacatcggttataataggacttttcttctggatgttgattttgatattgcacgataaattcggctacatattctctaatagcaaagctgtccttgatgaagtaaacaacctttctcttctattagccttcacaattctgctcaacagtgttcaaccagttctctcgggggtggcagtgggatcagggtggcaatcatatgttgcatacataaatttgggttgctactatattattggggtgcctcttggaattttgatgggttgggtcttcaatcaaggagttatgggaatctgggcagggatgatttttggtggcacagcaactcagacattaatattgagcctcattacaattcgatgcgactgggacaaagaggctgaaagagcaaaattgcatttaacgaagtggactgatccaaaacaagaattgaactaatcaagggatactcgctttgtaacctaaatgccaaaggaatccgcatatttgttttaggcttcggtgatattgaacgaaactaaaataattatgatatatgtcattattaatacaatgaaattgtttcatgatagtagtattagaaaagaaaattctatttaccaattttctccagttaagctccagtgtgatctttgattctcccatcactccagaagcattttatgaaaacccttgatttttctcgagtgactactggcct

SEQ ID NO: 74460 - DNA, 424 bp, Glycine max
  Clone ID: PAT_MRT3847_38250C.1
gtgccttgcagaaacaacgagatcactgcatttgtggcagagtttcatccatggcctttggagcggagtgataacagctagaagtgatacagattgataaattaaggtatcaagatgtcttatcgaagggggtcggatcagccaccgctaaggtgtggatactgcggactcagactgctgggaatttaggagccaattaaagagtatgaaaggatacattatacttggagaacatggaggaaagggaaactgggggcacacctccaataatccagacagtgagagcatgggacctggtattagttgtccaggtgaagtccacaccaaaggaaaagcagaagaagcaagagagagatgatggtatgaataatggatttgaacaagttcttttggtattagtggtgcaagctacttcactggaact

SEQ ID NO: 74461 - DNA, 1597 bp, Glycine max
  Clone ID: PAT_MRT3847_38251C.1
actactactactactacttctttttcactttctctgtctctcacattttctactcacccagatccgaggatctcactccctcagggtcagtgtgtcacccggggcctgtcgaggggtgttttctgcttgatctctgactgtgccatatatccaggcttcatgtgggctttccgttccgggtctgatctgcctcctctaacgcggttgcggcgggcccggtctccggggtgccatcatttcctataattatcgtctattttttttttcctgaaggtatttgttatgtaatttaatgtttcaccttttcttttcttacaggagtgatagcagctagaagtgatacagattgataaattaaggtatcaagatgtcttatcgaaggggttccgttcagccgccgataaggtggatactgcggactcagactgctgggaatttaggagccaattaaagagtatgaaaggtacattttggacagatttagatttagggaataggattgaaagggtaaattaaaagatttttatccacgcgtccgggcatgtcaagattttgtgccacttattttgaggatgattgagttttggatgtttggatcaagccaatgaattatgaaactccctgaaagaaagtgccaatatttacactgttcgggcatcgcttattgttgaagaatgcacaagacttggtttgatgaccaaatcatgatggtctgtacagagctatagacatctacttgaaggaaaagagagaagctgattgctcatgatgcacgtgccgccttgcccaattgtttgtgctattgccaccactcagaatagcgtgttccaattctagactaggattttcttttaaattattattattacgggagaattagaggaacgcgtttgtgaaaattcaaatcatgaatcgccatttggtagaaagtatacaattccaaatgaatgcccaatacgtcaagcaactgctccgtaatttctagatagtgggaaaaccgaagaaattttccttcttgattggtgtgccttgcagaaacaacgatatcactgcatttgtggcagagtttcatccatggcctttggagcggagtgataacagctagaagtgatacagattgataaattaaggtatcaagatgtcttatcgaagggggtcggatcagccaccgctaaggtgtggatactgcggactcagactgctgggaatttaggagccaattaaagagtatgaaaggattaacttggagaatatagaggaaagggaaactgggggcacacctccaataatccagacagtgagagcatgggacggtattaggtgataaaattaccctgctttgtgcaacccatttatgtatttttacattaaaaaaggacttctatcattttaaatatatccattgtactgaattttcatcacttgatgagatagctgcaatcttttgcgtcgcttctgaagtgaggctagcaataaacgagtgggttatctctgtcggctttatgcctttgaactagctcacaggctagttccgcaatcgagtgggcggggtgttcgcctcttccaaaccgctcttttcacgtctagagaagaaaat

SEQ ID NO: 74462 - DNA, 802 bp, Glycine max
  Clone ID: PAT_MRT3847_38252C.1
ccggattccccggggacacaagctgtggagttcttccacggagatcatcatcttcacttcaattcagtttactcatcgtgtgatttcatccaaagttagcaacatgagcttcttgaggccttctgcgttgtacaactttctgatcagttatcctgcgctgcgatggctgccatgtcagagttggggcttccttcgatggcccggccttgatgggttcttcaggcttttcgtggttgtgcttctgtggtctacactatccgagcttcgcttcataccctcatcttctatgtaccccacccttcgtgttggcgaccgaattattgtcgaaaaggcttcatattacatcaggagtccagctatacatgatattgtaacatttaaggatccaacacagtcctctggggaaaacacagatgctgtttttatcaagagaattgttgcaaaagcatgagacactgttgaggttaatcatggggcactctacatcaatggtgttgctcagcacgaagatttcatagccgagccaccagcatacgcactgcaattaactcatgtgcccaatggtcatgtttagttggataatcgtaacaatagttatgactcccatgtgtggggacccctgtgaagaacataggaagatatgcgtgctatcatccaagcatttgacagtatttgtttcgcgaatgcacaatattctgcttttctgtgtctttccttggctcgcgatctacctttatgcttgatgtcacgtaggaatagcatttggaatgaatgctattcctggtttggttgctctttgaaa

SEQ ID NO: 74463 - DNA, 493 bp, Glycine max
  Clone ID: PAT_MRT3847_38253C.1
tcaactcagactggatcaaagtatgtattagagagcctggtaaggaaaaagagaaagaaaacatctttgagttgtttcagttttttgctttgtaaaattcttgttttgaatataatttttaaaacttgatcaattttgagtgagaagtaatctagtaagtagtataaaacaattttagaaaatagcttttaaaactaaaaaatgaaaactgaatcaatcatagcctaaatcttttaacaccttatgaagactaataactaaggacaatgtaatgtacactatgattcatttgggacattttttcattttcataaattggtttagttttcctttccctactaaagttctagaaaaattaaagtttatagaattacaaaattctgtaacagtgtaagcactatacttttaaggattactaaagcttgataacaataaactgggtttctcttcatttagtgaacggtaaggaataaaacaagtactcaatcctgga

SEQ ID NO: 74464 - DNA, 307 bp, Glycine max
  unsure (1)..(307): unsure at all n locations
  Clone ID: PAT_MRT3847_38254C.1
gtcgctggtaataaaggcggtagtagataagtgtatccaacagttacaagaatcgttggatgctgatattcatgataggatcatgaagaacagacaaatacaaagttacattgaagaggcagaacgaggaattactaagcatgaaactacttaaacaactaatctttctcttcgcaatacataaatatctctgcaaaaagcaaagctgaagatagatacatacaatctagagaaaganaaaagtatctgagtgagaactacgtcatatcaacatgaccaagatgaatctcttgagagtacagtgagt

SEQ ID NO: 74465 - DNA, 2737 bp, Glycine max
  Clone ID: PAT_MRT3847_38255C.1
cctgtgctcttctgcggtaatcattggctgaacttccacggagatcatcatcttcacttcaattcagtttactcatcgtgtgatttcatccaaagttagcaacatgagcttcttgaggccttctgcgttgtacaactttctgatcagttatcctgcgctgcgatggctgccgagcatcaagcctaatagagggctaatccttcacttgtttgttttgtggtgtattattacattttgcaccatgccttctctcttcgctagaaaccagaggttctcattggctactctcctgcttcttctggaactattgacaggaaaccttcgcatggcagatgctcaaattggtgtgtgttatggcatgctgggcaacaatctaccgtcagcaaacgatgttataggtctttatagatcaaataacataaagagaatgagactctatgatcctaatcaagctgctctagaagcacttagaaattctggcattgaactcattcttggggtgccaaactctgaccttcaaggccttgccaccaatcctgacacttctcgtcaatgggtgcaaaaaaacgtgttgaacttttggcctagtgtcaaaatcaagtacgtggcagttggaaatgaagtgagtcccgttggaggatcttcttgggaagcccaatatgttctacctgccatccaaaatgtataccaagcaataagagctcaaggccttcatgatcaaatcaaggtttcaacatctattgacatgaccctaataggaaactctttccctccatcgcaaggttccttcaggggtgatgtgagatcatacctagatcccataattgggtacttggtatatgcaaatgcaccattactagtcaatgtgtacccttattttagttacactggtaacccccgtgacatatcacttccctatgctcttttcacagcaccaaatgttgtggtatgggatggtcaatatgggtaccaaaatttgtttgatgctatgttggattcagtacatgcagccattgataacactaagattggttatgtggaggttgttgtatccgagagtgggtggccatcagatggaggatttgctgccacttatgacaacgcacgcgtgtacttagacaatttggttcgtcgtgctaatagaggaagcccaagaaggccttcgaagcccactgagacttatatatttgccatgttcgatgaaaatcaaaaaaatccagagatagagaaacattttgggctcttcaatcccaacaaacaaaaaaaatacccatttgggtttggaggaaagaggctagggaaagttgttattgacgacttcaatgcaacaacttccattaagagtgatgtgtaaggttggaatcctactcctcaaaatctctgttattccacccataaaataagagagaatatgttgtttgtgtgaaatatgtatatatccttcagtcttggatgaataaaatttgtgaaaagttgataaagatgaagctatataatatgagacactctcctatgttatttacacatctctccaacctttcactttcgtttctcagttttattcgaatccctctctcaatctcctttccaaatggccagcgttgaggttgcacagcaaacaccaacaacagttccagaaaatgaaacaaccgaggtaagcaagacccaggaaacaaccccagtcactgagctggggcttacttcgatggcccggccttgatgggttcttcaggcttttcgtgggtgtgcttctgtggtctacactatgcgagcttggcttcataccctgatcttctatgtaccccacccttcgagttgacgaccgaattattgactaaaaggcttcatattacatcaggagtgcagatatacatgatattgcgacatttaaggatccaacacagtcctctgtggaaatcacagatgctgttgcgatcttgagaattaaagcaaaggaggcagacactttggagtttattcatggggcactctacatcaatggtgttgctcagcaggaagatttcatagccgagcccccagcatacgcaatgcaattaactcatgtgcccaatggtcatgtttatgtgttgggggataatcgtaccaatagttatgactcccatgtgtggggcccgcttcctgtgaagaacatagttggaagatatgtcacgtgctatcagactcgagaatacatctcaatgatatctctgtgagatgtattgaaggaactggtgttcttttactatggtctgaccagtggggcggcatactaggccatgtcatgtgatttccatgaagagttccctccagctgttccataaatgatgcacatcatttagccattctttatgggattggattctcatatgcatgtagtgaggtttccctcgttcagagcatgaaatgaatctactgaaaaaatgtcatgtgatttctgaagggttcactgttagttgagtaacgatgcttgccctttgccaataaatattcgtgtaggtatccaagtttctttagcagtattgaaataacattgctttcattgagagttgaactcaagacctcccgcttactaaacgggtgctctgaaagctttgcttctttgttcattgaactcattcttggggtgccaaactctgaccttcaaggccttgccaccaatcctgacacttctcgtcaaggggggccaccaaatatggagctactttacccctaaattaattatgaaccgcgtcctgca

SEQ ID NO: 74466 - DNA, 838 bp, Glycine max
  Clone ID: PAT_MRT3847_38256C.1
ggctcgagcaaactttctctctctctcacacacacgctccttttgattcgcaccaacttaccatcagaaatttacattcacatcatcccaacaaaaaaaaaaattaaattctccacacattttactttctccgcaactttctcagcactctacactcccatttctgcttccatgactgaaccacacaaacgtagctatctaaagcttcgacttcaaccttttttcagtaaagagagagctgagtagttctcagtaagaagcagctgaaaaaaaaattaaaaaaaaattctcagtccttctagggttttgttttattttgcattgaaattgaaatcccactactcaaaattcaaaatcccaaaccttctctctagaaaaagaaacagttttttttttttaattattattattattattattattctttgtgggatgggaagggtttaaattttgaatttagaattcggcattgacctgagctgagagtgagtttgagaagaaggttctagagtgcagggtttgcaatgtcgggcccacccagagttcgatccatgaacatggccgtcaccgacgctgacgcgcgcccggtgctcgtccccgccggcaacaaggttctccctgccatcgaccgacgcaagccggtgatgaaatcgtcgccggagacggagaagaaaccggtggcgcattcgccgcaatgcgtctccgttacgccgccagctatttcgcggcggcaggagcaccatcaggccgtgctgaaaagcctgtcgtcgatgaacgcctcctgctcttccgacgcgtcgtcgacggattcctccactcacagcagcggcgcgtcgtc

SEQ ID NO: 74467 - DNA, 279 bp, Glycine max
  Clone ID: PAT_MRT3847_38257C.1
attatcatggcacactgaggatcaatgttcattgcgactctcataacactctttgttcaaaaatggaactctggcttctagacccctatcaaaggtcgatctagtggctcgcaggcaatcatattatgaggagtgctttaatactgccgcatcgcttcaggaagaaactcttctttgctgggcgccttgctgaaatataaataccctccaaacatgccatgagaaccttctccagagataaccctctcgactcccaatgactcgatcttacgagacata

SEQ ID NO: 74468 - DNA, 446 bp, Glycine max
  Clone ID: PAT_MRT3847_38258C.1
cctacgcgtgcgccgactcgtgggcggacgcgtgggaaaattttacacacttcacacattattacaacaattaaaagaggcgtggaaatttttaaatgggcggagcatactcaacaagagggtcatgcctcatactctttattgaattaaacaaacgaacaaacgaaagaaaatacaaaattcagatcatgcagaggataccgcattttcagaagatctggcagtggcctgtggaacagaaaaagcgggcataagagtattaccagcactttcaaaatcttgagaaattcccacgagaatgtctgaaactgtacactgtgggggaacgtcaataaggaagctcaagtgccctgaagttggatttgaccactcagaactgcacattacagaaccattgttaggaccacacaccgttattgggaggatcaattcgcaggattgtggtt

SEQ ID NO: 74469 - DNA, 321 bp, Glycine max
  Clone ID: PAT_MRT3847_38259C.1
aaaaggagcaaccccttaatttctaccccctggtttgatgataatcttttaggatcccagcataagtatagggcgacgggctgtacccccatccctacatacaagcgtctcttattgaggttgggagggaaattacaccacgcctcacccgggagtgcggacttccatgaaccaccgtcctggctggccttaatccgaccaccaccccctttgggcgggtctaggcttaggcgcgccaggttggtgcacccggaaccccaggctttccgggttcatccccggcatcgggcaggtcctgcgttacccaaaaaatgggcccca

SEQ ID NO: 74470 - DNA, 501 bp, Glycine max
  Clone ID: PAT_MRT3847_3825C.1
aaaacaacacgatatgacattaaaacattatatatttcacacattcttaacaaacgtaggtgtggaataaaagaactattattaatgggacacaattgagttgaacacagaccgaacttattttcaagggacattattacagacccattaaacatcaaaggtctttaattgtttaggaaacacatgcaacattacacaacaagcttaaaaccccccacggacacggaagacaaggcgaagggtagaatccttctggatgttgcattcagagaggatcctttcatcctcaaactgtttgccactaaaaatcatgctctgttggtccggtggaaggccttccttgtactgaatattgaccttcacattgacaagggtgctcagactcttcaccttgagggtaagaagcttacacgtaagagtctacacgaaagtctgcgtaccaccacgaagacgcaacaccaaaatggagagtgaactcattctggatgttgtaatcataaa

SEQ ID NO: 74471 - DNA, 388 bp, Glycine max
  Clone ID: PAT_MRT3847_38260C.1
gtgagagagagaaaatcgactgatttttcttgcctctgtgcgcataaattcactacactggttgcctcatgactttaacaacgataacttgcttacaccaaaaactcggccctaagctatttttactctctcctccaccctataacttcaacagcatgcgggaccccactctgtaatgctgtctttactggatcaagcatgaatgattaatggttcctccttaggagaccggatggagccttgttcaaggggggaagatacaggaccctgattgcccttaggattccaatccacactgatcgttgccttactgccgagaacacgctgacgtatgactacatgaggtcactgccatggaatgcaaattgttgacgaggatgccctgcat

SEQ ID NO: 74472 - DNA, 297 bp, Glycine max
  Clone ID: PAT_MRT3847_38261C.1
gcggagaagaaggacaggcttctgtcttcgattatgcggcatgaggaagaggaatatgagtagggagaacccatgtggtggctgtcgaagtcgaacagtgataatcccgttcatgataaggcttgacatatggatccttctgagccaaggaagatgattttgtctgttaaaatgtgacttgctatgacccttatttcctatcttaattggtctacagaaccatcctttaaagatatgagccgctactactgctactacattctaactgtcatcggtgacttttgattcaccataggg

SEQ ID NO: 74473 - DNA, 288 bp, Glycine max
  Clone ID: PAT_MRT3847_38262C.1
gccacgcgtgcaggttcttagggctgctatacatgctacggtacatactcaggaagatactcgggttgatggtattgtgggggggccatttttaagcccatttcagattcgcccttcagattgaccctaatttaatacaaatttttatacaaaaatttgggcaacaagagggacttgctgattgaattcctccttgaatacaacaatgttcccaagattgttcccaatgttcatcccattgcacagtctatagcgaatgctgtatacattgatgaaaacattgataac

SEQ ID NO: 74474 - DNA, 574 bp, Glycine max
  unsure (1)..(574): unsure at all n locations
  Clone ID: PAT_MRT3847_38263C.1
cccggngtcgacccacgcgtccgttaccatcacgaaaatggatgaatctggtagtgaaacttcttctacctatcttctgaaactaacggaatcggaaaatatgaggtgaactctcaacctaaggaagcttttcttcccgaagaaagtaaagatccggagatgaagttactagatttatattgtggttgtggtgcaatgtcaactggtttgtgccttggtggaaatttatctggtgtgaaccttgttactagatgggcagtggacttgaatcaacatgcttgtgaatgtcttaaattaaaccatcctgaaactgaggttagaaatgaatcggcagaaaattttctttcattattgaaggagtggcaggaattatgtagttacttctctctagttgaaaaaaaggtgtcacatgagaaatatgtgaatctttttagtgaagatgacgatgacactcgcagtattgaagaggctaatagtgtagatgacactgaactgaatgaagatgatgaaatatttgaagtttctgaaatccttgctgtctgctacggtgacccaaataagaaaaaagaacaag

SEQ ID NO: 74475 - DNA, 755 bp, Glycine max
  unsure (1)..(755): unsure at all n locations
  Clone ID: PAT_MRT3847_38264C.1
cggtccggaattcccgcgtcgacccacgcgtccgctcagtttggggatatgtttggtttccatcaagtacggtttgcacacctgtattgggcttgaatccaagttttaattgaaagcaacatcaaggttgcttttgcaaactcagtttacaaaatgaagttcatttaaattttgcaaatttcatccaaccatgcaccacatttttatttcttaattttatttgagcatattttgcccttttagttgttgtttgttgctgttttagtggttttaaaagaattattctacttttggaagtttgaattttgtggtatgagtcctgtctgactatgtaaacaatgattctgctgaaacagattggtcctgcacagatagaagcgttgtaccaatatgccaaattccagtttgagtgtggaaactactctggtgctgctgactatctttatcagtacagagctttgtgcacaaatagtgaaaggagtttgagtgcattgtgggggaagctggcagctgaaattttgatgcagaactgggacatcgctcttgaagagctcaaccgcttgaaggaaatcattgactcaaagaattttgcatcacctttgaaccaggtgcaaagcagaatatggctgatgcattggagtctgttcatcttttttaatcatgacaatgggagaacacanataattgatctgttcaatcaggacaagtatgccttaccaatcctttcttaggatatttcacatgctttactttta

SEQ ID NO: 74476 - DNA, 107 bp, Glycine max
  Clone ID: PAT_MRT3847_38265C.1
gggctatacatgaaggtacaagagaaatgaatggttacattcgcactggcattcatgcttagagctataggccaatagcccctttcaaagaactgaattacagacca

SEQ ID NO: 74477 - DNA, 253 bp, Glycine max
  Clone ID: PAT_MRT3847_38266C.1
gacctccgcgcgccatactacgcacatggggagggcgcatatcacgctccactcaaggagcctgcagctcaagtacagctttgtacacaaggggttgaccacgtttgagcccggctatgacgtggccaagagcacctgggacttcaccggctctcggacggtcttatagggggactaatcattgatggcctattaccttacgtctaatgtggttatcggaatacaatggtcgctcgtgcccatgcacactgct

SEQ ID NO: 74478 - DNA, 425 bp, Glycine max
  Clone ID: PAT_MRT3847_38267C.1
tagtcggaggccaccctttatttttttttttaacttctaacaagtttcataaccatgatgcactgaacaagtggccagcctatgtctatatgcatacattatgacactagcattgttttctgccggagaaaagaaaatgctactaactagctagacaactacaacaactgtaacttggagtgaggctagcgataaataaagaactatatatgacactgatcattgtttacatacatgccttattatcaccatcatcattgggttaaatatactactgtcccgaaaaccagtagcatttggcaggatgacctggtcaactcgataatggaagatgccgtcttatgactacagggacgggtaaatatctcatgtagataaaccggctatgatttacactccttgatactgcaacccttactagcaca

SEQ ID NO: 74479 - DNA, 342 bp, Glycine max
  Clone ID: PAT_MRT3847_38268C.1
ggggtattcttttttatttttttttctgttttgatgcgactgggaccttatatatctgtccaggggaacgtcgaccctggtgttctttaaaagccaaaaaaattaattactgatcggggccttttactgtgagaaaattttgcacctcgtccaaaagggggggtggtgccccggggggaaccttttttaggaaaaagcccaaagttgagggggggggtgcgggtcccaaatttttcaaaaactaagaagctcccgaggagggagaaattcttttgacccaaaaaaaaacccggggggggcgtcccccgggaaagttatattggggccaaagccccttccccc

SEQ ID NO: 74480 - DNA, 537 bp, Glycine max
  Clone ID: PAT_MRT3847_38269C.1
aaggagaaaaacagtccatgaattgaaggataaaaataaaccaactgttagacagcactaacagatttgaataaaatccctgccgccgcgatattcaatttatcaatctaaatcatagggggccatagctaaagtatatgtctatgaagtatttgccatcttctacttgacacttcgatccgttggataattgcaaacatagagaaaattgtacccttatcataccaaagcctttccttactatacccatcttttatgttcgggcgtactcttatctccattaaaagatcgtcttctattcttttttaagtccccacgagctgacaatagcttttgggctgaaaaggaagctgcattaaatttttggctacttgaaagttctttacgaggactaacggattgagattttgagtggcattcaaaaaatcttcctgatgaactggatacttttgctggtagaaggtttctgattaattttggaagccaatattctggttcaggacaacatcagcaggacgaatcccgtgctttgatgac

SEQ ID NO: 74481 - DNA, 379 bp, Glycine max
  Clone ID: PAT_MRT3847_3826C.1
atcacctacgaatgctcctaatgcgattcgagctcttctctactctactgttcgttcctctcctcgacggctccgacgtcttggggattactccatgcactgagtctaaacaggtatcgatgcttaagacgctgttgaacaagaagcttgagtccgctgttaatctatgcgaagcaggcatcgatcactgacttgcacagattgctagcgatgacaatacgaagaggaggttcgacagctactcataactacagaagctgtgctgcgtcgatggcgtgccttatctgatccttagcggagacctaacgcagtgtgtgcagtacattcaccacggcatactataacatgccatgtctggaagtatcggctatactggtca

SEQ ID NO: 74482 - DNA, 778 bp, Glycine max
  Clone ID: PAT_MRT3847_38270C.1
ttcgttcgttccacgcgtccggcgaatcggtggtttacgtgtcgtttgggagcggaggaacgatgtcgtatgagcagatgacggaattggcttgggggctggagttgagtgagtggagatttgtttgggtggtgcgcgcgcccatggaaggaactgcggacgctgcgtttttcactactgggagtgatggggttgatgaggtggccaagtatttgccagaagggtttgtatcgagaacccgcaaagtgggactgttggttccggagtgggcccaacaggtaacaatactgaagcatcgttctattgggggttttctttcgcattgtggatggggttcgacgcttgagagcgtaacgaatggtattcccttgatcgcgtggccgctgtacgcagagcagaggatgaacgcgacgttgctggcggaggagttgggccttgcggtgaggaccacggtgttgccgacgaagaaggttgtgcgtagggaagagatagcgcggatggtgagggaggttcttcagggtgatgaaaatgtgaagagcaatggcataagggagagagtgaaagaggtgcaacgaagtgcagtgaatgctttgtcggaaggtggttcgtcctatgttgctctctctcacgtggcaaaaacaattcaaggataaaaagtacaagtgttgatatgtatcattataagattttttttatctggttacagcttttgcttctctcaaggtgctagctgatgagcgatgagactcaacaggcttcatgttccatggttgtgttt

SEQ ID NO: 74483 - DNA, 288 bp, Glycine max
  unsure (1)..(288): unsure at all n locations
  Clone ID: PAT_MRT3847_38271C.1
tnaatatncataatttgaaggatttaagtgagaataaggttcagagngaggtatctganattganaaggaagcttggaagttacttcangatgcngtcgtcacttactgtgggaatccngttnggacagttgcanctaaatnatcctgcggacaagcaaccnctgaaatnatgatcaagtctntatccgtgattttgttccatcagcactngcctnnttgctcaatggtgaaagggaattgtcaggaatttctacntcacacattgcantacanatttgggagncnng

SEQ ID NO: 74484 - DNA, 447 bp, Glycine max
  Clone ID: PAT_MRT3847_38273C.1
aaacaaaaacccaggggggcaaatccatttgggaatatccccggggaaaaaagaggaatcttccaataaaggggcttttgaagaaaacccgaattccaataggccgtaccctaattttaatggcaaaggacccgaaaccctaaacttaagctttttcccctttgattttgcgagcgagttgaatgcccttgggcataagggaaactcgcttaacgggaatagcgcaaaggttagggtcctcaaagagcccaacgagaaaagcctccggggtttcctgaaaagccaaaacggggtttttttgaaagcggaaatcggttttgaaatcctgagcgatttctttgacaagcctttggaaggggagttttcggatcaaaagttcggggcttttttgggcctttaaaatctccctcaaaaccccccttcctggcctgaaagggtggggttttt

SEQ ID NO: 74485 - DNA, 1597 bp, Glycine max
  Clone ID: PAT_MRT3847_38274C.1
cactgtcatgtgaaagagacaagcacgcttctggcgcatgctagcaccatcgctgacctgccacgaccatgaagaaccattgcttccatgggaaccaaatcactgaaacggagagctcgtgagtcccagaaccctcccatggccgccgcggatcctccgcggcgcaagcctcgctcttacgccaaggcatccgtagttctctccgcttttctcgttgtctccgtcatcgctcccttggtcctttcttcgaacaagtttcgcgcgttccaacgccgggtttcgtacgagacgatcaccgtcgtcaacgtgttccctcacgacccagaagccttcacccagggccttgtttacaatggaaatgacaccttatttgagtcaactggtctttatgggaagtcctctgtccataaagttgctcttcatactgggaagcttgaggatgtgcagaagatggatagttcattatttggggaaggtttaactctcctcaataataggctgttccaagtaacttggttgcagaaagctggtttcatatacaacccgaaaaattaagaaagataggggcatttagtgaagatatattttgaatgggatagcatgggatggttggggtctggcaactgatggaaaagtcttgtttggaagtgatggcagttcaacattgtatcaaatgattcaaactgatcctcagacatttaaagctgtatcaaaacaagttgtctactataagggtcatgaagtacacaatctcaatgaattggaatacataaatggtgaagtttgggcaaatgttttaccgactgactgcattgtaagaatctctcccagtgatggcaatgttcttggatggattctcctccaaaatttaaggaaagaacttatcaaagctgggaacaatgatattgatgttttgaatgggatagcttgggatggtgagcagaagcggatatttgtgactggaaaactgtggccaaagctgtatgaaatcaaggtttctccagtaaacaaaccaattgaagaagggatcattgagcagctttgtttgcgtaaccctttcaaatttccatgattgattttttctgttcctgctctaatttcttaaatccacttgggaatgcgcagctgaactgagtttttggcatggtattatgacatgatcattttgagaagatattcagttggtagaatgctacctaccctatgatgccctatgatgccctctatgatgccctaccctttatagtatcattcttctgtagcaggtcaagaattttaattaattaaatacactaagggagagatcaatcaatcttttttgtatgatgatggttgattttgtaagtaaccgggcaatttgagatgttatgtgttgcaaaaggatggaaattcaaccaaaacagaaagaatggatagctttattagttcaatttgaggtggcataacaatttaagacttggttcaccgaatagagacgtgtagatataatattcagtacattgtattaggaatttgggggatttttctccctgtccccgcaatcctcagtggtcccgaaattaaaaaaaatatattaattttaaattttaatacaagt

SEQ ID NO: 74486 - DNA, 572 bp, Glycine max
  unsure (1)..(572): unsure at all n locations
  Clone ID: PAT_MRT3847_38275C.1
ggcctctttatgatgtgccagttttgggttactttcttcggagtatttgttcttttaggatggtttatatctgatatgtttggtgcagatttatgttataggtagaatctgcatttcgttttgacatactcttcgttgtatattatgtggttgtccctgttgggtcacatttcgtggccttctgttattaataatattttcgattggtctttcaaaaataaaaaactaaattgaaaaaaaaaatgaaaataggcatgcatgtatgccttgcaaactgcgttgtatagtccgttgattttacagcaatctgaagcatcaaatttatagtactaggcttttgtagtaatttctgtaatagattgtctatactctatagacactgagcagttgctcgagtgttacaaaaatgtaattctatttccattannaaaaaaaaaaaaaaaaaaaaaaaaaaaaaaaaaaaaannnnnnaaannnnaaaannnnnaaaannnnnaaaaaaannannnnnnnanaaaaaannaaaaaaaaaaaaaaaaaaaaaagggggggcccgttttaaaggacccaag

SEQ ID NO: 74487 - DNA, 306 bp, Glycine max
  unsure (1)..(306): unsure at all n locations
  Clone ID: PAT_MRT3847_38276C.1
aagactacatgaagctcatgagttgtttgtcgtagagaggagtcttgggccgatcatgccgacggcttgtggggaggaggtcgttagtgttgaggcacgttactgcgcaggtggtccctgctaaggagtgattgaagctgaggggggggggggtgtggtcttgcacngggctgttattgatgactgaatcgtgagatgtgttttggggtacggtggtgtggttggagggctaggaggcgtggccgaaaggggtcatgttgatgcccgtggtggggggagtgtgggggtagatggtaggacgtgggg

SEQ ID NO: 74488 - DNA, 389 bp, Glycine max
  Clone ID: PAT_MRT3847_38277C.1
aacctttgggctgatttatgtgcttgtttatgtgcttgcatggtcgtgacaagatcatagaaggggaagtataaattcgagctagtgtctacacttccacgtcgcccgccctaacggaagctaccctcgtcctcagtccgaactttaatgtcttgacgcctgcgttatctgttcactggatggcggaggaccctcttgattagcggcgggattctgcctatcttctttttcggccttgtgatcatcggtcttgtgagcgtccttaagacttttagccttaaaatgatgatctccctgatcctgatcccgattcagactcttaagacgaatacgaacgggaatgaaaggaagggaaagaggctgcgcttccggggtcgtcgaaacggtta

SEQ ID NO: 74489 - DNA, 388 bp, Glycine max
  Clone ID: PAT_MRT3847_38278C.1
aaaatagacaatacttgtctatggttattattggttgtatgtctgtatttggatgctctggatcggtttgcaagtaataagagtgttttcactgtcactttgtaaaaaaaaaaaaaaaaaaaaaaaaaaaaaaaaaaaaaaaaaaaaaaaaaaaaaaaaaaaaaaaaaaaaaaaaaaaaaaaaaaaaaaaaaaaaaaaaaaaaaaaaaaaaaaaaaaaaaaagggcgccccttttaaagaacccaagttaacttaccctttattgcaacttaaaaacttttttatagggtacccaaaattaaattaactggccgtcttttaaaaactctgtaattgaaaaaacctctgcgtaaccaaattaaatccccttgaaaaaaatccccttttt

SEQ ID NO: 74490 - DNA, 584 bp, Glycine max
  Clone ID: PAT_MRT3847_38279C.1
aaaaaaaggccattcggggtaaaaaacaaaacaaaacaattctaaaacatcaaaggaaaaaataattatttctagagcaaaaaaacttttcaattctttcaactttaattcaaacattcacgggtaaaaaaaactttggggaggcaaaccccaacaggaacacagattcttcaaccacaggaaggggggccctacttcctaaaaggaaattacccatgggggagattaccccaaggaaaaacccggcaatcggggaaaaaaaaaacccatttagcaaaacaaaaacaggattattaagggctaaacccaacatccttaattcctactaacaaaaatagaataagggagagtttttaagggggcaaggcaggaaacctagggggttttaacaaaggaaagggccaagggcataaaaccaattcaggcccccccagggtttaacaataaaaaaatctcgggtacttaggaggaaacaaatattaagggagggggaaacaaggaaaacatgataaaaaggtgattccaaggaaaggaacactttatcatacggctccaaggggtgagggcgcaaacaggggtttgaa

SEQ ID NO: 74491 - DNA, 518 bp, Glycine max
  Clone ID: PAT_MRT3847_3827C.1
cccacgcgtccgtcctctcgtccggcattggccgattcttagggtcatgattttggtgttggtgagtctcgaatctgtcatgcgatactccaaccagacccctcatcagtcaaaagaacagcccccttacgactcatagggatcaacttgagacaatctctcagggttgcacatgaattagcacacaaagatacaattggattcctaagcggagagatggagttccaagagaacggaaatggggaaatggcgttgtccggaatccccttgagagcctctaacctgtacaagaagatgaactctgagcttcctgaggaccacgatgatgtattgcaccaccagcccgtggatgataggatgagctgtgccatcaattatgttcttgcctgtgccatctttgcttatgtcaacagtgtccttcttggctctgatgtatgtgtcatgaatgaagctgttatatctatcgaacaagatctgaagatatctgaggttcatgaagagattttgataggtattct

SEQ ID NO: 74492 - DNA, 426 bp, Glycine max
  Clone ID: PAT_MRT3847_38280C.1
aaaaaaaggacaaaaccaattttcccttctcaattgcttataaatgggatttgggagggaaaaaaaattcagtattttaaaaaaaatccaaagtaagtttttcgagtttgcataaacagagtttgcagtcctgctttttgacctaaatggaaacagtttttttttttttgactcgccctaatcctcctcggggttttttaacaatatccttttaaatgcttcgaaacacatgaaaaaaattccagggggtggtaccaactttatgcaactaggggctagccctttttataaaccatgtatgcctttttgttcaaatatgcatgcaagggcatgaaacacattcttgtaaacctgccttccactgaaagctccaagttgcatttgtttgcgagccaccttaaggggaaaagttgcactacttgaaaa

SEQ ID NO: 74493 - DNA, 485 bp, Glycine max
  Clone ID: PAT_MRT3847_38281C.1
gctgcgagaagacgacagaaggggacaacaaaaggtaggtgaggaaaactttggacaaaaaatggagtgctacacaaggccaaacaggagtgacatccacctctcagcagaggaagaagccaccatagaagcaaagaccagagagtactttgatggagtcgcaccacaacgccacacaaagcctcaacgaagtgactattcagctcaatatgtcgatgctttctccaatgcccatcactcttctttaactataccagaattaacacaattccaactcctccagaatgatccccaagagaaggttggttcctaatatcatctctaattttttcttcttcataatttcacttttatagaataataacaaaagaagtaataaaaaatgaaaattgcgtcccgtcctaaccgttggactacaaacgcttgtcatgttacttagcattactttttgaacttaatataaaaataatcttgaataagtaccc

SEQ ID NO: 74494 - DNA, 890 bp, Glycine max
  Clone ID: PAT_MRT3847_38282C.1
cgatctggttccgatcgcacacgttttaatgatcgtcgtcttccgcagcctctgattcggctctgatctctctcgccgcgttttcattgcacaaaaaatggagttctacacaaggccaaataggagtgacatccacctctcagcagaggaagaagccaccatagaggcaaagaccagagactactttgatggggttgcaccacaacgccacacaaagcctcaacgaagtgagtattcagctcaatatgtggatgctttctccaatgcccatcactcttcttcttcttcttctataccagaattcatgcaattccaacgcctccagaatgatccccaagagaagaaattggtgtacaatggaagtcaagtaccggaagaatttgtggaaacagagtattaccaagatctcaacagcgtggacaaacaccaccatacgactggaacaggatttatcaaagtagagaaaaatggaaatgactttcacatagaaccagataatgacactggttgccatcactcttgcaagggcaatccagcaaccaatgattgggttcctgctccttccactgaggtgggtttcaattcaggcaaacctaacaggagtgacaactagaaatggaggagtggctacatgaagatatcaatatctcagcttcttttcagattgtgtggattccatgtgttgtttaaaattacaatccaaatatatatatatatatatatatatatatatatatatatatatatatatatttaaataaaaaaaaccttgtgatttgaattcaaggttattgtgtttgaaatgtggtactagttagcgttccatcttgtatccttgatatcttacattcccggatatgtcattaatcgcatatgaagattatttaagc

SEQ ID NO: 74495 - DNA, 494 bp, Glycine max
  Clone ID: PAT_MRT3847_38283C.1
cccctgggttttgggggggttaaaaaaaacattgcgaactaaaattaaaattgagaagagcaaaatccaaattacaccaagtgcatagtgataataactaataacaacaagtgaaacccagggtaataatgggaaaaaagagtgccgggaagaaacaagggggggggggggggttttgggttccaatttccaaatgagacgaaaccctaaccagagggttgtgcgtccttgggatggggggtttctgcggagaggcattggcgatggggagaaaatcccagagggacccgctctggggaaataggcaggggggttgaggagggggcatgagcatcgagggggcccttaggggcgattcccaaagcggggagagacaggaccacaatagtgggccggcaggacgggatcctacccatcttcaatcggctccaccagggggagaggcggcgggttgggcaaatcccggtccttcacaacagcaaaccctaccttac

SEQ ID NO: 74496 - DNA, 1711 bp, Glycine max
  unsure (1)..(1711): unsure at all n locations
  Clone ID: PAT_MRT3847_38284C.1
cggccgctcgagccggcctgggcggaagcgataaacagaaataaaagagaaaaagaaactcaaactgtgctgcatatgtattggtaataatcagtgaatagcaagtagcactaattgcagttttcttctctctcgtatatatcaatattgtcggggagcgagcaagttcgtgcaccctaccccacacaatattatatataatacacaaagttacaaaccaaaccctaatcaccttattcccaaccaagcccttccttcttctacccttgtcaatattttttttcttctctgttgactcaaaaacaatactatatctatcactcttaccattaatcaatcatctccctccgatcttaatttcttccatataacgagagagagagagagagagttaattagttttcctgcaacttcaacttttgttatggccaaccggtggtggaccgggtcggtgggtctagagaactctggccactcgatgaaaaaaccggatctggggttttccatgaacgagagtacggtgacggggaaccatataggagaagaagatgaggacagagaaaacagcgacgagccaagagagggagctattgacgtcgccaccacgcgccgccctaggggacgtccaccgggctccagaaacaagccgaaaccgccgatattcgtcacccgagacagccctaacgcgctgcggagccacgtcatggagattgccgtcggagccgacatcgccgactgcgtggcgcagttcgctcggaggcgccagcgcggggtttccattctcagcggcagcgggaccgtcgtcaacgtcaatctccggcaacccacggcacccggcgccgtcatggcgctccacggccgcttcgacatcctctccctcaccggctcctttctccctgggccgtcccctcccggcgccaccgggctcacaatctacctcgccggaggccaggggcatgtcgtcggcggccgggtggtgggcccgctcttggcggcggctcccgttttgttaatggcggctacgttttccaatgctacgtacgaaagattgcctctagaggatgatgatcaggaacaacacggcggcggaggcggaggaggttcgccgcaggaaaaaaccgggggtcccggcgaggcgtcgtcgtcgatttcggtttataacaataatgttcctccgagtttaggtcttccgaatgggcaacatctgaaccatgaagcttattcttcttctccttgggttcattctcctcatgccagacctcctttctaattattgaacgtgctacatggcaacaattaatatattattatagaaggatcatatcataatattatgatatgagtaagttaattaattagctcgagacttgatttatataataataataataatgatatgatatgctattaatcatagtgtatttgtatatttaatttactgcaaccgcttccgatctggtctcaccttaataagcaacctgcacagtggccatgggcgttgcttctttctgtaatttcttgagtgactttttagttttctatcactctagccatgtctgcttctttctttttttatttggctcaagtatgtctgcttctatttccttcctttctactgttgttcttgcactgccatcgctccggccttgtcttgcctgccgttctacaatactattaaatatattaannnnattatacatgtattatgcaa

SEQ ID NO: 74497 - DNA, 1774 bp, Glycine max
  unsure (1)..(1774): unsure at all n locations
  Clone ID: PAT_MRT3847_38285C.1
aatttccctttttataagaataataacaaaagaaggtaataaaaaaataaaaattgcgtcccgtacaaaacggttgggactaaaaccgcttgtcatgttactaagcattactttttgaacttaatataaaaaaaatcttgaataagtacccagattattagttatctgattcacttctgattttgagacgcctcatcatacttcgagagctacacattgcccagaacctgtatctttcgcgaaacacactatctatacccacccacctcacccggtccacaggcgagttgaggaaaactttggacaaaaaatggagtgctacacaaggccaaacaggagtgacatccacctctcagcagaggaagaagccaccatagaggcaaagaccagagagtactttgatggggtcgcaccacaacgccacacaaagcctcaacgaagtgactattcagctcaatatgtcgatgctttctccaatgcccatcactcttctttaactataccagaattaacacaattccaactcctccagaatgatccccaagagaagaaattggtgtacaatggaagtcaagtaccggaagaatttgtggaaacagagtattaccaagatctcaacagcgtggacaaacaccaccatacgactggaacaggatttatcaaagtagagaaaaatggaaatgactttcacatagaaccagataatgacactggttgccatcactcttgcaagggcaatccagcaaccaatgattgggttccttctccttccaatgaggtgggtttcaattcagacaaaacctaacaggagtgacaactagaaatggaggagtggttacatgaagatatcaatatctcagcttcttttcaggattgtttggatttcatctgtaggtttaaaataaaatatcaaatatatatatatatatatatatatatatatatatagataatccttttttataaatccaaatagttttgtgatcataagacaacgttttttgatgtagactgaggtacctggcaaagtttttaatactttccagatcaatgattgttaatgggaacgtatttttcagtgtaagaaagatgatcttttatgcaagaggttggttactgttttagctattatgagtatgcagagatgacgtgcattagcttttcggctaattgtgtggattccacgtggcgtttagagttgcaaaccaaataaatttaaataaacaaaaaaaacttgtgagttggattcaaggttattgtgtttgagatatggtactagttagcatttcatcttgtatcattgatggtcttacattcctggatatgtctttaatcgcatataaagatttttaaagcaaattagcattttagtgatgcaccatgttaatcttacacagttttttggttcctaatatcatctctaattttttcttcttcataatttcacttttatagaataataacaaaagaagtaataaaaaatgaaaattgcgtcccgtcctaaccgttggactacaaacgcttgtcatgttacttagcattactttttgaacttaatataaaaataatcttgaataccttatatctgtcacctctttgagttatacaaattatgtttttcttttaaataaccttcgtatgggctagatctgttatttatttaacaaaagggttgacgtagtggtaagatctcattgtgttcagatgtggaataactcatttaacagcagaatttttcttagactaacaacagttacacaccgtgttctgnccc

SEQ ID NO: 74498 - DNA, 2710 bp, Glycine max
  unsure (1)..(2710): unsure at all n locations
  Clone ID: PAT_MRT3847_38286C.1
ccacgcgtccgcacagttgcattgttgcaattgcaactaaaatccgcgcctgggatcgcaccttcatttcaaaacctgctccatttttttctttctttctttcgcttccgtagctctatctctaagcgtgcacgcgcgcgtctagtgcaattattagttagtttgattggaatggtgaacggtgaaaagtgaattccagaaagaagagaatggcaagtagcggtgctgcaacagcggcgttgcagagcgatgcaagtagtagaatggaaggctggttgtaccttatacgcttcaaccgtattggacttcagttctctcggaagcgttacttcgttctcgatggtaaccttctccgcagcttcaaatcagttcctgtttcaaataatcaggatcctgttagaagcgcgattgtagattcctgcattcgagtcatggataatggaagggagagcgttaaccgaaaagtgttcttcatattcactctctataacacttcgaatcacaatgatcagttaaagtttggagcaagccgtcctgaagaagcggcgaggtggattcagtcctttcatgaagcatcgttaaggggtgcgcctgacggaggagatgatgctgtaggttgttctaagaggagatggcaatcctttagactcagtggatcttctagtagtataagtcacccaaattctgtagactggactctttcttctgctgatgttattgccccttcaccatggacactctttggataagaaaatggaaggggactattcaaggaagcaaaagacagggattctagtgggaagaaatgggatgatcaccctgcaataatggctgttggtgtggttgatggaacttcagaagccatcttccagactcttatgtcgcttggtccttcaagatcagaatgggatttctgtttctacaaaggaaatgtggtggagcacttggatggtcacactgacattattcacaaacaactatttagcgattggttgccttggggaatgaaacgaagagatctcttgttgcggcgttattggaggagagaagatgatggaacttatgttattctttaccattccatgtttcacaagaagtgccctccccagaaaggctatgtgcgtgcttgccttaaaagtggagggtatgttatatcaccagtgaacaaaggaaagcaatcagttgtaaagcatatgcttgctattgattggaaatgctggagattatatcttaaatcttcatcagcacattccataaccattcaaatgcttgggagagttgctgcattacgggaattatttaaagctaaactaggaaattgttcttcatctgattattcatctggagagttgacgagaaacagagagcttcatataaaggaagaacacatcataaattctgatactgaaattcaagcagatgagaacaatcatgatatttcagttggagaagtagatcaaacgcaatcagaacatgcaagccttgttactctaaatgatgctgatgatgagttctatgatgttccggagccatcagactgtgacgtgtcagaaaatggatggatgactgaatgtagacaacagaagtctcaggacattcgtcatcagaagttatcaactgctgccaactttgtgaaaagattgcatgatcttgcagttcagaagaggggttatgttgacttgcaagagatggtcagggaggacagtatcacatgctcatatggatccactcttccacaagatcctacttgtacattaccatgtagtttgacagaaacagatccttatactttcctgatacgtggagaaaattatcttgaagaccgccagaaggttaaagcaaagggaaccttgatgaaaatggttgctgcagattgggtgagatctgacaaaagggaagatgaccttggtggccgtcctgggagcattgcgcagaaatatgctgcacagggaggacccgagttctttttcattgtaaacattcaggttccaggttctactacatatagtctagcactatactatatgatgaatactcctgtggaagatgctcctttgctagagagttttatcaagggtgatgatgccttcagaaattccagatttaaacttataccatacatatctaagggttcatggatagtaaagcagagtgtgggaaagaaggcatgcctagttggtcaagcactggaaatcaattatttccagggaagtaactatttggagcttggagttgatattggatcatcaactgttgcaagaggtgttgtgagtcttgtccttgggtacctcaaccatctggttatagagatggcatttttaatacagggaaacacacgtgaagagctccctgaatttcttcttggaacttgccgccttaaccatctggatgcctctaaagcagtttgtctgacgctgtgactttcaatgaaactcctgacaagtacgttgtggagaagagaatttccaagttgcaaatgtagataattgaaattttagattcttgtttccacaaactcactttcagatgtcattcatttttgttcaattaatttgaatctggcagcagtttatggtgctgtgagcgttgttaggatggatgatgtggggggacgaatctttgtaaaatgaaaagttgcattttttcattagaaaaaaaattttttttaaacacgacgttcttcccttttgcatgtnnnccatgttgggtg

SEQ ID NO: 74499 - DNA, 1006 bp, Glycine max
  Clone ID: PAT_MRT3847_38287C.1
aaagcggcggtgctggtcactggagttgcattgcctgcctactaacgttctacagtttctttaatgttctaatccaggtattacaaagacagattaattactctccttaccagttcgactcacaaatcaaaaggttaaaaagaagacccttttgtaatcatatacaactctttgttatccagttgctacagctgcaaattttagtcggtctgctgtagatcttggaggcttgtggatgcacaatgaatccttgaagggtggcagttctggttctcctcaaggccctctccaattagccacacaatcgggggaagcaacatcccaaacagaaggtgacaacatgatagatgatgatgatgtaaaatcggacttataactggaaaaagtcacattcaaaaaacatggaaaaggtgatgtgtagatattttctcaccatgaatttagcagataaaagtagaggagttttacaactactcaagaacaacacatgatacataaaagaggatggatctttggagagaggctttttgagattttgaagtaaaaattggtttttgcacaataagaagccggagcagttctttgtccaaaataataatgatcattcatttctttttgccctgagaacactgtaatgctgcaggagaaattactccaacatcttagatggattttggagtttcatgatttggtggttgacttagttaatagtagtttagatgatttatatttgatatcttgcacttgttgcataccgttgtgccaaaataggaaaggaaagctatcaagtaactcccagttttgctccccagtgttttctaatagttgtgaaggaggttgtgaaattcgtcatccgggtcaggtgcaaatttaccatgctagctagatagtgagagagagagagataaaatgtttgatgtcattttgtgtacaaagtccataagactgttagagaacttgttaaaatatgattttgaataaaaaaattatatattgttgaagtcct

SEQ ID NO: 74500 - DNA, 756 bp, Glycine max
  Clone ID: PAT_MRT3847_38288C.1
ggcaccatcatcaacgttaaccctatccaaagtttctttgttccttgtgttgctcttctttgtttcactttcttcttcctatgcaacttctcgcctcacccatgaccgtgtcaataacccaccaaaatcacgagcagaaaagctcataagaagccttaacctatctccaaaggacccagtaaacattgttaaaggtgatgaccttgctaatggttttgtcccagggaatatcgtggagaagaagttctcgtttcttggtgattctggaccttctattgaagaccttggtcatcatgcaggttactattcacttcctaattccaaagctgcaaggatgttctactttttctttgaatcacggagcaacaaggatgatccagttgtcatatggttgactggaggaccagggtgtggaggtgaattggccttgttttatgaaaatggcccttttcatattgccaacaacttgtcccttgtatggaatgatttcggttgggaccaggcatcaaatattttatttgttgaccaacctaccgggacaggttttagttactcttctgatgctagtgacattcgtaatgatgaagtaggcattagcaatgatttatatgatttcttgcaggagtttttcaaggcgcatcctgaatttgttaagaatgacttttacattaccggagaatcatatgctggacactatgttccagctcttgcatcccgggttaccaaggaaataaagaaaatgaaggaattcatatc

SEQ ID NO: 74501 - DNA, 265 bp, Glycine max
  Clone ID: PAT_MRT3847_38289C.1
gggcatacaaaagtcttaacttctctttagcccttaattatttacaagattaatttaatttgggccctggccttaataaaaaataaattaaatttatttaaatgcaaaccctgtcctgaagggtaatcaaaaaatttccacttttttttccccccaaacttggcctgtcccccttttaaccctttcttttttatgttcaagggggaaaaagccgggcacacaaattggattttttatccaatgtccaatttatgaaagaaaaagc

SEQ ID NO: 74502 - DNA, 180 bp, Glycine max
  unsure (1)..(180): unsure at all n locations
  Clone ID: PAT_MRT3847_3828C.1
gtgnangcacgcgtacgtaagctcggaattcggctcgagcggctcgaggtgaccaaagactngaccactcaaagtccagctccctgtaactgctagacatggacaccggtgtgattgaaggnggattaaatgtcactctcaccatcaggntacttatgcacggaggcgaagtnggcantt

SEQ ID NO: 74503 - DNA, 296 bp, Glycine max
  unsure (1)..(296): unsure at all n locations
  Clone ID: PAT_MRT3847_38290C.1
ttttggtaaagtattcaacaatgcnnnnggaattattgtggccacaacaaaagacacagttatgaaaaatcagccaacagatagataacgatcctggtagaatatgggttttgtgtggtgcagagaagcagaatagggccctctctttttgtgacacgcgtgtctcggtgtgtgattcgcatcgttctcttcagtccacgtcgcaccaccgcaaaaaaccaaaaattctcacttctttctttgttttctttgaacccatcatgattgggttttggctttgacaagtttttggtttt

SEQ ID NO: 74504 - DNA, 484 bp, Glycine max
  Clone ID: PAT_MRT3847_38291C.1
ttttattctgtctttttgtcaggacaagaacaccggatgctgttccaatcattttttttcgtaacgacaattgtttgtctatcacattttgaaccaacttgtttttttttgaacatgagcattttgaaagcacccaacccctttatcttcgagtacatccccctccttatataagagcttaataaacacacgttcccgaactaaaaactggggccacaggcgcgaccagactttgggggcccctcccttcatatgacagggcaaggcggccctgtcttagggggcgcctacacagaaacctgtgccattggggggcatatctttggaggtcccgaccgtgttgccgtaggttcccatttttaaggctcaactgttgcgcgacatgcccctgcgtttgtccgccccctattgctgcttcagggcctcatagacaggagcttttgtagtctcaaggagccacatgctcgagacaccacttgaaatg

SEQ ID NO: 74505 - DNA, 220 bp, Glycine max
  Clone ID: PAT_MRT3847_38292C.1
ttcgttttgcatgggtgaagggccagtggagggacggatcgcactcaaccaattaaagggatgaccaaaatggggggcacagtgtggtgtttctgagaagaacaggtatagcattgggtctgagctatgaataagttcttttaggggggcgacccagtatatgctactatacacccatctgctctaacagagctgcgagaagatggaatgcctgcttgca

SEQ ID NO: 74506 - DNA, 210 bp, Glycine max
  Clone ID: PAT_MRT3847_38293C.1
tctttttttaaaattacacacacttcacatgtcatttcgacaattaaaagaggtgtggaaattttcaaataggcacagcgcactcttcactggggtcatgcctagtttcctttattgaattaaacaaacgatcaagcgaatgaaaacacacattccagatcatgcggaggattccgcatttatagaagatctggcagttgcctgtggaac

SEQ ID NO: 74507 - DNA, 414 bp, Glycine max
  Clone ID: PAT_MRT3847_38294C.1
ccagcaaactactatttttttatggaatcttagccaattaacaagcaaacagaaatcctttttattttttagacccataagagaaaaaatttttccccaccccagggccagaaggcaacttgagaagcaccaaagggctcgtatgacttgacattcaagggtcaaagaccaagctttttgtttttcgcttcacgggttcaaagagcccagacgatagataacgctctccaaaactggggaagaccgcaacaaggggttttccagcattttcgggcctcttcgttattttaactgcagcagctgcagcaccaccagatgattttcccaccaggaaaccttttttcaatgcaagaagcttagcagtttcaatagctttttcacttgaaatttgaacaactttttcaggtaaatcaa

SEQ ID NO: 74508 - DNA, 449 bp, Glycine max
  Clone ID: PAT_MRT3847_38295C.1
tgttcttttgtttagtattattttttttggggccaaaccaatactgcgacgagattactgatgcttttatgaaagaagggatgcgcatacctactttgggcaaaaagtaaccctaacaaaaaaaatgtggttcctcaaacaaggccctgccgtcatactgccaaacaagccggaactgttttgtggaaaagaaacaaattcccctcattcgcttgacaggtgtatcttacatttttctcaaagttgcgctctgaaattcctcctgttgacactaaccgtagataagctgtgaaagctagtgaaaactccaaagctgattgaacaccctgcgacctccccttgccattggacacatccgcccagggatcttaaagggtggagcaagactgattgttcttaacaagtttgggcagcttcttttaaacggggacacccacgaggaggcccct

SEQ ID NO: 74509 - DNA, 139 bp, Glycine max
  Clone ID: PAT_MRT3847_38296C.1
cccacgcgtccgcttcggttcctaatgcgtaacagacacatgtgattcgcaggtgtatagtacatctgacttgtgagcaatagattcttcaaattcggctgcattgggtcggctcaacgatcaagatctgtcgaccatc

SEQ ID NO: 74510 - DNA, 147 bp, Glycine max
  Clone ID: PAT_MRT3847_38297C.1
ctttattctccgagttgtttcaattgaatggcttttcatctttcaccacttcctggccgtgccaggcgctctaacttaagcgtgtgctcccttactgcacgaatatctaacacctctgccactctgtcacaacccttaaacgactgg

SEQ ID NO: 74511 - DNA, 419 bp, Glycine max
  Clone ID: PAT_MRT3847_38298C.1
ttgactgctgccgcgtcgtaagctggatccttaacggcgcctttttttttttttattaatctttttaaaaaaataaagagattaaacttactggaaactacgcaaaaacattcattcatttttaatttttaatacattttttaataaaagaacgtcctttcttagaatgatacacatttaatgcttcaaaactgatgtttaatctcaaagattgattgctgaacctgatgcagggaggggtcatttcaggtcaatagaaatatacctcaacctgaccgtgactgggcttttgattcataggacaataaaaattgtggttttaacaccgagtgactcagaaatttaactactgggtttctttgtcccatgaggtaaaaaacccaataatttttttagcccatggtggtttcaaatattac

SEQ ID NO: 74512 - DNA, 309 bp, Glycine max
  Clone ID: PAT_MRT3847_38299C.1
cccacgcgtacgactgcatgttgacaagttttctcgtatggctcaaaagttagaggtgggggagtctatacctgagggacaggctactaacttcatagcatcggagatagtaattattgttaaatttgcctttttgattctctatatattatatgttatatgatttattttttgtaacatttcttttctattttttttatctgtactttatcttttttatttttttataattttttatgatcttattttttattttatatttttttatttgattttatatattataacttattatcttccttttttttt

SEQ ID NO: 74513 - DNA, 678 bp, Glycine max
  Clone ID: PAT_MRT3847_3829C.1
gggcacctgtacgttggaagccataaagctttggaattgttgagatagatattcatgggtagtatcactttgtagggtgtgaatgagaacaccaaattgttttttatttcttgataaaatgatgtaaagattcaaaacaactcagatcgatttaccattaaaaatagccaagtctgtcaagaataatcttctataaaggtgacaaaatatcttgactctaaagtaggcatgccatgacataagccccatacatcagagtgaaccaaaacaaaaggaaacctatctctacaaatgacacaataaggaaaagaactttgaacatgttttccaaattgacaagactcacaagacaaggttggtaacttggacagacttgacaccatttgtttttgcttgcaagactaggatgacccaatttataatggatgagaataggagaatatgcaaccaaactagaatgtagttaagtccccatgactcacgtatggcccaaactctaatcctgcaagaaaacaaaatatttagtgaatcaaaccacataatcaagagaacgagcaaaggcgactactggataatagattaatcgaaaacttgaggacatggaagacattgtcaattgagagagaaggaaaggggtggacaatagtaagcaactctgtttaattttcgccttccaaa

SEQ ID NO: 74514 - DNA, 671 bp, Glycine max
  unsure (1)..(671): unsure at all n locations
  Clone ID: PAT_MRT3847_382C.1
attaactctgaatgaatgcttttgttttgtttctttgttgtgcaggaaggaaagtgagaagtggtgaaaatgtttacatgcatagcgtgcacgaagcaagcggcgaaggagaaggaagaagagggtgagagtggcacgccgagtacaaataaagaagccgtcaaaagcctgagtgctcagttaaaggatatggcactgaagttttcatgtgcctacaagcagtgcaaaccttgcacagggtctagtacctacaagaaaggacagaggccatatcctgactttgacaccatttcagaaggggttccatacccttatattggacgtgcaatctcaacttcaacccctgcttgggacttcacaagctccaatttccttggtgctagatcagaccaaagatttatggggggattcagtggtgataggacccctagagggcctcaatcagcaccagcctgtgatgtagttgttgaggatgaggatgaaaccaaggagtggatggcacaggtgganaccagggttcacattacctttgtgtctcttcctaatggaggaaatgatctcaaaagaattcgctttagccgagagatttttgacaagtggcaagctcaaaaatggtggggtgagaattatgacagaatcatggaactttacaacgtgcagagattcaatcg

SEQ ID NO: 74515 - DNA, 323 bp, Glycine max
  Clone ID: PAT_MRT3847_38300C.1
gttttgtgtttttttttttgatttatttttccttaaaaaaaaacacacactttacacatcattaccacaattaaaagaggggtggaaatttttaaataggccgagcatactctacaagaggggcgtgcctaatttcctttattggattaaaccatcttaccagcggaagaaaacacaaatttccgatcatgccgaagattccgcattttcaaaaaaactggcaggagcccgtggaacaaaaaaagctggcctaaaagtattaccaaccatttcaaaattttgagagattcccaaaaaaatatcaaaaacttttaactggttgg

SEQ ID NO: 74516 - DNA, 337 bp, Glycine max
  Clone ID: PAT_MRT3847_38301C.1
ctcgagccgtttgaattgccaactctttgccattaatgttcaaacataacacaacaaacacaaagaaggtggacggcaatgaccactctgtgatcattatttatttattcattagccgctcaacctttgaggcttgattgcttgaacggcatctttttgttcttgttctttcttcttcctctcttgcacttacatgggggctcgttgctctaaattctctttctgctggttccactctcacctcaaaccttctgtccttgaatcctctgaccaagaaaatggtgagaagggtgagagaaaattgtggccaagttttggtgagttcagtttggagcaa

SEQ ID NO: 74517 - DNA, 454 bp, Glycine max
  Clone ID: PAT_MRT3847_38302C.1
actcgaatttcaattcccggcgcgacccactcttcacgccttccttcagatgcgataacactacacatcaattcctctacctcatgtaatatctgtttagtcaattaagactgaatatgaccctattttcttttatacatctgctatcgatcctccatacatgtacttccaaaactatgctcatatgtccatttataaacatacatttccaataagtcctataacacactgtatagaattgtccaattaaatcttcaaaaacaaaacatataaatactcgtttaccctgcatataaaaaataccacatttttacactcccataacatgtttcttctactacttatttattctcatacatcatgattatgatgattctgattattattatcaatattattatcattcattattcttattattattaccttttttcattaacattttaatttccac

SEQ ID NO: 74518 - DNA, 276 bp, Glycine max
  Clone ID: PAT_MRT3847_38303C.1
cgagaagacgacagaaggagggtatagggtacaacaggtggagacgcgtgttaggcatgcagagaatcataggttgtaatcaaataaatcagatgtgtgtgtatgcaaatactatactgtgtgtatatattatttctaaaggctttggggaaaatcagaaaaatcaatgatgtttgccaacgcggtcttagctggaccctaacactgtacactctcttaccaatctacctcaccatacacaacatacatacaactacgtcgttttgaaggttcaac

SEQ ID NO: 74519 - DNA, 362 bp, Glycine max
  Clone ID: PAT_MRT3847_38304C.1
aaaaagcattttgaattttattttaaggcccttttggaattttaaaaaaaaaaaaaaaaattggcccttttttcccatggggaataaaaaatttttgaacagtttgtaattattcgaacccaaagggactgggggaaattaaaggaccccaattttttgacccaggcccttttgtttgaaaacttttagcgtggcggttccaatttgggggggggactccaaaaccttgaccccagtttccttgggggtttaaattttgtttggggaagggcctttgccacccgaaaaatttgttccgggttgacccttacaagggccggggggggcagttaacccagctttaaaagcaacaccgggttttt

SEQ ID NO: 74520 - DNA, 234 bp, Glycine max
  Clone ID: PAT_MRT3847_38305C.1
atatgactaggaattcggcctcccgctctagcctattctgttggagtgggaagatggtttctgttcctgccagtgtttcatgactggtgatggataaaagtaacaataatggtgggggtggtggaggtgcagaatctggaacaacctctggcataaaaaggatcatcagtgaacagaatatgtgggtgctgcctctccgcgggcacaactttcttgaagaccaaatgggaatgc

SEQ ID NO: 74521 - DNA, 1712 bp, Glycine max
  Clone ID: PAT_MRT3847_38306C.1
cccacgcgtccgctttgtcttcttttgggagcggtggatggacatggagtgttaagtaatttcgaaaggcttctgttccttcctatatataaaaccagcctcttgtatctatttgcggaaaacacccctagtttttctcagttgaacctcgatcgcacaccagagagaaaagaaagaataatgccaccttcttactgcgtgaaggagagaaaaccatgtgtgagatgggtcgagaaatatttcaaagattgcctttgcaatttgaaagatgaaatctcgttcagcttcggcctcacaagtctagtgttctggggtgtggctgaaattcctcaaataataaccatttttcgtaccaagaaaagccatggagtttcccttgtctttctcctcacttgggttgctggggatatatgcaatttgacgggatgcattcttgaaccagctactttgccaacacagtactacacagctctgctttacacgatcactacgatcgtattactactgctaatagtatattatgactacatcagcagatggtacaaacatcgtcagaaggtcaacctcgtaagggatcacgaagaagagaaaaaaccattgaagccaccgaaacccactaacaaatctggaatcccaataccaaatggctcacccaaggcagcacctagacaggagtactattatatgtcagcaagatcattggctgggagtggcactccaccctggggaatctacatgagagctgctaaaagtggtccttcagccatcgaatcgatcgatgactcttctttcgatgacgaagcacctcctgcttcctcaaataattctgcatcccaagctatgccaatcccacgttctgttgctggaagttatggaacatacccagcagctgctaataatttgcctctcaagggtaatgctttgaggcaaggatacataggatatggtggaagaaaacttttgcaggattacgagaaacatagtacatttggtcaatggctgggatggctcatggctgctatctatataagtgggcgagttcctcaaaatatggttgaatattaaaagaagcagtgtggagggcttaaatcctttcatgttcgtcttcgcattggttgctaatgtcacttacgtgggaagtattcttgtaagaaccacagaatgggaaagcatcaaagctaatatgccatggttattggatgccgtaatttgcgtggcattggacattttcataatatcgcaatacatctactacagatactttcgaaggagagaagcaaaagatgattatgaagaagcgggaaaagttgctgcatcttgatttttgtagctgtgtgctgtaaccaattgatattggattgaaaacttaatgggcaccttcacaaaactgagatattagcgtacattcttcgtgagaagtatgtatgctgctaatgtttatgtagggattatgggaaattagtacacacccataggatatgcatgtttagttgttgaagacatgatagtcgctactttgaagtggttttgttgatccaataactgacaagcttgttggaggactatgctaggacttcctcttgtagttgatacagcatcacaactctcaattcaactatgtgctctgtagtttacactccttcatcacaactttcaattcaataaaacatacacctaataattactatttaaaaaaaaaaaaaaaaaactcg

SEQ ID NO: 74522 - DNA, 328 bp, Glycine max
  unsure (1)..(328): unsure at all n locations
  Clone ID: PAT_MRT3847_38307C.1
cactaactacntggggaacccgtgttttccattttttttaaactaacctccacctcccaaatggcttattcctggggtggtggtagggaaatttacagcacccagtttggaaaagagaatgtgggtttctaaatttttagggaagacaccctttccagaggctttttttagcacaaacacccatttccgggtcccaatgattttaattttgttgggcctaaaccattttactgattccactggcttcctcaagcttagttgccttttatggcaacttttctttgggtccaagtacttgtggcaggcgttcttctcaaagcttttaccc

SEQ ID NO: 74523 - DNA, 231 bp, Glycine max
  unsure (1)..(231): unsure at all n locations
  Clone ID: PAT_MRT3847_38308C.1
gnnggttnnagagntgagntncgaaagatgaatggcgaagcacgagggagnttcnntaatcccggattaancaataatctagaaacncgtctatngcggaggttccgnacttcgaagaagnctnnagnttcgtttcgataaatttgaaagttcccaaattcgttcgaaaatnnttccggtcatnatnctcaaaatctttngttcggttcacctggnaagagtgnaacttga

SEQ ID NO: 74524 - DNA, 364 bp, Glycine max
  Clone ID: PAT_MRT3847_38309C.1
aaaaaaaagttatttctataaaacaaaatctttgcttttctcatgagaactatgcacgttgccggatctacatcgattataaaaagagtgatatattaaatgatatggggacatttttaatagaactgctactttttaaatcagtgtggacagtttttgtaaaaccactttcgacgagaacattacgtagccaggatttatgtcgctgcatgttaagaccttcttaagctttcgggagctcaatatatggataatgaatcctagcccacttgagcacaaactcataaacggcatgctttgaaggcctttggaggtcatcactaaatattcaggacttcatctgcaaacctagatcattcagtga

SEQ ID NO: 74525 - DNA, 189 bp, Glycine max
  Clone ID: PAT_MRT3847_3830C.1
actctttaaaatactacaaaaagtctatttatttacaaatcaaacaatctaaccgcgggccttatattaattattattaacaacctattttctttcgcatcatcatctgcatctctcttctcatccactcctcattcttaactttcacctactacaactttcacttccataccacacttacttacattt

SEQ ID NO: 74526 - DNA, 483 bp, Glycine max
  Clone ID: PAT_MRT3847_38310C.1
tccacgcgtccgtccacgcgtccgattatgttgttttatgttcgtgtggctttcttgcctctgacaacattcccctgtgattgctgggaacatgcacatacatatatatttataaaagggttgtgttagagcctagaggctcatttgtttccatttcttcttctctctcattgacacatccttgttgtgctgcatgccttatgcaatatatttgcacatacaataatgtgtgcatatatacatatatatgtatatatatcatttgttagggacatgttaatgtactacaacaaaaacattaacatcatctgaggttaatttgcattttgcaacaacagttactgatttggcgtgtttgaactttgaattcaaatgacgcaattaccttcaaagatcccaaacatgtcaccaagttggccagatttctcttcacaccaccagaagatgcaattgccaactttttaattcggttgctacaacaat

SEQ ID NO: 74527 - DNA, 220 bp, Glycine max
  Clone ID: PAT_MRT3847_38311C.1
aacaaagattttactttcaaacagaaagcaaagttccttcgacatgtttacctagggaatcctcggtagcacttatccttggtttaaacgagagggtcctaacgactccacacagggccgctgacaggaaaccgctggagggaacaaattgccttcacttttccgcaccgttcgaaacagtggatcgactgccgagtctacctaaggagaaggtcgcata

SEQ ID NO: 74528 - DNA, 794 bp, Glycine max
  Clone ID: PAT_MRT3847_38312C.1
tacggctgcggaagacgacagaaggggacgcaaaggcacaatagatccaaagcaaagacaagttgacaataaactaatctccaccaaagaattaaaaggactttgcttataaagtaaatatccattaaaaacaaaactcaactctcaaagctagcaatcttagcagaacaaagatgagtctcaatgtagatgatgatgagttagtgagtgaaatggatgaagcacccagttttgcttcatctctaccagtccccaatgttcaagaaatggtaaggaataaccctttgcaggttcctgaaagatatgcgaggagtcaagaagagttggagaaagtcaaccatatgcctcacctttcatctgaggtccctgtcattgatttagcactgctttcaaatggaaacaaagaggagttgttgaaattggacgtagcatgcaaagagtggggcttctttcagatagtaaatcatggtgttcaagaacacctgcagaaaatgaaggatgcatcatctgagtttttcaaacttccaatagaagagaagaacaagtatgcatcggcctcaaatgacacacatggctatgggcaggcttatgtagtttctgaggagcagacactagactggtcagatgcattgatgttaatcacgtaccccacccggtacaggaagcttcaattttggcctaaaactccagagggattcatggatataatagatgcatatgcaagtgaagttagacgagttggtgaggaactgattagttcattgtcagtgattatggggatgcagaagcatgtt

SEQ ID NO: 74529 - DNA, 1662 bp, Glycine max
  Clone ID: PAT_MRT3847_38313C.1
aaacgtcaaacgcatagagttggtccttagaattgaattcaacatgaaaaataaacgccaagataagacaatcatatatatatatgtgattttttgtcagacttctgaattagtcagagtctaactctttcctctgatgaaggttaagaaaaaaatatccccttaattcatagctgtgatagccacatcaattccgagtcttcaaatcttataattatatataaaaccacatacccttctctttcaaggtatccattctcatccactatcgctaattagagactccaatggaggatccgtttagcaatttgccagatgaaattctaagctgcatagtttcttttctgccactagaaaccagcctcatatctactaggtggagagacctgtggaaccaagcccttgttagacatggaagcacacaagacgacgtagctagtgttgttgctggttttctgtctcgttttgaagagcttgatccattaaaacatcctcgcaaacttcattttcacttttctgatcaagacactgcactctttgcatccattgcaaccaacagtaagcttcttcttgatttccctgctgggatcaaagacctcaaaaagcagtatgagctcaagtttatactcaacaagcatcacatcacacacaacactgtcccccccactttcttagtcaaaactctttatttgaaatcagtgagtcatttgactagtgagttgatttcctccatcgtttcaaatttagagcatcttgagaagttggtgattgttgagtgcaccgggttgcaatctttgttcattgagtctgaatcaaagcttcacgagttaaccatattagattgcccccagttgaagtctctccatcttagaacttctaagcttaaaagtttcagacttgatggacctcttccaaagatttggccagaatcccatttcaaccttagccatgccatgcttgatttcagacttggaccaagctgtgctgacttcaaggctcaagatttcaaccaaacactgttgacaataaagaattgtgaagctctcactttatgtgagtggacttttcaggaattgatatggccatcgatttctccaagtgggaactttatattctataaaataagagagctatggtggattcacaaccataggggtgaaaatagcatggacaccttagtctcctttttgaaattatgtcctgccttggagcaactttttgtgacgaatgattctacaagttattcggctccacggtccaattcatattgtttaacgcaagaaactgaatatagtacaaaattggagcatctaaaacggataaagtttatgggatttacaaatcgagtggatgaaatctcagtggcaaagaaattgattgaattagtcaagggagagcctccaaagatagagacatcggatgagagttgcttgaatgtagtgatcgtgcagtgatttttttttttttatgtagaaaggaaaattatatgaacaagtcatttcccatgctctttcaggctggggctggcatagcgttataattcagaagagataaaatatgtcacttttggagcctttgtttctatatatccttttctgcaatgtaatcttgtaggggacagcacatctttaaatatggtatgattcattttacggcaaaaaa

SEQ ID NO: 74530 - DNA, 720 bp, Glycine max
  Clone ID: PAT_MRT3847_38314C.1
ctgccaaatgaatcagcactagaaaccagccctcatatctactaggtggagagacctatggaaccaagtccttgtcagacatggaaccacacaagacataactggtgttgttgctggttttctgtctcgttttgaagagctagatccattaaaacatccccgcaaacttcaatttcactttgccgatcaagacactgcactctttgcatccattgcaactaacagtaagcttcttcttgatttccctggtggtgggaacaaagacctcaaaaagcaatatgaactgaagttcatgttcaacaaagatctcaacactgttccccccactttcttagtcaaaacgctttatttgaaatcagtgagccatttgactagtgagttggtttcctccatcgtttcaaatttggagcatcttgagaagttgatgattgttgagtgcactgggttgcagtctttgttcattgagtctgaatcaaagcttcacaagttaaccatattagattgcccccagttgaagtctctccatcttagaacttctaagcttaaaaggttcagacttcatggacctcttccaaagatttggccagaatcccatttcaacctcagccatgccatgcttgatttcagacttggaccaagctgtgctgacttcaaggctcaagatttcaaccaaacactgttgacaataaagaattgtgaagctctcactttatgtgagtg

SEQ ID NO: 74531 - DNA, 270 bp, Glycine max
  unsure (1)..(270): unsure at all n locations
  Clone ID: PAT_MRT3847_38315C.1
aaaacattttcataaaaacaaaaaaggttttggagcttgatttgtgtagttggttttggctcagttcagtttattattcatccttaagttttctttggtctactgctctgtttttcttnttggtgttgattggtttccaggagaataattatggattttttatgacaacccataattattctcctggaaaccaatcaacaccaaaaagaagcacagagcagtacaccaaagaataattatgggttgtcataaaaaatccagctttaagtg

SEQ ID NO: 74532 - DNA, 410 bp, Glycine max
  Clone ID: PAT_MRT3847_38316C.1
gcctctccaaaccctctatcactcttacgcgctcctatattctctcctacaccgagactctctcgaacaagcacggcaccatcttcatcagatgggagacgcatcatctggtatggaacaccatgatgactgcaggttgaaggttacgtagctgaaagcaaaaaggacacaccctgccatattttataagattgaggagcaccagaagcaaggcatcgttgagaagctcggagagcctgcccatggctgttaagattacactggcagccttcctgctgacgagtgccaaggtgccgtttatgattttgagcatctgactgaagggaatgttcctaaaagcagaatttttttcattgagtgctcctctgacacataaacggtgaggagcaggatgatttatgcaagctcca

SEQ ID NO: 74533 - DNA, 898 bp, Glycine max
  unsure (1)..(898): unsure at all n locations
  Clone ID: PAT_MRT3847_38317C.1
gcggtagacttacaccgtaattattaatttttttgatttacaaataacataacaggtgtacttgttctgaaaaaagcaaaaaaaaaaaaaaaagtgtgcccatgttgggataacatgtggtaattgtcattgcaaataacaaattaatatttacagcgtacccattgatataacatggtaaccaacaaatatggcaatttgacatgggatctttttggggtaacatgtatcctcaccctttctaaattatacatgggtttatctatggagggaaatacaagggtaggacgacaagtggcagtattatacagatctcgaacttcgtagaatctggtgatgaattcaatttttaacgtgattgaaacttgaaggccattaatttttgaatcgcaagccaatgacagcctcgtgatcgtgacatcttaatctactgcctttacatgcaagttacaatcctaaccagttgacgagcctcagatgtaaaccatttgagagcttaaagaatgcaacaagagggctgcctccgattagctctagagaataatgtgggactgttagatggagaatatcctcttgcgccgtcaccaacgcattcatcaccctccgacgacgacgacgacgacggcaccggaacctcgtgccggcacacggggcaagaattgtgcagcctcagccacggaacaatgcaatcggagtgatatatgtgcttgcactgaagctccctcgcttctccacccacttcgaactcctcctgacaaacaggacactgagaattctccttcagatgcgcgctctcgattttcaccgtcggaatagcctcgatagcccgttccggcgccggcgccnnnnnctgccggtcgttttctgttatctgttcgatgagttcgttangccctgg

SEQ ID NO: 74534 - DNA, 152 bp, Glycine max
  unsure (1)..(152): unsure at all n locations
  Clone ID: PAT_MRT3847_38318C.1
gactaagttcggcttttctggtatcgccatanatgtcgagtgtagaaagcttgatttgcttatctccgttggggccatcggtgctcttagcttcacaggagtatcgttgatgaatttgggtatccccgtgagggaggggagggtctatcggg

SEQ ID NO: 74535 - DNA, 472 bp, Glycine max
  Clone ID: PAT_MRT3847_38319C.1
ggagaaaaagatttttttattccaactttaaggaaaaaaggagaaataccccatattgtttgaaaggagagcagcaaaggaaacagggcccacatgcaacgaggcaatcttttaggattttaagggtgcaaggccttgctcaaggacggaactaaaatactcaaaccccccactacttgaaaaaaaaaagccaagctttacccctccttttttggctccactttttgcaaaaggcacacacaatattcggggagggaacatcatccccactttggtagggtttccaaatccaaaggcagccccataaacataaaatttaggggaccctgcaactagcattggacttcccaaaaaaaacattttcctacttaattccttccaggtttctgcatttttaaaaggggcagttttcatatcagttattgcccttgcaatgcccttcactgccttcaaaaaaccaccttttcccttt

SEQ ID NO: 74536 - DNA, 253 bp, Glycine max
  Clone ID: PAT_MRT3847_3831C.1
aaaagataaaaaaaaaagatttaatgaatcgggtgagaagtctaaactaaactttttacaagatataatatgatgattacgatcgaagacgaaataaactcatgtttcacattcaaagatgggaagccataacataattaaccaaagggaagctgatttttttaaaaatttaccaaccaaaaaaaaaaaaaaaaaaaaaaaaaaaagggaaagcggaataaaagaataaagaattcatttcaaaagaatgcaa

SEQ ID NO: 74537 - DNA, 348 bp, Glycine max
  Clone ID: PAT_MRT3847_38320C.1
ccggaactcccacaaaaaatattaattggatgatcacatcacacatatgaagatgtataatataacccccgagaaattatcagttggcaacctaacttacctgctacactgctgacagaaacgttgcataacatttcccactagtgccataggggccttagaatgaatatcacaaaccttatgccgacgggggtaatccttggcattactaagatcagccctacaatcttgcacctgacaaacagcacgattagaggcaggggtagtactagctgtaggggccccaattacctttgttttctttccactcttttcttcttcttccaccatgagagggtaaccttgacc

SEQ ID NO: 74538 - DNA, 145 bp, Glycine max
  Clone ID: PAT_MRT3847_38321C.1
tttcctcgcgtccgaggacgcattggcggacgcgcgggcacaatttgaaacgctgatcctttcgttaagcgaccccaaaagtgacatggggagaaaaaatatcttgccgcacgcttttgcaatgcatctaggatgtgtaaaaata

SEQ ID NO: 74539 - DNA, 108 bp, Glycine max
  Clone ID: PAT_MRT3847_38322C.1
cagcaaatgtcttctcatgtgcttatctggtcaatctggtcacgcccactcatcgaaagatagcttcaaaacatcagaaggcagttacggtatagtggacttcgagga

SEQ ID NO: 74540 - DNA, 230 bp, Glycine max
  Clone ID: PAT_MRT3847_38323C.1
gacaaagtcttcccgtggcatggatggatcacgaaggacgccgatggaaggcgctagcttgagtacgagacatagaaaaaggggcacactactgctgttgggaagggcttttggttattggccaattttggggcctatggccaagaatctggagtaggctgtaacagattgcttgggcttggatgaagtggaagagagtctttagatttttctctgatgaaaagataccc

SEQ ID NO: 74541 - DNA, 416 bp, Glycine max
  Clone ID: PAT_MRT3847_38324C.1
tcgcttacgcgtgggcggacgcgtgggatgttgttggtctgtggaattcccatatcgtgagagaagcaccatctgctggagccgaatagctgtgctctcctgaggccttctcttacgtgggcactatggatcgggacagagttattgttgctgaaccattggacggaccaattatgaaccactactgatctttggccagagaatccgtcatttgggagtcacttggaggctggcaagagattgaatccgatcctcaacacttgtgaaatactcatgttatacgagaggacaccgcgcgacacataaggtcttataggatgatgctcctgtttgacacagatgttcctggtggaagggtctacagagaaagcagccttacataatcacgctgcatattgttgcatgagacagagcta

SEQ ID NO: 74542 - DNA, 232 bp, Glycine max
  Clone ID: PAT_MRT3847_38325C.1
tttttttataaacgaataatatgctctataatttgttacatgaatttgtattaatagaaaaaacaaaagcctccgccaaaacagccgtttttatttttaagaggttgtacctgaccgagacacaaagctctttcattgaattccaccgggcttaactggggcaagaagaaggttctggttctaactcttaaaaaaataaatgtaccaagcgcgaacacaaattttccgggtt

SEQ ID NO: 74543 - DNA, 180 bp, Glycine max
  unsure (1)..(180): unsure at all n locations
  Clone ID: PAT_MRT3847_38326C.1
tcctaangggccggggaagcccctctnatagcgctctctgcgcctactcccaaaggggatccgggtaaaattcctnaacccggacctgnggggtgaccngaaccttagggggtcccgagacctccgcgggggcccccgaaaggggatcttttctgtgtaacagcctggccaccctggaaa

SEQ ID NO: 74544 - DNA, 197 bp, Glycine max
  Clone ID: PAT_MRT3847_38327C.1
accctttcttaggttataggagggaactcatgaatccagaaaaatttgtcccaaatttgggggaatgtttttgggtgattttctattgtaggaaaatgaatacataacacaagttcaattgagtcacaaaatgtggttttactctagcccattatgaatgttaattacaaaaaaagaagaaaaaaatcttttatttt

SEQ ID NO: 74545 - DNA, 954 bp, Glycine max
  Clone ID: PAT_MRT3847_38328C.1
gacactgcttcacacccaaaaagaagcgagttatgtctgagtcaaatttggagatggaagtcttctttcgtttctcgatggtgaagtaagactaaactcatgagcttattatcctaggtcggaacaagttgataggagctacttttttcacccccatccatgtcgccacacgggggcgacatggatgggggtgaaaaaaggaaagagagggatggggtttctcttgcttttggcatagcgggccccggcgggaggcccgcacgacgggctattagctcagtggtagagcgcgcccctgataattgcgtcgttgtgcctggactgtgagggctctcagccacatggatagtttaatgtgctcatcggcgcctgaccctgagatgtggatcatccaaggcacattagcatggcgtacttctcctgtttgaaccggggtttgaaaccaaacttatcctcaggaggatagatggggcgattcaggtgagatccaatgtagatccaactttctcttcactcgtgggatccgggcgatccgggggggaccaccacggctcctctcttctcgagaattcatacatcccttatcagtatatggacagttatctctcgagcacaggtttaggtttggcctcaatggaaaaaaacggagcacctaacaacgtatcttcgcagaccaagaactacgagatcgcccctttcattctggggtgacggtgggatcgtaccattcgagcctttttttcatgcttttcccgggggtctggagaaaattgcaatcaataggattttactaatccttccttcccgaaaggaagaacgtgaaaaattctttttcctttccacagggaccaggagattggatctagccataagaagaatagaatgcttggctgataaataactcacttcttggtctttgaccccctcagtcactacgaacgcccccgatcagtg

SEQ ID NO: 74546 - DNA, 539 bp, Glycine max
  Clone ID: PAT_MRT3847_38329C.1
ggcaattctaaaagggaaacctttttcctgattctgggcatatgcatattaaaaaacacaagatttaacatcctaacactttttacacttaacagaaacttaactttccttgcacaagtttaaattatgaaaattccctaaaaaaaaaaaggcctcctgggtctcaatgatgagccaaatgatttggtatctccagggactacaaaagtagggctattggaactccctgagggctctgagcttttattttctccttggcccttaccaacaatccatagcttggaaaaaattctccttgacctaaatggcagaaactgcaggccacttcggggggtcttgctactcttcttggtaaacttcccattcttttgcaacgggtcatctctaatcttcatgggacacatctggttgtcgagggattggcagctttctccccccgatttcgcacactcctcgtctccgttgacatgagggtttgaaaaattgtggggactgttgccgagtgcaagagcattggaagcagctctgacctgctcaaa

SEQ ID NO: 74547 - DNA, 245 bp, Glycine max
  unsure (1)..(245): unsure at all n locations
  Clone ID: PAT_MRT3847_3832C.1
gnagntctttctagatttaaggaagatgggtaagganaagttcacatcagtatgtngtattggcatgtgatctgggagtccactaccatggcatgnatctacagctggaggattgacagcgtgttatgagagattgagaggaagtgtgagatgacaagaggncttcaanatgctggngctgtaacttaagctgacgtgaagaggatcacattgatatgcttgtggaanttgaacacagtatatgc

SEQ ID NO: 74548 - DNA, 648 bp, Glycine max
  Clone ID: PAT_MRT3847_38330C.1
tacggctgcgagaagacgacagaagggggaattggacgggccattgataaccttgtgtagttcttgcggcggaagacaaagaagtttaaataaatgggtctagctttaatcgtcggactcctcggccttctgattctatttcacgccgcttattcaactattcagtataggggccttttgaagattacggaggaagagttttcagggcctccattcgacgtggtgattgagctgtttcttggattgttgctttgtttttgggctgccctcactgcgccggggaagtttctatccatacatcctcactctgaagataacagaattgtctctttacctgccaacctagacttcatgatcttcaaccaccgaggcaaggcctttcctgtggaaatggatttgaagctgagacaatgagaactattggatccagtgtcttcatctctcacacgaggaggaaaatctttacactggaaaattaaagaattgggatgtacattttgaccgttggttgatgtatcggttttgctgtttctttttgtagctttggccatttgccctgctaataatgttcacaggatgttattacttgactcatgtatgaagagattgcttgcacttcaactaatactttacataattgatttcccg

SEQ ID NO: 74549 - DNA, 615 bp, Glycine max
  unsure (1)..(615): unsure at all n locations
  Clone ID: PAT_MRT3847_38331C.1
gttgttttagttttgcacatacctatttgttgggtactagtgtttggactgggacttggacaaaatggagcagcaatatccattggaatttcatattggctcagtgtcatgttacttttaatttacacaaagtattatccatcatgtcagaaaactaagatagccttaggtagcaatgctttaagaagcatcaaggagttcttcttcttagccatcccatctgcacttatgatttgttttgagtggtggtcatttgagctggtagtaatacttgctggacttttaccaaatcccaaacttgaaacttccgttctatcaatctgccttaacatttgcaccttgcactatttcattccatatggaaccggtgctgcagtaagtacccgggtttcgaatgaattangggcacgaagaccacaggcagcgcgagaggctgtttntgctgtaattgttctagcattcacggatgcagttgtctttagctctgttctcttttgcttccgtcatgtgttgcgatttgcatttagcaatgagatggaagttgtacattatgttgcanagatagttcctgtgctttgtctctctttcatgggggatggctatctaggagttttg

SEQ ID NO: 74550 - DNA, 2880 bp, Glycine max
  Clone ID: PAT_MRT3847_38332C.1
cacaggtctcggttcccgagcatcatctctctctctctctctgttttcccatatcttctgtttcccgtcgttggtcaacctttgttcattggttctctttctctttccatttcaagtcttcgcttctttggttcaaaggacttgagcattcttgatgttaaactagccatcttcttcagttctctgtttctttctctctgtttttctgcagcgttttgaagcctcttccaagagtctcttacttaagatttcctgctgtcgagttcatcttccctcttaagtcttaacgggtaacaccctgtatgtaatatttattcttcttttgctcttaacgtctttcccatgtcagttaagttctgaaagttcaaattttttgttctcacgcctcaatttatttgatggatcatccccagatgaaaaatcatctcagtttttgcttctgggaatctgagttttgttgcttgacttgcaagtgactttggtcttgtggtaggggaaacagtgacctttctcaattttgcttatttaatttgagcttagtttgtttagttatagattatgttagctagcttttcagtttagatgggtacttaaaggggtttaatttcttcttttgcttctaaatttagtcaaacagtgctttgactcaattggaatctcgtatatttggaatcatggataactcatatgattcatcctcatccttgagtttcgtatcatctcacctgtcacatggttctagtaatcacaacgtgtcttccaccaccagcaaagatgcatgacgaaaatattgaaattttgagtctgaataagctcagtggaagcctcgagaagctattgattgaggctgagtatgattattgcgatgctgagattcttgttgaagacatccctgtgggtattcatcgctgtatattggcttcgcgtagtcagtttttccatgagctttttaagaaagggactgatggatcagggaaggaaggaaagccaaggtatctcatgtcagatttgatgccttatggcacagttggatatcaagctttccaagtgttcttgtactatctgtatactggaaggctaaaggcttcaccaacagaagagacaacatgtgttgatgaaacatgtatccatgtagcatgccgccctgctatcaatcatgccctagagctgatgtatgcttctgccacttttcagatgaaagagctagttttactttttcagcggcatctcctaaattttgttgagaaggctcttgtggaagatgtcattcctattcttatggctgctttcaactgccaactagaccagcttctctctcggtgcattcagagagtagcaaggtctgactttgacaacacatctttggaaaaagagctccctcgtgaagttgtgactgaaatcaaattgctccgactcccatttcagccagaatccacacctaatgcaatggaagtggagtccttgaatgaaaagagtataaggagaatccacaaggcattggactctgatgatgttgagctactgaagcttcttctaaatgagtctagtgtcactctagatgatgcacatgccctgcactatgcttgtgcctatagcgattctaaggttattcaagaagttcttagtctaggcatggctgatattcttcgtagaaattcccgaggatacacagttcttcatgtggctgcaaggcgaaaggatccatccattttggtagcactactgaataaaggggcgtgtgcatcagataccactccagatggacaaactgctcttgcaatttgtcagaggttgacgagatacaaggattatcaagagcaaacagtgcagtgtaaggaatctaacaaggacaggctctgtgttgatgtcctggagagggagatgagaagaaattctatgactgtgaatatgtctgtttcatcacagttaacagccgatgatttgcacatgagactggattaccttgaagatagagttgcatttgctcggctgttgtttcctgctgaggctagggtagccattgagaatgctgaagcagattcatcatcactgtatgcaaattcatcggctttgaaggtcacaaatggcaacccgaaagaagtagatctaaatgaatctccctcggctcgaaccagaaaactccagttaagattgcatgcccttatgaaaacagttgagaatggtaggcgcttctttccccattgctctgaagtgcttgataagtttctggaagacgacgaaatgccagatgttttcttcctagagaagggcagtgaagaagagcagagaatcaaaaaagcacgcttcatggagcttaaagatgatgtgcaaaaggcatttcacaaggatatggctgaaaataaccattctggtttttcatctacggtgtcttcctcttcttcctcaactcgtagggaaggtcttaaccatagagtaaggagaaaatgaagtccatgttcttctatgtagagtgttgcaacttgcaagtagaagccgtggaatatttagaaaaaataagatggaatgttaaattagggggttttgctaatgaacttgggagatttttactagcttgatttagtttcttatagttgttggaccaagagaagaagaaaaataaaagaagacgaattggcttatagtaatatctttgttccttttcgaagacccaaaagtgtgtattttttactttgttatctgattatagattgttatataattgaaaatctcacctcctgtaataattactttaaagatgacatgcaagactatttaaaagtcatttctaattgattatccttgcaaaattgtatgtccgttgtacaccaaaataattgtatatattgaaaacatataaatactaaactcttgtttcaaaaa

SEQ ID NO: 74551 - DNA, 2228 bp, Glycine max
  Clone ID: PAT_MRT3847_38333C.1
ggtccggaattccccgtcgacccacgcgtccggtctctttgcacctgttgtcttgacctggctgctatgtatcagtgctattggtgtctataatatcttccattggaatccacatgtttatgaagctctctccccatattacatgttcaaatttctgaagaagacacaaaagggaggatggatgtccttgggtggaattctactgtgtataacaggttcagaagccatgtatgctgatttaggacacttttcacaattgtcaattaagattgcattcacctttttggtatacccttctttaatcctagcatatatgggacaagctgcatatctttccagacatcattcccttgaaagtgactatagaattgggttctatgtatctgtacctgtaaaacttagatggcctgttcttgcaatagccatacttcaagctgtggttggaagtcaagctgtcatcacagggactttctccataatcaaacaatgttctgctatgggatgtttccccaaagttaaaataattcacacatcatccaaaatgcatggccagatttacattcctgagatcaactggagtttgatgctgctttgcctggctattacagttgggtttagagatactaaacgcatgggaaatgcagcaggcttggctgtcataactgtcatgctggtgaccacttgcttaatgtctctagttatagtcttgtgctggcacaagaacatactgctagcagtttgcttcatattgttctttggttccattgaagcactctatttctcagcatccctcatcaagttccttgagggggcttgggtccccattgccctctccctcatatttctcatttccatgtatgtgtggcactatggcacattaaagaagtatgagtttgatgttcaaaacaaggttccaatcaactggctcctcagtttaggcccctctctaggcattgtcagggtcaagggaattggtctcatacacactgagcttgtatctgggatcccagctattttctcccactttgttaccaatctacctgccttccaccaagttgttatcttcctctgcattaaatcagtccaagtgccacatgttagacctgaagaaaggttcttggtgggtagagttggcccaaaggagtatagactttaccggtgcatagcgcggtatggctaccgcgacattcaccaggatgacattgagcttgagcgggatcctctttgcagcatagctgaattcatcagatcagatgcatctgaatatggcttaggatttgggagctttgaagaagatacaaagatgacagttgtggggacttcagcatcaaacttagagggttcaataaggatgactgaagatgatgatcaacaagattctcaaatggaagaaggtccttcagagttgatggaggttaagtcttctcctgagaaagtgaggaagagagtgaggtttgttgtgccagacagtccacagattgatttggatgcaagagaggagttgcttgagctaatggatgcaaaagaggctggaatggcattcatattgagtcactcatatgttagagcaaaaagtggatcaagctggttgaaaaaagttgttatcaattatggatatgatttcttaaggagaaactcgagaggaccagcatatgcattgagtatacctcatgcatctaccttagaggtgggaatgatctatcatgtatgaatgagttttggattatatatatatatatatatatatatatatatatatatatatatttatcaacaaatgttagttgttaatttgttagtttttgttagagagggttagaacccaccacttatccctccttttctcccttcaccaccaaattaaaccaaccttatatctcctagtatttatatatctagtttagttttgtaactagtgagattatatggttggtcaaccttacacaggatgataaatggtggcattttgtatagtgatactctccaaagcttcttgacaagtgctgccgacctgtcgtattcaccttttgttttgtaattttcttggtacataaataagctgtctgtagggactagtccccccagtgtctagtaagctctttcttgtcctgttgttctagcttgaatctgaaatgtagattcaagttgagatttcaacagatactgtaatgagtcttttgaatgaatagaagaaaactcaatggattaatatagctttgatatagttt

SEQ ID NO: 74552 - DNA, 383 bp, Glycine max
  Clone ID: PAT_MRT3847_38334C.1
agaaagaaaaaaaaaaaaaaaaaaaaaagagtaaaaaaaaagagataaaaaaaaaaggactggggatatatcaagagggactcttaaatactctggcttgcgacatcttacttctaatctagggtggattcaattaaattgactgtcactggttatacaacgtctacactggaactaccctgtctttaccaagataaattgccttgcaaaaaattccccttacaacccataatggaaaatctttcacttccacaccaatctttcacactaaaagtctgactatcctacttgtagaacggaagcctacttgtatatgtcatttaggaccttattaagcagtggatccgcacaccgtttaaaattcccaggtcattgttccaata

SEQ ID NO: 74553 - DNA, 552 bp, Glycine max
  Clone ID: PAT_MRT3847_38335C.1
gggagcactttatgttgatcgaatagatttcagtgatcatcacatattccatgccagggatattgagatgatcagagccaaacttggagaactagatgggaagtttgttcccaaaccaattgttgtaatgactgaaaaggattatgatagggacccagaaattcttaagcaattgcacccatttaaagtttttgttctctgttctgcattgaaggttctgccctatagaggaagcacagaggatagctttaagaaatttctgaaggaccatttaaaattagaattgcctccagcactacgtcactagtcttggatatttttatgttgttgatggtaatttttttcctaattacataaggggccttacaaagttgatacattttttttagtgactaattatgtaatagaaataaagtatctcaaatttataatatcgtgggactatttagttactttttttttcttctttaagaaccaacttcagtagtgatttttttcaatacccgatcttactttatatataatttttattagtatatgaaattgaacaat

SEQ ID NO: 74554 - DNA, 368 bp, Glycine max
  Clone ID: PAT_MRT3847_38336C.1
acatgttatgtttgttttactgcatggttttttgtgctagtgaaaacccacattttttgtggcctttttttttttcccaccgaaaaaacattttgagcctgggtttatttttggggccccccttaaaccctccaaaaagcccgggacgggtttttgaaatcccattgcattaaaaaaaaccaatatttaagcgtgggttcattgccaaaaccgaaaaaagaaactttttaacaagatttagggaggttccttaaaccgggggggggggccctaacttaaaaatgggccctggaaaaaaggggggccctcgaaaggatttactagatctaaaatccggataaattctgaccgaagggaacccccccaaa

SEQ ID NO: 74555 - DNA, 1328 bp, Glycine max
  Clone ID: PAT_MRT3847_38337C.1
tattttttttttttttaaaaaatagggggcaccaaactgacatatattgaaaattttgatactggatacttgcaagttgcaagttgaaagtcaactggtacaccttacaaaatgatatgcaaataggaaaacaaaaaattcaaacattctgaaatcagttagtctttaacatctgaaactccttctgcacaaatctgaaaccttgcttcggcttccgctaagcaaggagaacttatcactttacagatccgctcttcccctctccctttcctgagagctagcctcgtagttgtggcatgagccataatgttgcctccaataggcttgatttgaggtcccgcaaagactgcagaaccatctacttgtgaaactacttggtttgttatgacaatagccacaccaaactcatctgctaatttctgaaggctcctcaggaactttgctagatgcatttgccgagctgaaagctccccccttccagagaaatctgtcctatagagggcagtagcactgtctactatcattacagcaaatctagtttccaccatcattgaagctgcttcaagcagaagccgtgattgatgatcggtattgtatgctctagcataagcaacattttccaatacatcagcaccattcaatccaaacctatctgctatctgtaagagtcgctgaggcctaaatgtgccctcagcatctatgtacatagctttaccctccccgcctccttggtctagtggcaattggcaagtgacacagagagtgtgacacaactgagtcttcccagaccgaaattcaccatataactcggtgatagaaccagtctcaactccaccctccaatatcttgtcaagctctgtcgatcccgtggttatctgaatgattgcatcgcgctgggcatggagttcactagcactggtgaaacccataggcaccagcttagaagctgcttcaattatcttgtcaactttagcttcactgatacctttgatttgcaaaagatctttcctgggagtgtaagcaacggattcaacggtgcaaattcccgcgtctttaagcttcttaacgtccgtggcggctatgcccgatgcctgaagttgctcgacgggtaaagggccatgttgtatttcttcagcttcgtcttgttgttgggggcgttgctgctgctgctccatagttgctgccatcattctgattctgaaagacccctcaaagattcaattgttgagatgagatgggtgaaagggaagaacgaaaatgtgtggagtggtgttgtgtgggggtgaggattcaaaagaattggaggggcgccaaaataatatattgcc

SEQ ID NO: 74556 - DNA, 509 bp, Glycine max
  Clone ID: PAT_MRT3847_38338C.1
aattcgcctaacacaaacgaaacacaaacagtgttctctctttctttctttctttctgtctgttgtgctctctgaacatgttgatggattccccctctcgctcctccgtcatcatcgtaggtgccggcatctccggtatcgctgcggcgaaggtgttggccgagaacggcgtagaggacctggtgatcctggaggcctcggaccgcgtcggcggcaggatctgcaaagagagcttcggcggcgtgacggtggagctcggtgccggatggatcgctggcgtcggcggccagcaacccaaccccatttgggaactcgccgctcaattcgagctccgcacctgcttctccgactacagcaatgcgcgctacaacatttatgatcgcagtgggaacatcataccgagtgaaatcgctgctgactcgtacaaaaaagcggtggactcggcgattcacaagttgagacaccaggacgaagaagaagaagaagcctatggtgatgatcattggaat

SEQ ID NO: 74557 - DNA, 839 bp, Glycine max
  unsure (1)..(839): unsure at all n locations
  Clone ID: PAT_MRT3847_38339C.1
ctctagcctcgtttgtacacacaccctgcacctccattgagttgagttcaaaactctgttctttcctccatgaattcaatttctttaggttccttcatcctcacaccatgcaagttccgcccttttcttcaaaccaaacaccaacccatattccacacactctccccaattcccctgacacaaaaacccacttttcttcgagccacagactcgaacatcgacgcccccatttccctccccgagggcgcgtccttcgtttccatcccagaaatcatcgagaaggactggtccgtgcttgattgcgcctaacaccgaaccactgaccgcattatagcttccggaaacatcgaacagagttcgagggttttggtcaagactgggtcagaaccctagtgtgattccttagcgggtttaactccctctgtgtttgttgttcatgactcgcttctgacactggcttgcattaaagaaaaatatgacagggttaagtgttggcaaggggagattatttatgttccggaattgtgggctccttttgatgctgtgtttctttatttccttcccgcgttgcccttcaagctccaccaaattttggagtctttggctcgggtgggtgcgccgggtgcaggcgtccctatcggtcagccgtatgggaacggcgtcgtagaccggccccggatgctgtaccctctggccgtcctgtctgaccttccttacaaagcgttgctgctgcccgttcctgcggcccggccgtttgtcgtggcggacctggccgatgtaccgcccctttgttctgcccttgggatctgctcgagagcttaaaaacttgnnaatacaca

SEQ ID NO: 74558 - DNA, 310 bp, Glycine max
  Clone ID: PAT_MRT3847_3833C.1
aaagtatcagatctcatcaatcattctgctcagcttttgcaaagaagaacggcctctgatgcagagagagcattagaacatattaataaggcgttaataataagttcatactctgaaaaattgcttgaaatgaaagcagaggctctcctaatgctttgtaggtatgaggaggtgattcagctgtgtggcaagacccttgattctgctgagaagaatgcctgtcctttggatgctggttgcaaagtcacggatctggataattcacaactctcaaaaggtttctactttagaatatggcgatgctcaatga

SEQ ID NO: 74559 - DNA, 124 bp, Glycine max
  unsure (1)..(124): unsure at all n locations
  Clone ID: PAT_MRT3847_38340C.1
cagtctttaacactcgaagattctntccttttcaaatttcanaccttttcccccaaaactaacagntgcctcttctggntctctctctgtaatctcaatngtgcatgggtcgtcttcantgatc

SEQ ID NO: 74560 - DNA, 211 bp, Glycine max
  Clone ID: PAT_MRT3847_38341C.1
caaaaaaaaaacactcttatacttatttaacagaagatagtgaagcaataaaaagcacttgtcttgaatgtacgtaaaacggaataaacacatgtaagacaaacagcggatactaagaagacactagatctcaacatgaatctaaaaaacatatacgctttaaataggcccgagacactaccggctgtctgaaaaccactgtatataccta

SEQ ID NO: 74561 - DNA, 228 bp, Glycine max
  unsure (1)..(228): unsure at all n locations
  Clone ID: PAT_MRT3847_38342C.1
ttgggnggggaatagtntttngtgatgtncnnagcagctnctagnnaantggaaaaccnttgggtatnagaggtatacttatattcnagtgggtagnagttgggctcnaagggatcgtattngganagaccagacatgggganctagaaaaatatgtatntgggttttttgncaancncagtggggannnagnaganngacgaagtnangtnngaatttcgggtngct

SEQ ID NO: 74562 - DNA, 238 bp, Glycine max
  Clone ID: PAT_MRT3847_38343C.1
accacaatgcaatttccttgtaagcactctcaactgaattacttccatggataacattccttcgcatgtctatatgcaaatcgccacgaataagtccaggctcacatcgagctggtgttagtgctccgataatctatctgccagatgggacaacatgaatacccgtccagatgatggggaccacagggccatagacagatgtatctcacataacacttgagaaaggctctgcggacaa

SEQ ID NO: 74563 - DNA, 162 bp, Glycine max
  unsure (1)..(162): unsure at all n locations
  Clone ID: PAT_MRT3847_38344C.1
aaatactctgaaaccgcgaaaccctagctgaaccctctttcccttctccggncaccgnaatggatttcaataaggcggcggatnaaggacggtttcacggccgaaaagctnttcacngcagggnttctcctacacntangatgaccgtnatcttccttccac

SEQ ID NO: 74564 - DNA, 394 bp, Glycine max
  unsure (1)..(394): unsure at all n locations
  Clone ID: PAT_MRT3847_38345C.1
acgagtcagggcgatcgaatgagaaatgttggtgtggttgattctgagtacatagttcatctgggtctgcctactcatgggggctcaaatggcaacaaggcaagtgattttcatttctacatgtagtgtaacatgaagataatagtcgcatanaaatttattatgcttgtagtaatccactactatcaactttaaaatctttaaattaaatctcatttatttgcaagtcccaataaatataantattttaattttactaagtctaattattaataaagatcttatcctttaaattacaagctccccagaagataatagatctaaagtaacatgaaataatatagatttatacagagttaaatacagtcatacattaaaaatacaatttttaata

SEQ ID NO: 74565 - DNA, 296 bp, Glycine max
  unsure (1)..(296): unsure at all n locations
  Clone ID: PAT_MRT3847_38346C.1
aggaagncggcgtcgaggacacatgtacacatatcaacacaacttccaagagttattttctatttcaacctcgtgaagaataatactggactatatacaatatagtgcgggcgatgcaaattatttaatgaaaatctgatcaactctctctctcaaagtatacttttttactgtaatttctaggcactccactgtaacacgttttataatattaattaataacaaaccttgtgaacattactattattatacacaatttgccttcttttgaacatcaaatactaatcgaaaaacat

SEQ ID NO: 74566 - DNA, 238 bp, Glycine max
  Clone ID: PAT_MRT3847_38347C.1
attggtccttaaacactcatcagtcatcaccatggccaagctagcttcatccctttgtcttctgcattgcagttggtgctgcttcgctttcagttccagagagcagcctcagcaaaacgagtgtcagatcgcataactcaatgctctcaaaccggataaccgtatagagtcagtatgagggctcattgagacatggagccctaacagcaagccattccagtgtgccggtgtagcgctc

SEQ ID NO: 74567 - DNA, 1101 bp, Glycine max
  Clone ID: PAT_MRT3847_38348C.1
cccacgcgtcctcccgcgcgcttctctgcgggcctccacacttaatcggaaaagaaaaaaaaaaaaaaaaagtaagcccagctttgttctgcttcaattctctaacaatggcgatggctttcaaaatggcgactactgggatgtgggttacggatgagtgcaagaactcattcatggaaatgaagtggaagaaggtgcacagatacatagtcttcaagatcgatgagaagtcaaggcttgtcaccgttgataaggtcggtggtcccggcgagagctatggtgatctcgctgcctccttgcccgacgatgattgcagatatgctgttttcgactttgattttgtcaccgttgataactgccgcaagagcaagatcttcttcattgcatggtctccaacagcatcaaggataagagcaaagatgctctacgcaacatcgaaggatgggctgagaagagctctggatggaataagctatgaagttcaggccactgatccaaccgagatgggattcgatgtaattcaagacagagccaaatagatggatgccccctttttttaaagtgggaatccaactccttatttatgtgctgagctaatcaattaatctgtcaatcttactctctctctctctttatttgctatatataaattaagtaaccatatatagtccaatgactgtatgacatgtgctatctcttcttctttcttgtttttatgctagtttaattgtgtttgatgtaagtggggcatctaatcttcaatccttactcataataataagttatgtgtaatatatgactgtcggctgtatgataagttaagggcaacaaactttggttgcaatctctttaatgatgaaaatttgtggaaaagaatggattagctcaacttttcccacggaaagttgatgcgttaccatatttataaatgatgctttcacattctacattctcaatactttaattacttaactattgtagtttgctaacttgggctcggcagttttgttcaatggcgccataacgaaggcacttgccaacaatgcttcgctcatggattcgtacaaaaccagaaatagaaaatcagaaacagcggtgact

SEQ ID NO: 74568 - DNA, 252 bp, Glycine max
  Clone ID: PAT_MRT3847_38349C.1
aagaaataaatctggtttcaacttatgtttagtgattgaaatcttgatcttatttttctttttccgtaataaggttgctttacattaatatgttttatggtcattttgcttatttgggacactagataaattgccttaaaattgctttctataacacttaaacgattggtttgtttgaactttgatgggcatcaaaatctaggacctagttgttgcttagataagtctaatgaatttgggaagttgtcattt

SEQ ID NO: 74569 - DNA, 143 bp, Glycine max
  Clone ID: PAT_MRT3847_3834C.1
ggctcgagggcttttgggggattccttttttcgcataggcagggtgggaccttctgggcgctgatccgctctgcggcgggagaccataggggaagttcatggattcacgtgatccgagatcctatcgtactgaggatcaagcc

SEQ ID NO: 74570 - DNA, 683 bp, Glycine max
  Clone ID: PAT_MRT3847_38350C.1
cttcccacgcttccgggaaaagaaaaaaaaaaaaaaaaagtaagcccagctttgttctgcttcaattctctaacaatggcgatggctttcaaaatggcgactactgggatgtgggttacggatgagtgcaagaactcattcatggaaatgaagtggaagaaggtgcacagatacatagtcttcaagatcgatgagaagtcaaggcttgtcaccgttgataaggtcggtggtcccggcgagagctatggtgatctcgctgcctccttgcccgacgatgattgcagatatgctgttttcgactttgattttgtcaccgttgataactgccgcaagagcaagatcttcttcattgcatggtatatattattcatatatatgtcatgaccataagtccataaacatggttattaacgtttgactctaatactgataatgttatggaaaaatgaccccctacccaaaagggtaattttagttctttttttttttttgggtacaaataaaataatgcaattgtcgtgtgaatttaatatatgatgatttatggcaattaaggcattatattttagtttttgttttttacgaaaaaattcaggtctccaacagcatcaaggataagagcaaagatgctctacgcaacatcgaaggatgggctgagaagagctctggatggataagctatg

SEQ ID NO: 74571 - DNA, 530 bp, Glycine max
  Clone ID: PAT_MRT3847_38351C.1
tacggctgcgagaagacgacagaagggggacaaggaaagtgaaagtgagagagagagagagaaacttcgaggaaacaaccttcaccgttcaattcatcaacatcaattgaacaacaacaacatcaaaacatatcccattcttattcttatcatttctcaatcactgccacactgatactactgacacgcccacctaccaccttaatgctcttcaactcccactactgcctcactctctctcaggcccttcaaggttttctttaggataaagaatttatgggtggatcaatttcaaaacggaggcgttctaagcaacattcgtcaaatttttttcctcggtatcagcaacctcatttcccacaaagccaagataatgggtctgtggggcattatgggtattcacctcagagctatggtggtggtcgtgctccagaacaaggaaagagcttggataggaagtattcaaggataggtgatgattataagagcttggaccaggtaactgatgctctggcaaaagctggcttaga

SEQ ID NO: 74572 - DNA, 955 bp, Glycine max
  Clone ID: PAT_MRT3847_38352C.1
gtgccgaaaacaagacacaggcgtttgaggtcacgtttagtagagttaagttggatggctctgagagttttggctccattgagtggactgatggaagtcatgttgtgaggagtccaattgctgttacttggagcggtgcatactcatcgtccgtttgaatgaattgctgtggagacgacgtctttctcaggttatggattattggatttagtctctttgtaatttttatcatgttggcttattgtacaaactacaaaataaccacgtacttccaggtagttgatgaagggcttctaataatttgcgggaatgagatgttgtgatttttaaggtagttggatcagattgttgtggtttggtatgtttatcatgttgagattaaaacacactatacatgtctcatttgactgatataaagggtatgtcatgctgaacgagatcaatatgacagcattgcacctagatgaatttgctgaaaatatgtatatggcagtccgtaatactaaggacatttgaatttttcatgccttttgtggcgtatctctcactgatgtcaattggtgcctgatggagccgtggactctcatcatccatttgagttgcattcgggtgtttctgtggaacacatcattcacaggttatagatttatttaagtctcttgtaattatctgtaagcttattgccttatttgaaaaactactaaaatacgttattggtatgctgtttcttgcaagtgtgctcggaacaactttgaagtagttgatgggagggcttctaataaattatggggctaaattaggatctgtgacatgagatgtgatttgtaagattgttggttcagattattgtggttctacatatttatcatgttaaaattaaaaacacacaacacatgcctcatgcgatatgtaagggtatgtcatggtaaacaaaatgtatatggtgttatatttc

SEQ ID NO: 74573 - DNA, 119 bp, Glycine max
  Clone ID: PAT_MRT3847_38353C.1
tcgatttaatgatggctccacccaaaggcacggggaggcttgggtggaggaaggcggtagtggtctcactactatgtagagggcgatactggtaagggaaagaaaagcactctctgtgc

SEQ ID NO: 74574 - DNA, 252 bp, Glycine max
  Clone ID: PAT_MRT3847_38354C.1
cagtgtgaccatttgcgtctgccaatgtggtgtaagaatcacattaccggaatatttgtcggatgcagaggctgcttcatgctcacgatcttaattagtgctaatttttgtgtggtcctcctttgtgtgccaggatgcaaaagcatgcaggagaacacggcaagaaagagctcaggctgaggagggaataatgcagtggtgacgcacaaataggcaaaatcatgacttgagatgtaatggatgtagcatgga

SEQ ID NO: 74575 - DNA, 622 bp, Glycine max
  unsure (1)..(622): unsure at all n locations
  Clone ID: PAT_MRT3847_38355C.1
ctaaaaaaagagggggcgaaaaacttttttttttaaaagggggggtngcttccacggggggggggccctaacatggggtggcccccaaaaaaaggacccgcgggggggggagggttcaaccacaacccctagactttttccctggccccggcttaaaaccaaaaaaaaagacccatttttttttgttgttaaacacctcaaggcgctcttccggaaaaaaaaacgggggggaaatgcttgaaaaccgcggggccttggggaaacaaaggaagacttggacccccacttattgttttttcttgttgaggacaaagctcttttgcccccattctcccccccccttgtggaggagaaaaggggggaaaaaacacaaggcggcccaaaagggggcggatcttgaaaaggggggtttggcaccacaaacttttcacaccctctcgtgggggggcgccccccccctttgggggggggaaaaaaaaaaaccgcggggggggggtttgaaaagagcacccccagggggaaaactgtttggaacaccccgggggggggggggccccaccaaaaaaaagagggggggggacccccccgggaaaaaaaaacgtgggaaggttggggggggggg

SEQ ID NO: 74576 - DNA, 114 bp, Glycine max
  Clone ID: PAT_MRT3847_38356C.1
gcctgtcgaggcttaagagatagctgacatttatgcatgagcctgttgttgattgatctctgtctatttgaaatctcacacgctctctgatttatatgaatgatgcgcgagcgt

SEQ ID NO: 74577 - DNA, 388 bp, Glycine max
  Clone ID: PAT_MRT3847_38357C.1
ttgtcgtcccacccccccgttctttctggtggaggaattctaggggacaaaggggttaattggatcacactggggcaaaaccctccaattagtaactcgttgagagttgctgcttggaagaaaggctgtttaatggttaagattgcgatgtctgggaatgcaacagtcaaaaggagtgactgggcctcattggcccaagtgtttttaacaaacagcaacagcacagagcattttgatgcaggacagtggacaaaatcggaaccacatccctgggaattgagcttcccaatagagggatgtggtcctaataatggtattgaaatgtggagctctgagagggcaaaatcaacttcacgtatttgagtttgcctattgaccattccaaaca

SEQ ID NO: 74578 - DNA, 307 bp, Glycine max
  Clone ID: PAT_MRT3847_38358C.1
aaagccgtcgagtcctatattataaattaattatttttttaaaaaaaaaaaaatggtgcgtatttaagggtggtataaaaaaatcttccgatcatattattatagctaaacacaccggtaagattttttttttttttctcctttatgtgaatggctacaatttgttgatccaaaaatcgaattctccaacacgacacctgtattattcataatacttcacactttcatttatcttagcaagatttgacttgatataatcacttaataagcaatatgttattaaactagagcacaatcaacatcctat

SEQ ID NO: 74579 - DNA, 249 bp, Glycine max
  unsure (1)..(249): unsure at all n locations
  Clone ID: PAT_MRT3847_38359C.1
gaaaataaatanatgattattgtgctattcataaattgactgcagtttaatnttantcttatatagtgcngganattgtcgcgggtnttcaaaanttaggttattgtnttcatgacataaactcactttctgntatacannattctgttnagtgngccntttgaaattctacactcgctcttgctnacnatggantgtgcgcagaantagatacaaaatantttggnacctgttcgcatgagnttnacc

SEQ ID NO: 74580 - DNA, 549 bp, Glycine max
  Clone ID: PAT_MRT3847_3835C.1
tgttaatacacctaacttacgtgacgtcgcatgcacgctagctcggggttatccacaggatcaagaccacaatacggtagaggattgttgatattagtaaggtccaactaacacttattttacacgctgatacaagtgaacaagcaaacatctttaatatatatagcttgcctgtattatgatatcatgaggtacaatatattataagttgatactcgatagaaatgatagtttcatcattttcatttgaaagatgcacctacatataaaagagacaatggcatttgagacataattcaatatatatgccaattagtgaattctgaggtacatgataatagcaattatcctgtggatatatatacttgaacctatggatgtagaaacataaatgtgtacatgttattattgtattctgagttcagatgtgaaatatatactaatggtatttgtcacaattcttttcttgctctgaaacagtgaatgcttattttattttatttagtacatgtacagtttatgaacacatatcgaagtattctttatttg

SEQ ID NO: 74581 - DNA, 479 bp, Glycine max
  Clone ID: PAT_MRT3847_38360C.1
atatatgttggaataaattaagcaaatcaaagaacatacatgttacagagcacatccagcttatagacgaattgcctgaataaaatgcagatctgccgactgaaatcgaaaaatcgaacacattaaaaaaagaaatagaagacccccacacccgagattaggtttaattaatagaaataaaaaaagactaaacccgcgaatggtggatggtttatggaagaatgagcagaggaggcaattatctggggggtatggtattgaaattaatttttttgacccagcgaatggataggagcgaaagagagaggtgaacctcgggtttccccaaacgtcgcggattcgatcgaactacctggggattggcgtggccccaggccgatgaggaaaaggactaggcttattaatatgaagaacaaggtgcttgtccaggctttgaaagtaagaagaggtaaatccccttgttggcaaacttaagccac

SEQ ID NO: 74582 - DNA, 303 bp, Glycine max
  Clone ID: PAT_MRT3847_38361C.1
acggctgcgagaagacgacagaaggggccatcctaaaggatgaagcgcagacattggcatgtttggtaggctctaacacatgtgcagacctgatgaaatacgagatacacaaggccgatatagacatgaagtatgcgcatgaggaacaggataacattttgcttaattacttacaagacacactctcattttggacctgctgttcatgaagaggccgcgacgggataccatggggcgtggaagtaacctaaggcacaagagcgtggtttgactcctgctcacattcgaggttgggtcgaaaac

SEQ ID NO: 74583 - DNA, 229 bp, Glycine max
  Clone ID: PAT_MRT3847_38362C.1
gttagcaagataacaagccctagcaaaatttctactaagcaaagggcggcgggtatctacaatcatgctttaaaacagggcccttcatgcctccttatactagatgcctagtatgctaccagacgttgcaacgcgtcttggcttttacagaattagaactaaacacaggctgttgaaattttgaggacgaagagactaattatctaagcctgtagctctttcccaaacg

SEQ ID NO: 74584 - DNA, 386 bp, Glycine max
  Clone ID: PAT_MRT3847_38363C.1
attaaaacacaacaggtgcacatgtgcacttatcaatgccatgaatcagcaaaggggtatgtaaagttgcttataaagcttcaaaatatatgatatgaaaaattatatattactaacataaagttgtatggattgagaagggttataagtgccatattcacctattccccttaatattgaaccactgcctgagcacatggcttatgagcaatcaagcaaatcgttcttacaagaacatccaaatgcaatggaggcaccaaactgatgactatcactctacaaacccatgtgacatatactacaatccttatatacttaagccaaaagcaccttgatctcaggaaccacagttctagcttccacctgcacagaacactgagaagcag

SEQ ID NO: 74585 - DNA, 269 bp, Glycine max
  Clone ID: PAT_MRT3847_38364C.1
caaacgcaaaaaaggcgtagcaaaaaactgagcgaaagggaaattcgctcaaaatttccaccccataccattttttaacataaagcctttagccaggggatcctaatgagtccgcccactaaaattaaaagggctgggctgacccgccaattttccagtcccaaaacctgttgtgggaaaaacaaaaatcactcggccagggcgccccgagagtcttcttgcgtattcctcgcgagggccaaatttccccttactagggatgacttaaa

SEQ ID NO: 74586 - DNA, 1451 bp, Glycine max
  Clone ID: PAT_MRT3847_38365C.1
ccacgcgtccggtcgttttattgcgaaaacgataatctctcagcgtcgtttcatgtttgtatgcggaatatttctggttgccggagagaagattgggaacgaacaagacaaaaaatgcagcaaaaacaaaaccttaacccaaccggaccgggtatcaaaggcagagaagagagtaacaaggttgcttcgaacagtttagaatcatgtcttggtgcaccattgagtccgatcccggtgtgtttacagaacttattcagcaaatgcaagtgaaaggagtacaggttgaggaactttattcattggatcttgactctctcaacagccttaggcctgtttatgggttgatttttcttttcaaatggcgtccaggagaaaaggatgaccgtgtcgttatcaaagatcccaaccctaacttgttttttgctagtcaggtaattaataatgcttgtgcaacccaagcaatcttgtccattcttatgaattcaccagacattgacattggtccagagctgacgaaattgaaagaatttaccaagaatttccctcctgaactcaaaggtttggccatcaataacagtgaggccatacgtacagcccataatagctttgctaggccagaaccttttgttcctgaagagcaaaaggttgctaccagagatgatgatgtttaccacttcataagctatctacctgttgatggggtactgtatgagcttgatggattaaaggagggtcccatcagccttggtcagtgctctggtgggcaaggtgatattgaatggttgaagatagtgcagcctgtgatccaggaacgcattgaaaggtattcccaaagtgagataagattcaatctcctggcagtcatcaagaacaggaaagagttgtatacagctgagctgaaggaacttcagaagaggagggagcgcattttgcagcagctagcagcatcaaagtcagacagactggtcgacaatagcagttttgaggcactgaacaattctctctctgaagtgaatgctgggattgaagctgcgactgagaagatcttgatggaggaagaaaaattcaaaaaatggaaaacagaaaatattcgcaggaaacacaactacataccctttttgtttaactttctaaagattcttgctgagaagaagcagctgaagcccctcattgagaaggccaagcagaaaacaagcagccctcggtgaagaatgtttatacaaccttatgcgtggatttttttccccagatatgagtatgcccatatgtatcacgttgcacttaattattatttttagcattctcttaagtactgatgcacacaagcttcttctgatccaaggatataactctaccctctttggtaaggattcttcattagttctctttactagtgattctggattcaataatatactgttagaggatgaatttaatcttcaaagcaaaaa

SEQ ID NO: 74587 - DNA, 706 bp, Glycine max
  unsure (1)..(706): unsure at all n locations
  Clone ID: PAT_MRT3847_38366C.1
cgaaatttaaaacaaaatccacctattgaaccaggacttccagccatctcaattgagaatggatacttttcatgggatcgtaaggaagagaaaccgacattatcagatatcaatgtggaaataccagttggcagcttagttgcaatcattggcggtactggagaaggcaaaacatcacttatttcagcgatgattggagagttacctcctttagccaatggaaatgctacaatcagaggcactgttgcttatgttcctcagatttcatggatttacaatgccacagttcgtgaaaacatattatttggatcaaaatttgaatatgaacaatatcggaaggtcattgatatgactgctctacagcatgatctcaacttactacctggacgtgattttacagagatcggagaaagaggagtcaatattagtggtggtcaaaagcaaagagtttccatagctagggctgtatactcaaattcgngatatatatatatttgatgatcctttgagtgctcttgatgctcatattgctcaagaggttttcaggaactgtataaaggaagggctacgagggaaaaccagggttcttgtcaccaaccaactacattttctccctcaggtggataaaatcattctggttagtgaaggaatgattaaggagcagggaacctttgaggagttatcaaaaagtgggcctctatttcag

SEQ ID NO: 74588 - DNA, 369 bp, Glycine max
  Clone ID: PAT_MRT3847_38367C.1
aaagcaaaaaaaaatttttttatggggtcaaaaacctcctaaaaaaaccctagaaatatgggtttatggaaatttgggggggtaaggcccctttttttttgactatggggctattttagggtaaaaaaaaaaacccctcccgggttaggaccatccttcacacaaaaaatcaggtggactttggcaacttaaaaagatttcccacggggaaccccctttccagtcacccctggttttgaaaaaggtttaaaaagctcggacgggacaaggccagctccattttgggtcttaaacttgggggtcccattcctctcaaaaaacaggggttctaggttcttaaggccctctttaaatctttaaaaggaagcc

SEQ ID NO: 74589 - DNA, 357 bp, Glycine max
  Clone ID: PAT_MRT3847_38368C.1
cgaacttggaagctacaaacagtcttcggaaccatgaagacttgctcgtcttgcttgtctcgcgtgaccactgtgaatgacgataaccatctctagggctaggcgatcctcttctcacaaacagcgacatgacatacgagtttgggtacaaaaggattgacaggatctggctgcttgaagtaatggcactcgacgacgacaacacgcttgcgctgctagacgactcagcctacgactgccacctcctgaacaaggtctgagattcgccgcaaaagcctcagaaaaggacatgatgccaaccttcaccagaaaagtgactgtgcaagtctacgatgtggtgctgataaaggacggcac

SEQ ID NO: 74590 - DNA, 5701 bp, Glycine max
  Clone ID: PAT_MRT3847_38369C.1
atggcggctgccaacgctccgatcgccatgagagacgctctcaccttgcgaagcatttgcataaattcgcagttcataactttcacgcatgtgacgtttgagtcccataagtatatatgcgttggagaaacggctccgcagaatagtgtggttatcattgatatgtacataccgaatcagcctaagaggtggtctattacgtcaacttccgcgattatgaatccaaataccacaatccttgctttgtaaaccgcgacgcactatactctccccgcctctgtcttcctaaacgcgtatgagcttgtgaggagcaccagcactgcaaagaacgcacctatttgtatatactatatgatgagtttgataatgcggcaactaccatcatgaaccattcacctgaagcatgggatcacatgccaactacaagtaacaactttagatcacctacaaattttttgcattgaaaggcaagccacgactacttgttagaacatccagatctgatcaatgattttctaaatgtattagcccaagttgttggccattgtaacatagtcctctttatgcgattggtcagttgaaggtgactctgaacctctaaaaatgtttgagagaaaagcaaaattggctctccatttaataaataattatatgagttatacttctgggaaatagtttgtgttagtttgcagtagtccatggaaactttagatgccagaattgtcttaagttaacagcaattaaggttgatccatcaagagtgatggattatgctacttgatttgatcattttgatgttcccgcgaatgaagcagaagctggggaagctctgttatatgatttctttatttgccatttttaatgacgctctcctactaatgttcaagttgctaattgttgagtggttgattagattcttcacaatgatggacatcattgagtaagctgtcccatttttacgccatgattttgctattgcactgccagacccgatgatcatacgcctgaatttcaatattatttgcaactgagtctcttatacgagctgatgatgcttcgcaatttgtcggtgacagtccgtgctgtatgaaggatggcattgaagcacaaaatgaagtgaaggttaaagagcaagaggaaaaggatgtagttgcacaacagaacatgtatgctcaattgttgcctcttgctttgcctgcaccaccaatgcctggaatgggaggcccaggaggtatgggaggaggctttgctcctccccctccaatgggtggactggggatgcccccaatgcctccttatggcatgcctcccatgggcagcagtttttgacaagtttagcatgaacttggcccctgtgaagagcaatgtaggaacttcgaagttttgtgtagaagaatatcttgtgtgatttggatgcagcattctttctttgcttcgggtggcggtgggagatcccaatttaaaataatgtgaagtttctgtttagattgtgtcataatagtcttgtaagtttattgttttttctgggttgtagttgaggcattttttgggctggtggttatatctaaccgagaaatttctgtattcttccaattttcttgatatagatgactttgctctggttggagtaatgtacactagattccgacctaataaaaatatggaggataccgatgttgacagaacggagttcaataatattcaaatctactctaaacaggttgggtacacacctgactatctcttgattttgctaacaattctccggacagattctcatgatgctgcaactattgcaatgatgatttcacaaatggagggggatcacatgcaattcaaagatgttgttgttaaagttgccattgtagaagttgtactacaaggctgttcacttctacttggaagagcatccagatcttatcaatgatgttctgaacgtccttgcacttcgtgtggaccatgcacgtgttgttgacatcatgcggaaggctggtcacctccgtcttgtgaaaccgtatatgattgcagttcaaagcaacaatgtatctgctgttaatgaagcgttgaatgagatatatgtcgaggaggaagattatgatagattgcgcgagtcaattgatttgcacgataactttgatcaaataggccttgctcaaaagattgaaaagcatgagcttcttgagatgagacgtgttgctgcttatatttacaagaaggcaggtaggtggaagcagtctattgctttgtcaaagaaggataacctttacaaagatgccatggagacagcctcccaatccggggagcgtgaacttgctgaggagttgcttgtttattttattgatcagggaaagaaggaatgctttgcctcatgtctatttgtttgctatgatctcatacgggcagacattgttcttgaactagcttggatgcacaatatgattgactttgccttcccatatctattgcagtttattcgtgagtacactggcaaagtcgatgaactagtgaaggacaaaattgaagcacaaaatgaagtgaaggctaaagagcaagaagaaaaggatgtagttgcacaacagaacatgtatgctcaattgttgcctcttgctttgcctgcaccaccaatgcctggaatgggaggctttgctcctccccctccaatgggtggactggggatgcccccaatgcctccttatggtatgccacccatgggcagcagtttttgaagagtatagcatgaactcggtccctatgaagagcaatgtaggaacttccaagttttgcgtagaacaatatcttgtgtgatttggatgcagcattctttctttgcttcggttggcggtgggatatcccaagttaaaataatgtgaagtttttcggtttagattgtgtcataatagtcttgtaagtttattgttttttctgtgttgtagtcgaggcattttttgggctgctgattctagctaaccgataaatttctgtattctaccatttttcttgtaataaatgagttagtcctaggtgaccaaacaaaaaatgaattacatctagtatatataagaaagttcttgatcctgataatgactatagaaggcaacttattgatcaggttgtatctactgctttgcctgaaagcacaagccctgagcaagtttctgcagctgttaaggctttcatgacagccgatctgccccatgaattgattgaacttcttgagaagattgtgcttcagaattctgcattcagtggaaactttaatttgcagaatcttcttattttgacagcaataaaggctgatccatccagagttatggattatgttaatagattggataattttgatgggcccgcagttggaggaatggctgtagaagctcagttatatgaggaagcatttgccatttttaagaagttcaacttgaatgttcaagcagtcaacgtgttgcttgataagattcatagcattgatagagctgttgagtttgctttccgagttgaagaagatgctgtttggagtcaggtggccaaggctcaactcagggatgggctagtaagtgatgcaattgagtcatttatacgagctgatgatgctacacaatttttagatgttatccgtgctgctgaagatggcaatgtttaccatgacttggtgaaatacttgctaatggtaagagggaaagcaaaagaacccaaggtcgacagtgagctcatttatgcatatgcaaaaatagataggctgagtgacattgaggagttcattcttatgcctaatgttgctaatcttcaaaatgttggtgaccgattgtacgatgaagcattatatgaagctgcaaaaatcatatttgcttttatatctaactgggccaagttggctatcacactggtgaaattacaacagtttcaaggtgctgttgatgcagcaaggaaagccaacagctcaaagacatggaaggaagtttgctttgcttgtgttgatgcagaggagtttcgtttggcccaaatttgtggactaaacattattattcaggtggatgacttggaagaagtcagtgaatattaccaaaatagaggttgcttcaatgagctaatatctctcatggagagtggtttagggttagaacgggcacatatgggcatctttactgagttaggagttctgtatgctagataccgtcctgagaagcttatggagcatatcaaactattctcaacccgactcaatattcctaaactcataagagcttgtgatgaacaacaacattggaaagaactgacctatttgtatatacaatatgatgagtttgataatgctgcaactaccatcatgaaccattcacctgaagcatgggatcacatgcaattcaaagatgttgttgtcaaagttgctaatgtagagttgtattacaaggctgttcatttctatttacaagagcatccagatcttatcaatgatgttttgaatgtccttgcacttcgtgttgaccatgcacgtgttgttgacatcatgcgaaaggctggtcatctccgtcttgtgaagccatatatggttgcagttcaaagcaacaatgtatctgctgttaatgaagcgttgaatgagatatatgttgaggaggaagactatgatagattgcgcgagtcaattgatttgcacgataactttgatcaaataggccttgctcaaaagattgaaaagcatgagcttcttgagatgagacgtgttgctgcttatatttacaagaaggcaggtaggtggaagcagtctattgctttgtcaaagaaggataacctttacaaagatgccatggagacagcctcccaatctggggagcgtgaacttgctgaggagttgcttgtttatttcattgatcagggaaagaaggaatgctttgcctcatgtctatttgtttgctatgatttgatccgggcagacattgctcttgaattggcctggatgaacaatatgattgactttgccttcccatatctcctgcagtttatccgtgagtacactggcaaagttgatgaactggtgaaggataaaattgaagcgcagaaccaagtgaaggctaaagaacaagaagagaaggaagtaattgctcaacagaatatgtatgctcagttgttgcctcttgctttgcccgcaccaccaatgcctggaatgggaggaggctttgcgcctccccctccaatgggtggattggggatgcctccaatgcctccttttggaatgccacccatgggcagctactgacatataagttctcggcaatgaactcaagtgtataccgagagcagcgtagcaacttgggagttttcaaacattttcttctggggttttaatgcagtattctttccttgcttctaatggaggaggaggttcagttcaaaataatttcaagtttctgttggggggtttgtgtcatatttttgtaatatttttctttatagttgaggcatttttttgggctgcttgcacgagctagccgaggattttctgtatgtaaccatttttcttgtattaaaatgatggtccaaagtattatacgaaatagaacccactttgactccaagcccatgtttgtcatggcctagatttattccactttaccttgtgatggaaactacctgatttaagcttgttggcttcatgttttgtttgttatgtgcatcttttaaatacgtggttattgccacctgaaaa

SEQ ID NO: 74591 - DNA, 173 bp, Glycine max
  unsure (1)..(173): unsure at all n locations
  Clone ID: PAT_MRT3847_3836C.1
tcctctagagcggccgcccttgcttttntttattcacatccaacattatttttaacatttactcttcagaacttataccatgactacatcaatcttggtgttctgtgctatattcttaacagaatcttgcttactctttacttctacccatttattaaacattatatcacata

SEQ ID NO: 74592 - DNA, 373 bp, Glycine max
  Clone ID: PAT_MRT3847_38370C.1
gaagtcctgcaaagtttacaaaggagacaccatgattgcagaggtaattggtgtatatccaaggagcaacttcagcaattggacagaaagttttaaggtcaaaatgaatgcaggggtggattatgctttcattgttgcgttgcttgtaatactcaccgtaaatgattacatataatattgatctccctcctgggcaaggttatactgttaaaaatgccataaaggacttgaacataatataataaaataactaattgcattgtataaacctattatgatgaaatgcaataaaattctcaatccttttttcttatttttaaattgaggggaaaaaaataaaggtaaataatggaataggttccactaactaaaa

SEQ ID NO: 74593 - DNA, 5542 bp, Glycine max
  Clone ID: PAT_MRT3847_38371C.1
cccagatttcccctcgacttgggcaccccccatcgccgaactccatcctccgactcaagcaccgcctcagagatttctcgcccattgaaccaaaccatcatggcggccgccaatgctccgatcgccatgagagaaactctcacctttccgaccattggcatcaatccgcaattcatcacgttcacgcatgtgacgatggagtccgataagtatatatccgttcgagaaacggctccacaggatagtgtggttatcattgatatgaacatgccgaatcaacctttgaggaggcctatcacggcagattctgctcttatgaatccgaattctagaagccttgctttgaaaacccaactccaaggaacaactcaagatcacctacaaatttttaacattgaatttaaatcaaagatgaaatcttatcagatacctgaacaggtgtctttttggaagtggattacccccaagttgttgggtattgtaacacagacctctgtataccattggtcaattgaaggtgactctgaacctgtaaagatgtttgagagaacagcgaatctgccaaacaaccaaataattaattatagatgtgatcctacagagaaatggttggtcttgattggtattctccatggttcccctgagaggccacaattggtaaaaggaagaatgcaactcttctctgtggaacaacaacggagccaggctcttgaagcacatgctgcatcatttgctcaattcaaagttcctgggaatgaaaacccatctactttgtttctttttgccacgaaccctaatgctggtcaaattataaccaagttgcatgttattgagctgggtgcacaaccagggaaccatcatttaccaagaaacaagcagatcttttcttccccccagattttttctgatgattttccagttgccatgcagatatcccacaaatacaatttgatttatgtgattaccaaacttggtctcctatttgtctacgatttggagacagctacagctgtatataggaacagaattagtccagatcctatatttttgacatcagaagctacatctgttggaggcttttatgccattaataggagaggccaggtgttgttggctactgttaatgagcaaacgatcgtgaattttgtcagtggtcagttaaacaatttggagctagcagttaatcttgccaagcgaggaaatcttcctggtgctgagaaactggtggtagaacgtttccatgaactgtttgcccaaacaaagtataaagaagcagctgaacttgctgctgagtctccgcaaggaatccttcgcacacctgatacagttgccaaatttcagagtgttcctgtgcaagctgggcaaactcctccactattgcagtattttggaacacttctaacaagaggaaagctgaatgcccttgagtcattggaattgtcaaggctggttgtgaaccagaacaagaaaaatcttttggagaattcgtccggttggcggaggataagcttgaatgcagtgaggagctaggagatctcgtaaagactgtggacaatgatcttgctttaaaaatatacatcaaagccagagctactccaaaagttgttgctgcttttgctgagaggagggagtttgacaagattctgatttactctaaacaggttgggtacacacctgactatctcttccttttgcaaacaattctccggacagatcctcagggcgctgttaattttgcattaatgatgtcgcaaatggagggaggttgcccagttgattacaacacaataactgatctctttcttcagagaaatctgatccgtgaggcaacagcctttctgctagatgttctgaaaccaaatctaccagaacatgggttccttcaaacaaaggtgttggagataaatctggttactttccccaatgttgctgatgcaattttggctaatggaatgttcagccattatgaccgtcctcgtattgctcaactttgtgaaaaagctggtctttatgtgcgagctttgcaacattacacagagttgccagatataaaacgtgtgattgtaaatacacatgcaattgagccacagtcactcgttgaattttttggtactctgtcaagagaatgggcattagagtgtatgaaagacctattgctggtcaatcttagaggcaacctacagattattgtgcaggttgctaaagaatattgtgaacaattgggcgttgatgcttgcataaagctttttgagcagttcaggtcatatgaagggctgtattttttcctgggatcatatttgagctccagtgaggatcctgacattcacttcaagtacattgaggcagcagcaaagactggacaaatcaaagaggttgagcgtgtgactagagaatcaagtttttatgatcctgagaaaacaaagaactttctaatggaagctaagcttccagatgcacgacctctgattaatgtttgtgaccgatttggatttgttccggatctaacacactatctatacacaaacaacatgcttcgttacattgaaggttatgttcagaaggtgaacccagggaatgctcctttagtcgttgggcagcttttagatgatgaatgtccagaagattttatcaaaggcttgattctttctgttcgctccttactgccagtggagccccttgtggaggagtgtgagaagaggaatcggcttcgtttgctcacacagtttttggaacatcttgtaagtgagggaagccaggatgtacatgttcacaatgcactgggtaaaatcatcattgatagcaacaacaatccagaacattttctcactaccaacccatactatgattctcgagttgtgggcaaatattgtgagaaacgtgatcccaccttggcagttgtagcttataggcggggacaatgtgacgacgaacttatcaatgtgacaaacaaaaattctttgttcaaactgcaagcaagatatgttgttgagaggatggatggtgatttttgggagaaagttcttaaccctgataatgcctacagaaggcaacttattgatcaggttgtatctacagctcttcctgaaagcaagagccctgaacaagtatctgcagctgttaaggctttcatgactgctgatctacctcacgaattgattgagcttcttgagaagattgtgcttcagaattctgcattcagtgggaactttaatctgcagaatctgcttattttaacagcaataaaggctgatccgtccagagttatggattatattaatagactggataattttgatgggccagcagttggagaaatggctgttgaggctcaattatatgaggaagcatttgcaattttcaagaagttcaacttaaatgtccaagcagtcaatgtcttgctagatcatattcatagcattgatagagctgtggagtttgctttccgagttgaagaagatgctgtttggagtcaggtagccaaggctcaactaagggaagggctagtaagtgatgccattgagtcctttatacgagcagacgatgccacacagtttttggatgttatccgtgctgctgaagatggaaatgcttaccatgacttggtgagatacttgttgatggtaaggcataagacaaaagaacccaaggtggacagtgagctcatttacgcgtatgcaaagattgatcggctcagtgacattgaggagttcattcttatgccaaatgtagccaatcttcaaaatgttggtgaccgattatatgatgaagaactatatgaggctgctaaaatcatatttgcttttatatctaactgggccaagttagcagttacacttgtgaagttgaaacaattccaaggtgcagttgatgcagcaaggaaagctaacagtgcaaaaacatggaaggaagtttgctttgcatgtgttgacgcggaggagtttcgtttggcccagatatgtgggcttaatattattattcaggtggatgacttggaagaggtcagtgaatattaccaaaatagaggttgcttcaatgagctaatatcgcttatggagagtggtttaggattagaacgggcacatatgggtatctttacagagttaggagttctgtatgctagatatcgtcatgagaagcttatggagcatatcaaactatttgcgactcgacccaatattccaaaactcataagagcttgtgatgaacaacaacattggaaggagctgacctatttgtacatccaatatgatgagttcgataatgctgcaacaaccatcatgaaccattcacctgaagcatgggatcacatgcaactcaaagatgttgttgtcaaagttgctaatgtagagttgtattacaaggctgttcacttctatttacaagagcatccagatcttatcaatgatgttttgaatgtccttgcacttcgtgttgatcaggcacgtgttgttgacatcatgcgaaaggctggtcatctccggcttgtcaagccttacatggttgcagttcagagtaacaacgtgtctgctgttaatgaagccctgaatgaaatatatgttgaggaggaagactatgatagattgcgcgagtcaattgatttgcatgataactttgaccaaataggccttgcacagaagattgaaacgcatgagcttcttgagatgagacgtgtcgctgcttatatttacaagaaggcaggtagatggaaacagtccatagagctatgtcacaagaaagataccctatacaaagatgccatggagacagtctcacaatctggtgaccgtgaacttgttgaggagttgcttgtttatttcattgatcagggaaagaaagaatgctttgcctcgtgtctatttgtttgttatgatttgatccgcgcagacattgttcttgagttggcctggatgaacaatatgattgactttgccttcccatatctcctgcagtttatccgtgagtacactggcaaagttgatgaactggtgaaggataaaatagaagcgcagaaccaagtgaaagctaaagagcaagaagagaaggaagtaattgctcaacagaatatgtatgctcagttgttgcctcttgctttgcctgcaccgccaatgcctggaatgggaggaggctttgcccctccccctccaatgggtggattggggatgcctccaatgccaccttttggtatgccacccatgggtagttactgacagataagttcggcaatgaactcaagtgtataccgagagcagtgtagcaacttgggagttttcaaacattttcttttggtgttttaatgcagtattctttccttgcttctaatggaagaggaggttcaggtcaaaataatttcaaatttctgttggggggtttgtgtcatattttggtaatatttttctatagttgaggcatattttggggctgtttgaacgagctagccgaggattttctgtatgtaaccacatttcttgttttaaatgatggtccaaaagaattattatacgaaatagaacccactttgactcaaaaaaaaaaaaaaaaaaaa

SEQ ID NO: 74594 - DNA, 458 bp, Glycine max
  unsure (1)..(458): unsure at all n locations
  Clone ID: PAT_MRT3847_38372C.1
tgtccnttgaanggtaccnnccncnannggcgnngaanntnngaaaggnannnannganngaggacaatntaccggngantgccagagaannggacatccaaggacttccncgnagtacganccatgnntggncgagcacagtnntcccacnctanagtnngagacagancgaacgntnacananatgtanacaacagagtgagaantatctatgtgngatntcgangangnagnagganagtaanganagatcantntgttgttganctgnggaagactgagagnagnganncngcanaganntgntngnaaggnncagcanangntagatnngngagantaagnancagangtgnanangaganagnagagncagnnagnnngannanganngngnaaaagagagnctagcanctaagngngnagaganncnngnngnagatngangnagnatcgc

SEQ ID NO: 74595 - DNA, 617 bp, Glycine max
  Clone ID: PAT_MRT3847_38373C.1
cccccccctccatgggtggactggggatgcccccaatgcctccttatggcatgccccccatgggcagcagttttaagtttagcatgaactggcccctgtgaagagcaaggtaggaacttggaagttttgtgtagaagatttttttttgggatttggatgcagcattctttctttgcttcgggtggcggtgggagatcccaatttaaaataatgtgaagtttctgtttagaggttgcataatagtcttgtaagtttattgttttttctgggttgtagttgaggcattttttgggctgttggttctagctaaccgataaatttctgtattctaccatttttcttgtattaaatgagttagtcctaggtagaccaaacaaaaaatgaattgctcctagtatatatacgaaatttaccgactttaacagccagctttatatgtgcatgctgtggccaaaatttcctcccttgtggtcacttgatgtggaagctacctgattaaaaaaatcctgttgacatgctgcttttcacatgcgttttttttttttttttccagtttattgccccgatttaatttcatgtttaagcgtaattataataaatagacacttttttggtcc

SEQ ID NO: 74596 - DNA, 297 bp, Glycine max
  Clone ID: PAT_MRT3847_38374C.1
gagcgaacccactaccgttcagcaaaatgatcgctcactctagcaacatcgacattcgatgactactctagctctagcctgtagccctagctagtagctaagccactcggtcgtgtagtcatcaaccttctgatcgtcacccatggccactgccgaggtccagaccccgaccgacgtggcgaccgaggaagcgccggtggtggagaccccggctccgcccgccgtcgtgcccgaggaggctgcccccgccaccgaggccaaggtggaagagccagctgccccggcggagaccgatcc

SEQ ID NO: 74597 - DNA, 211 bp, Glycine max
  unsure (1)..(211): unsure at all n locations
  Clone ID: PAT_MRT3847_38375C.1
ncntcncatcgnanncacnnntnngtccnntcggcattcggctcgagcnacaagcttnannttntgccatnncanctcgnngtcnataccccnngacanntntagtgttccagtctagnntggccaccgtntntctctantnttccntnctgcncanccacatgngtntgnggtngcagcatttanctcgaccttntatgctgaatgggnc

SEQ ID NO: 74598 - DNA, 739 bp, Glycine max
  Clone ID: PAT_MRT3847_38376C.1
cccgcgtccgggaagtttgctttgcttgtgttgatgcggaggagtttcgtttggcccagatttgtggactcaacattattgttcaggtggatgacttggaagaagtcagtgaatattaccaaaatagaggttgcttcaatgagctaatatctctgatggagagtggtttagggttagaacgggcacatatgggcatctttactgagttaggagttctgtacgctagataccgccctgagaagcttatggagcatatcaaactattctcaacccgcctcaatattcctaaactcatacgagcttgtgatgaacaacagcattggaaagaactgacctatttgtatatacaatatgatgagtttgataatgctgcaactaccatcatgaaccattcacctgaagcatgggatcacatgcaattcaaagatgttgttgttaaagttgctaatgtggagttgtattacaaggctgttcacttctacttggaagagcatccagatcttatcaatgatgttctgaacgtccttgcacttcgtgtggacctgcacgtgttgttgacatcatgcggaggctggcacctccgtcttgtgaaaccatatatggttgcagttaaagcaacaacgatctgctgttatgaagcgttgatgagatatatgttgaggagaagatatgatagatgcgcgagcaattgtttgccgatactttgataaataggcctgcccaaagatgaaagcatgac

SEQ ID NO: 74599 - DNA, 5791 bp, Glycine max
  unsure (1)..(5791): unsure at all n locations
  Clone ID: PAT_MRT3847_38377C.1
atggcggctgccaacgctccgatcgccatgagagaagctctcaccttgccaagcattggcataaatccgcagttcatcactttcacgcatgtgacgatggagtccgataagtatatatgcgttcgagaaacggctccgcagaatagtgtggttatcattgatatgaacatgccgaatcagcctttgaggaggcctattacggcagattccgctcttatgaatccaaattccagaatccttgctttgaaagttgcttctgaaacattagttctacttactagattgtcaaatgactattatggaaagtccacaatgggctatgactttattatggacttcattgcttgtaatgctatgaaccttagtatttgcttttggattatattcccttctaagttacatccctctcttgaagctcaactccaaggaacaactcaagatcacctacaaatttttaacattgaaatgaaagcaaagatgaaatcttatcagatgcccgagcaggtggtcttttggaagtggattacccccaagttgttgggtcttgtaacacagacctctgtataccattggtcaattgaaggtgactctgaacctgtaaagatgtttgagagaacagcaaatttggcaaacaatcaaataattaattatagatgtgatccttctgagaaatggttggtcttgattggtattgctccaggttcccctgagaggccacaattggttaaaggaaacatgcaactcttctctgtggatcaacagcggagccaggctcttgaagcacatgcggcatcatttgctcaattcaaagttcctgggaatgaaaatccttctactttgatttcttttgccactaaaacacttaatgctggccaaattatatccaagttgcatgttattgagctgggtgcacaaccagggaagccatcatttacaaagaaacaagcagatcttttctttcccccagattttgctgatgattttccagttgccatgcagatatcccacaaatacagtttgatttatgtgataacgaaacttggtctcctatttgtctacgatttggagacagctacagctgtatataggaacagaattagtccagatcctatatttttgacatcagaagctacatctgttggaggcttttatgccattaataggagaggccaggtgttgttggctactgttaatgagcaaacgatcgtgaattttgtcagtggtcagttaaacaatttggagctagcagttaatcttgccaagcgaggaaatcttcctggtgctgagaaactggtggtagaacgtttccatgaactgtttgcccaaacaaagtataaagaagcagctgaacttgctgctgagtctccgcaaggaatccttcgcacacctgatacagttgccaaatttcagagtgttcctgtgcaagctgggcaaactcctccactattgcagtattttggaacacttctaacaagaggaaagctgaatgcctttgagtcattggaattgtcaaggctggttgtgaaccagaacaagaaaaatcttttggagaattggttggcggaggataagcttgaatgcagtgaggagctaggagatcttgtaaagactgtggacaatgatcttgctttaaaaatatacatcaaagccagagctactccaaaagttgttgctgcttttgctgagagaagggagtttgacaagattctaatatactctaagcaggttgggtacacacctgactatctcttccttttgcaaacaattctccggacagatcctcagggtgctgttaattttgcattaatgatgtcgcaaatggagggaggttgcccagttgattacaacaccataactgatctgtttcttcagagaaatctgatccgtgaggcaacagcctttctgctagatgttctgaaaccaaatctaccagaacatgggtaccttcaaacaaaggtgttggagataaatctggttactttcccaaatgttgctgatgcaattttggctaatggaatgttcagccattatgaccgtcctcgtattgctcaactttgtgaaaaagctggtctttatgtgcgagctttgcaacattacacagagttgccagatataaaacgtgtgattgtaaatacacatgcaattgagccacagtcactcgttgaattttttggtactctgtcaagagaatgggcattagagtgtatgaaagacctattgctggtcaatcttagaggcaacctacagattattgtgcaggttgctaaagaatattgtgaacaattgggcgttgatgcttgcataaagctttttgagcagttcaggtcatatgaagggctgtattttttcctgggatcatatttgagctccagtgaggatcctgacattcacttcaagtacattgaggcagcagcaaagactggacaaatcaaagaggttgagcgtgtgactagagaatcaagtttttatgatcctgagaaaacaaagaactttctaatggaagctaagcttccagatgcacgacctctgattaatgtttgtgaccgatttggatttgttccggatctaacacactatctatacacaaacaacatgcttcgttacattgaaggttatgttcagaaggtgaacccagggaatgctcctttagtcgttgggcagcttttagatgatgaatgtccagaagattttatcaaaggcttgattctctctgttcgttccttactgccagtggagccccttgtggaggagtgtgagaagaggaatcggcttcgtttgcttacacagtttttggaacatcttgtaagtgagggaagccaggatgtacatgttcacaatgcactgggtaaaatcatcattgatagcaacaacaatccggaacattttctcactaccaacccatactatgattctcgggttgtgggcaaatattgtgagaaacgtgatcccaccttggcagttgtagcttataggcggggacaatgtgatgacgagcttatcaatgtgacaaacaaaaattctttgttcaaactgcaagcaagatatgttgttgagaggatggatggtgatctttgggagaaagttcttaaccctgataatgcctacagaaggcaacttattgatcaggttgtatctacagctcttcctgaaagcaagagccctgaacaagtatctgcagctgttaaggctttcatgactgctgatctacctcacgaattgattgagcttcttgagaagattgtgcttcagaattctgcattcagtgggaactttaatcttcagaatctgcttattttaacagcaataaaggctgatccgtccagagttatggattatattaatagactggataattttgatgggccagcagttggagaaatggctgttgaggctcaattatatgaggaagcatttgcaattttcaagaagttcaacttaaatgtccaagcagtcaatgtcttgctagatcatattcatagcattgatagagctgtggagtttgctttccgagttgaagaagatgctgtttggagtcaggtagccaaggctcaactaagggaagggctagtaagtgatgccattgagtcctttatacgagcagacgatgccacacagtttttggatgttatccgtgctgctgaagatggaaatgcttaccatgacttggtgagatacttgttgatggtaaggcataagacaaaagaacccaaggtggacagtgagctcatttacgcgtatgcaaagattgatcggctcagtgacattgaggagttcattcttatgccaaatgtagccaatcttcaaaatgttggtgaccgattatatgatgaagaactatatgaggctgctaaaatcatatttgcttttatatctaactgggccaagttagcagttacacttgtgaagttgaaacaattccaaggtgcagttgatgcagcaaggaaagctaacagtgcaaaaacatggaaggaagtttgctttgcatgtgttgacgcggaggagtttcgtttggcccagatatgtgggcttaatattattattcagctgtcatctgatttccagttagaaagtttgaataatacattctttcaaaatgtggatgacttggaagaggtcagtgaatattaccaaaatagaggttgcttcaatgagctaatatcgcttatggagagtggtttaggattagaacgggcacatatgggtatctttacagagttaggagttctgtatgctagatatcgtcatgagaagcttatggagcatatcaaactatttgcgacccgactcaatattccaaaactcataagagcttgtgatgaacaacaacattggaaggagctgacatatttgtacatccaatatgatgagttcgataatgctgcaacaaccatcatgaaccattcacctgaagcatgggatcacatgcaattcaaagatgttgttgtcaaagttgctaatgtagagttgtattacaaggctgttcatttctatttacaagagcatccggatcttatcaatgatgttttgaatgtccttgcacttcgtgttgatcatgcacgtgttgttgacatcatgcgaaaggctggtcatctccgtcttgtcaagccatacatggttgcagttcagagtaacaatgtgtctgctgttaatgaagcccttaatgaaatatatgttgaggaggaagactatgatagattgcgcgagtcgattgatttgcacgataacttcgaccaaataggcctagcacagaagattgaaaagcatgagcttcttgagatgagacgtgttgctgcttatatttacaagaaggcaggtagatggaagcagtccattgccttgtcaaagaaggataacctttacaaagatgccatggagacagcctcgcaatctggtgaccgtgaacttgctgaggagttgcttgtttatttcattgatcagggaaagaaagaatgctttgcctcgtgtctatttgtttgctatgatttgatccgggcagacattgctcttgaattggcctggatgaacaatatgattgactttgccttcccatatctcctgcagtttatccgtgagtacaccggcaaagttgatgaactggtgaaggataaaattgaagcgcagaaccaagtgaaggctaaagagcaagaagaaaaggatgtagttgctcaacagaacatgtatgctcaattgttgcctcttgctttgcctgcaccaccaatgcctggaatgggaggctttgctcctccccctccaatgggtggactggggatgcccccaatgcctccttatggtatgccacccatgggcagcagtttttgaagagtatagcatgaactcggtccctatgaagagcaatgtaggaacttccaagttttgcgtagaacaatatcttgtgtgatttggatgcagcattctttctttgcttcggttggcggtgggagatcccaagttaaaataatgtgaagtttttcggtttagattgtgtcataatagtcttgtaagtttattgttttttctgtgttgtagtcgaggcattttttgggctgctgattctagctaaccgataaatttctgtattctaccatttttcttgtaataaatgagttagtcctaggtagaccaaacaaaaaatgaattacatctagtatatataagaaattttccgactttaacagccttaaaaaaaaaaaaaaggaccattcataaattgaaggggggtgtagtatatataagaaattttccgactataaaaacacananagggggggagagggggggaaaaatatattaa

SEQ ID NO: 74600 - DNA, 879 bp, Glycine max
  Clone ID: PAT_MRT3847_38378C.1
cttctaaccagtacacttacatggagcccccagggcctccaccacctggcagaatgacttcttcagaatggcttcgttggtacagagaaaattacaaacctgaaaggactaacaataacatgcaacccactcatttgaatactcctggtcctggaaatcatgtcaacttcctctaccatgatacttacaggtttggtcaatttgatacatggaacaacaacccccctttgtcttctaaccagtacacttacatggagcccccagggcctccaccagtgcagccaggttttttgtctgcttttggtgagcacaaaggcagtgtctacaacaattttcaaagaccaagcccttatgggtgtggtgtagtgacagacctgagaaatgagccacagtctctactagagtgcctgaaggagaaagagtggagactccagtcagatcctaatgtcagagggcctacattcatgggaaattagaagttagaacatgtatctgaaacttttgtttcagagttctacacctttttgtcattttgtgcactttggttccataccaagcatcaaaataggaaagatgtgtgcatttatgcatagagatgtttcggtcatttcttgaatgaattgaggaatttcaaagaaagtgggtgaagtatcctccattccagtttttatatcatggaaatctacacttcttttcttaatcatctgttctaggatatgcatgtaaaatatgtatagttagaggaggaaatcatcgttcttagaagtggacacatatttctgaaacatgttactagccatgtttgctgatatatatgtggttatctaaaatgagatataaattataaaggcatatatgatgccagaaatatggttgagt

SEQ ID NO: 74601 - DNA, 457 bp, Glycine max
  Clone ID: PAT_MRT3847_38379C.1
aaattatgctttttttttttttgcaaaaaaaagtcccaatatagggagaaaaaacattttgttaaaaaaaatgacccgagggaaaaaaaggaaaaggtactttcttttttggggaaaaaaaaaaaaaggggttaaaactttcaaaaaggggtgcaaaggggggtggaaaccaaaaagtaaaaagttagggtggacgttgccccaaagtttaaaaaaaaagtggttttgtggacaaaaaaaaaaacaggcactgtaaggggagggggaggcctatttggagaaaaaaaaaaggatttttcaaagaaaaagaacttaccgcccggagggccctaaaaggaaacccgtaaaaaaatacccaaaatttttgagaagcgtggggcgacccggccaccccgccccaaaaaggggaggggtcccaggtatccctatttttattaaaacgggggcccccccaaaa

SEQ ID NO: 74602 - DNA, 247 bp, Glycine max
  Clone ID: PAT_MRT3847_3837C.1
gtcaaattggtggtgcaggttctgatgattctgtccatgagttactacctgggactaaacatcatagccaggttcagaaaattatgcctgattctgctggcattgcttctgatgaaaagaaagaaagaagttttcttagaccgaaaggtgatacaaataatgttgtgataaaacaagtagagaggaaacgtagagctgtttgcctttttgatgatgacgacgacgacaaacctaaaactcctgttca

SEQ ID NO: 74603 - DNA, 303 bp, Glycine max
  Clone ID: PAT_MRT3847_38380C.1
atcaaaacaacaaaattttctttctcaaaaaaccttatacaaaatgcggctcggttctttatcacaaaaatcttcaaaattaactaccactcatttaaaccaccatctccttaaattgaacaaaaaataatttacttggtcggcccccacttttttaatcaccccccctgcaattatttttccaaccccaccctgactgtccccccattttccttattaggggccatttaaaaccttgcctaaacacagtgctaacgcctcccctcacaaaaaagttcaacccttcacaattccacaaaaatt

SEQ ID NO: 74604 - DNA, 347 bp, Glycine max
  Clone ID: PAT_MRT3847_38381C.1
gtgcagcttcattgagaaatcaggggaaaatatgctgtttcagaaactgcagaagctgctggccgcaagcgtgctcaagcgtggcacaggaaaggcgtggcattgaccccaatgaaatcaacgaaacctccatggccaattctacactaaacattaagaagtctgttaacgatgggtttatcatcaggaatccaaccaagattgactcacgctcgcgtgctcatacgatgaaggaggcaaagaagaagggccaacactctggttatggttcgagaaagggtacaagggaagcgagcattcccaccataatactgtggatgagaacgatgcatctgctcatgcggttg

SEQ ID NO: 74605 - DNA, 289 bp, Glycine max
  unsure (1)..(289): unsure at all n locations
  Clone ID: PAT_MRT3847_38382C.1
nnnccgttcgnncgtnagctcngtgttcggntngaggtcctnanttnggnntccttgtngtnnngannngggtnngtgcgtgccntntcctggncgngngtgtnngntntcgacgatgtcnggtntnnncgtntgnatgtgtttctggggnctgntngttangcgttttagnntnagntgtgganatgttcttgtngngnncnttagngggttgtcgcggnttngnnncntgtnttgcattgtngagnctggnnngnnttttttnntttnanggggagggtggggggcg

SEQ ID NO: 74606 - DNA, 408 bp, Glycine max
  Clone ID: PAT_MRT3847_38383C.1
accaaacgtcgtggtatattctctacaatacttaatcaaaacggtagacacgaggtggagataactcaatcacagacacaactaatctgctgattctagcgctaaacatagcacgctgtacttacgttaagaaaggctacagatctacgattcagttgataactgattgaacgggagtaaaccatgaacatagtaacctgaataattactcaatagaggtgcaatctactagacgtatttgagtatccaatctctatgaactgtgagagaacagctatggacagactctcgaacacattcatgccagcgtcattgacttcccctgctatcactggcaccactaacactaccatatcaacactgaactctgagccatcatcctcttcatccaatcaggatcaacagcta

SEQ ID NO: 74607 - DNA, 382 bp, Glycine max
  unsure (1)..(382): unsure at all n locations
  Clone ID: PAT_MRT3847_38384C.1
tgatcggtcgagcgttccctcaattgcactgctttcttcactcgattgtccccaccaaattctatcatatcatcatctgtttctacctgtgatggtctattggtcaaccctaacagtaagaacacaatgggggtgttgggtccaagtttacagcatggggatgtttatgaggggaatttcaaaaagggaaggttggggaggggttatactatcacatgcatgggagttgagggagagggtgatggaaagatgatggtatggngtggacatggctgaggagcggttagaggcatataagaagttgagctggaagggattatagtttactgggggatggttgggggagggctaaggacaggcatggttggagtcacactgcatg

SEQ ID NO: 74608 - DNA, 259 bp, Glycine max
  Clone ID: PAT_MRT3847_38385C.1
tcgacccacgctccgctcttttttttctctccctcaaaaagggggcgcggggtggcctctcttttctaatttttggtttagattcacccaaaacccgacaacccacacatgggtgaagtacatgcaagaagtccaaaatcgccggggacgtcgccgacgtgatcatggaggctccaccgacacactaccacctcggcgggggggcgggcgccaaaactctaaccctccaaaatacctgcccggactcctgacaactacc

SEQ ID NO: 74609 - DNA, 235 bp, Glycine max
  Clone ID: PAT_MRT3847_38386C.1
gaagcttaaaaaaatctttcacaatacaaaaaatggcattatggggggagggaacaatttattttccttcgagattatcctagatacaaatgaggcttaatctgatacaggccaccttaaaggtgacctgcaaaagggatgtcaagaccccataaaatttattctaaaaaccagaaattaaactgataaactttgctatgggcacaatgaaacaaaagctttttacttatgagaa

SEQ ID NO: 74610 - DNA, 254 bp, Glycine max
  Clone ID: PAT_MRT3847_38387C.1
cttgatccccactctgttccatcagaagaactttccacttggtttgtatacattgtgcaacggctaaatcctggtattcacaacttggctgccccaacacttcataactcaagttttgcgggttcttgctctccgatattgcaacgaaattcttaatgggatgcacgttctttcttaaggaagtattttggctgaaattattattgcatgggttatcataattcaaaaccagatttgatgataaatcttgagtg

SEQ ID NO: 74611 - DNA, 366 bp, Glycine max
  Clone ID: PAT_MRT3847_38388C.1
attttgattctatcctatgcccttttccatccaaaccaacctcaagacgatgataaggcacatccaccaggtgctaagcccctcccaattattggtaaccttcacatgcttggaaaactcccacatcgttcccttcaagccctagccaaaaaatatggacccataatgtccatcaagttaggtcaagtcccaaccattgtagtttcctcacctgaaactgctgagctattccttaagacccacgacactgtctttgctagcaggccaaaaactcaagcatcggaatacatgtcttatggcaccaagggtcttgtgttttctgagtatggaccctattggcgcaacatgagaaagttctgcaccaca

SEQ ID NO: 74612 - DNA, 762 bp, Glycine max
  unsure (1)..(762): unsure at all n locations
  Clone ID: PAT_MRT3847_38389C.1
gaagggtagcagacgtttccacagccgccgacccgcagcttgagtgtcctgcaccacctttcgtggaaatctgagccggctgtacagctttcctccttgttcctgcagccatgtccacgaacgagaatgctaacttaccagctgcccgacttaacaggttcaagaacaaggggaaggacagcacagaaatgcgtcgccgccgaatagaagttaatgtggaactcaggaaagctaaaaaagatgagcagatgctgaaaagaagaaacgtcagctcctttcctgatgatgctacttctccgctacaggaaaaccggaacaaccagggtactgtaaattggtctgttgaggacattgttaaaggcataaacagtaacaatttggaaagccagctccaagctactcaagctgctcggaaattgctttctagagagaaacagcctcctatagacaacatcatccgggctggtttgatcccaaaatttgtgtccttcttgggcaaaactgattgtagtcctattcagtttgagtctgcttgggcactcaccaacattgcttctggaacatctgaacagaccaaagctgtggtggatggaggtgctatcccagcgtttatttctctcttggcatctnctcatgctcacatcagcgagcaagctgtttgggctcttggaacattgcaggtgatggttcagctttccgagacttagttatcaaacacggtgcgattgacccactgttggcacttcttgcagttcccgatct

SEQ ID NO: 74613 - DNA, 280 bp, Glycine max
  unsure (1)..(280): unsure at all n locations
  Clone ID: PAT_MRT3847_3838C.1
gacccacgcggccgcagcagaaagcccaggaagacangcgggaggggagaaagagcctagngccnagaccgcaagcgcaagggaaagagcccangagcaggggcgggaagggggaaaggangacgagcgngaggaggggcnacacncaaggaccaaacgaggcagaggnngcggggggccaaggagggaggagacggggccgggccggccncaggcagacagggagccgaagacaaggcccgacgngcgggaacggggggggaggaacgggccagagaag

SEQ ID NO: 74614 - DNA, 537 bp, Glycine max
  Clone ID: PAT_MRT3847_38390C.1
caaaccgagtaaggggcccgggacggaaaaaccccccccgcataggcgggagggcctttttgggttggttttaaatcccctcccctgggaaggggcaaaaaaggcggagggaaacccctaggataccccgggccgacaaaaatcgggcaaaaaaacatggactttaacctcccaaaacaggggaaaatttccccgggttttcattcaacccagcatcattcaaaggtccacccatttggggttaacttccccctttacccggaaaaggggggggttaattcttctcttcaaacaggctggaacagctttcttttaaaaatccaaattcaatttccaaatcttaattcccatgggcttcggaaccttaaggctggcagccttgaaaaatggggggggattgggaccccaaattttccccaggggacaaacccccggattggttatcggaatccaatatgggcatttcggcaataggggggtctgggggggggggaaaaattttgtaaaggcctccccaaaaagtttctaggggaggga

SEQ ID NO: 74615 - DNA, 669 bp, Glycine max
  Clone ID: PAT_MRT3847_38391C.1
ccacgcgtccgcaatggcgtccgcacaactcttacatgacccaaatttccctctcttcaaaacccctcgcaaaaccccttcttcacccgccgtaaccaccaccgccactaacaaacccccttcaaccgccgcaaaccccacctccaacggcgagcgcatcgaagaccaccccgacgaaaccgccaccgacaccgatgccgacgccgagacgttcggcgaccttgggctcgcggaatgggcggtgaagacgtgccgggagctcgggatgcggaggccgcggggcgtgcagcggcggtgcatcccgcgcgtgctggagggccggcacgtgcttggcgtcgatgagaccgggagcgggaagacggcggccttcgcgctcccgatcctgcaccgcctcgctgagcacccgttcggcgtcttcgccctcgtcgtgacccccacgcgcgagctcgccttccagctcgccgagcagttccgcgccctcggctccgccgtgcacctccgcatcacggtggtcgtcgggggcatggacatgctcaggcaggccaaggagctcgccgcgaggccgcaccttgtcatcgccaccccggggaggatccacgccctgctccgcaataaccctgatattcctcccgcattctcctcgccgcgattccttgtcttggatgaagc

SEQ ID NO: 74616 - DNA, 308 bp, Glycine max
  Clone ID: PAT_MRT3847_38392C.1
gacgcacacgcatacgcacgtgtgagagacgacttcagtacgtgatagtgcatgatgctacaccgtggcagagcgggtctgtctaaattcttgattagactcattagcacttcttcaacacacacattctaaaagggatgctctcacttctaactaaaacccatcaaatgatacattatcaacacaacaggatgatcctttctagtgaaagagctagccctgttaaaatgctcattacactcctactttgactcatgaatgccaccttgcgagtacactacttcacttttccaaagttattccatact

SEQ ID NO: 74617 - DNA, 291 bp, Glycine max
  unsure (1)..(291): unsure at all n locations
  Clone ID: PAT_MRT3847_38393C.1
agaggaccanggnttgagtagcagcttgnnncctttcattgttgtggaggaggtgtttgntcagaaatctgacacttgagctctctagnntaagtgaaactgtccagtattgaaggactgnaanatagagccaaaaatcaagcnanggatntatcatgaatgggtggctcttcacagaaccagttgaattaggatggtcaatgactnaggaggacnttcnatgaacggtcagtgctatggttccaggacngatggntnanagtagaatgtgactcgctgtgantgtaanna

SEQ ID NO: 74618 - DNA, 137 bp, Glycine max
  unsure (1)..(137): unsure at all n locations
  Clone ID: PAT_MRT3847_38394C.1
gaatactacangcaatgatnccaaacacagtggagaatgtacgggccgtaaggccttgcctacatggttcaatagaccagagggtgataaccttggaaacctctggccgttgtaagccccaccaggcgtggggggct

SEQ ID NO: 74619 - DNA, 1011 bp, Glycine max
  Clone ID: PAT_MRT3847_38395C.1
attttcagttcagtgttggctcacttcatattaaaagagaaattgcacatttttggcgtgcttgggtgtgctctgtgtgtggtgggatctacgtctattgttttgcatgcaccgaaagagaaagacattcattctgtcaaggaagtgtgggaacttgctacaggaccaggttttattgtctacatttgcgctatagtgatattagtttgcgtccttcatttccgttttgtgcgaagccatgggcagactcatatgatggtgtatctcggaatatgttctcccaccggctccattacggttatgggtgtcaaagcagtgggaatcgctttgaagcttacatttgaagggacgaatcaatttgtttactttgagacctggatatttacagtggttgtgataggatgttgccttttgcagattaactacttgaacaaggctttggacgcctttagcactgctgtggtgtcaccagtttactacgtgatgttcacatcatttacaatcgtggccagcattatcacgtttaaggaatgggcgaagcaggattcaacgcagattgctactgagttgtgtggttttgtgacaatattatctgggaccttcctccttcacagaactaaggatatgggaaataaaccctccgacgcctccgttcattcaagtcctgaagataacaatagtaatactaagacacctctaagcaaccaaatttgaatctatatagcttctctccacaagcattattttgcttcttaacaagcatgtaatttcacacattttttttataaaaaaatcaaagatatgcgatgaaaatatggaagattaaaggaaacatgcctatatatatgtggttttgcccaataattgggtactcccccatgcccctgcacaaatcacagttgcatatcatgtaaatcgccggatgatatgtcatccccattttgtactgtagttaatagaagagaccccataaatggagtatacgttggtccttttttttaaaaaaagaaa

SEQ ID NO: 74620 - DNA, 362 bp, Glycine max
  Clone ID: PAT_MRT3847_38396C.1
ggagagagagagagagagagagagagagagagagagagagagagagagagagagagagagagagagagagagagagagagagagagagaggagagactagtccagttttttttttttttttttgaaagcattgcaggggtcatgacaattcgtgcattcagaaagcaaaaaaagttttgtgaagaaaacctcaaacgggtaaatgctaatttgcggatggatttccacaactatagttctacttagtgggtgggatttcgcatagaattgtttggaagctttgtcttttgcatttctgccatgttcatgatcatcttccccagcagtatcataaagccagtttttaggcaggtggaaccttc

SEQ ID NO: 74621 - DNA, 1199 bp, Glycine max
  unsure (1)..(1199): unsure at all n locations
  Clone ID: PAT_MRT3847_38397C.1
catattcagtggacatgtggttgcattattgcatatttgctataagcacatatggggatccaaacactgttcgtaggctttttgaacgaggattagcttatgttggaacagattatctttcttttcccctctgggataaatacattgaatatgagtacatgcagcaggactgggcctgccttgctgtgatctacaccagaatattagagaatccaaatcaacaattagatcggtatttcagcagcttcaaagagttagctggaaatcgtcctttatcagagttacgaactgctgatgaagctgctgcagtggcaggagttgcttcagaggctactggccaagctactgagggagaagttcatcctgatggtgcagagcgttctcctaaatctgtaagtgctggcttaacagaagcagaagagttggagaagtatatcgccattagagaagagatgtataagaaagctaaagagttcgattctaagatcattggttttgaaacagctatcaggaggccctactttcatgtacggcccctcaatgttggagagcttgagaattggcataactatttggactttatagaaagggaaggggacttgagcaagattgtcaagttgtatgagagatgtgtcattgcatgcgccaattatccggagtattggatacgctatgttttgtgtatggaagccagcggaagcatggatcttgcaaataatgttcttgctcgagcaacccaagtctttgttaagagacaaccagagatacatctgtttttgtgctcggttcaaggagcagactggagatatagatggtgctagagctgcgtatcaacttgtgcatactgaaacttctactgctcttcttgaagcaattatcaaacatgccaatatgggataccgactggaaaaaatggaggatgccttctctttgtatgaacaggccattgccattgagaaagggaaagaacattcacaaacattgccgatgttgtttgctcaatattctcgatttgtatatttggcttctgggaatgcagagaaggcaaggcagattctagttgaggggcttgagaatgttttgttgtcaaagccactacttgaggctatattgcattntgaggctattcaacccttgccanagcgcgttgatattgactttctggagtcatgggttgtcaaattcataatgcctaactc

SEQ ID NO: 74622 - DNA, 416 bp, Glycine max
  Clone ID: PAT_MRT3847_38398C.1
aaacttaaaatcgacaaaaaatatattcaatcacgaacggtaaaaatacatcatacaaataaaaaaattggaaagtgacatctacactaaatccacacaaacttaaatcatacgaggacaaaaataataatcataataacgatgatgataaaaatgagaaaagctggaacctttagactagagctataaccctctggttaggctctaagacatacttaataagagaatccataatagacaacagttttggaaattccttattcaatttggcaacgataagctcattgatgatcctaggagcatcaatcaccttgacctgttcctcgagagtgaaaatgttccaggagaagtacgggtaaacataatatctgaacatatacaagatttcattgagactaaacactcctgggttagta

SEQ ID NO: 74623 - DNA, 265 bp, Glycine max
  Clone ID: PAT_MRT3847_38399C.1
acatctgcagagcctgcttggttttaccgtcatgttacatgccaaacctctgcctacatagttggtgttgctgggtggggaactggtctcaaactcggaagtgactcggttggtattaagtataacacccatagagcattgggatcaccctcttctgacttggacaccttcaggtttttgctctgctcttgaggcccaacaaagaccaaaaatcagaatctactggaacatttaccataagccgttggatatcccacataatcat

SEQ ID NO: 74624 - DNA, 380 bp, Glycine max
  Clone ID: PAT_MRT3847_3839C.1
ccacacccgtccggaatatggaggggttaaaattaattgcaaagcccctgtttgggaggaccttgaaagggaccgatgcttttgaggatcctcttaatgttgggggggttcgggatcttgttttttcctttgccaaaaaggagggccttttttccaatcccaattcattggaaattgttgggcttgttgggtttttccatgacttagttgcttccaaatccctaagggcccaatttggggaaaaaattggggggaattttcttgatgaaaaggggttttagggggccaccaggttcaaaattttgaagatcttcaaaggattggttttttgggaggaagtgttagggaaggggaaatttgttaggtttttccagaatttt

SEQ ID NO: 74625 - DNA, 667 bp, Glycine max
  unsure (1)..(667): unsure at all n locations
  Clone ID: PAT_MRT3847_383C.1
taagtctttttgcatctctagcttctacgaaacatatcaagtaactaaaatttgagaaaaatttgcttttactggtttgacttctcgcattattgcacattagacatcatatgtccgtttggtccaatctatatcctcctctcctctaatttatcgtatgtgctatcttgttaccttaataagtaataacatttgctgtcttttctttttcagtggcaagagactttgaggaacaaggcttactgtgagaagccttagagttttccaacgaagacctatgtatatgtactgatcgaagccagttcagaatttaggaattaatgtgttctagtccattgcatttattaagcagagttcatcgtggtcctgtgtgggaagcttagcgttgtcatgggatgggtcataaatgaaatatcctttcatcaatgacatgtgctataggcgattctgatggtggattttgttggggcttctttttcattaactccagctttaatataagcacatgttgcatgtggattccgggaattttgttgtttgatggtttatgtaattntatgtgcttcatgattttttctctaggtgatgtacggcatgtaaatggtataagttttgtcagcaatataaattttcttttatcagatataaatataaacttttaacattc

SEQ ID NO: 74626 - DNA, 389 bp, Glycine max
  Clone ID: PAT_MRT3847_38400C.1
accactcgttcgttcacactgtcattgatacgatcactcataggtgcgggtatccaatactgcaactgttgcaacgctctaggctctttgctatactaacgagcaggagctatactcactatgacagtggccttcaagcgccaagcaatcgcaccccttataggtgttgacactacagatgctatgtctgatattaagactgcaattattgctttcaataagactcatgaagtatggaactctaaagctcgcatgacacaaatcattggagctgaaactcctaggggataatctgcaatggcataataaactggcatcattaatgatgcaggcataggccttaatattcggctatgaacattacaaacggatatgcttgtaaatggtga

SEQ ID NO: 74627 - DNA, 208 bp, Glycine max
  Clone ID: PAT_MRT3847_38401C.1
cgatctatttatgaggaggtacaccagtgacgacaatcatagcttttcgaagatgctagcaaaagtgtattacatgaggaaagaaagggctgggtctttgaatgaggataggcaggggatcgagggcaggatgagggataggaatactggtggacatagaccctgatctcagcctgctggttcccttagctggtggtactacccatgc

SEQ ID NO: 74628 - DNA, 467 bp, Glycine max
  Clone ID: PAT_MRT3847_38402C.1
ctctttctccctcacaattccatttaattcgctgcgatcacatattccccgattgctgcatcttttcaatcttccttttttactttacgaaattcaaaaccacctcttcgattcgttttccaatttggatcgagaaacaataagatatacaccgattatgtattttccccaaataataggaaaagaagaatagatacaaatattagcggtgttgatcgatttgcaaatctgagagtaaatccttgtgctgcgattcttgtttttttgtttatgtcagatggcgtttcaggaaaagcaaaacaggtttaagaggcagccagagaagagtgcccctgcttcacaaaatggaagaacttcagctcctattaaattctctaacgataccgaaaggctccagcatgttaatagcatacgcaaagcccctgttggggctcacatgaagcgtgttattgatctgctatttgaga

SEQ ID NO: 74629 - DNA, 232 bp, Glycine max
  unsure (1)..(232): unsure at all n locations
  Clone ID: PAT_MRT3847_38403C.1
ggcgcanagaagggncgaaagggcngaaagagaacgcgggganaggcggaacgaaaccgggggggaccggaaacaaaagaacaangaaccggncaaagcaaaggcaananaacaagaggaccacggaaacaaaaaaaaagaagggaagagaaggcgaaangagagacangnngngncaccacagagaaaacgcgagacgggggcaaagaaagaaagcgagacancgcagcaa

SEQ ID NO: 74630 - DNA, 1162 bp, Glycine max
  Clone ID: PAT_MRT3847_38404C.1
aacactctctctcttaacttgttcactccacgctaccacaaaaatttaattcacccaaaccctctctctctctctctatatatatatatataaattcggattggattgaaacaagaagaacatgatgatgaaacagggtgcgagtgagaacgaggttgctgaaatcctccttagcctcccaagtcttattcgggaatttgagtgtggctgtggaatcctaccacctccttcgtggggttgcaagagaaagagatctacgattgccgttgatcctaaaacactacaaaaagcagcttcaagtcctgccactcctctctccttctcgctcagtgagtccgatgaaaaccccaccacgctcgtcagtagaagaagaagaagaagaagaagaaacgtttctctcaaaaggaagagagaacactatctcaggataatacaagatttgaccaaagataacgatttgctccgtggggagataaagaatgtgaatggttactgtgacatgaagaaggagtacaatttaaagttgaaggcaaggaaacaagagctaagtcaaggtggtctcgttcacaagcaagcacaacagcaattccaattttcaggcatggcgcatcatccaccgttgatcttgaatcagacggctggatcaggccaaataaaaggcggcgagggagttgttggtcttgctcacgcaacgacgtcgttgggagtggcatccttaagtagcagtaataatgtgggcccagttggaattcccgatctgaacctgccactcgatgagcccatgacaatggagttttgtgatgcgttggatgtgagtttggccaataaggatctgagtaggaccatggcagctcaggcccgccagaatatgcttcaaaaatacaggttcaagaatccaattggaattagtaaaccccgttactcttgtagatgatggtaattatagtacagtattatatttgcatatactttaattcgttcttccttttaagttcttaccttcaattttgtttttagccattgctaatagtacaagttttttcatactactattcgtaaggaaggaattgaatgggtgttactgttcacagaatgtatattttggaatctctctgggagattttgtcggacttttgtttcatgataatgattttaacgtttc

SEQ ID NO: 74631 - DNA, 939 bp, Glycine max
  Clone ID: PAT_MRT3847_38405C.1
attacacttcgcaaagtaaacacgttatactttattagtccattacccgcctctgttctttctttctccattctccactaagaaacggaaattggaacacaactaactatgatgatggctgataatagtgataatacttcactaccgccggaaaaaaccgaaagcacgtcgagcctcgccacgctccactccgacatcatccacgcgcacatcctcacacgcctcgacggcgccacgctggcatccgccgcatccgtatcgtccctcatgcaccgcctctgcacccaagacgatctctggcgcgaaatcagcaccgccacgtggccctcgctccaaaaccccatcgctcgccacgtcatctccgccatccccggcggctaccggtccattttctccgacgccttcccttccctccacaactcctccttccgccgccaccgcccgcctccgccgacgccggagctcatctccgccgtggacatgtactaccagggaaaacccgtgttctcgcgcgtgatacgcacggaaacgcagaagaactggttcttcgcctcgccgctgtggatagacgcgcttcaacacaaagagttaattcctacgacagtgaagtttgcgaggaaggacgaggaatggctgaagcacttggaggagaatctgagcgtgagctggattattgtggaccccacacggaagcgtgcggcgaacgtatcgagccggagggcggtgttggcacagcggcactggctgacgcgggaggtagaggtggtatacgcggcggagatggcgggggagcgggggggcgcgacggagagggtgcagtgcctggtgaaggtcacgtgctgcgggaaagttggaggggagttgcacgtgagggaggtgaatttggtgatggaggacacggaggggaggcgagtgagtgggaaagagagtgtggagatt

SEQ ID NO: 74632 - DNA, 473 bp, Glycine max
  Clone ID: PAT_MRT3847_38406C.1
gggcgactcgccagagctcaacccgctgccgccattgccacgtcacaaattcaaaccatggaccactgaagaagagaataatgataaagatatcatagaaaaggaaaatgaagaagaagaagaagaagaacagtttttttctccaagtggttcttctggtgggaacattaacaaacaacaaaagagttctccttctccttctggtgttgttgcttccagctcacgtgttttccacgtggataaattcggttccagaagcttcacttctcgaaccccttcttacccacgctccaattcactctctttttctcgttccccttctctgaatttcagccccccaagtgttaaatcattgccaccgaacaacaaccctgcttccccttctttctcttcatcctcttcttctccgagggaagaatggcatgttccatctcaggggaaaaattctccagcggccaccgatttacctactc

SEQ ID NO: 74633 - DNA, 460 bp, Glycine max
  Clone ID: PAT_MRT3847_38407C.1
cgaatttcgggtcgctcatctctcttgttgcgcttactctgcctgatctctctcatccttgccttggctcaggcagattcagatactgatttccaaggctatgaagccgaatcgacgatgacgacttggaagactcgttgatccatccagtctctctccgatcacgccccctctccgaccctactaccactccgcagccttcacctttggatgtccccaaattccctcccttcgatttttgggacgacgatgagtacaaaggcgttccctgggagcactcctaccccgaaccttcctgcgatcccaaatgccccgtatacgcctcctccacggaaaccggtgcaagccccaaccgctactggatgcttcttcgtggagatcatctgctgaagctctcttatcaggtactcgatcatttacttgtgcaggaagcgcgagaacgaaaacctcgggctgtact

SEQ ID NO: 74634 - DNA, 699 bp, Glycine max
  Clone ID: PAT_MRT3847_38408C.1
tttcattctagaatataactgagggaagtatttggcccatgcttgctcaagaaagtttaaaggcattaggtggattgggtctgctttctcttggggcaaagtacattctcagaagagtttttgaggttgttgcagatacaaggagctcagaggcttttgttgctctttgcttgctgactgttgcagggacttcactagtcacacagaatttgggatttagtgacacgcttggggcttttttagctggagcaattttagcagagacaaacttcaggacccagattgaagcagacataagaccatttagaggcttgcttcttgggttgttttttctaactacgggaacttcaattgacatgcagctccttttgcgagagtggcccaatgtactttccctcttgggaggtttaattgttataaagacattgatcataactgcaattggtcctcgtgttggacttactttaaaggaaagtgtaagaataggattgcttctatcccaaggaggcgagtttggatttgttgttttctctttagcaaataggcttggggtgcttcctcttgagctcaacaagctgctcataattgtggttgtattgtcaatggcattaaccccatttctgaatgaagctggaagaagggctgctagctttattgaagacaaatttgatgctgagaataaacagaatgcttctgaga

SEQ ID NO: 74635 - DNA, 431 bp, Glycine max
  Clone ID: PAT_MRT3847_38409C.1
ctttggctagtcaaaagatggaaggagaagctactatggctacgagggctaacatgtgcgacacgagcagtctggtccgctaattcgtgacgtgtggtgcgcatactgacttactctgcgcaaagtgcgacgctcgcatacacccctcgctgacccagaagcatcgcaagcgagcgctcaaggccggctaacgcgcagctgcagtgttcctatgcgaggttgacgctgactgggtatgcgcctcctgggacaacgcatccacgcagacacacgctctgcaacggaacaatggtgatcagattgatatgaatgcagcttgctcctggatcgacgtctacgagctcgcatacaatgctgacttggacgacgactactgaaccgcttgatggctcttgctcaaccctgtcacaagcgctaatgtccctaacaac

SEQ ID NO: 74636 - DNA, 528 bp, Glycine max
  Clone ID: PAT_MRT3847_3840C.1
aattcggctcgagctgcgagaagacgacagaagggatcccacccaccatccatcacctccacttgagaataatggtgatcgattaatgacggttaaatatgagttatttttataataaaaatatattaaaatatttatttaaaagttatttttgtattaaatgataaaaattaatatttttcttatttattatttgcagatatgaaaaagaagaaattaaaagaaaaaaaataaaaaaatatccaaaatattataaagtctcaagaaaaatatgattaaaagcaaaacaaattcaaaacatatcatcgctcaacagcttccaaccattattgctttcacttggcagccatggtcgacacccaccttcccacaatcacgtactgcatctacttgtcagcaatagccactaattttgaagcttttggaacacaaaatgtaaaacttatgtaatcaaaattcaaaacgttgacgtcaattgcttcattcttgtgaaccacactcccactcccattcatcacccaaatcatc

SEQ ID NO: 74637 - DNA, 367 bp, Glycine max
  Clone ID: PAT_MRT3847_38410C.1
aaaagggtgattctcctctgccagatatatctcctttcgcacatttttcacctatgcactcatttaacaccatttgagggagtttcatttaaaagcgaggtgggtctctctccaccaaccaccacttgcttcccttcttacatcaccagcttcaacacatcctctaacatctccatacatatgccaaatgcttacttaccatgctgtcaccgactatccccctactgctacaaaccggaagaaaacatccatcttattaacgcctaccgtgacaaattgtcctctctttgcctactccaccctaatgctacccactgtcaagaggtggccgacgccgtcaccgttcattgccccaacgcctccccca

SEQ ID NO: 74638 - DNA, 264 bp, Glycine max
  Clone ID: PAT_MRT3847_38411C.1
acataaaaactattgtgtgaaataactgaaagttatttaaaagttcagggagaacagtttgtatacattaaacaacaacccttccgtttttctcttaggaaaatatgatcttaagaccctaaactcaaatttgaaatcttcactttcggattacacttacgtaacaatgtattgatataccattcatcatatattactctatccattcttattaatattattttaggtgcgttaagacacattctaagtatgcaatgttcgctc

SEQ ID NO: 74639 - DNA, 209 bp, Glycine max
  Clone ID: PAT_MRT3847_38412C.1
gtcactcgctttgccaatctttttttctttggcagctgtctctcgctttccgacttttgaaacccgccttattcttaattataaatctctgaaagatgcgtttcacagacgtcttttctgtcagtgtgggggcgccttttggggcagctcacgggggggtcccacgagcacctaaaatttttggcctacccacagacttgctcgatgac

SEQ ID NO: 74640 - DNA, 327 bp, Glycine max
  Clone ID: PAT_MRT3847_38413C.1
acagtgggtggctctcctcactagttgggacattgctgctaaggacttaaacttgtcatagatgtttacccaggactttatgtcctcttaagctcccatcaatagctttgcgtttagcagtgtcaccggggagacaacctagagctccctccaaaagcagagatgagcgcttggtcataactgactggagatgagatgtttagctggggagaccacatgttgggcatccaaggccagccggaaatgacctaggaccttgtcttgtgctttattgaccggattattgagggaattttgttccaccaagaatatgctgggggatgcaaa

SEQ ID NO: 74641 - DNA, 265 bp, Glycine max
  Clone ID: PAT_MRT3847_38414C.1
aattctggtgaatgcgtagagaaggtgaatatagagattagcgtgaaaaatgatgggtatgttcagcagctaccatagtgtcgccgccggaggagatcgttgccgccggcggccgtacgaccgatcgccgaagatgacggcggcggcgctacggaaatggatcgaggcgtaggacccctccgccgtgtcgctgcaggtcggagaggatctccagctcgcttatacacaccagaacgcgtcgccggttcagcacagatcctttgct

SEQ ID NO: 74642 - DNA, 496 bp, Glycine max
  Clone ID: PAT_MRT3847_38415C.1
ggctcgagggaagaagaaggagcagatgggtaatccacggaaaccgagtaccgccgacgagcttcacacggcggcaaggtccggtgatctcatcgccgttaactcaattttggcttcaaatcctttggccgttaattccagagataagcattccagaacaccgtatcctgctcatttcctcacttcttttcttcctctattaattaattcaattttattttttatgtaaactcaacgcaatagaaaccctaacaattaaattctttcaattagtcgttgttgttgttctagataacaaaacacagtagctggaattgaaaattacgttttgctggttattataatgatatgattcattgcagcatctgtgtctttcgctctttttgatctgtgcattgcatattctacctatcttgtttgaaccattcattttatgaaatcactacatcataatcacccctattagagaaggcttacgtgttccttagcacagaga

SEQ ID NO: 74643 - DNA, 1311 bp, Glycine max
  Clone ID: PAT_MRT3847_38416C.1
cccattcgttcgcccacgttgacgtatttgtgtacaagagatgcagaaacatagcttgccaaaaccaacttcctgttgaagattgtacctgtgagacatgcactaatggcaatggtttctgcaatctttgcatgtgtgttatctgcagcaagtttgactttgaagtaaatacatgccgctggattggatgtgatttgtgttctcattggactcacacagactgtgccatacgtgagcaacttatttgtatgggcccttctgcaaagaatggagcagggccaagtgaaatggttttcaggtgtcaagcatgcaacaggacttcagaacttctgggttgggttaaagatgtcttacagcattgtgcaccatcatgggatggagaggccttgatgagggaacttgattttgtcagtaggatctttcatggtagttacgacccacgagggaggaaactttattggaagtgtgatgatctcaacgaaaaattgacaagtgggaaagggggaatctagcctcctttccatttttcttctcctctctctggtaaccttcctctcctttttaatccaaatcatcgttcttattttttcaaggatatttttgctgtgattgcgtgaatttcgatcaacctttgaagcatcctttgctgcaacttttaggtctcaattttaaggtcaactttctgtgccgggtcgttcaacttgcatctttatcatttgatctattgtttgagttgacgagtgaacttgtgtgacatcatagtttctgtgagagattgcatatctctcaagcttctttatttgataagaagcttgttgcataatagaatcaagagtgaaatcactggtattaaactttctaatttttcttctttcccgttatcactgatggattttcctgtgattattgtgtagattatgataatatgttttttcgaatgtattttgttttttggcatcagtttgtggaaaaattagggcctgattgcatactaaatagtttgataattattctctccagtctctagtctctagtacttgctttgtcttttgaaatgtttctgtgttttggaggtttatgtggagtgggggcagaggatgaaaggctgtaagcctgcaacttttagcagattatgaattttctcaagttcctcgctcatttgtaacattttagtatttaactatttgtagcataacaaagaatatgtgataatcatgtgcagtggtatataatcacctttgctagttacagacaaagtaaatattttttgggtaggtcaccccgctctaccataaaacagaagcctttgtg

SEQ ID NO: 74644 - DNA, 220 bp, Glycine max
  unsure (1)..(220): unsure at all n locations
  Clone ID: PAT_MRT3847_38417C.1
tcaantgtagcgnncanccgatcgagcnttctgatcgagccccngctagctnttcacaaatgncccctgcgggttgcatttctccatngtttncctagcggttttggctctatgnnattctgnngnttacttttcggctnntttncgctntgctggttccaaatggncctgagtcactggggnagnntgagtcccatcttatnccgcctgctcacatggg

SEQ ID NO: 74645 - DNA, 253 bp, Glycine max
  unsure (1)..(253): unsure at all n locations
  Clone ID: PAT_MRT3847_38418C.1
atttctcctaagaaggagttntcttcaatcacttctctgtctgtgtcgaatcctaanccatctgatgtggaagcagcgggaaataagaaaaaacggatatttgatatgaacttgccttgtgatgctgtgtcgttgagttggacaaagaagcattcactgaaactgctgttggtaagacaaggtctcctacaacagaagnagnnccctagaaatcaaatngatcnganttgaattaaggnntggggccnaaggt

SEQ ID NO: 74646 - DNA, 245 bp, Glycine max
  unsure (1)..(245): unsure at all n locations
  Clone ID: PAT_MRT3847_38419C.1
cttccaactccatttacgatttcactgtcaaggttcgtttttnacnctcatacccaactgttgtttctctctaattacttgaaaagattgtngcttgctcatgcccaactgtgtttgcactcgaattgtttgatgagtgtgtgaagataatctaagaagtatcagggtacactatgatgacaaaattatatttagtaggntctgattttatatttnttgtatttcaactttnatggagatcaatg

SEQ ID NO: 74647 - DNA, 492 bp, Glycine max
  Clone ID: PAT_MRT3847_3841C.1
aaatcttcctatggttttaattaaggtcaccaaaaaatggattcagcttccagtgttgctaaatatcaaacatgaaggccacaacccacaacaaaagccagcaagtctgggttgaaagtggcattcctgatttgcacactaatgaagtccatctatgaaatttgaagacaacgtttattgctaagaattaagtattgggaattaactattgaggcaagcttggttatatatgttgagaggtccattaactgaaccatgacccaatactaaccaacaagcgaaaataaatacttcttgttactacttattaaatgacaaaaatactaatggggtacatttataaattagggagagtgagtgtatttagcaattgccaaatggctaattaggttcaagttatggacccaaaatttaccaattctaagtttctaacccaacctggttttagatcaaaatcaaataaatccatgtttagagtttaaaaaaaaaaaa

SEQ ID NO: 74648 - DNA, 1607 bp, Glycine max
  Clone ID: PAT_MRT3847_38420C.1
attgggtaccgggctcgaggtcgacggtatcgatttcggctcgagctcaaacaagaagaggatcaggatctggacgaaggtgcatggaatattgcaatggcaggtggtacatgccttggtttagttgcccgtactgttggagatgatattgtgccgctggtaatgcccttcattgaggagaatatcacaaaaccagattggaggcaaagggaggcagcctcttatgcttttggatctatcttggaggggccttcacctgacaaattagctcctcttgttaaccatgccttaccatttatgcttagtgctttagtgaaggacccaaacaaccatgtgaaagacaccactgcttggactttgggacgaatgttcgaatttcttcacagttcaattgttggtacaccaatcattaatgagggaaattgccaacagattattacagttctccttcaaagcatgaaggatgttcccaatgttgctgagaaggcctgtggtgctctgtattttcttgcccagggttatgaggatgttggaccaacatctccgctaactcccttttttcaggaaattgttcaatcccttctaactgttacccacagagaggatgctacagaatcacgattgagaactgcggcatatgaaacattgaatgaagtagtaaggtgttcaacagatgaaacagctactttggtggtacaactagtttcttgcatcatgatggagctgcacaaatgtctggaagtaacacaaaatattggctcttaattaaaaaaaaaaaaagtttgttatgcttggaaagctctcagagacagagtgataacacatccaagctaaaggtatccttgtacagtacgaatattagcatatataacttatagcttagccctggtgaaaaactgacgggctaaaaagtaccaatgactctaaaatacaataaaatcaatagcttaaaatgaaaatatggcagatgtaaatcacttcactttatggctttctcttaatttttctttgagcctttaagtctatcacaattacagagatgttatcttggcttcccctgtggatggcaagcttagttagatactctgcggcggactgagctgcaggatcagctccttcactgcgtcctgttgggccattgtcaccaaacttcttgtgccaaagaaggattcgcttatttgcaacctcacatgcttcttcatttgtcattacatcccataaaccatcacttgctagaatgagacactcatcgtttttctctcgacgcacaatattgacttcgggttctggaattacccatggtttcaggtatctatcacctatggaccttgacattgccaagacaccaagaactcgatatcctttccaatgtatgactcttcctcccgcagcttctatcctagcccactcgtcctctctatttggtttgtggtcagaagacaatggcatagcttcttttccacggtataagacagttcttgaatctccacagtttgcaactatgatgtgggtttggcttaaaatggcaaccactgcagtggagccagcagtctcaggagcaacagttttaatattagactcagacccaccactgttgtttcccctca

SEQ ID NO: 74649 - DNA, 393 bp, Glycine max
  Clone ID: PAT_MRT3847_38421C.1
ggcggggaaagatgaaaactcgccaagagttgattgattcttgcacaatcctcatatggactgcttcagccctccatgcagctgttaattttggacagtatccatatggaggttacatccttaaccgcccaactcttagcaggcgattcatgccttagaaaggatcccctgagtatgatgagcttgctaagaaccctcagaaggtgtatttgaagacaattacagggaagagtatcaatatttattttctcacaactttttttcgtaacttagacctatgagaatcaaacaccttttttattagttttatttccaagttttgtatttaactcattgcctagtaagcaaaaagtgtgtaaattgccaaagattgaataagtcccttgcaaaaac

SEQ ID NO: 74650 - DNA, 190 bp, Glycine max
  Clone ID: PAT_MRT3847_38422C.1
agccctttcataaaatgttggtgcagctcattactgccaccaaggctgagggacttttgaaaggacacgttacacccctacaaatttaagaccctaaaacaccctcctatcctttcagctgattaatattccccccacttatttaagaaatgcctctttttttttgcccctcccgccacattaaacattt

SEQ ID NO: 74651 - DNA, 301 bp, Glycine max
  unsure (1)..(301): unsure at all n locations
  Clone ID: PAT_MRT3847_38423C.1
tgtttctgtttgtgctggnttcncngttttgagattcncatctgtntgttanggactaatcctgcagnnctngnagngcgtttgatctagataccatnaacctctgtctcgtcagatntccttcttccgttcantaaaccngnncttcgtccgatcnggtntatttnccnaatccanaatggctacgatnacaagcttgatcggnctcancaataagatncaacgagcctgcacctngttgggcgnacacggtggcgaggggttgtcgcttgnggaggctcttccntccgtcgccgtcgtc

SEQ ID NO: 74652 - DNA, 490 bp, Glycine max
  Clone ID: PAT_MRT3847_38424C.1
ctcaaatcaattggaattatcgtgctccctcagcactataggctattgcctgcctactttaattgtaggaaactatggccttctgattaccaccgccttagctcccaatcctgactactacaggaaattgcttcttgatactagcaccagacaaagatacccttctctgttatccttgaaggtgcttgaagatcaataatgatcattacatgatgactgaacatatgcaagcctacacactatgcacagtttgtatacattgaactgctatggaatgggttgctggaacagaaaggactatgccggctcaaatgatgttcatattaaagactgtgaccattgatgaagaaacataagctcaattttatgactttgacctacagtcgtagatgatgaggacttattatatgaattttcctatacgcatgaaatgctaatgactgttacctacccattgtacatagtagggaaagcctatagtgatagacaa

SEQ ID NO: 74653 - DNA, 467 bp, Glycine max
  Clone ID: PAT_MRT3847_38425C.1
gttcgagttttttttttttttttttaacttaaattaagcttctaggtcgaaaggtcattttgaagattgattttctcataacaaagtgaaggtggatcatgttcttcagctaatgcacgcgtgaattacttggctaagctgggcatgctggaaaacgaccacataaagctgtaagtggatcaaaccagattgatagccagttagatcaaacctctaaaactgtaagttcagaaaccctctccaaccgttcctttcccctgattaacgagtgccgttaccttgatcctcgtctctcgaaaataacgctgttctcgagccatccatttgttgctgttatgtttgacttaccaattactatatttgtgatgaagcaatttgatgacgttagagatacatacatagcctcaatgtttttctccacgattctactttacatgcatggataacaaaaaatgcagttcgatgtg

SEQ ID NO: 74654 - DNA, 876 bp, Glycine max
  unsure (1)..(876): unsure at all n locations
  Clone ID: PAT_MRT3847_38426C.1
ggtccggattcccgggtcgacccacgcgtccgtccggataaacgaccttcgtcgctcgctcgcgaaaacgaaaatcacaatggcgtcaccagcggcggcgaggacgccggtctctaccggcgcatctccgatgcaacgcctctccaccttcaaaaacccctcctccgccgccgcctccaccgccaccaccaccccctcctcctccgccctagactctctggcctcggatcccatcttctccgccttcctctctccttccttctcctccacctccttctcctccgccgcgctctcctccggctccccggcctccaccgccgagaagctccaccacgcgatccgcctcctcgagaaccagctccgttccgaagtcctctcgcggcatcacgatctcctctcgcagctctcgtccctccaccacgcggaccacgccctctccaccctccgatccgcgctctcctctctccagtcctccgtccgccgcctccgctccgagctctccgacccgcaccgctccgtcgccgccaaaaccgcccagctctccaacctccaccgcaccacggagctcctccagcactccatccgcgccctccgcctctcgaagaagctccgcgacctcatggccgcccctgaccccgaaaaactcgatctcgccaaggccgcccagctccacttcgagatcctcagcctctgcgacgagtacgacctctccggcatcgacgccgtcgacgaagagctcaattgggtcagggagaccggagatttgcttcgcagcgtggcgatgaaggttctggaacgcggaatggatgggttgaaccaggcagaggttgggaccgggttgcaggttntctacaatctcggggaattgaaggtcac

SEQ ID NO: 74655 - DNA, 443 bp, Glycine max
  unsure (1)..(443): unsure at all n locations
  Clone ID: PAT_MRT3847_38427C.1
ccacgcgtccgacaatatggactcatcaagacattccgttgtcatagtagcattcttattagctttttccatcatggcttcagatatctgcattaagtcagaagcaaggggacccatatataaatcacattgtgacaaggacttcgagtgtcgagttggatgtcataatataatgtgtggttgtagagccgtatgtattgatcatgtgtgtcaatgtccgcatccaagttccaccaataataatattcttggtgtagcacctccaaactgagtgccagaaaataggatcttgggatgcaactataaggttcttaatgtatatttagttctagttcctaataatggattattgcatctctttgtgtatccaaacattacatcatgaatgtcttaataaaacttaagctttactttgttcttaaaaaaaaaaaaaaaannnnana

SEQ ID NO: 74656 - DNA, 991 bp, Glycine max
  Clone ID: PAT_MRT3847_38428C.1
tgcccacgcgtccgtacggctgcgagaagacgacagaagggggagggaggggagaagagaaagaaggaaggagacatttataaaaagctctttcccttcccctaaatccctcacactcattccatttttacctttctctctcgctcgcaaacgcaaataataaaaaacaaggttttagccatggcatcgaagcggatcttgaaggaactcaaggatctccaaaaggatcctcctacctcatgcagcgccggtcctgttgctgaagacatgtttcactggcaagcaacaattatgggtcctccagacagtccttatgctggaggtgttttcctagtcactattcatttccctccagattatccctttaagccacccaaggttgcattcaggacgaaggtatttcacccaaatataaatagcaatggaagcatttgccttgacatattgaaggagcagtggagccctgctctaactatttcaaaggtgttgctctcaatttgttccctgttgacggaccctaatcctgacgatcctttggtccctgaaattgcccacatgtacaagacagacaggaacaagtacgagtcaactgccagaagctggacccagaaatatgccatgggttaagtgaccttgtggtatgtttgagggagagcctttctactctcagtgtttaggtctctcagcccttgtaggaatatttgtcgttttaaatcatgattaaggcccctccagttgaagatgaatgggggaaaacgtttctcctgctgtttgtattgcaaatgttcatggtaatttagaacagtgaaatgttgccccaattaaatgttatgctcaagtttttaaccgttctattaagtgccatttcatgtttttcttttgtcatttatgaacttaagccttaatttaagagttgctcatcacctggtagtttttgaccctttgttcaaacatctggcgcggatcaaatataagtttagttggattctct

SEQ ID NO: 74657 - DNA, 338 bp, Glycine max
  Clone ID: PAT_MRT3847_38429C.1
ggttaagctttttttttttttttttttttttttttttttttttttttttttttttttttttttttttttccaaaagggaaaagaaaacccctttaaaacacagtgggcaatatttaaaaacattcccgggggtttcccaaggaacctccctccctaaaaaagtttttaaaaaaccgggctttgcctgacccaaattaccaaaataccaggtgggtttttaaagcaaaatttttagggggaaaaaaaggactttgctctaacaaaccccccttaaaaaagaaaaccccaaattttctttttccagcaatcccaaaaaagggaaaaattatcccctgttt

SEQ ID NO: 74658 - DNA, 306 bp, Glycine max
  Clone ID: PAT_MRT3847_3842C.1
ggggaaataaagctacaaatagatataacttacaaaggcagaaaagggggcaagagaacacacaagggaaccaggggggaatgaaccatcaacaccaacaccaaggaaaaaacagccatgggtcacggagaacgccaaccaacctgtgagaggcacatgagccatcaaacaggaatatggagactggagaagctggacatgtgcctacaactgacgccaagacaagagtaaaatggacaccagatcaagaggccagggggaatagaagcaggcaaaccagtagggggagctggcaagggaaccccc

SEQ ID NO: 74659 - DNA, 107 bp, Glycine max
  Clone ID: PAT_MRT3847_38430C.1
ccattcgtcccttcactcgtccttttactcgtccgctcaaacgatggatcgtagcgcacaaaccataaaacgagccctataaaaagcaccgacgtaaacatccccag

SEQ ID NO: 74660 - DNA, 660 bp, Glycine max
  unsure (1)..(660): unsure at all n locations
  Clone ID: PAT_MRT3847_38431C.1
atcatattagcttttaactgctttgatatcaaatttcagttgtagcacacctgattttttttgttgatattcagctctggtggggtggtgttggcttctcgtgatggaaagattgtgtgtgaaaatacacttgatgcacgtcttgatgtagttttccgtaaaaagcttccagaggtaaaaaagaactgagtatagcagttcttattctgtgatgttagatatttgttgctgaattgtttttactgttgactctcgtattgctctcactcaaataacttgtatgcagcatttatgattcacttcccttctgcaagatagtagtatgtattttcttgggtagtgctattcacttcattccgcaatattatatacactttctattgattgtattgaaattataaccaactaaaaattacttttgatttggttttaaaaccaatgagtctttttttccctccctatttctgttcctttgtatttgctagactggtccaagtgatctttttcactaattgctccttactttcttttctccttcctatcaaatgtactgtatttccatgaattcattattgggccaactttcgggtactctattttgctgactttggatattgcatccggggcaaaatttggaaagtcatangtttagttgaagct

SEQ ID NO: 74661 - DNA, 1557 bp, Glycine max
  Clone ID: PAT_MRT3847_38432C.1
ccacgcgtccgagaatgtgtcgtcgaacttcgaagctccaaacagctttttaaccattttcgcttcttctcttcccttctctcgcattaccactatgcgttaagttaaccatttctagcgttagggtttttgcttctcggaagattcgaaatggaagaagattatggctacagaaggacggcgaagatagcacttgtcgcaatcatggtgctcgcttccgtcgccgtctttgcattgctcgttgtcttcgcttactactgctacatcctcaacaaggtctcgaatcgtcgcaaaagcctcaaaaaagttgaagatgccaaccttaacgagaaaagtgactttgcaaatctgcaagttgttgctgagaaaggacttcaggtgtttactttcaagcagctgcattctgcaacggggggattcagcaagtcaaatgtcattggtcatggtggatttggacttgtttaccggggagtgctcaatgatggtaggaaagttgcaattaaattcatggatcaggcaggaaagcaaggagaagaagaatttaaagtagaggtggaattgctaactcggttgcattctccatatctgctggcattgcttggatactgctctgatagtaatcataaattactggtgtatgaatttatggcaaatggtggactgcaggaacatctctatcctgtcagcaattctattattacgcctgtaaaattggattgggaaacacgactaagaatagcacttgaagctgctaagggtttggaatatcttcatgagcatgtcagccctccagtgattcacagagattttaagagcagcaacatcctcttgggcaagaaatttcatgccaaagtttctgattttggattggcgaagcttggacctgatagagctggtggacatgtttcaactcgggttttgggcacccagggatatgttgcccccgaatatgcactaacagggcatttaacaacaaaatcagatgtgtacagttatggtgttgtacttttggagctgctcactggccgggtgcctgttgatatgaagagacctccaggggaaggtgttcttgtttcttgggctctgccccttttgactgatagagaaaaggttgtaaagattatggatccttcattggagggacaatactctatgaaagaggttgtccaggtggctgcaattgctgcaatgtgtgtgcaaccagaggcagattatcggcctctaatggcagatgttgtgcagtcattggttccactggtgaagactcaaaggtccccctcaaaggtaggcagctgctctagtttcaattcccctaagttgtcccctggcccaacattttaatgcacgtaacatatcaacattttaaatgaaggagaggtacatgcttaccaaactagatttgtattgcatgtttggtagttgccgtttccttgtaatcttaaaccatatgatgccttttggagaggaaaaaaatggtgggtttaatgttaatgttcaaattgataatgatgaaagatttagacttgtttacttttaaaaaaaaaaaaaaaaaactcg

SEQ ID NO: 74662 - DNA, 512 bp, Glycine max
  Clone ID: PAT_MRT3847_38433C.1
tttaacttttttacctaactatggagcgaattatgatcgtgggctgtagcggcaccggaaaatcgacacttgccagaaccctctctgaaatattaggcatcgaagcttatcacaacgatcgcttatattggagtcctggctgggtagaagtctcagaagaacaacactccaaagcccatgaggaaatcatatcgaaagaaaaatggatatttgatggcaatcattctaagacaatgggaaagagattagaaagggcagatacagtgatatatttggacttttcagtatggagttgcctgtatggtgttgttaaaagaaagtttcaatatggaagccagactagaccagatgtgactgagggttgtcctgaaaaggttgattgggagtttatcaagtttattatgaattataataaagaaagagctccgaaaatgaagcagaaaattgctgaatatccagaaaagaaggtgtttatatttaagaatagaggtgaggttgatgcatttgttgaa

SEQ ID NO: 74663 - DNA, 361 bp, Glycine max
  Clone ID: PAT_MRT3847_38434C.1
aaggcgccgaacagagggggcggctatattaaaatgttttcttattgcccccgaatgatgcttctcattgctagcatccttccagctttggttgaatgcacagagaggcactacaaatttcatgaggtgcctaaacaaaccaatagaacgtgttcaagcaaatctattgtcaccattaatggcaagtacccgggacccactctttacgccagggaagacgacacagtgttgggcaaagacatcaaccaagtcaatcacaacgtaaccatccattggcttggcgtgaggcaactcgataaccggacgggctgatggacctgcaaatgtcacacagtgcccaattcaacccagggcaaaacct

SEQ ID NO: 74664 - DNA, 300 bp, Glycine max
  Clone ID: PAT_MRT3847_38435C.1
caatcacgtactctctggtttccttcacgccaagaacatgtgtagacacctataggagacaactgtattacggttatgcctaatatggctgtgctttccaggaaccaacaatggctgagggcaccaccaaagagagctagagttcctcatcttcttgctcacgtcatggagcacctcatacgtgatgatctaatcctgtgatggagttcgaaatcatggcgatgggagaatagccggaggaagctatctacctggagcatgccggcgccgcatcttgtaacatgggcctcgtctgaagag

SEQ ID NO: 74665 - DNA, 243 bp, Glycine max
  unsure (1)..(243): unsure at all n locations
  Clone ID: PAT_MRT3847_38436C.1
tattacaatacattacattgctagttaaagcataactaacgatgaccaagtgagtacatatttaaagaggaagaagctactggatatgcacagcgcacaagatgatcatgattctgtctcgtctgatttgatatagcccatagnnacttttggnnagttctcatagcaccataatnntatttatccgaatacgagtatttggctgtctgggtccaatgtttctgcaataatgatacttctttt

SEQ ID NO: 74666 - DNA, 395 bp, Glycine max
  Clone ID: PAT_MRT3847_38437C.1
tttttatttgtttgggttttttttttttttttttgagaaaaacacccatcctcgaattaaggaacccccacacccgtgtatcgggaaacccggacactggtctatgattacaacctgccgtccatcaggaaaacaggaacttctgttgaataccaaacaagcgttgggttgtggggacccaccgagtggcggtaaatcaggagaaaccatgtacctatgaaccagatggctccatggcgccacatccaaaaaggaaccagggaagggcatttttgtgggaacgataccattgtcacaaggcaacaagcggaaaaaggtgccctgcctgcaagggggtcctggaacccagaatggcaagggggaaactgggacaaaatgtaaaccgggggacccat

SEQ ID NO: 74667 - DNA, 438 bp, Glycine max
  Clone ID: PAT_MRT3847_38438C.1
cggctgcgagaagacgacagaagggttcctgttgaaaagcagtctagaaaaaatctcctccaccataaattaaagaaagtaatacagacatacacacacaaaaatcatagagcataaaccttgggtaatagaaaaatttgacaatagtagaaaaataaagggttgatagattaagtacctgatagcgtctgaaacgaaaacttggttctgtgagtttaaatccatggacattcaccctgtcaaaaccaaacctggaactctgaaacccaaaacaaaggcaccaaaaaatcaaacgtttaggtaaaaacccaaatgatctatccgacaaactaatcgagcaaaagaaatgtgtatcagcctgtgccttctaacacaaccaaactgtttttaggtaaagagcaaaatgatttatctgaaaaaagaaaccaagcaaaaata

SEQ ID NO: 74668 - DNA, 496 bp, Glycine max
  Clone ID: PAT_MRT3847_38439C.1
cgacacttctcgctcagcctcaaccataacaaacaatttcacgatttctctttctctccccttcttaaatttctaggtttcgattctcttcctgcatttgcatcccaactttagatgtacagtagcgcaataacagaatctccgttcatcattttctggcttccttttatagcttgagctggaattgccatccgatctgacttcgtttcgcagggtttgttcttgattatttgacaattttgttcttcgattaagaaatttggtagaattcgttgtttgttttgttgctataggggattagggctttttgtagaatttagggttacaagtatatctatggcggctagtagacatggaggttatcgtgacaacgagtttagggaccgtgagtccaattttgatgtttcaaggcggggtttcaataataattctaaacaagagtatgataagattaccaatggtggccgcgatgttgtgagggttgggagcaaggatg

SEQ ID NO: 74669 - DNA, 1175 bp, Glycine max
  Clone ID: PAT_MRT3847_3843C.1
aatccgggtccacgcgtccgggctcgtctttttctccaaagtttcggtgctgactgatagaacactacctattcagccgccatgcacactctcctccgatccactctcaggaccaagactgcttcatctttagcatatgctgtggtttccagaagtgctcacgaaaatctccttcaggctcccttattgtctagatcaaatagcactgaggcttcattggcaaaggataattcctctaatgatgtaaaaaatggtcaagggtacaaaggtcatagtatgcttgctcctttcacggctgggtggcagtcttctgatttgcaccctctgatcatagaaaagtcagagggaagctatgtatatgacattaatgggaagaaatatcttgatgcacttgctggtctatgggccacttctttagggggaagtgagccacgccttgttgatgctgccgttgcacaactaaagaagttgccattttaccattccttttggaatcgaaccacattaccttctttggatctagccaaggaactcctagaaatgttcacagccagaaaaatggggaaagctttttttgttaacagtggatcagaagccaatgacactcaggtgaaacttgtatggtattataacaatgcacttggaagaccagataagaagaaattcatagctcgtgctaaatcgtatcatggttcaacactgatagcagccagtctttctggccttccggctctgcatcaaaaatttgatttgccagctccttttgtattgcacactgactgtccacattactggcggtatcatcttccaggtgagacagaggaagaattttcaaccagattagccaaaaatttggagcagctgattctgaaagagggaccagagactattgctgcatttattgctgaacctgtaatgggggcaggaggtgtaatacctccaccatcaacttattttgagaaggtccaagccgttgtcaagaagtatgacattctttttattgcagatgaggtaatatgtgcctttggaaggcttgggacaatgtttggatgtgacaagtacaacattaagccagaccttgtatccctggctaaggcactatcttctgcatatttgccaattggagctgtccttgtaagcccggaaatatcagaagttatacatgatcaaagcaa

SEQ ID NO: 74670 - DNA, 490 bp, Glycine max
  Clone ID: PAT_MRT3847_38440C.1
ccacgcgtccgttttactcctatccactgcggcctggacgcgtgcgagagacttgaccaagcagcagcagcagggatggcgcctctgaagctgtacgggatgccgctgtcccccaacgtggtgcgcgtggccaccgtgctcaacgagaagggcctcgacttcgagatcgtccccgtcgacctcaccaccggcgcccacaagcagcccgacttcctcgccctcaaccctttcggccagatcccggctctcgtcgacggagacgaagtcctcttcgagtcccgtgcgatcaaccggtacatcgccagcaagtacgcgtcggagggcacggacctgctccccgcgacggcgtcggcggcgaagctggaggtgtggctggaggtggagtcgcaccactttcacccgaacgcgtcgccgctggtgttccagctgctcgtgaggccgctcctgggcggcgcccccgacgcggcggtggtggagaagcacgcggagc

SEQ ID NO: 74671 - DNA, 303 bp, Glycine max
  Clone ID: PAT_MRT3847_38441C.1
attggaatgagatagttgcataatctgtgtgtatcctccagtgccatttccatggagctagaggtgcaggtggtgggaggcatagactcctgcttcgtctccctccctctctctctcatccaaactctccagtccacgcgctcatcaccgatccctcaaatcctcgctctcgaacttcgctctccgactcacccccctcacacctggttcgtcgcttggtccggcgccacttcctcttcttcttccgctatagaggtttctcctcaatttgcggagtgtgtttcgttgccgaatcatgctact

SEQ ID NO: 74672 - DNA, 456 bp, Glycine max
  Clone ID: PAT_MRT3847_38442C.1
aattcccgtctcgacccacgcgtacgcccacgcgtgagaagacgacagaagggggtgcacacgaagtgacccaatttggtttcagtttctcgaattctgggaacgtgtctccgccctctggtctcttccccttctccgcaagcaaaaccccaatttcttcttcacgaaccctaattcactcttcccattccaaatctcaatcacctttctgattcaatctttctctcctcgccaatctcttcgttcacctcgcaaatcaaggtgagggattcgaattgaaacctcaagatgccagccacagcaggaagggttcgtatgcctgcgaacaatagggttcacagcagtgcagcgcttcaaacccatggcatatggcaaagtgccattggctacgacccttatgcacccaataaggaagataagagggattcttctcaaaatctgccaaatgcagaacct

SEQ ID NO: 74673 - DNA, 269 bp, Glycine max
  unsure (1)..(269): unsure at all n locations
  Clone ID: PAT_MRT3847_38443C.1
tttnnaaaatttttaatgtcttcaacacacacaccaaggggatcgaggaaatttttaaaaaacatttcacccctccccaaacaacacatannattaacgcaacaccccccgctagagaaataatatcccaacaagatgacaagattcccacgcgtaaaaaaccaccaccgagcacgacatatttagcttcctccaaaaaaatgacgatacataaaaaatgttcgcccccctcataaaaaattaacccaccccacccccggatagaaata

SEQ ID NO: 74674 - DNA, 224 bp, Glycine max
  unsure (1)..(224): unsure at all n locations
  Clone ID: PAT_MRT3847_38444C.1
agtcgcncgcacgcgtnacgcanagcncngaantcggctcgagctngntcgtnactagngctgtagcagngctgctntcgntgctcttcacnancancncgncgacggnatttcctngacgccnagggagtatgaggnnggcngncncngaggntattnancctnnncntngtntnagttggntngttgnngggttaaagntggnctnaccngggacgcgngtt

SEQ ID NO: 74675 - DNA, 271 bp, Glycine max
  Clone ID: PAT_MRT3847_38445C.1
aaaagctggtaggggttttttttttatggtaaactggcaccaatacaggacacgccagtgttatatgagtaacaggagggagaaaccacatgagaatgcaaattaatcagcttctccagggaatctttcttaaacctggcaacacaccaatgacgcatctggggctgcataatgaacgtgtgtaaacggaaagacagctatgcttttgtttaaaaccctgcttttgacttaacatagagtgccaccaacaaatcgcgacgtgtgttggagt

SEQ ID NO: 74676 - DNA, 379 bp, Glycine max
  Clone ID: PAT_MRT3847_38446C.1
gagtcagagagacagaaggcaggaagtcaaagagaggacacggtggttcggcggggaacaagttcctgatgtctctgggtctgccggtggccgctacagttaaatgccccgacaacacggcggcgaataagctcgacatcatagcggtgaaagggatcaaagggcatttgaaccgtctcgcctcggcttgcgttggcgacatggtgatggccaccgtgaagaaggggagacccgatcttaggaagaatgttttgccagctgtcattgttcgccagcgcgcaccatagcgcctaaaggacggcgtctacatgtattgcgaagataacgcaggtgtgattgtcaatcccaaacgataaattaaaggttctgctatcactgg

SEQ ID NO: 74677 - DNA, 265 bp, Glycine max
  unsure (1)..(265): unsure at all n locations
  Clone ID: PAT_MRT3847_38447C.1
ttctcccatttcctctcagaaccctcgatnactcgcacgcggnccgatatcntctcctncancgtcgntctctcncaacgatcacaacaacatcgnnatcccatggcaaacgcngcatctggtatggtagtnccatgatgactgtaagtcaaggtttttggagccgaagacaaagagganacancgtttncatagnttntangagtgangngncgcagaangcaggtcattgtggagaatctgggtgagncagnccagtgctatg

SEQ ID NO: 74678 - DNA, 401 bp, Glycine max
  Clone ID: PAT_MRT3847_38448C.1
gcgcaagctcggaatatggctcttgcatttaatgtcacccacatcgtgtttgaggaacacgatcagatccctgcgcacattgggctgttcaatagtatgcctttcccaccaaaccaaacctacccaccttggggttgtcaaacggtaacttcgtaatgcataagtgcagtacatacacaacggtcatctgctgcacatattgctgaaaccctactgtcaaccgctgctaatcaaagaccacgcgaagaggatctcacttcaagtctggtaggaggaggtggaggccaactccttaccttgagcagatcgagagtgaattcatgggcatgggaggaagtaagcgactgcttgatgggtcaaagaaatggaggagatgataatcatcatcatcatgtaagggt

SEQ ID NO: 74679 - DNA, 1005 bp, Glycine max
  Clone ID: PAT_MRT3847_38449C.1
ggtccggaattcccgcgtcgacccacgcgtccgtgattttgtccatccaaaccttaaaaagattcagtgaagaacaacgttaatggcatctcttggtgtgcaagcagttcatcctcctccattaacatccacctccgacccacctcctctttttgatggcaccaccaggttgtacatcagttattcttgcccctatgcacaacgtgtatggatcgctcggaacttcaagggactaaaagacaagatcaatttggtccctataaaccttcaagacaggccagcttggtataaggagaaagtctaccctgaaaataaggtgccatccttggagcacaatggcaaggtgttgggagaaagtcttgatttgatcaaatatgtagatgaaaactttgaagggacacctttgtttcccagagatcctgccaagaaagagttcggagagcaattgatatcccatgttgatacattcagcagagacctgttcgtttcattgaaaggggatgctgtacagcaagccagtcccgcttttgaatacttggagaatgctctaggtaaatttgatgatgggccattcttgcttggtcaattcagtttggtggatattgcctatttccatttgctggttgaaagatccaaattgtctttgctgcgaacatgacataacatagccagaaggcctaaacttgcaacatggtttgaggagttgaataagctaaatgcttataccgagactagagtcgatcctcaggagatcgttgattttttcaaaaaacgcttcctggcttcctttaaaaagtagactttgcccataaagggtcctttcattcccgggatgggaggcatttgcagtcaaatgtcggttgggtttttttcccaaagttgcaggatagtttgaagtcataatcccgttcatttttcagcttgtttgtttgatgtcataaaaatgtttatgtcccagtttgtgatccctgatcaatatgatataatgccccatatggttttttt

SEQ ID NO: 74680 - DNA, 476 bp, Glycine max
  unsure (1)..(476): unsure at all n locations
  Clone ID: PAT_MRT3847_3844C.1
ggccgctcgagcncggcgggccgggatatccatatctccccagagatatttttttattataaattcaaactaataataataatgccttcttctcttcactttgataggttcaatcctatcacccacgccgccaccactgtcgccatcgccaacggcgtaaactgtccgaagcagcctcaagcgccgccctcttccacggcggcgcgtcgcctcgtggttccctctctctcttccggcagaggaatcgcggcccccgacacggtggcgctccaccacgcgcacgtggtggaccccaaccagtgctgctccatcgtgacgcagcacatcaacgcccccgtctccgccggttgggcggaggtgcggcgcttcgacaacccgcagggatacaagaacttcgtgaggagctgccacgtcatcaccggcgacggcattcgcgtcggcgccgtccgcgaggtgcgactgccgcccacaccccc

SEQ ID NO: 74681 - DNA, 342 bp, Glycine max
  Clone ID: PAT_MRT3847_38450C.1
aacgaagccttctcgttcttattcttccgccctttctctctctagaaccgtacggcacgtccctttctctctgctcaaccggagacagcgtcgcggtcttttctgaatctcgcggtgttgccagctctgccgcggctgtagttcccgcggcgatgggacaccgactcgctgatctacacgcttcttcgcttgcgggaccgtgatcctagcggagtacaccgagtacaccggaaacttcaccagcgtcgcggctcattgcctgctcaaactgccttcctccaacaacaagttcacttacaactgctatgggcacacctccaactacttcggtgtaaccggatt

SEQ ID NO: 74682 - DNA, 1231 bp, Glycine max
  Clone ID: PAT_MRT3847_38451C.1
gcccacgcgtccgtacggctgcgggaagacgacagaaagggattctgattctgtccatccaaatcttaaaaatattcagtgaagatcaacctcaatggcatctcttggcgtgcgaccagttcttccccctccattaacttccatctccgacccacctcctcttttcgatggcaccaccaggttgtacatcagttattcttgcccctatgcacaacgtgtgtggatcgctaggaactacaaggggctacaagataagatcaatttggtccctattaaccttcaagacaggccagcttggtataaggagaaagtctaccctgaaaataaggtgccatccttggagcacaatggcaaggtgttgggagaaagtcttgatttgatcaaatatgtagatgcaaactttgaagggacacctttgtttcccagtgatcctgccaagaaagagttcggtgagcaattgatatcccatgttgatacattcagcaaagacctgttcgtttcattgaaaggggatgctgtacagcaagccagtcccgcttttgaatacttggagaatgctcttggtaaatttgatgatgggccattcttgcttggccaattcagtttggtggatattgcttatattccatttgttgaaagattccaaattgtctttgctgaggtgttcaaacatgacatcacagaaggaaggcctaaacttgcaacatggtttgaggagttgaataagctaaatgcttataccgagactagagtcgatcctcaggagatcgttgatcttttcaagaaacgcttcctgcctcaacagtgaaacgttgtattgctgcaggcttcctctaagatgtagactgagccaataaagcgtcctttcattcaatggatgggatgcatctacagtcaaatagaagttgtgtttatctgctagagtcgtaggatagtttgaagtcataatcatgttcatttttcagcttgttttgtttgatgtaataataatgtttatgtaccagtttgtgatcactgatcaatatgatataatgaccaatatggtattattatcctatttgaactatgttatatcacgtactaagctatgatatctcaagtgtccgtgacctgtcagcaaaggtttattgaaagaaaattatgcatggttaacaatatatcacctcccatattttatccttcgtgtgtagttgtgttatatctcaaactcaaggagagatccgaaacccaa

SEQ ID NO: 74683 - DNA, 564 bp, Glycine max
  Clone ID: PAT_MRT3847_38452C.1
aactgcggttgaatcaataaaccttgatcaaatattgtctcccgattcaattgtcagtccaatttttaaaacattagttaaacctaaaatactagttataattacagttaaagcttaataggttggcctaatcattatagtagaatcactctaattagtatatccatgtgattcaggatccaaccaccagctgaatggctcagcaacccaaaagaaatagaaaactcacaaaatgaggcactgggaaacaataatagtaataaatgggaaccaaatatagaaatctagattacatgatttgtggaacattgagtagtaaaaccagtccttatatcctttaagtttcacttttccccctttctgtatatctcatgccaatggtacaggagggacgagccaataattggtgtaaccatcaaaaccaactccactttcatttgttgggaagaaaaaatttgtcagcttctggaacctataacccaaacaaggccctcatcattacctttcctaaacatatcatcatcttgatgtagcactgaactattcttcatgtgtacaggactt

SEQ ID NO: 74684 - DNA, 405 bp, Glycine max
  Clone ID: PAT_MRT3847_38453C.1
ataacacacactttacatatcatttgttgggtttttttatgttgtgtaagaaacgcccaaggagtgaattcttatttggtaaattatgtcttaacacccttaatgacttaaatcttcggctgggcatttgaacctatacacaccttattttgtggacaaaaaatttttttaaaactaggggttattgaacaacaatacaacacatgctggccaacaaatatttccaggaacaacaaataattcaaacattcccagattttttcgcacttctttatatagttgggaaacgttttttttgtaaccaattaaccgtgagaaaaggttcgctcgctcggaattttaattgaaaaacccttattgtgaaaacttcgtttataaaaatacatttgaaggggatttcggtcc

SEQ ID NO: 74685 - DNA, 290 bp, Glycine max
  unsure (1)..(290): unsure at all n locations
  Clone ID: PAT_MRT3847_38454C.1
cttaactaggggaggttcttccttttttctcttcanctnttanngatatcaggtctcagcccagaccaccgganaggaactncntcngcctcngaaagctcaaaaccccngtctaactctncccgcggcttantttcgtanngggggtcttaactncttagagnaccgtaactcttcagttttctaaaatttcttntaagtttccgtcctnggngtacttttaaaagaactaaggcttagngctttttctttaaaaaatttttttaatactagttttaaacctttaaatt

SEQ ID NO: 74686 - DNA, 190 bp, Glycine max
  unsure (1)..(190): unsure at all n locations
  Clone ID: PAT_MRT3847_38455C.1
gtcgcangcacgcgtacgtaagctcggaattcggctcgnagnaanannnaagaaacacctgggananaaaaancgacgnctcattccgcctncgccgccgtaggnancgacgncgtcgtcntncgtcctccggcatcannanagagttcgnngaagacganggtanttataatatcaagtcttcgncgcc

SEQ ID NO: 74687 - DNA, 139 bp, Glycine max
  unsure (1)..(139): unsure at all n locations
  Clone ID: PAT_MRT3847_38456C.1
gaaactcncggcccaacacatcggaacctaacacattaatattttagcacaagaagatgtgggataacaatcacacacagntaaaaaattatacatgtccttgcttgnggtgtttcactggacatataataataatact

SEQ ID NO: 74688 - DNA, 1396 bp, Glycine max
  Clone ID: PAT_MRT3847_38457C.1
cctaattctgttttatttgtttctgtctgattcgatcacacgtgagaatgtctgatcacgactaccatgcatactactcaggcaataaatcctttgcaaagcgtaggttcagggataggtccaaggaggcattgtctaaacaagccgttaagttagccaaacaagctgaagagcatgaaaggttcatcaacaaggtgactcatcttttgggggttcttggctttggttggttttgcttcatctttggggcaaggccacaagccgttcccttggtatattgtttgttctatgtgatatttgttcctctccgttggatatattacaggttcaagaaatggcattactatctcctggatttttgctattatgccaatacaatcttcttgatttaccttcttttttacccaaagaatgaaaagcttttcctggtttgtttttcatttgctgaggggccattagcatgggctttgattgtttggcgttgcagcttagttttcagttcagttgacaaaattgtcagtgttcttatccatcttttacctgaattggttttctttaccattcgatggtggaatcctgcaacctttgaagccatgcgaccagcgggaatggctggaagatctacatggccttatattgaggataaatcctatctctggatgtggctgtttctggtacccttagcagtttacattctctggcaggttctatacttcctcattgtcaacgtcttgcgccaacaacggtttttaagagatcctgaagccatgacttcctacagggaactctcaaaaaaggctcagaaagcaaacaacatatggtggcgcttaagtgggttgcttggggatcaaaatcgcatgctgatgtacatttttcttcaaggcatatttacggtggcaaccatggctcttactgtccccatattcttgtcatatgaattgcatgtagttttccaaatactaaaggtttctgcctcaatatggaacggaggaagttttctgttggaagtaatgcctaggcaggcaattcttaaggagaaaaagaaatcagagatgcaacctgttgaagctcaacccaatcatcaataatcaatagagatggaaaatgatagcaagttaaaacaatgttgttgtgacatgtcactccttgctcaactaatatccacgtattttgaagttgtaattgtatttgttgatttgtttttactggggtgcgtgggtttggttgtctttcttttaagggcacgaccccaagatattccctatgcaatatgcttgtcatacgacatctatttttcctcttcgtaggaaaaactataagcgccaagaaatggaattacctattactggaattttggctttatggcaaaacaaaatatctggaatgaatttttttt

SEQ ID NO: 74689 - DNA, 163 bp, Glycine max
  Clone ID: PAT_MRT3847_38458C.1
caaagcctacagctacacctactatgatgccactagcaccttcacgtgttctggcgctgattacacaatcacatgttgcccttgtgttccaagtttaaaatcttcaacggattcaagtccaaagggaatggatgcagggtctgggtctgggggaggttcatca

SEQ ID NO: 74690 - DNA, 482 bp, Glycine max
  Clone ID: PAT_MRT3847_38459C.1
atcgtctgcttcttctatggctctcactctcggatgcatcgactatccctgtcatcaacggaggtcgatcttaaaccgactcttccctaatcttcggctatgatctactctgcttctgtatctgatcttttctcctaaccttcttcaatgaaatgtactgtatcatgtgaatcaggccagggaggatctatctctatccaagatgtagttctggatgggaagaaggaaccctacccgtctacatatacaaggaatcttcctcaacacatggtgggtcatgaattcgctaacaagagaatgaatgtggtcctagtatctgactgattgagaggcacacacgatcttgcatattatggactcaaatctttcacgcactctatctctcgattggactcagctgactagtatgatagaataccatggaagagaatctatgagcaacacatagagagaagcagacagtaacatgggacggtttgggt

SEQ ID NO: 74691 - DNA, 421 bp, Glycine max
  Clone ID: PAT_MRT3847_3845C.1
ctcgcattcggctccagccgtccgtatggctttagccttcaagcgcacacaggctcgcatatcccgtcttgatcaacctcgactcgagtccgcgcgcgtccccgaatcgaggggagatgagtcgtccgcatgacggacacaggtccttctttcccatggggaatcccttaaggatgattctcccaagaggagcccgcctgccaccgaagctcactgagctgctcactccgtatgaggatggcctggcctcgagctcgaggaaggtcaagccagaggccacctcataggtgttcacactatcatggatgaagctcgcagtggagtgcttatcagagctgcacaccactatagccaccctgattactgagcttgagcttgccttatcagactgggatgagacgtgggtggacagctacctgaa

SEQ ID NO: 74692 - DNA, 331 bp, Glycine max
  Clone ID: PAT_MRT3847_38460C.1
gaccacgtgaaccaatatatcccaagccctatacaaccataccctaacacatacccatttgattcagtttccatggctagcctcaacgttgcatttttggctgcagtgctctgcatggttgtggctagtgcacccatggcacatgcacctatcacgtgcgggcaggtgaccaatatcctgatcaattgcatcggttacctccagaacggacgaacgccgccgtcgggatgctgcaactgagtcaataacctcaatgccaccgccaacactaacgccgaccgccagaccgcgtgcaactgcctcaagtcggtctccagcccaatctccggct

SEQ ID NO: 74693 - DNA, 441 bp, Glycine max
  Clone ID: PAT_MRT3847_38461C.1
cccacgcgtccgatatagcccatgccctattcaaccaaaccctaacacacacgcatttgatgtcagtttccatggctagcctcaaggttgcatttttggctgcagtgctctgcatggttgtggtgagtgcacccatggcacatgcagctatcacgtgcgggcaggtgacgagtagcctggccaattgcatcggttacctccagaagggaggaacgccgtcatcgggatgctgcaacggagtgaagagcctcaatgccgccgccaagaccaccgacgaccgccagactgcgtgcaactgcttcatgtcggccgccagccaaatctgcggcttcaacgccgacaacgccggctagctctccggcaaatgctgagtctgcataccttacaagatcagcacctgcaccaactgcgctaccatcaaggttttgaagagaaagtcat

SEQ ID NO: 74694 - DNA, 326 bp, Glycine max
  Clone ID: PAT_MRT3847_38462C.1
gggctgcagtgctctgcatggttgtggtgagtgcacccatggcacatgcagctatcacgtgcgggcaggtgacgaatagcctgatcaattgcatcagttacctccataacggaggaacgccgccgtcgggatgctgcaactgattgaagagccttaatgccggcgccaagaccacgcgcgaccgccagactgcatgcaactgcctcaagtcggccgccagccaaatctcctgcttcaaaaccaacaacgccgcctcactccccagcaaatgcatattctccatcccctacaatatcagcacctccaccaactgctctaccatcaat

SEQ ID NO: 74695 - DNA, 322 bp, Glycine max
  Clone ID: PAT_MRT3847_38463C.1
ggctgcagtgctctgcatggttgtggtgagtgcacccatggcacatgcagctatcacgtgcgggcaggtgacgaatagcctgatcaattgcatcggttacctccagaacggaagaacgccgccgtcgggatgctgcaacggaatgaagagcctcaatgtctacgtcaaaaccactgccgagccccagacggcgtgcaactgcctcaagtcggacggcagccagatcttcggcttcaaagtcaacagcgccgtctcgctccccggcaaatgcggagtcttcatcccctacaatatcagcacctgcaccaactgcgctaccatc

SEQ ID NO: 74696 - DNA, 153 bp, Glycine max
  Clone ID: PAT_MRT3847_38464C.1
atcgatgccctggtagttcccctgaaccttttttaatttgtgcgaaatttggaaggggtaaatttccccctaacttgagtacccaattactttgtgtggtcagtccaagctggggtttcgttgggaccacgttgttcgcttgaactaatggtg

SEQ ID NO: 74697 - DNA, 319 bp, Glycine max
  unsure (1)..(319): unsure at all n locations
  Clone ID: PAT_MRT3847_38465C.1
antactctgcatggtggtggtgagtgcacccatcgcacatccaactatcacatgcgggcaggtgacgaatagcctgatcaattgcatcagttacctccagatcggaggaacgcccacgtcggtatgctgcaacggagtgaatatcctcaatgccgccgacaataccaccgccgaccgccagactgcgtgcaactgcctcaagtcggccgccagccaaatctccggcttcaaagccaacaacagcccctcgctccccagctaatgcagagtctccatcccctacaagatcagcacctccaccaactgcgctaccatcaaa

SEQ ID NO: 74698 - DNA, 543 bp, Glycine max
  Clone ID: PAT_MRT3847_38466C.1
gggtgatggaacaaagaaattgaatgtggaagagatgcataagtctggtgaggaggggtctaaggaagaaaagagaggtgatttattgcaaagcaagggagatgagtgtgtcgaaaatcaaaggttgacaagaacaaagaggttgttgagaagatgggtgatggaagtagtaagaaaactatcaatgaagatgatgagaggaaagattctggtgtggattctggtaagaaagtgataatggaaagtaaagttgatgatggaaaagattcgttggttgcaaataagcactcggggaacaagaaagaggaggaggatcttgagtgggatgaaattgagaatcttagtagaattgatgaagagaaggaagttcggacgggtagccctaccaaagttgatttgcggaagcgcctcagtgctgctcaagagcaagacgaagaagacgacttgagttgggacattgaagatgatgatgaacatgctaaggcatgagatatgagcttcactttcatgagatttatgcatgtaagtgtggttttcataaca

SEQ ID NO: 74699 - DNA, 333 bp, Glycine max
  Clone ID: PAT_MRT3847_38467C.1
acatagcccaagccctatacaaccaaaccctaacacacacccaatcgatacagttttcatggctaggctgacggtcgcatttctggctgcagcgctctgcatggttgtggtgagtgcacccatggcacatgcagctatcacgtgcggtcaggtgacgaatagcctgatcaattgcaatcggatacctccagaacggaggaacgccgccgtcgggatgctgcaacggagtgaagagccttaatgccgacgtcaagaccaccgccgaccgccagacggcgtgcaactgcctcaagtcggccgtcagccaaatcttcggcttcaaagccaacaacg

SEQ ID NO: 74700 - DNA, 207 bp, Glycine max
  Clone ID: PAT_MRT3847_38468C.1
gggccgggaatcccgggggaccccgcctcccgcatgtgcatttatagtgactcgcagccccggcggaatgaaaccgcaaatcctacagagatagggtccagagattcccagcaggagaccacccacgatggataccggccgaggcggctcatcacctacgagccgccattccgcggaggacgctcacggcgtggaagcattaccagc

SEQ ID NO: 74701 - DNA, 387 bp, Glycine max
  Clone ID: PAT_MRT3847_38469C.1
gcaaaccctaacacacacccatttgattcagtttccatggctagcctcaaggttgcatttttggctgcagtgctctgcatggttgtggtgagtgcacccatggcacatgcagctatcacgtgcgggcaggtgacaagtagcctggccaattgcatcagttacctccagaatggaggaacgccgtcgtcgggatgctgcaacggagtgaagagcctcaatgccgccgccaataccaccgccgaccgccagacagcttgcaactgcctcaattctgccgccagccaaatctccagcttcaacaccaacaactcctcctcactccccatcaaatgcagaatctccatccgctacaatatcatcacctccaccaactactctaccatcaaa

SEQ ID NO: 74702 - DNA, 243 bp, Glycine max
  unsure (1)..(243): unsure at all n locations
  Clone ID: PAT_MRT3847_3846C.1
gtcncanncactcntacgtaagctcggaattctgctcgatncttatngtggatacctaggcacccagagacgatgaatggcgtantaagcgangaaatgctncgggganttgaanataagcggaganccggggattcccgatatnnggncaacctttcgaactgctggctgaatccacgggcaggcaagnnacaacctgntgaactgaaacatcttagtagccagangaanaanaaaacaaan

SEQ ID NO: 74703 - DNA, 414 bp, Glycine max
  Clone ID: PAT_MRT3847_38470C.1
cccaagccctatacaaccaaaccctatcactcacccatttgattcagtttccatggctagcgctaaggttgcatttgtggctgcagtgctctgcatggttgtggtgagtgcacccatggcacatgcagctatcacgtgcggtcaggtgacgagtagcctggccaattgcatcggttacctccagaagggaggaacgccgtcgtcgggatgctgcaacggagtgaagagcctcaatgccgacgtcaagaccaccgtcgaccgtcagactgcgtgctactgcctcaagtcggccgtcagccaaatctccggcttcaacgccaacaacgccgtctagctccccggcaaatgcggagtctccatcccctacaagatcagcaccttcaccaactgcgctaccatcaaggtctgaagaga

SEQ ID NO: 74704 - DNA, 301 bp, Glycine max
  unsure (1)..(301): unsure at all n locations
  Clone ID: PAT_MRT3847_38471C.1
gtagtgttgaaaattctaatancaacatcgaaaactacaaggcagaatgggagcagagagaacatcatcttgtcaactgcttaaagctaactgaagaagagaactcgtccctgggaaatnaaataaataggctgattcgtttactcaaggaaacctgagaagaagctaatnccaagagggaggnagaaggccaactgaaggaaaatctgaaggaagttgaggctgaggtgatccacctgcaggaagacttaaagaagcanaggctgagancatgaagttgaaggatagtctattggatana

SEQ ID NO: 74705 - DNA, 778 bp, Glycine max
  Clone ID: PAT_MRT3847_38472C.1
tggattcgtgggatagcccaagccctatacagccagggcctaacacacacccattgggttcagtttccatggctagcctcaaggttgcatttttggctgcagtgctctgcatggttgtggtgagtgcacccatggcacatgcagctatcacgtgcgggcaggtgacgagtagcctgatcaattgcatcggttacctccagaacggaggaacgccgccgtcgggatgctgcaacggagtgaagagcctcaatgccgccgccaagaccaccgccgaccgccagacggcgtgcaactgcctcaagtcggccgccagccaaatctccggcttcaaagccaacaacgccgcctcgctccccggcaaatgcggagtctccatcccctacaagatcagcacctccaccaactgcgctacgtaagaatatatataacttcattttaattatcatcatatttttttcccactctcactatactctctttttgctgatgaaattattctatagtctaaagtgacaaaaggatggcctttttacaagtataaaaaaattcattagaaagcctaacaactaactaattaattttcacctaacatgttttgaactaatatatcatgaaacaagcaaaatcttatattgtgaatgttatctcttttatttttgtatatttaaacccacgtaattccagtttttataatcagtcctctctgactcaagatcttgggtaagccttgtctaggataataatttagattaatttctatttgatacttagttgcact

SEQ ID NO: 74706 - DNA, 408 bp, Glycine max
  unsure (1)..(408): unsure at all n locations
  Clone ID: PAT_MRT3847_38473C.1
ctggaactctatgtagcttactagcagcagcagccttagcatgatcgttacctgctatgaatactacgagtattctgcaaataaattacacacttggtttgacatgagaaacattgtaccnntccaggagtagaaactcagggccattnnccaacacaatannctaatactnnatgtctaggcagcactatagagtaacaaaatctcactatgtctcttattaatcacagataccaagnctaaagatcaccttctgcttgtgcgtggattcctaagggcatttccattagcatatgggacctacgcacgcacacgataaagatgcgacctgctgtaagtacgtgcacgaggagacagactacggtgcctaggggaccgcccacgaggactnnnncnnctncgaccata

SEQ ID NO: 74707 - DNA, 453 bp, Glycine max
  Clone ID: PAT_MRT3847_38474C.1
atcgtgaataaataagtttatatactgaatacaactacggatacaaatgaagcagtcacctgaaatgaacgatgaaaaacctgacctagctctctacaattgggttacaccccccatcactcctcaagggatatatgagagactaaagcacacttgctagaattttagctaatcttccatggtatatgacatagctggcgttgcccaacaaaaaagaccaatcactgtttcgtagacatcctctggtgtaaggaggaaaaagcatgatccttctcatactgttgagggctagaccacactgctggagctcctgactgaggttgattcactcccattgtgggaatcatacctgtaactggaggaggaacttgacccataccttagaatctggatggtggatattgaacaaagctctctgctaagagtgctggggtcatgctcctaggctgaccc

SEQ ID NO: 74708 - DNA, 518 bp, Glycine max
  Clone ID: PAT_MRT3847_38475C.1
gtgggcaagatgagactactttctaaaacagggtttcactacatattacactttcttaaccttcatatcccaggcgacataatattatggatcacacccacagactaattaagatcaacccaatagcttttattttttgaactatataaggtttgattattctgcacaagcacaagctttcctgccatttatcccaggacaccaaacactagtaaattgttgggaggagccctcggtttttattaacaggaacccccctaaccccttccacattcttgaagccctgggaattaaactgggggtttgggccccaaaaaaaacacccttggaatggcctttaaaagttaaaaccttgggtttttaacctgaaacttgggacccacctaaaactttatgggagtatccaacacaaattttggggacccctgggttggcttaaaaaaatcctttaacaagggtggggccgggaaaatgacctcctttttacccgggttgttaaaagaaccttttggcatttt

SEQ ID NO: 74709 - DNA, 678 bp, Glycine max
  unsure (1)..(678): unsure at all n locations
  Clone ID: PAT_MRT3847_38476C.1
cacgcgtccggccatagtggcattgcctcggttctggtcgtagctatatgggtactcaccgaagggaaggataaatgcttgaactctgaagagtcacctctgatcactgctctcattggtgctgttataggccattattcctgctgcaatggagatacttggtcttcggagcttggaattctcagtgatgagaagcctcgtctaatcacaaacttcaagtttgtgaagaaaggtacaaatggtggtgtgacaaaaagaggacttctagcagctgcagcagctggaagtgtcattggactgtcgtttgttcttttgggaatctcagctaccagatgtgagggtaagggtagtacagttcttaagcaactactggtcatacccatcgccacccttgcaggactatgtggaagtgtcattgactctctcctgngtgcaacattgcaattcaccggattttgctccattcgcggcaagatggttggaaagccaggaccaacagttagaaggatttcaggtgccaacattcttgacaacaacgcagtgaatttcgtatcaatactgttgacctcattttttacttcaatcgcttgtttgtacattttctgaattcatcacaagaaggggttatgcagccaaaaggatccagagttcgaaaccttgtaattcagtggaattaga

SEQ ID NO: 74710 - DNA, 362 bp, Glycine max
  Clone ID: PAT_MRT3847_38477C.1
acagtccagcaactcctgtgagaattcgaatggcttgtttagatgaattgtcaagtggaattgtttgagcgtgaatttttgcattaatgaaggctggaacctatgataaggggatatctgatgatgactggaaaatactgctaaagtggtcatagtcaatgaaacgaggattcacaattgttttggaggcccattgcatttaggctagtggaaaattgagccgatcacgtggctatttatgttcaggtaccgagacgggcgactatatagggaatgaacgtggactccccacgctttatttacgggatccgaagaatgatcaaatttcttagatctatgctccgttgtgcgcatatacacca

SEQ ID NO: 74711 - DNA, 253 bp, Glycine max
  Clone ID: PAT_MRT3847_38478C.1
ggcggacccgacaaagattgaagaagaactggagaagaacaaggcagaggctgcagagaaaatagaaaacaaagttgctacaatccacaaggaggctgaagaaagaagaacaataattgaggcaaagaagggtgaagatctgcttaaggcagaggagcaagctggagagtatggagcaactggaacagctacaaagaaactccttggttgcttctaatgctttaaatcttaagcattgcgggaaacagaacaa

SEQ ID NO: 74712 - DNA, 163 bp, Glycine max
  Clone ID: PAT_MRT3847_38479C.1
caccatcgacgacgtgaaggccaagatccacgactaggatcgcatacctcacgaccaggagctgcttatattcgtcggtaagcatctggaggacggacgcaccctcgccgactacaacattcataatgagaccacgctataccttggcctccgcctacgtggc

SEQ ID NO: 74713 - DNA, 163 bp, Glycine max
  Clone ID: PAT_MRT3847_3847C.1
tcttcttggcggctgcctttgtgaccttggctcccgtggggtctttcttctcaacactcatgatgacttcaacagctactgtctgacacatgttcctcacaacacaacgaccaatgtgaggatactccaagaagattgcaaccaccattgggcttggttgtaa

SEQ ID NO: 74714 - DNA, 285 bp, Glycine max
  Clone ID: PAT_MRT3847_38480C.1
cttgaacgatgtcgtttcaaagagctttgttgggaggtacttcaagttggaagcaaggaagagttgcttcaccagggagcttcgtgccgccatggccacttttctgaccatggtatacatcatcaccgtaaacgccaccatcatcgcggtctccggtggaacctgctccgtcgaagattgctcgtctccgacgaggccggactgtaaggtgaagcccgacgttgggtacgagagttgtcttgcaaagacgaagagtgacctggttgtggccaccgctgtttctgg

SEQ ID NO: 74715 - DNA, 2259 bp, Glycine max
  Clone ID: PAT_MRT3847_38481C.1
cccaggctattcgctaaacccaaaacactattttattatcttcttcgtctgttctttgcattgaagaaaatttctttgaattgaagaaaacttgaaatcgaattgtgaaacagaaaataaaccaaaggaaatttttactgattgaattgcagagattggaaaaatggcgttgagtatgactcaacagatcgggaccctagctggtgcgacggtgccggattcctcggccggagaatcgaccgcggcggtgagtgccgccgcggtgtggaagtcaccgacggcgagtctgaagtgcaaggtaatgaggacggatggctgcgcggaggggctttcgccgccgctgagtccgtgcaggtcgccggtgctgcgggcggatctgtcggcggcgtgtcaggcattcacggcggaggtggcggaggaggagtacgttgccggagggaaggaggagaaagggaaggggaaggagggagtgccggtgtttgtgatgatgcctttggacagcgtgacggcggggaacgcggtgaaccggaaaaaggcgatgaacgcggcgatggctgcgctgaagagcgcgggggtggagggggtgatgatggacgtgtggtggggtttggtggagagagagaagcctggggagtataattggggagggtacgtggaactcatggaaatggcgaagaagcatggcctcaaggtgcaggctgttatgtcatttcaccaatgtggcggtaacgtcggagactcttgcactattcctttgcccaaatgggttgtggaggagattgataatgaccacgatcttgcatatactgatcaatggggaagaagaaactatgaatatatatcacttggatgtgatactttgccggtgctcaagggacgatccccagttcaatgttatgctgatttcatgcgtgctttcagagacactttcaagcacctccttggtgataccattgtggaaatccaagttgggatgggaccagcaggtgagttgcgttacccttcgtacccagagcaaaatgggacatggaaattcccaggaattggtgctttccaatgctatgacaagtatatgttgagtagcttaaaagctgctgctgaagctcacggtaagcctgaatggggaagcacaggccctactgatgctggccactataacaactggccagaagacactcaatttttccgcaaagaaggtggtggatgggatggtccatatggtgagtttttcctcacttggtactctcagatgctgttggaacatggtgacaggattctctcatcagccacgtcgatctttgacaacactggagttaagatctcagtgaaggttgccggcattcactggcactatggtacaaggtctcacgccccagaactcactgcagggtattacaacacccgattccgtgatggctacctccccattgctcaaatgctggcgcgccacggtgccatctttaacttcacctgtatcgagatgcgcgatcacgagcagccacaagaggccctttgtgcacctgagaagctggtgaagcaagtggctctggcaacgcagaaggcacaggttccacttgccggcgaaaacgcgctgccacggtacgacgagtatgcacatgagcagatcataagggcatcacaattggatgttgatggtgagtctggtgatagagagatgtgtgccttcacatacctgaggatgaatccgcatttgtttgaaccaaataactggaggaagtttgtggggtttgtgaagaagatgaaagaagggaagagtgcacacaagtgttgggaagaggtggagagggaagctgagcattttgtgcatgttacacagcctcttgtgcaagaggctgcagtgctgatgcactgagaattgttgaacatccttgtggtaatagggcttaggaataagtcacaaggaggctgtgtgaaagttttagtgaaccaacagcccaggtttgtggctttgaagatgtaaaattttgtattatattgttttgtattgtatgcacctaaaacttctatttgtgacccttttacattgtgtacgtaatcatagactttggggtactgtttccttaaaagttactctactttgtacaagtagttacttaatctggtttataaaaatgtcataaggcgtaacagcaacaagagatgctattttcttctatagggaaaaatgaatttaaaatcaatgattttcgttgtgtttaatttaagcaaccttcaccggtcttgaatctttaatttgct

SEQ ID NO: 74716 - DNA, 495 bp, Glycine max
  unsure (1)..(495): unsure at all n locations
  Clone ID: PAT_MRT3847_38482C.1
gactgtataaaatttagaacacgagncaagagaggacctttgtggtcagggtccaaactataaaatcgctgttccctattacatgtctgcgaggtcccagccgggaactgcaccggacataggtttgttacattctctcctgatatgccttcacattctataatacaagacacctggttcactttcccttgatcccgagaaattgataaaaccctggtatcttaatacacactgatgttagtgcgcggacctgtcagattcacttgactaaatctatagtattgtgtactagatgcaccccttatatgaaacataacaatcggcttcttattcagtgacaccatcaatagctgcacgcttcacatgttcacgtgtaccactacctcttgtgggacttagggatacgaattgttgtctacgagcactgcatgcttcagggacgacaagatgcataccgctcttaggtgaccattcccaccatctttgacgctccca

SEQ ID NO: 74717 - DNA, 220 bp, Glycine max
  Clone ID: PAT_MRT3847_38483C.1
tcagttggcgacctttaagacgcgcgactgcgaggctgactagtacctcatcaaatacgtgggcgttgaaccaccagaggagagtcgttaagtgccaacggggaacaccacaactcatgtgatgctgggacttcatgtaagacacggacaagctccgaatggagccatggctcacaaaatgcatatatgaatgtgatgggaatatgctaccaaggaaata

SEQ ID NO: 74718 - DNA, 268 bp, Glycine max
  Clone ID: PAT_MRT3847_38484C.1
tttggttttcgctaggggtaggcgatcgatgcactcagggattctaatatgaggcggggagcacagggaccatgagggcggggactacagagagagacatgacattcgtaaccgaagggctagaccacatggtgatggactcgaggagggggagccactgatgaacaccaagcacgacttgaagggacttaaggacaatggcactgacaactactgctccagagatggcacacgataacaagttacgagcagtcatgggcaagaaacc

SEQ ID NO: 74719 - DNA, 434 bp, Glycine max
  Clone ID: PAT_MRT3847_38485C.1
ttatatgagagctccctcagaatttcttaatgctcgtccatgttgcatattgctttttattttctttttacatatgtatgatgaatgttaagccattctcatgtgccatgatgttctgagcaattgtgtttttctcttgttgcattacttgtattctatctgttttgcttttatttttgcagagcctcttgtatacattcctctttgttttcaactgcaaaattatatctgaatcttagtgataattgaagcaaattgctcgttactttgcccaatgatgcacaaatagattgttgagcagctacatggtatctatcataacctgaagtgcacctttctctctctgtctccctgtctctctctccctctctctcaatatacctcttttcctctgtgtgtgtgtgtgtgtgtgtgtttgtgtgcgtgtgctttgc

SEQ ID NO: 74720 - DNA, 347 bp, Glycine max
  Clone ID: PAT_MRT3847_38486C.1
agggggaaaaaaaaaagggatgttaacctttaaaccacattaacatccttttataatcattccataaaacaatgttggaataattgaccccttaagactgctggtgggcaaaacaaaatgaccagggggcgggtaccaaatgggtgcattcgggcttcccccccaaaattattatagcttgcaagagccgcccgcaaatttgagctcagttccctaataaactacttgccctttgaccaaaattttcttaattggaagtacatttgatgaaactttgaaaaagatcctggttaaggtttaaaaggggcccctactactaatatctcttaaaatggccgacctttggg

SEQ ID NO: 74721 - DNA, 729 bp, Glycine max
  Clone ID: PAT_MRT3847_38487C.1
tctcactctggggcccctgctcgacctggctccctcactctctctgctccgccgccacggaggttgatttcggccaccataggccttgccttctgattttgcccaatccaagctgcgaccatcaaagctatttccgcccaccacgatacatttcatgaggtgagaaggagacgtgactgaaaggaggagtcatatgacaccataatgttggaaaagtatggagaagactcttcaaagcatccattggttgattcaacagtgtgggcagatgtgtcagattcaaagaagagacaaatttttggaactatggctacttcatcttcaaagatcataggtccctcccacatttgaatttctacacaagaagtttattaaggaagctgtaaatgttgccatgacttcttttgttgataatcgtttaatgcctgtgttggagcccattatatctttctttggtgactcccaagctagagcaactgaggaggatcatgaggactcataatgaatgttggtgctccttggcagcatagtgttaaagcaaattggacctttaggcacaagattgttgatttagagaaagattgtttgagattacattaatttaactttattttgcaaaaaaattggacctttaggattttatcatttgttctgttgtgactttctaattttatatgttgcaaaaaaaaaaaaaattgttttgcatgattaggaatatggttcttcttt

SEQ ID NO: 74722 - DNA, 178 bp, Glycine max
  unsure (1)..(178): unsure at all n locations
  Clone ID: PAT_MRT3847_38488C.1
ctcggaattcggctcgagcttgattgctgaaatttctggcttggacagctcaagctttgtttcccaccttgtttattgaagtattatattttggtttttttgagctactttcctaggctattttagggaacanatgggacattatttgtggtgtgtaaaaatcatgagttacctgttt

SEQ ID NO: 74723 - DNA, 138 bp, Glycine max
  Clone ID: PAT_MRT3847_38489C.1
ccacgcgtccgatgttgtatgggatgatcgattctgctcaatattttgctcgcagtgtctaacagctgatggtccattatttgcaagcgaacattacaggtggttccttgagacatggctgagcgtgatcacatgaat

SEQ ID NO: 74724 - DNA, 255 bp, Glycine max
  Clone ID: PAT_MRT3847_3848C.1
caaacaccaaccttcaaaaattacccgaaacttttctcaatttgagggaccccacaccacacctatcttaacctcataaccacttataatataacgcctaactattactattatacaccaacaaaacgctcatccaaacaaaaaattaagcaaactatcacttatataaaatcttataaacacataaaaatatcataaccaatcaaaaacaaaaccctaatttttcccaaccaacaaaattacatgtttacaaca

SEQ ID NO: 74725 - DNA, 407 bp, Glycine max
  Clone ID: PAT_MRT3847_38490C.1
cggtcacgaattaccgggctgacccacgcgtcaggcgagaacacgacagccaggaagagtgtgcttggtgctcccagatcgtcctggaggatcctgtcatccattcaacaccacgcatatactaacgggaactacttgagtgccaaccagcatattgagtacatacggacagttgaattggatctagccatcatctgctgtgatgttatgatagtgattgatgagcaccttatgccttctgctgcaactggtgaatccaccgtcttttactatcacatcatacgacattattatcgttatcttgctaaatttcagtcaagccctgacaccaacgaagctgctgatcagtctactatagcatctgagtctgctaccgctgcattcacaagctgatttacctcccacac

SEQ ID NO: 74726 - DNA, 2433 bp, Glycine max
  Clone ID: PAT_MRT3847_38491C.1
atggaagacaatgagagggtctgtgattatttcacaagattgtttagaattgtgaacaaaatgcaagaatgtgaatcatatgggagaaaaagggaaccaggatcaagtaataagggtggaaaaggaaagtttgacaagagtaagatcagatgctacaattgtcaaggctggggacactttgcaaatgaatgtggaagtgcagatgtaaaagagaagaaggagaaatacagtaaaaatgaggctcatatggcacaagcaaagcaacatgatgatagtgaaagtgattcaaacggagaagcagttgtattaatgacaaccacctgcaactttaccagtaatggagattcagaaacatggtatttggacactagtttctcaaatcacatgacttgtaatttgagttggctagtgagtcttgatgatagtaacaaatgcactataaagtttgcaggtcaaaatactataagaagtgtgggaattgggaatgttgctttcagaaggagtaatgaaagccttgtagtaatagaagaggtgatgtatgtgccagatatggggtgtaagctgatgagctacggccagcttcttgagaaagaattttcaacatccttgaaaaacaagatcatagtttctaataagatttgtgagagatgcttgacaagcaagcaacccaggaactttttcaaatcagaatcacatgcaagagcaactgaagtgctaggagttgttcactctaatgtgtatggcccactggaagtgttttcaatgggagagttcaaagtgttgaatgaaaatcacagtggaaagtcaatcaaaatcattagaactgatggtggaggagagtacacatctaatgattttgaatctttctgtactaatcatggtataatgcacgagatcactgcttcctatactcctcagcataatggtttggctgagaggaggaacaggacaatgatgaacatggcaaggtgtatgttgaaagagaagcattttccatcaactttatggggagaagcaatgtccactacaacatatattttgaataagtgtcccacaaagaagataaaaaatagagttcctgaagaagcatggacacgaaggaagcctacaatgaagcatttgagagtgtttgggtcactatgtttcaagcatatgcctgatgaaaggaggaaaaagcttcaggacaagagtgtacctatgatactggttggatatcatccaactgatgcctataggttgtatgatccgttaactcacaagatcttcatcagcatagatgttgtgattgatgaagatggctcttgggattggaagaggaagtgcactatcagcaccttgtttggagatgagaacaatgagactagactcagtgaagtagaagaaataggagctgatcatgaaaaacctgctgatgtgcatcagagaccacaaagagacaagcacctgcctttgaagtataaagattatcatgttgatatgcctaacattcttgggcatgctgcagtggcagatgaagaagagaaggaagaagcaaagaggaaaacaagtgagtttgtgcattttgcctttttggcagacactgaaccaattgatcacaaagatgcactacaacaagatcattggaaagctgcaatggaagaggaattgagagcaattgaaagaaatcagatctggaaacttgttgacttgcctccaaacaagtcttcaatagatgtgaagtgggtgtttaagcttgatgtaaagtcgacattcctcaatggtactttggaagaagaggtctttgtgaaacaacctcctgggtttgagatcaagggtgaagaagacaagaagtatgcaacaaacttgttgaagagatttaagatgatgagctgcaacctagcatccactccagttgatccaggcttgggattagtgaaagatgagtcagaaaagtcggtggatagtaccctattcaagcaggtcgtagggtcattaagatacctctgcaacacaagaccagacatttcttttgcagttggtttaattagtaggtttatggataatcctaaagcctctcattgggttgttgctaagagaattatgagatatctaagaggaacactcagctatggtgttctattttctaaggattctgatcaaactgctctcacaggcttggttgaaattttagaatctataactatgttgatgggtttctcagactcaaactggtgtagagacaaggtggaaaggaagagcactacgggatatctcttcaagttcctagcacacgaaagatcaaaacacatagagacaagatttcactttatttgtgaaaagatgagcaaaaaacaacttgacttgaagtactgcaatactgaaatgcaacttgctgatattctcacaaaaggcttgaaagtgaagagattcatagtattgagagacaagctttga

SEQ ID NO: 74727 - DNA, 130 bp, Glycine max
  Clone ID: PAT_MRT3847_38492C.1
ggagacgtcgaggatccgtcctatatcattggccagaagccagggccctacgtcgaggagaccagtcgaaatatctactgtcagctctgtgctcgcatcgccttctgcggcatcgacgcacgatccgatc

SEQ ID NO: 74728 - DNA, 2700 bp, Glycine max
  unsure (1)..(2700): unsure at all n locations
  Clone ID: PAT_MRT3847_38493C.1
atgaatgagagaagcccagtaaaatttcaagatcaggctttatatgcttcaaaacagaagcaaggaggaaagaccaagaagtggaaaggaaattttaagaggcagagcaataagcaggaaggaaagagcttttcatttcaaggaaaacatgatcatactgattctgatcaggatcaatcagaatcatatgggagaaaaagggaaccaggatcaagtaataagggtggaaaaggaaagtttgacaagagtaagatcagatgctacaattgtcaaggctgnggaccctttacaaatgaatgtggaagtgcagatgtaaaagagaagagggagaaatccagtaaaaatgaggctcatatggcacaagcaaagcaacatgatgatagtgaaagtgattcaaacggagaagcagttgtattaatgacaaccacctgcaactttaccagtaatggagattcagaaacatggtatttggacactagtttctcaaatcacatgacttgtaatttgagttggctagtgagtcttgatgatagtaacaaatgcactataaagtttgcaggtcaaaatactataagaagtgtgggaattgggaatgttgctttcagaaggagtaatgaaagccttgtagtaatagaagaggtgatgtatgtgccagatatggggtgtaagctgatgagctacggccagcttcttgagaaagaattttcaacatccttgaaaaacaagtttctagatttgctagatctaagtgatgtgagagtgtttaaagtcccattgtccagaaatagaacttttcaagtgaacatgaataatgctgatgtgcaatgtctggcatcaaccgtcaatgaagatgagagctggctttggcattcaagacttgggcatttgaatttcaagggactgaataaacttccattaccaaagttagtgagggcctggcccaggatcaaagtttctataagattttgtgagagatgcttgccaagcaaaccaacccaggaactttttcaaatcagaatcacagcaagagcaactgaagtgctaggagttgttcactctaatgtgtatggcccactggaagtgttttcaatgggagccaaaagtgaagtgccctttgttttcaaagagttcaaagtgttgaatgaaaatcacagtggaaagtcaatcaaaatcattagaactgatggtggaggagagtacacatctaatgattttgaatctttctgtactaatcatggtataatgcacgagatcactgcttcctatactcctcagcataatggtttggctgagaggaggaacaggacaatgatgaacatggcaaggaggaaaaagcttcaggacaagagtgtacctatgatactggttggatatcatccaactgatgcctataggttgtatgatccgttaactcacaagatcttcatcagcatagatgttgtgattgatgaagatggctcttgggattggaagaggaagtgcactatcagcaccttgtttggagatgagaacaatgagactagactcagtgaagtagaagaaataggagctgatcatgaaaaacctgctgatgtgcatcagagaccacaaagagacaagcacctgcctttgaagtataaagattatcatgttgatatgcctaacattcttgggcatgctgcagtggcagatgaagaagagaaggaagaagcaaagaggaaaacaagtgagtttgtgcattttgcctttttggcagacactgaaccaattgatcacaaagatgcactacaacaagatcattggaaagctgcaatggaagaggaattgagagcaattgaaagaaatcagatctggaaacttgttgacttgcctccaaacaagtcttcaatagatgtgaagtgggtgtttaaggtgaaattaaagccttatggaattgttgccaagcataaagcaaggctaattgcaagaggattcctccaaagagctggtttggattattcagaagtgtttgctccaatagctaggctagaaaccataaggttgcttgatgtaaagtcgacattcctcaatggtactttggaagaagaggtctttgtgaaacaacctcctgggtttgagatcaagggtgaagaagacaagaagtatgcaacaaacttgttgaagagatttaagatgatgagctgcaacctagcatccactccagttgatccaggcttgggattagtgaaagatgagtcagaaaagtcggtggatagtaccctattcaagcaggtcgtagggtcattaagatacctctgcaacacaagaccagacatttcttttgcagttggtttaattagtaggtttatggataatcctaaagcctctcattgggttgttgctaagagaattatgagatatctaagaggaacactcagctatggtgttctattttctaaggattctgatcaaactgctctcacaggcttggttgaaattttagaatctataactatgttgatgggtttctcagactcaaactggtgtagagacaaggtggaaaggaagagcactacgggatatctcttcaagttcctaggtgcaccaataagttggtgttcaaagaaacaacctatagtggcattatcttcctaccaagctgagtacattgcagcatgctatgttgcatgccaagcactatggctagactctttacttgaagaattgaagatagaaatttag

SEQ ID NO: 74729 - DNA, 2727 bp, Glycine max
  Clone ID: PAT_MRT3847_38494C.1
atgaatgagagaagcccagtaaaatttcaagatcaggctttatatgcttcaaaacagaagcaaggaggaaagaacaagaagtggaaaggaaattttaagaggcagagcaataagcaggaaggaaagagcttttcatttcaaggaaaacatgatcatactgattctgatcaggatcaatcagaatcatatgggagaaaaagggaaccaggatcaagtaataagggtggaaaaggaaagtttgacaagagtaagatcagatgctacaattgtcaaggctggggacactttgcaaatgaatgtggaagtgcagatgtaaaagagaagaaggagaaatacagtaaaaatgaggctcatatggcacaagcaaagcaacatgatgatagtgaaagtgattcaaacggagaagcagttgtattaatgacaaccacctgcaactttaccagtaatggagattcagaaacatggtatttggacactagtttctcaaatcacatgacttgtaatttgagttggctagtgagtcttgatgatagtaacaaatgcactataaagtttgcaggtcaaaatactataagaagtgtgggaattgggaatgttgctttcagaaggagtaatgaaagccttgtagtaatagaagaggtgatgtatgtgccagatatggggtgtaagctgatgagctacggccagcttcttgagaaagaattttcaacatccttgaaaaacaagtttctagatttgctagatctaagtgatttagttgagggcttgcccaggatcatagtttctaataagatttgtgagagatgcttgacaagcaagcaacccaggaactttttcaaatcagaatcacatgcaagagcaactgaagtgctaggagttgttcactctaatgtgtatggcccactggaagtgttttcaatgggagccaaaagtgaagtgccctttgttttcaaagagttcaaagtgttgaatgaaaatcacagtggaaagtcaatcaaaatcattagaactgatggtggaggagagtacacatctaatgattttgaatctttctgtactaatcatggtataatgcacgagatcactgcttcctatactcctcagcataatggtttggctgagaggaggaacaggacaatgatgaacatggcaaggtgtatgttgaaagagaagcattttccatcaactttatggggagaagcaatgtccactacaacatatattttgaataagtgtcccacaaagaagataaaaaatagagttcctgaagaagcatggacacgaaggaagcctacaatgaagcatttgagagtgtttgggtcactatgtttcaagcatatgcctgatgaaaggaggaaaaagcttcaggacaagagtgtacctatgatactggttggatatcatccaactgatgcctataggttgtatgatccgttaactcacaagatcttcatcagcatagatgttgtgattgatgaagatggctcttgggattggaagaggaagtgcactatcagcaccttgtttggagatgagaacaatgagactagactcagtgaagtagaagaaataggagctgatcatgaaaaacctgctgatgtgcatcagagaccacaaagagacaagcacctgcctttgaagtataaagattatcatgttgatatgcctaacattcttgggcatgctgcagtggcagatgaagaagagaaggaagaagcaaagaggaaaacaagtgagtttgtgcattttgcctttttggcagacactgaaccaattgatcacaaagatgcactacaacaagatcattggaaagctgcaatggaagaggaattgagagcaattgaaagaaatcagatctggaaacttgttgacttgcctccaaacaagtcttcaatagatgtgaagtgggtgtttaaggtgaaattaaagccttatggaattgttgccaagcataaagcaaggctaattgcaagaggattcctccaaagagctggtttggattattcagaagtgtttgctccaatagctaggctagaaaccataaggttgcttgatgtaaagtcgacattcctcaatggtactttggaagaagaggtctttgtgaaacaacctcctgggtttgagatcaagggtgaagaagacaagaagtatgcaacaaacttgttgaagagatttaagatgatgagctgcaacctagcatccactccagttgatccaggcttgggattagtgaaagatgagtcagaaaagtcggtggatagtaccctattcaagcaggtcgtagggtcattaagatacctctgcaacacaagaccagacatttcttttgcagttggtttaattagtaggtttatggataatcctaaagcctctcattgggttgttgctaagagaattatgagatatctaagaggaacactcagctatggtgttctattttctaaggattctgatcaaactgctctcacaggcttggttgaaattttagaatctataactatgttgatgggtttctcagactcaaactggtgtagagacaaggtggaaaggaagagcactacgggatatctcttcaagttcctaggtgcaccaataagttggtgttcaaagaaacaacctatagtggcattatcttcctaccaagctgagtacattgcagcatgctatgttgcatgccaagcactatggctagactctttacttgaagaattgaagatagaaatttag

SEQ ID NO: 74730 - DNA, 740 bp, Glycine max
  Clone ID: PAT_MRT3847_38495C.1
tcgcgatctagaacataaattatatgattttggaatatggcaaggaaggcttgggggataaggcgctttggatttttgtggatatgctacaatctggattgaaaccaagtgattacacgtttacgaatttgatcagtgtgtgtgattcaagtgtaggattatatgtagggaagcaactacatgggcttgcagttaagtatggttttatgtgtaaaacatctcttggaaatgcagttattacaatgtatgggcaacatggaaaggtcaaagaggctgagagagtgtttggtgaactggatgagaggtctttgatttcctggtctgctcttctttcagtgtttgttaagaacggccattctaacaaagcctttgaaattttcctaaatatgcttcaagttggtgtgcctcttgattctggttgcttcagcactgttttagatgggtgttcagagtggaataatttgaaatttgggattcaaattcatggacttgcaataaagcttggtcatgtctctgatgtaaatagtggtacttctttagtagatttgtatgctaactgtggaagtttgcagtctgcaagagtgatttttgacaggcttccaaataaaacaattgcttcatttaatgctattctagttggataccagaattcaaaaataagagatgatgaagaggaccctatgggttttttcagcaaagtaagattcaatggtgtgaaaccagattgtgtaacgttttca

SEQ ID NO: 74731 - DNA, 399 bp, Glycine max
  Clone ID: PAT_MRT3847_38496C.1
aagcaccaaataaccactttttaccctttttttttatgagagagagaataccaagcccactggtcacaggatgatgctctctttaagtagggaagcaaatcttatcaggacacatagggggggtgaaattctaactctaacaatctaactagaaaaaggaggacttgcacaacacacaggacatgataatttattttatacacaatctcattctcatggggctcaaaatgcatgggctaattaaacaacaatgttggtctgataggcaatgtccacaaataaattggggacccataaaaagggcctgcttccaaagaaatgggaaacaagggtaggtccaagaacaacccccataaagtgatgaaacatttgatgattcattcccaaaatatttgaggg

SEQ ID NO: 74732 - DNA, 261 bp, Glycine max
  Clone ID: PAT_MRT3847_38497C.1
aaacaacataatttacgatttttacacgctccccaaactttagacatttgttaatttcataaaaccacagcccatctttatttcataaactcttaatacaatctaatccaaataattcatcatcaaattattctccaatcttaaaatccacaacaacaatgattaaaagatttctcaacaatctcctatctctctcactctcaatcaccaaaaaatgtcatcacacttaacttccccatctcaacattcactattaccatt

SEQ ID NO: 74733 - DNA, 249 bp, Glycine max
  Clone ID: PAT_MRT3847_38498C.1
aaaaaaaaaaagggctccctttttttttttgggacaaaccttggccaaattattgttttaaacctgttcgaaatccaaagagggtccttgcataagggttttttaacctccatgaaaaacctgttggtgttgcacattgaaaccccccccagcccccccctgaaaaaaaaactcgggagcttgggttgtttgatctgggggcacttgctcgggattttgattggggggccttttcagggggttttaaaa

SEQ ID NO: 74734 - DNA, 1164 bp, Glycine max
  Clone ID: PAT_MRT3847_38499C.1
gttttgttatacacgcggctcgggacgacagagggggactcttctacgtaccagtttgctgatggtgaagcatgacgcatgagatgcgatgagatcccctttttgatggttcacttcacacttctttgtatccaaatccaacagttttctcccacattcagctttgacacttgtatctcattcatagatggagtcaccccacgcatccctcttcatcaaattcaagacaccaatctttttctgcttcttcctaagcactctttcagtctcagcttcttcaaaatcaacccatctattccccaaagaagctcttcccaacaagtatggttaccttccaatcagcaccacttccacttcttccattttctatgctttctatgaagcccagaattccactttacctctcctccagaccccacttctcatttggctccaaggtggccctggttgctcctcaatgcttggcaacttgtatgaacttggaccctggcgtgtcaccaaatcactcaccctacagtccaaccctggtgcttggaatagaatttttggacttcttttccttgataatcccattggaactggcttcagtgtggcctcaaccccagaagagatcccaaaagatcaaaacactgttgcaaagcacctttttgctgctataaccaggtttgttcaacttgatcctgttttcaagcatcgccctatttatattactggtgaaagctatgctggaaagtatgtgcctgcaatagggtattacatattgaagaaaaagttggaagtttctgaaagctgaaccgacggaaaactcagtcatgctctgaatgattattatgatggattgatcaatcagaggtttgggtgaagaaaacgcaatgggaagggattgtagattttctgaatgctgaaaggaagatatggaaggttaatggagagcttgctgggtatgttcagaattggaagtctctaaccaatgttgtggttttgggggctggccatcttttgcctactgaccagcctgttaattctcaaaaaatgataaaagattgggttttggaaaggggtgtgtttaaaagtgtgcaggatgaaaatgtatccaaaaagtctatatgtgttatgtaacgattgagactcatcatcaattgaataaatatgtcatggttccgg

SEQ ID NO: 74735 - DNA, 571 bp, Glycine max
  Clone ID: PAT_MRT3847_3849C.1
gttttgggtttttgggggttttttttttttgggcgacgaaaacaacactccttcatttaaatttcaattgaggggttacattttctgagcaaacatagcttcgggtgggacagaacaaaccaaaacctaaactaaacttcacgcgaattcaaaagaaccaatgggggaggcggcgacacaggcattaaacctaaagattctattctttaacctccaaaacgcatagagggggcttccctggctcttgagagcgtaaacgacatccataggaggaacaggtttcctcctagcgtgctcagggggggggacaggatcgggaatcagggggtccaaaaatatcttcagaactcctctgggttcctcggaaatcaaaccactggtcctcttcacgcgacctcttctcggtaacctacgaatcggaggggttcggagtccttgaatggggggacgaagaacctttctgggcctcttaactgctccctttcccaaacccttcccaccttttccacgggctgggattgtgggggggaaatttggggggaacttaagttggggtccccttttggggggt

SEQ ID NO: 74736 - DNA, 1275 bp, Glycine max
  Clone ID: PAT_MRT3847_384C.1
acgcacaccataatctgtttttttcggctgcgctatcatttctgaagggtattgcgcggaattcagatctagcgtttgcactttgcacaatgcgagttctataggatcgtttggttatgccgattagtgttactaaaacaacgtttttgtgatatcgagaaaaaagaaaaataaaaagtgatgtcgaggagaccggggaatccttatagaaggttcggtgacagtggcggtggactgttctcgaaatctaggtcgccaccggttttgtctattgcgctcgtagttgtgggaggtttgtttctcgttggctatgtgtatagaggctcaggtggaattggaaaccgtatagaatctgttagcagggttgaaggtgattatttgtgcagtggagaggtccaacaagcaattccccttttacagaaagcatatggagatagcatgcataaagttttgcatgttggtcctgatacttgttatgtggtctctaaattgctgaaggaggatgaaactgatgcctggggaatagaaccatatgatacagaggatgctgataataattgcaaagcacttatacgtagaggcagtgtgcgtgtgtctgatatcaagtttcctcttccatacaggccaaaatctttctctcttgtaattgtttcagatgctctggattacctgtctcccagatacctcaataaaactcttccggatttggtgagggtagcatctgatggtgtagtgatatttactggttttcccaccactcaaaaggccaaggtagctgatgtttctaaatttggaagagcggccaagatgaggagttcatcctggtgggtcaagtttttcctccagattaacttagaggagaatgaagctgctgttaagaagtttgaacaggcttcaaccaagagttcatatgttccaaaatgccagatattccacttgaagtcactccattgactcgtgggatggttcagcattggagctctgattgctgcttctccgttttcatttaaaacactttcttctctataaaggcaatttaattctttgaaatatactcgccatagatggtgtatcgcttttgttgatagatttttattctttgaattccagcccctggctgtaaaagacaaatcaatttagtatttttactaaattattagttgaattaggcgatctataagttgcagtgattgttgtgctaaagtaatattccttcttttgttgagatataaattaaatgttatcatattttctggaatacattgtcaaaaggag

SEQ ID NO: 74737 - DNA, 130 bp, Glycine max
  Clone ID: PAT_MRT3847_38500C.1
gaaggggtctgtctttctgcttttgaatttgcactgggggaatggaaggtggggccgtccttgaacggtctttttctggtgccgagacctggtggaccggccgttcttgcttggttccagggtggttttc

SEQ ID NO: 74738 - DNA, 506 bp, Glycine max
  Clone ID: PAT_MRT3847_38501C.1
aaaacaaatttccatttttttaccttttctttcttttttttttataataaccatttcccttttgcccttgttggggggccaaaaaacaaaaagaatggaaagaccaaaaattctaggccagaaagtaaaaaacaataaacaaaaaaaggcccaaagctccggccacacaaacccccaaaagaaaaaacaaaacccggtattaaatccaaaaccccatccaacgaacggaaccaaaaaaggacgggggggggcacaacccccgggaccccacttggggacctttggccggtttttcccccccttcgagacacctttaaaccccccaccacccccattctttttttcagaaacaccaaattcccctggcccccccctttcccgggaaggaggcacgggccaattctttcctacattcccacacaaaagggttatgacagcaccggccttgggctttttcatcaaaacaacttcccaaaatcccaattttcccttccccttccttaaac

SEQ ID NO: 74739 - DNA, 443 bp, Glycine max
  Clone ID: PAT_MRT3847_38502C.1
tgaacaaaaggataaaataaatagttcccttttatctcaaaattctcatcatatatatactatttcaatgggcttcgcatacataaacctcattattttggtaaggtaatattatctttattatataataattattattattagaacaaggggaacatgagttactctttatgttaagtttttaaattgttggttcatgacacctagatgaagaaccccacatcagggagtgatattttatctattttgtttttgaaatttatgatcaattaattgcaaggcaaaacaacacaaaatgtgtggagggcaaaagaacaagcataatagtgttgcacacagaggaatatgggtcaaagaaaagtggttcaaggaggttcagttggaccaaatggagctggaaagcatcagaacaagaggaatgtgctgtgtgcttggaatcattc

SEQ ID NO: 74740 - DNA, 1545 bp, Glycine max
  Clone ID: PAT_MRT3847_38503C.1
caagaagccaattcaaaagggcgatcaggaaatgctgctaaccgcaagtttggacacagaaagcgacctcacctatcaaagctcagtgttaatggttctaataattacatttacagggaaggcagttctaggaatgagattacttccgccaccacaaagaggagttccaaaagtcatgttagacatgtcatctccatctagacaatcaaaatctagaaacttaactttgaatgaggattctgttaatcattcaacaaaagcttctgtgtccaaaatttcatctccggcatctctgagttccttggcttcaaagtctatatcttacaaagaagtggctttagcaccaccaggaactgttttaaagccattgttggaaaaggctgacatggaaagggttaatgctggagatgagatatgctgcaatcctgctgtgacatcaataagtgaaggtagttgccaaagttccataactaatacagtttgtcagcatgatgaaacagaggaaactcatgaaaatgaacctcaacaagaaagttctggatcggaacttgagaaggtttctgatcaggcaaaatctacagcagaaacaaatggcagtaagctttcagctgcggccaaacctttcaatccaggaatgttgtccatgtctcaccatttaaattcagcttccttcacaagcatgtatgatacagatgttagtcaaggcatgcacgtggagactgtgcttccccctgctgttgctagggtcccttgtgggcctagatcgcctctgtattatagaaccaactatacttttcgcatgaaacatggttctactaaaggtcaaacctctatcagagaaagaagtggatttgggtctccaagaataatgaatccacatgcgcctgagtttgttcccagaaatgcttctcaaatagaagccaatgatgccaattcaaatgtttccaatgagcataactctttgtctgacataggcatgtcagaagaaaacaagctagatgaaaattttgttgaaatcaatgggagttccaacaaaaacagtatttctgaatctgagaagtccgagatagctaggcattttactgctaagttttctagggaaatctttcaaggaaaatattgattctggtggatgagtttaaggatggtgaacgaaaaattgagatcttggaaagttgttctgatgaagctgtcaaaaacattatgtatggaaatgaagaaaggaagaagacgatgaaaagtataagccagtgcctccttcccgtgatagtgatgagcaagagaaattaggtgtttcttaaaaaaaaaatggagatggtgaagggtttatagttgttttgaagaggaggaaaaacaggcagaagatccccaatggagtcccagaattgttcaacccccagtccctttgtgcttcagttcgttgaataaagttatgaaataaataacggatattgtctttccatttgagtgtttgtttggccgaagctttggacctcatattgttaatagtttataacttcaaggcctagaatttttggtccttcc

SEQ ID NO: 74741 - DNA, 333 bp, Glycine max
  Clone ID: PAT_MRT3847_38504C.1
ttttaatacaaatcatatgatcagaatgtacggcccaacccaaccctaccataatgaactgtcctgtattaaactaaacgaactgtgcggtgagcctaacctatatacattccatcccagcacactccccttagttgaacttaacctagcgcagaggaaacgaagcctctattgctttgtcttagaatagactcttctctactgacctgacatgacccacccgcactgggctgtcctgactctattttcgtactcatcttattcagcctcggccacggctttgtcttttggttggttctactcttcttttggttcggtccattcttttttccc

SEQ ID NO: 74742 - DNA, 409 bp, Glycine max
  Clone ID: PAT_MRT3847_38505C.1
ttgggggggggggggggggggggggggggggggggggggggggggggggggggaccttagcccccccaaaagacagcacttcaaagggaaaacggggagtaggaataacgctgaactttaagtaggctaggtaacgagagcccaaaaaagcccagtagggaccttaagggttaaattataccggccaggatcccatatgcggttatgagggacgcaaagactagagcttttggatagctaaagccgaacccggatttaactgcttttattgccggaccaaaactataattttggggggcgttaataaccgcctttggcagtggtattgggccacctttgctaggcgggctgcaaactgcatgaattaggggaggtggcagcctactaaatagccttagcaaactagggg

SEQ ID NO: 74743 - DNA, 391 bp, Glycine max
  Clone ID: PAT_MRT3847_38506C.1
atcaaaaaactccaccagttcttattaattcggtgattttttataaaatataacttatacaaactcaaccaactaaatcggcctaacgataaaacatttggatgcttcatacaacattttaagtgcacaccttattctcgcccttaaaaaaaacaaaaaaatcctttcaaattctaaatacgaatgatgataacacattggtacttttctagctgggcctggtgcaacaaaacctaattacaccttgatttccagttttaacaccaaccctttccaacttaataacagcatcaacaaaaactttttgaaaaactccttcatttgatgcaaataagatgactgttgcacttttaccttgcatgtagaaacattacctgttcaaaaatgaaga

SEQ ID NO: 74744 - DNA, 2112 bp, Glycine max
  Clone ID: PAT_MRT3847_38507C.1
ccggccgggctcgggaaaaaagtaagaaaaacaagagaaagaatttttgctttgctaccatcccaatctcaatctcattcattcctccaactccaaaccttcttcccctctctctctctctctctactgaacaaaaagaaaaagtgagagttcagaatttttaaatctcacctatttaactacctcgcataaaaattcacgtaacattctcttctgtgtcctaatcggaactcgcacaaattttgttatagtgatgtgatgtcattttagggtttttgaattgcgatgggtctgggaaacgatgacgatgacggagacacgcacaagtccttcggttcagtgccttgttcgatttgcctcgaggctgttaccgataacggtgatcgatcctgggccaagcttcaatgcggacatcaatttcatctcgattgcattggctcagccttcaatataaagggggcaatgcagtgccccaattgtcgtaagattgaaaaaggtcagtggctttatgctaatggttgccgatcatatccagaatttagcatggatgaatggacacatgatgaggatctatatgatgttagctactctgaaatgtcctttggagttcactggtgcccttttggtaacttgacccggcttccttcatctttcgaggaaggggatttttcttcaattgcatatcatgatgtgctgggacaacatgctatatttgcagaacatacagctgtatcatctgctagtcatccttgcccgtatattgcctactttggaccaatacatccctccacctccaattctggcttaactgtttccgaagcttctaatttcaaccactggaatggtccacctgtacctggtgacatgccaacctcctacacatttcctgcagtggatcttcattatcacagttgggaacacaattcctctcatttctcttctgccaacagccgtctaggcacctcagaacagacctcggtatcacctggtagtcaaaggcctgcccggggtggttcagatgtccctagatccgggtcttttatgcatcccttccttgttggtcacagttctgctgctagggctggaaactctgttgcatcttcaatgatccctccttatccaggcagcaatgctcgggcccgtgatagagtccaagctcttcaagcatattatcaacctcagcaacctcataattctaccacaatacggacacctgttgcttctagcactcgaagatccagtagtcatagtgggcctgttcaattagcaccagtggcctcgccaccagaccaaagtgctggcttcgtatatattccatcaggttcttcaggacgcaattttcaggaagaaacccatttgccaagtcgattccatgcttgggaaagagagcacttgccttcattggcgttaaacaatgttggtagagaatcaagttggagagcataccaccagactgccagtgtgtcagacccaagtatcagatccagcagctttcgattaagacacgaatccgacagaatgccttcacaaaatcggtgatatacttgtttttatgtcaaactacagttattgtggaaaatcaaaatttatgtatgattgagaaacgttacataatgcttttagcctggctggcgtgttatgacagactttatactctggctggccttggaattcatctttctggcagccgtgtggcagtgtgatggacattggtctcctctagtttctttgccttggagggcataaaataagatcgtatctagttgggaaaatcaggtttgggaagaaatactggtgcattgtcatctcaagtgataaattagtggatgagagcatttgtggttgttggatttattgtagtgggtaaattatttactttgatatcgatgctcatgcaaatgctgtgtatcgagaatatgcttaatcttaccactgctcagtggcaatgtgattatagactactattattgtgcaagagctgaccccagtgattctaaacttgcttagtttaggataatttcaaggctgatttaacgaaataatctttaatttttttattcgtaggaattattcacgatattacaagatttataatatatcatagttagttat

SEQ ID NO: 74745 - DNA, 154 bp, Glycine max
  Clone ID: PAT_MRT3847_38508C.1
ttttggggatttttaaaagacattggcgttaaaaaaccaataaaacattatgcacaagagttataaaatgccaaccagagagacgtaaaaccatgtttttgcagtgtccctaaatgccaaaactcttgtaaaataatctttctgagaccaaaac

SEQ ID NO: 74746 - DNA, 421 bp, Glycine max
  Clone ID: PAT_MRT3847_38509C.1
acgcacgcttgcgatagctcgtaagctggatcgggaatatgaattctaatttgctagaggatttctagaataatcatggggcccgtgcggggtccaggaacgagctactgccttgtccttcgtatactactgaacctgtaagatttagaaaatcggccctgctagccgttaagcgttctgcacccgggctaatccctaggaccgagggcatcatgaagcacatcatgcatgccaataacagaggaccgaacgaacttatcactctccaactgggcgcatgcgcaaaggggctgatctcgcctaaggatggtgaaagtcaacaaggagacaagctgagaggcccactatcgcgcgagactgcgtgacacttgctgcaaaacttgagcctggaactgctgagaaactatacttttcaggtatt

SEQ ID NO: 74747 - DNA, 555 bp, Glycine max
  Clone ID: PAT_MRT3847_3850C.1
gaaaaaaaaaaggcccgctttttattcgggggaatttaaaggacaaaggaaaaaaaccggttttaggggaggcggggaaaaactttcttcccccctttttcatttcaaaaaaaaaaacaaaaggcccaaagaaaaggggaacaacaaaggatacttttttccaatctgggggggccgaaataacaacttaatttttatggggggtttaaactaaaaacaacaaaaaccggaaatttaatcggaaaggggggccccaaaaaaggattttcctttgaacaaaaaggggccctataggaaacccccggctttaaaaaaaagggaagaaaacccccgcgggggacggggggaaccacagggaaaaacgctaaaaaggaaccacgcctggggcgggcctgggaaacactcacccaaagggggcttccggccaaacttggaccaaaaagaggagaaacccgatttttaatttcgggctaaaaaaaaatggggacaaagccaaagccacgggaacgacgggtctccctggaaaaaacaacccgggcattcaccaaattacca

SEQ ID NO: 74748 - DNA, 448 bp, Glycine max
  Clone ID: PAT_MRT3847_38510C.1
gcttttgtggttattagagcataaactgtctgatgccccctcaaatctttttagtcaagactttagtttatttgtaaatcctctgccaatgtaagtgctcccccatgagttaataatctgattgaaacaacatcttcatgcactgttaatgttccttcttcatgcttttaaataattttgtgagcataattcatcttatgactaatttgtaaagggcattataaactgtggtggcttggtttatattctcatacaactatacaagtctgactttctaattggagactgtaattcagattcttcattcactccatgttttctgctggaatgtgggggattaacatgttttttactctatatggagtttggtattaatttgttctgtaggcttttcctatataaaacttagagcaaatgtcacaaaaaatttcaggctatcacaacaatc

SEQ ID NO: 74749 - DNA, 568 bp, Glycine max
  unsure (1)..(568): unsure at all n locations
  Clone ID: PAT_MRT3847_38511C.1
cggantncccgggctcatgatcgttgtgaagccgttgtcacaatcgcttatgaggctcaggctcgtatcagagaccctgtctatggctgtgtctctcacatttttgccttacaacaacaggtaccattatatatgttattacaaacctcatcaaaacttttaaacttttttttctctagaaataatagatcttgtcatgctcatctttaatgtttatatatcctgttagacatcaaataagtaacacattaacacctatttaatgtaggacaaaacttagatggagttctaatggtgtttttgatgttatttaatcagaattggagtttccaaaatacctaaagaattgtatgtaggttttattcttttatggttttcaataacggaagaaatagacttaaatatctaaacatttgcactagccgctcgttcatgaaattctctttagttagaacttggtgatttttctttcttgtctttttttttaatgtatgttggaaatttggaaaaccattcaaccaaactagctactcctgtctttttctcttgctagaagtctagctaccta

SEQ ID NO: 74750 - DNA, 157 bp, Glycine max
  Clone ID: PAT_MRT3847_38512C.1
aagaaatcctaacataaccttactttcttattcatcgtcaacaacctaaattacgattatattccgggcgtgcttcctctaaacatctactacttgtccatttctacccataaaaaaaattaagcatcaaacaaaacacgagaccttaaactaatcc

SEQ ID NO: 74751 - DNA, 211 bp, Glycine max
  unsure (1)..(211): unsure at all n locations
  Clone ID: PAT_MRT3847_38513C.1
gatggngaaagggaatatcatctataggaagctgagatggcatccaagacataaaagtcatcacaccacaacccacagattcatcatggaatagccacatagatcgactaataaacactctgtctttgacttttcataaggtcgctgacgtatcgcattcaaaaaaagttcatacattctcgattattccagaaagcacagacaggaaaac

SEQ ID NO: 74752 - DNA, 215 bp, Glycine max
  unsure (1)..(215): unsure at all n locations
  Clone ID: PAT_MRT3847_38514C.1
aagctcgaaanncagctcagaagagaaaggctcccaagggtctaatctattaggctgtgttattcttttcatcactggcactgagaccttgatcttgggtgcgaccatgaactgaggaaggacgtctacttagaatcatgccccttcgctatttacataatcaatgaacaagtcaatcttttctacattccaccacatgaacactcgattctcct

SEQ ID NO: 74753 - DNA, 637 bp, Glycine max
  Clone ID: PAT_MRT3847_38515C.1
aaaaacaaacgaggatcactgtttccataatgtcaacaatcctttatggaaatccacggttatcgtctcgttgttcttgaactaaaggtagatacagaaatatagctgaagcctactaaaaacaaaacaaatacttatatagatgctcgagtttcaagttttaatttaaagaataccatatacggttatcttaacttgtttcgctcgaccatacatactgatgtacgaacaaacatcgacagaagtatacaaatgcctcctcaatattcatcatcgccaattaagttattgctgttgcaaccacacattgataatctctatcggtaataaacacttccctcctccgatctgctgctggtatgatctaaatgcatgctgctcctttcttctgaccttatgctgctgtcgttgtctgagttctcactgctgattaggccaattgaaacattcccttctgatggcctgcttccactacgatcaaaaagatcaccaccatcttgtgacaccccactggtgctactgctgcttgaattaaatgaacggcttacatcctcacttttcttggggcttaagattctcacagaagatttcttgctgctcttttggctcaaagagatttcttactgctcttctggct

SEQ ID NO: 74754 - DNA, 1790 bp, Glycine max
  Clone ID: PAT_MRT3847_38516C.1
gagcatgtgaatgaagccttagatcttttttaatataatttgaatttaaaattatatgtttacctttttttttcggtatatggattgaatgtctttttatcaaatccttcttcattttctgttttgatctttttgtgagggaacccaaaattgataatctttatcagcttctcatttaggaaaaattgactgcagatgggccttgattttgctgggaaggcagtatatactgctgtatgggttgctgctgtgtcattgttcatggagttgctaggtttctccacacagaagtgggtaactgctggtggtttgggcacagtattgctcactctggcaggtcgtgagatatttacaaactttctttcgagcataatgatccatgcaactcggccatttatagtaaacgagtggattcaaacgaagattgaaggatatgaggtttctggcacagttgagcatgtaagctggtggtcaccaaccatcatcagaggtgatgatcgcgaggctcttcatattcctaaccacaagtttaccctgaatgttgtgcgaaatctgcccacgaaatctattctgcgtatcaagagttacaaaaacaacagtaagatggatcttctgtccctctgtcatcagttaggccatccttggaagagaacattctactcggggttgccatagaaggctcaaaacgtactcttccaattgaggaagaaatgactccatctcctatgcctgcagagtcacaagaatttgctgttcaacaacatgggggtgtgacgcctgctagtaaggataagaaggatggccagtcttcatttccaactagtaaacagaatgactaagattagtagctaaattaggcagattagaacttgatatttcagtacatctctccgatagaaactactcaagaatgatccagctgtcttttttataagttggaattatgcattgtattctgatagaaccaccgtataaagttaatggcgaagataaagttaatgcttcaacacgttcaactcgtgcaaatgaggaaaaagattccaaaattgatgaaaccatggcatctgacaccaaagaagatgagaattttacagcaacatcaacctcctcacctgatgtaatttccaaggataaatccaagtcattgtctgatgcccagcctaaaaaggaaaatgcagtagatgcaggaaagggaactacagttcctgtatctaaaaaccttgttcaaagtgctgttcctgaagcctctcttgctactacccaagagatcacttctgcaacttcttcacagtcaaagcaagatgaagagaaatcttctgtgtctttgccatcagttaggccttccttggaagagaacattcttctcggggttgccatagaaggctcaaaacgaactcttccaattgagggagaaatgactccatctcctatgcctgcagagtcacaagaatttgctgttcaacggaatgggggtggacctccggctagcaaggataagaaggatggtcagtcttcatttccaactggtaaacagaatgactagattagtagctaagttaagcagattagaagttgatatttcagtacataccttcgatagaagctaaaaaaaataatccagctgtcttttttataagttggaattatgcattgtattctccttaatttgcccatgtatgtacataattatcaattcatggttcacataactttcagaatctctaaatagtcctgatatatggtttgttccccacacccgggtaaatgcatacatttaaataattttctcc

SEQ ID NO: 74755 - DNA, 916 bp, Glycine max
  Clone ID: PAT_MRT3847_38517C.1
attataaatcatattttacgttgttaaaaaacatcatactttacattatacaagttatcaatgtgaaactacatggtagcttgagccacgtagaactgtctagcacaggtttgtcacgtgacaggtgcctcttctatttactatataaaataagataagatgcatctaactcaagaaaattataatgggaaccacatgataattatcttaaattagtgaagggttcggttttaatgcaaagtaaccaatttaatgcacatgagacgacactgctttatcaagtattctagttggagagcctacacttcactacaatctgaagcctgcagaggcacgtgtgcggtatgcccaagttagcaactaagtacacaactccatcgcttcttaacctgcagctccaacttagcagtatcccctcttattcttcatctgcttttcattaccactactgcttcttcaaagatgactacgtcttttcagatgaagatgacaacatatactgcgggctagtgcttggggacatggacataatattttctgagtttagttgccttgttgtatttaagccagagaagtctataaatcctttttcaggtaattaaaattctcaagcacgtgcttgtttaaacgaagatagttgtaaaataaaatcggatttggaggaagttcactcgatctcatcatagaaaatgactcctgcgttgtaattaaattccagccctttctttcccttgctcatgtccaaacaaagatctttaaatcgacaataaggcaaaaaatttctggttctcctcgcatcttggatatgtttttgcatattcaacagcagccatgataactttcttggcactgtcatcatcaaagtttatttctcctgctacagtatattgcattttcatttggccggacgcgtggg

SEQ ID NO: 74756 - DNA, 375 bp, Glycine max
  Clone ID: PAT_MRT3847_38518C.1
tgttgaaatgctactaagcagcatatagaagggaagtggagtaatttagtactaaagaaaattatttcaagtgaaattcagccagtgaaataaacaaaggtactgcaacgtttctaaatacactgttcatgtatccctcacgagttgaaaaaaagcaacattgcttctcaaatttaagacatctcaatctttatggaacaaagttaaagagcacaaatcatcgtggttccaagctcgaaaaaagaagactagtatttacaacacgcgtgtctaatccgtgatttataggacaaccaattcttcgcaaggcaacacactgtttggattatagctctaattccagtccacatgcagcaaattgggtcattcagacaa

SEQ ID NO: 74757 - DNA, 368 bp, Glycine max
  Clone ID: PAT_MRT3847_38519C.1
ctcgagccgtcatgatatttctgcttttcattctgccgctcctctgattcccaagtttcatgaagctgccatgcacggtcgcatgaggcctttacaagaaatgcttacttttcgtttattgtgtcctgcggagagggtaggaaatataattggcaaaggtggagcaatcataaagaccgtgcagcaagagacagcaagtgagatcaaggttttagaagcccctccagattcagaggactgtgttattgttatatctggtccagcgcacccagaggatagaatatcccctgtgcaagaggctgtatttcgtgtgcaaactagaatagccaagcctatacctgatgccaaagaccatattatgttagcaa

SEQ ID NO: 74758 - DNA, 745 bp, Glycine max
  Clone ID: PAT_MRT3847_3851C.1
ggctcgagctcgaggagcaatctcttaaccctatctcaaattcattcagattctcccttcccctttttgatttttcttagaaaactcccaacttcgaatcaatatgaagaaagtggtgctaaaggtggaactccatgatgacaaaatcaagaaaaaggccatgaaggcagtatctggtatttcaggggtagagtcagtctcagtggacatgaaggaccagaaaatgactataattggggatgttgatcctgtaacagtagttggaaagtttacaaaattcagtcttggcaagcttagaaaattctgtcatgttgagatactttcagttggaccagccaaagaggaaccaaagaaagaggagaagaagccagaagccaagaaagatccaaaggaggaatatgctgaacttctgaaggtagttgaagccaattattatcagactagacatctgcaatacccttattactatagcagaactgtggaagagaatccaactggctgtgttatttgctaagtattggagtttgatggataataaatgagatcaaggaaagaagatggtggctggagttgagaaagatttgtttctgtttttgaaatttccttttttccttttctttgttaagttttggcctttcttcttgttttagtacccaaaagaaaaaaaaaaaaaagagcagtctaaagcagagaaatataatgtgtacattattttgtggtgtaatacaatcaatttattcaaaaa

SEQ ID NO: 74759 - DNA, 476 bp, Glycine max
  Clone ID: PAT_MRT3847_38520C.1
acggctgcgagaagacgacagaagggtcatttagttttcagtaaaattaaagcatcaattcaacatgattatcttattggatgctcacttaacaaaagttactagatactctctcaaactagtaatcattcaagaacgaattgttatagattgttttgacaaaagaaaaagattaatataggagaattgtaacccacaaacagaacgaaatgaataatttcagtacctagcaaaacatggccgagcctattcgttatatcatcaacaatctaaacaagaatactaaattagcatacgtatgaaatggagggatggatgatatataccaaatagcaacgagagaaagtcaagtcatcctaatgaaggggaaataatataacttgccaataccagttgtatataataaactgaaatcagaacagaacaagctggatatgaatgacaaaaagtgcatgtgaaaattgattgactatata

SEQ ID NO: 74760 - DNA, 241 bp, Glycine max
  unsure (1)..(241): unsure at all n locations
  Clone ID: PAT_MRT3847_38521C.1
anacgntaacaaatggnatcatcaccagtcgaggnagagacttgacgccgtcgattctcncgctgcttccggtctcgttccgcgccaaagattgcagtggcttttgctgcgttgngaccgnttgcaataagaatgtgccggtgcactcatngacatgncncagttngcngcnttgaagntaaaatgnaaatngagctaagcgngnanttttggaaangttgttgngtaganagcngggnng

SEQ ID NO: 74761 - DNA, 464 bp, Glycine max
  Clone ID: PAT_MRT3847_38522C.1
tgctcggcggccgccctttttttttttttttttttttttttttttttttttttttttttttttttttttttttttttcttgtttttttttttttttttttttttttgggccaaaacctcaattgttggcccaggtaaaaacgggaaaaaggcccttaaacaaaaaccaataatctaaacaccacctaaaaccaaaaggccccccgctaactaaaaactccaaggggggctagcaaaaagcaaaaaccccccacgagaatctctacgcaaaccaagctccccaatttggggcccaagcccccttccactggacattgcaaggcccaccccaaccagggggccccccgcattacccacagccccctgggcccaattgggcatactgggctaacaaaagcttgccaagccccttggggcaaccccaaaacgatacgccccaaacaaaggggggcccattgcccctgg

SEQ ID NO: 74762 - DNA, 196 bp, Glycine max
  Clone ID: PAT_MRT3847_38523C.1
acgagaaaacgactgatctctgcaccctaatgagttctcacaaatggagagttatggtgagtaacgcgtgacttggggtcaaggcggctggactctcgcagcagctctatacttatgatactcgcgtcaggctagaggttctcaaaacatcctactcatcttctagctctggctcacatagaaatcacttatcaca

SEQ ID NO: 74763 - DNA, 211 bp, Glycine max
  Clone ID: PAT_MRT3847_38524C.1
ttcagtgtttttttaatttttaaatagttatttgaacaccgggacttctacataccttatttcaaaaaaaatgaaagggcacaaaaaccaacaaatcctgtagtattgacataacaaaaaaaagacatgcaatactgctggagcacttggctagtggcgtgtaaaagatacattagaacaagatggttactcatcaaatatatacctactt

SEQ ID NO: 74764 - DNA, 454 bp, Glycine max
  Clone ID: PAT_MRT3847_38525C.1
gaaagatttgttagagggaaatttttcctttgatataaatctcgctctagattggaaaaagcttcctctacaaaagcacaattacgatagtggaaaaaccttcaagatatgataatcagggtgctggtcacagtcttctttgtgatttccttcaaagggatgatcagagaaacccaaaaaggtttgatcctgaattgggtcctataatttatccttaattccaagaaggtcaagcctcgaaggaaaccaaattggttgaatcttgcttctcgagaaggtcaaacctcctaaaggctatatgctatctcataaagatattaaatctgaatagcacgctctagaagcacagaaccagaatatccattgtgcatagagatatattcaaatattttatcacagagccatattgatgaacaagtgatgattagcagatcactcatattattagagggat

SEQ ID NO: 74765 - DNA, 420 bp, Glycine max
  Clone ID: PAT_MRT3847_38526C.1
gcacgagggcgctgtgatatgatagtctttggtggcttaacttgacaatttctaattaacgctttgtctgggtcaaggtttttaaaagttgcaatccttaacgttgcgggaagtggcagacaaatgtggccacaattgtggtcacggagagcccaacagccttgtcgttatgacagaaattgtgatcggaccgttttttaaaaccttggtctgggttgttaaaattttagaataaatttaatcatgttgtcttaaagattatgcttcttattaatcggagaaacagagtacagtattgtcaacaattgtgttcccatctctttcctcaaattttgtattttcttgctaatggatgccctttataacttataaaaatttctggcttttcaattttgacatagaatcttatcttatggtttt

SEQ ID NO: 74766 - DNA, 490 bp, Glycine max
  Clone ID: PAT_MRT3847_38527C.1
tgggctaacctttgggctgatttatgtgcttgcatggtcgtgagaagatgatagaaggggatagtacccccgaagcagcccgcgcagatccaaagaagagccaagggaaaaaaacaagacgaatatcaccggagccacgaccacgactacgctcacgccagggcctgtataagtcaacaaccataacttcttacccgcgtaagccgagctaactagcgagatcaacagatccatccgcttataagtacgtagagcataacgcgtagtcccagtattagccgaattacggcacgataaacgcgccaaagaacgtatcgtaaaccgcaagtacgacgcgcttgccgtcaaagaccgtcccatcagccgcgttccaactaagcttaccaatactaataacgacgcctgcgactccctgattaacaccgcgacgaaccctcgtccgtaagaacgctaaaataagaaacaagccgccataagaactcctaagaaa

SEQ ID NO: 74767 - DNA, 1248 bp, Glycine max
  Clone ID: PAT_MRT3847_38528C.1
gatacagcaaaaattattgggacaattgtaagtaagtacatgggtaagttcatcccaaggaagtgaaaattaactgacgcaaagaaaacaaaaatgaattctactactattaacaagaaacaaaacataccacctagtactctctggtgaatccttctcactcacacccctggcacatgttcatacttctcaataggaacatacaaatttgttacatttataattaattatacatgattgacacctgagttttgagacaaattgttagcaggtaaaggatgataatcaggttccacagcagactctacatcatgagttcccctctccttcctgaatgagttactatgaagattccgcgtgattttagccgtcgtatccaagaagaacaaaacaagtgatgtcaagcagcaacatgcaaacataggtatgggcccataaatccagaggaagaatggaaatgacaagtaaaatgctcgaagtccaatagaccaagcatgactcccacgattcaaagtcacggcaatatattccatatactcccttttgtctctgagtgttggagcagtgattaggaaactgacatggcaatagtatctaatagactgtacattgcacaaaaatgcaacaaggaagaaaatggtgacagaaatatgtttgattgaagtacggccagaaggtatgaaagccgtgtcatcagaactccacatgctgctagcgaaaataccaataagtgaactgagtgtgatggctgttgtagatagaagagtagatgccatgatattgttgcgaatagtttgaactgccaaaaccccattctttaacggatcactcataatggaaagaacccactgatgacgagactcagcattaaggccaataacagttcgaagagggttgtgtacaatggtgtagacaagccagatatggtatgtcagatacaccaacagacccaatggcaccaacacatattcaagctgctccttctccatgcctccaagtctccaacaacacttgctttcgtacgaggaatttggaactgaacaaaaggcttaataatgaatgattcactcattcaagtaagtatatctgtctggtcttgattgacccaaattcaaagtcatcatttcattataaaactcatatatattcaccatgtaaaaattaaaaagggtgaaagtaaaatgtacgtaactgttattcattcacgggctacaaatggatgtgaatctaacatctcagatctgaagt

SEQ ID NO: 74768 - DNA, 402 bp, Glycine max
  Clone ID: PAT_MRT3847_38529C.1
ggactaagggatagatgttcatttatcattgcttatgaacaaatttgtggcaatcaacctatggggatggcctcacaacctgggaagaccatagcccagcacccaaaactccctggggcttatggcacttatactaccctccatatttgtagaccacgggccaacagaaccttttttggatatatcaatgaattttatcccaatgccatagactaaatcaatttgtccaaaataacaaaaccctgggcctgtaaagactatctttgactggactatattgacccgaaggatcttttgacttcccttgtttacagaagaattcccgcttttgaacctttagaaaacatgaacccctgtgtacaggtcctaaatgacagcttggtgacattttgtcctttcctc

SEQ ID NO: 74769 - DNA, 295 bp, Glycine max
  Clone ID: PAT_MRT3847_3852C.1
aaaaaaaaaaaaaaaaaaaaaaaaattataaaaaaaaaacaaaaaataaaaaacaaaggaaataaaaaaaaaaagaaaaaggcaaaaagactgtaacagcaaacccaatattatattttaaaggggggccggtttttagggagccggtcctactctttacaagtttggaaaatggaaagaaccttttccagggccgcacctaaagcgaatcacgggccttcccccttaagccattggggggaaaagaccataggtttccccgtttttatttttaaaaaacctcaactttaatggg

SEQ ID NO: 74770 - DNA, 169 bp, Glycine max
  Clone ID: PAT_MRT3847_38530C.1
cagaagaatcatagaaattgcagatgactgatacaagatgtcaaagatgcagcgaaaagaaagttggcatatctgatattatccatgcaggtcatggagaccgctatcagttggaatgcactccctgtggctacacatggttttcgtccagagactttatcacaccact

SEQ ID NO: 74771 - DNA, 337 bp, Glycine max
  Clone ID: PAT_MRT3847_38531C.1
gagaaaaaaaaaaaggcctccctgccccccgtttattaaaaaagcatttcatgcccatgggggccatcaaagcctaaaccatgaaagaagccgatttgggcccttcacttatttttatggggcccacatttgacttccccccttcaaaaacaaagattattcccaacattggaaagttcattcgggaatcccaccaatattcaaaccggaacccgtggggggggaagttttttcaaaggccggggaatgccatagttcatggattgggccattttccaactgtgttaacgcctttttacacggaatttatttttttaatcaaaaacctttctaaaag

SEQ ID NO: 74772 - DNA, 603 bp, Glycine max
  Clone ID: PAT_MRT3847_38532C.1
gaatgcaacaggcgacaaattgtttcattcatttagattatcatctttaacagcaatagtcttgttgcactaggtgaacaacaacaaaatgtatcactcacttacgtacatcaacgaccaagcctaaatttgctactctgcatatatttttgtgactataacgttgagcattggcatcaacatgtgatacactaacaatatgattttgaaaactataacttgcaatgatccaaagcctactgcatcaactaatccgatagctaccccaatgttttcccgttctcgcagcaaattacagggaatgaaaaggaatattctaataccacaaacggctaaaatgtttccttgcagcaaacaacacgcaatgataaggcatattatcaccccaactttatttcttatgaaggtgtttgtgaagaaatcaggagctgcaacaataagaagaataaaaactgcaggcaactccagccaatcagagaagtgccttggaaacaaaaggtgcaatacaatagcaatgaaagcaatccattttccaaagtctgtcctgatgatgcgaaaaataagaaggcaggctgaagaaaagaatggatgagtagtgatgta

SEQ ID NO: 74773 - DNA, 250 bp, Glycine max
  Clone ID: PAT_MRT3847_38533C.1
ctcgagcgctcgagcggctcgaacggactcgagcggctcgaggaacgatgacagtggacaacgtcggaacgtcattcctgggacttgatctagccaataacggtatgtggtcctaataatggttttgaaatgtggaattctgagtggggcaatcaaacttcatggcatttgagtttccttattgacaatcccaaataggctacagtttttgatattctcttgggaatttctcaagattttgaaattgctg

SEQ ID NO: 74774 - DNA, 419 bp, Glycine max
  Clone ID: PAT_MRT3847_38534C.1
cctaaaacccgttttattttggggggggggggcccaaaaatttaccattttaaagcccgaaatccctttgcaggccgctaaaaataaatttttttttttttccaaggcccccatttccattttttaaaatttttttttggccgtccctttaattcatctaaacggaaaccccttcaaaatcttcccagattttaattttcccccctttttttattggaaagggccctgccggattccaaattttagctttgaaacaggcaaacatttttttccaccaaaagcatccttctgacctttattatttcctgaaactttttttcgggaaaataccctttttggacacctttaagggaaattaaatctcttttccccaaaatataaaccctttttttaaaattccccctgtttttttttttggc

SEQ ID NO: 74775 - DNA, 270 bp, Glycine max
  Clone ID: PAT_MRT3847_38535C.1
gatacactgtacctttcactcatagacagatatctgagcgcttcgcaaaataaccatgtctctcttttgtccctctcaatttcaactcgtcataatgccgccggcgaatcgcatagcggagggaactgctgcagctgccgcttcgtctgcggcagctccgatgagagtcactcatgctgcagcgaaacgcgccgccgcgagctccgatcctccgccggtgccagtggttaataatgccgcgaagaatgccaaagtatgctgctgctgcta

SEQ ID NO: 74776 - DNA, 729 bp, Glycine max
  Clone ID: PAT_MRT3847_38536C.1
aatttcttccttgatcccaaatagctgaaaccatgctcctagtgccatcaaaattattttaacttcatattgcagatattcagtctcttctggtaccaatgcactcaatattttgcccaccaactccggtctcctgaacaatagatcatttaagcataatagtaagtttagtctcaattgagaaaaactaaaacagtccgttttctttccattttaaaccattaatctaaaacctaccttcaggtataaggagaggttaataatcacatatagttaaaaccttttccattgtgcatatgtggggacggattcagtagttggtcgtaaatctgacaggcaacccttgaagatgtttgccttctggccatctgttctacagcagcctgattgtgacttgttaagtaaagagtattgttgagcttggtatctactatctaagttgataatctataatttatagttgaattgcatgtgagcaagaattatccagttaaaattatgtgactgaagggagcccacatagaataatagttttaatttgtatggatatgctagttgacttgaagcaaaatccatgttgtatgtgtttccatattttcgagctggcctaaaaacttgtatgttctttacttttctctttgctgcttaactttttctggttttgacgctatctgtaagctgtatttactattttgtaataaaatgtcatttaatgtaatagaaaaagag

SEQ ID NO: 74777 - DNA, 1206 bp, Glycine max
  Clone ID: PAT_MRT3847_38537C.1
gtcgcagcggcgcccttttttttttttctttctcttctctgaatccatttactttgtgttgaattcaatatgagtcttaagggatttttcgagggtggtgtcgcttccatcgtcgcaggctgcaccactcacccactcgacctcatcaaagttcgaatgcaacttcaagaaacccacactctccgcccagcctttgcctttcacgctcccactccaatgcctcctccgccgccctccggccccatctccgtcggcctccgcatcgttcagtcggagggactcgccgctcttttctccggcgtctccgccaccgtcctccgccagacgctctactccaccacccgcatgggcctctacgacgtcctcaagcgccactggaccgaccccgaccgcggaaccatgcccctcacaagaaaaatcacggccgggctcgtcgccggcgggatcggagccgccgtgggcaaccccgccgacgtggcgatggtgcgaatgcaggccgacgggcgcctcccgccggcggagcgtcgcaactacaacggcgtgttcgacgcgatacggcgcatgagtaaccaagaaggcgttggtagcctgtggcgcggttcagcgcttacggtgaaccgcgcgatgatcgttacggcttctcagttggcctcgtacgaccagtttaaggaaagcattttaggacgcggctggatggaggacgggcttgggacccacgtgttagcgagttttgcggcgggttttgtggcctcgattgcgtcgaaccccattgatgttataaagactagggtgatgaacatgaaggctgaggcttacaatggggccttggattgtgctctcaagactgttagggccgaaggacctcttgccctttataagggtttcatccctacaatttcaaggcagggtcctttcaccgttgtcctctttgtcaccctcgaacaagtcaggaagctcttcaaggacttttgaattttttattcattcggacaccttctcaccattcactaatcgatattcattctctaattggttgagatacatattcattctttttttttttttttagggattagttattgaggttttggaactttcgatgactaccttcttgagattcatatatgattattctaatttcatcaaatatatttaccaacaatgtaaaacattaaactggtatagaaattcagacttaatttcttc

SEQ ID NO: 74778 - DNA, 340 bp, Glycine max
  Clone ID: PAT_MRT3847_38538C.1
tacatctgatgctacaagggctgacctcgggattcttgtttcttatttgagcatcgctcgaatcctggaccaaatatgtagggatatacaatatggttctaaatttttgaatgaccgggaacctgtgactgttcacattggtgtcaaaacaaggagctctgtacgaggagtctgccgtctgtttacaattgacaatgaccgtcatgcgtagataattacacaacctatggggactatgctcccctctattctgttgggaaagtgcctgaatgggcggctctgcactttcttgtttctagatcaattagtgtggcttgggggaactggcgtctaccataat

SEQ ID NO: 74779 - DNA, 818 bp, Glycine max
  Clone ID: PAT_MRT3847_38539C.1
atcagcaaaaacattttttttataaaaaaatgcaaaaagtggcagaggtacccaaaaacaggtacaaacgttcaaagcaaagaacaaaagaggggtatacaaatagccataaatcacctaatccaaagcaaacctgaccagattgcaaaacacacgagaccaacaatattctactcagatcctgaaacgaatacgaaaagcaaacaaagggacaccgaaatacaatatgagttagcagaaactccttcgaacaccatccgatgaccattgaaaatccaagtctatgaggagttgggaaatgatgagggggtaaaataggaagctgatggcatttattgtttttcacaaatgtggatggctaaactaaggtttggagaagcaagcccaattaacctctaagcctaggtggcaagagtactttaagggaaattaaaccaaacctactcccagttactacaacacgcagaaaaaatttacttatttatagccgaaaccgccaaacgtgacggttattttattgtaggaaagattcggcaaaagagcgcgcgcgaaaacacgctggttaattttcaacctttgacttcagtttcatgatccaccctctgaacgggctttttggtgcactgcttttttgttgcgaacaagcaaacattagccattgcagcacgcatctcgtaggatggtcctccgacgcttaaagacttgaccgcggtttctttcaactctcttgctcttcgcttcatctccttcccttcttccccttccatcaccatcctcaccaccctttttatttcctccttccccacccaacctttttc

SEQ ID NO: 74780 - DNA, 232 bp, Glycine max
  unsure (1)..(232): unsure at all n locations
  Clone ID: PAT_MRT3847_3853C.1
gtctcgctaatcatttacatatcctcttcatttctnaatncccacgctttgaatnntntcctcagaccaccatatttaacaagaaaaatngtatcttacaggactattaggtaatcatggacggtcataaatctaatgaatgtngatggtgatanattattgagttnttattttagaagaaagtattaataaaaccccactgaaattatatatagtaacctgaaattanatt

SEQ ID NO: 74781 - DNA, 269 bp, Glycine max
  Clone ID: PAT_MRT3847_38540C.1
tcgctctgctgcgagaagacgacagaagggggggggagtttcttcttggatcttaccctcttgcccgctaacatactaattcttctgtctctgcatctcctccatctgaactaaaaagatgtgggttgcccctcaccagagctcttagccggctctttgctaataacgaaatgcgtactctcatggcaagactcaaagcgaatgttaagactaccattatcgtacagcctcaaagggtgagaaaatgagacaaccaatcccacaaaaca

SEQ ID NO: 74782 - DNA, 622 bp, Glycine max
  Clone ID: PAT_MRT3847_38541C.1
ggggggtccccagatcatttttgacattagccccgggggaattcaaaaaaaagaatttagttttaaatactacattttggaaatgggcaaaggggggttgcaatcaaacttttttgatgacggggtttgaaaaaaaattttggaagaccggtcttaatttaagaaaaaacaccccccgggcctttcccggttcaataaaaattttcaagggggtatttgggggggataatttatgcaaacaaatcccaaaattcagcgattggttaagcaattagccagcgggttcattaagctttttacagcagacagggggcggggcaaactactccataacccccctttggggggcttaagcaaccttttggagtttcataaattcagctggccgtattgctctttgggaccctggtttgggaactttcctatggggtggtccaaatcccgaatcccccttttttgatttttttatccttgccccactagcccggctaaattcctaaatatttctttccccgggccaaaaccccattctttttgctgaatttgcgccccccctgggccaagggggtatcccgctctctccctgggggttggggggggttttctcccggggcccccttgg

SEQ ID NO: 74783 - DNA, 585 bp, Glycine max
  Clone ID: PAT_MRT3847_38542C.1
ggcccaaacacaattacctgttttcatatttgattgtagcggtctcacttcaacattttccccctttttcaacgccagaataataggaagagctgaggaactactagtatgactctttcccctaatgtttcttgggaaagcctttgagacacaaggaatgaaacaacaaggggcatcgaaactgaggctaaaaacaggaaaaaaaattgacatattcacctttatctaactcaagatcggctacggcatgaccttttttcgtttgccagcaaatgtctcctcagaaacagttaaaagcttattgatagacattcccctgcctctaacaagcttcttgacttcaaacctatgcttaatcctatcatcaagcttgtacccaagaaatgcaggaaaaagcagcaactcctcaatgtcccgccccatctcctctatcaagtactccatcttcttctccaaagaggtgtgattatactgcagtatctgtggctgcttcttgctcatagcaacaatgtcttcacacgaaaacccataattcaagaacaaactaatgaccttctgcatgttcccacagtttgtcctagtagc

SEQ ID NO: 74784 - DNA, 128 bp, Glycine max
  unsure (1)..(128): unsure at all n locations
  Clone ID: PAT_MRT3847_38543C.1
taaagatnatccntgcctcttccccataatgggaggtcctcctcacccngatatttttatngggtggtattgaagattccccaangtgtttttggagatctcagggggttttcaancctccatttttc

SEQ ID NO: 74785 - DNA, 715 bp, Glycine max
  unsure (1)..(715): unsure at all n locations
  Clone ID: PAT_MRT3847_38544C.1
taattagancttcgtagagatagatttacatctttgtacattttttctgcgctcctatggcttattagttattagaagcatgaacagccaatttcttagaaataaagtgttattatttaacatctctgatgattcttgcagactagcctgtaaaacaggcagaagattaaccttcttgctcgagttttcacgccctcgcaatccctaactcccctttcttatctgccgcctgttcccaagttctgttgattgagacatcataaagagacggtaaaactttgaaggagaaatttcagtgactgccagcaacaggaaggaaccagagaagtgtgctataatctatattttcacataataatcaaggtattcaccagaaatctccacatgaacagagtcctctttcaaaatgatggaacctgttggcatcccttacaacaagggcccgttgggagacttctgatgctatcttaaagaatgtatgacaatcgtcacaaatacgaaggttcttggtgattcgaatacaagtaccttttggggtaacaagcagaccataaccaagtgccaacctttcactatgtccatatagcatctgtgttttctcttcttcgctaacattgtggaatacaaacttagtttgagctatatagccccctttttttcccaaaagttttgtaaattgagctaattttagataaatgtcatcagtctgtggatg

SEQ ID NO: 74786 - DNA, 353 bp, Glycine max
  Clone ID: PAT_MRT3847_38545C.1
tggcttggaacctttgggctgatttatgtgcttgcatggtcgtgagaagatgatagaaggggggagccagacatatatatattatacaaagaaagaaaaaaaagaagtcataccgtcctccgccggagatactaaatacggtaatcggcgttattttagacggaccacctcggctagcgcacgaaaggcgtacacttcgtcatgacaatcgtgctgagtgatgatttcattattgcaatcgcggccgcgtatcttacaataagctatccaccaaccgtatgtataagtccctaaggcgcaataacgcgctacatttcacgaggagggtacggaccgaatgaagtccggctccg

SEQ ID NO: 74787 - DNA, 513 bp, Glycine max
  unsure (1)..(513): unsure at all n locations
  Clone ID: PAT_MRT3847_38546C.1
nnnnnnnnnnnnnnnnnnnnnnnnnnnntttttaacaaaaactaataaactgacaaacattaaaaagaagatacagttctggacataactaactgtataactgtgtattaacaaaggtgaaaagaaaagaacgtggccatgagggaatgaagaatgggagagcataagttgtacgtacagtgtagttatgtggcaagtacatgttgtttttgctagtcacttgaatgagtcataaagttactaatttcccagctgctacgtactgctggtggtttttcttccctctgaaaatcttggtccaatttggtataacttttttcttcttcttaacaatgaaaggactgacaggacgaggtgaagaagccttctgaaacttagatgatccccttgaagaaggcgtcatgctctttggccttgttcttgatggatactcatacttggctcccttctttgattctctcttttctcttgcctcagcagcagctatcttagtcttcatcattatctccttct

SEQ ID NO: 74788 - DNA, 496 bp, Glycine max
  unsure (1)..(496): unsure at all n locations
  Clone ID: PAT_MRT3847_38547C.1
tacggctgcgagaagacgacagaagggtacggctgcgagaagacgacagaaggggattcgaccggccgctttttccatgttttttttaatttttttttatataacgatttgccttagtgtattaggtgcatggtctcatgactaatgctcacctcaattttttatttatgaattaattttctcaacagagcacaaaagccaacccacgcatgaatagttaaagaaattgcaagtaatatactcatcaatcaaatataattttctaacanaaaaaaaaaaaaaaaaaaaaaaaaaaaaaaaaaaaaaaaaaaaaaaaaaaaaaaaaaaaaaaaaaaaaaaaaaaaaggggaaaaaaaaaaaaaaaaaaaaaaaaaaaaagggggccgttttaaaggacccaatttaacttccccgggctggcaaggtaaaattttttttttggggcccccaaattcaaattcagggcccggggtttaacaacgtggggacgggaaaa

SEQ ID NO: 74789 - DNA, 404 bp, Glycine max
  Clone ID: PAT_MRT3847_38548C.1
gatatttggagacttatttggcccagattgctttattaattaactgctttaattgttgcgtgcagctaggaggtccccatgtccctcttaccactggaaggagcggatggggcaaggagcaggactgctggggtggagccggtcctcccggaccacgattgagctccgtttatggctattcattgacaagtgttggtgccatgggtaattgacgcccctgctcataaagcgctggttcatgcacacatactatgacgagccccttgcgtgaaggagaagaaccaggagcacccgaaggatgataccactcctgaacactggaccgatccctcagatgattatgctgagccctggagcgccttcaatccttagagcagaccacagcattacccaccttcttatca

SEQ ID NO: 74790 - DNA, 803 bp, Glycine max
  Clone ID: PAT_MRT3847_38549C.1
ggtaaaataaacaaatgaataaaaaacataaaataaagtacaatacggtcgttacatctttctctggatctcaaaacttgcggatttttgcaagtgctgtgattgcctctattttatgcttttttagctttcttatagatgacattaatttatttatttttaatccgctattatcaagctagataatacccccccctgttttctactgttagattatttatgacctttctagcttccttttttcataaaacacaattttctaaatcaatcaggttttaaggacatcatcgtcatacagtctgcattgaatgtcgtaaaacaggttcatcgattagccttatgtcttgatctgttatgttgtaatgtttttctcatttatctttctttttctacattcgattcatcatctcaaaagagaactattgttttttaaacattggtttgttgttagcaatatagaaaggttgagttggaccatttggacaatgagggctcaagttattagtcccatttttatagacttctttactctaccaatcgagtgcccttctttattgggttctttttttgtttctttcttctcttctctatccatttagaacaattctattttgtcacattgtagacgcctgctgttcaagacaaagtgggtctaactcacccatgtccaaatgttaattatgaatataaggatggtgtgtaacacaaatatttatcattcaaagtttgtctgaaattaaagtgaggacatgtgcagactgcaggtcgactctagaggatccccgggaaccgagctcgaattc

SEQ ID NO: 74791 - DNA, 403 bp, Glycine max
  unsure (1)..(403): unsure at all n locations
  Clone ID: PAT_MRT3847_3854C.1
gttactgcatgacctacagttacattttaaatgctgagaatcctnnnccatctcttctgaacctgagactttcagatgaaaccgtacaaaacacaagaaaaacatcctcgtactaacaaaagtgcctgttctttttagaatcttattctactagcctacacttactttcttagtgttcgtatgacatcatccccaataaagttacgtatacaccttgaagtaagtactattaacaaataaagtttaagtaatggtatataaacacctctatataccaaaatttttattaacaactattatttcactctctttttctctttttatcacatagtattattatatatacttatctgtcttctctctttttatctatctaggatctaggtgtctactagagtttgct

SEQ ID NO: 74792 - DNA, 403 bp, Glycine max
  Clone ID: PAT_MRT3847_38550C.1
ctgtaaaacaccaatcgatatcgactccttctctgattgtcttaaaaccatactacacacatataggtaggacctatgaattaaaatttagttgcattgactctccactctggaacatcacacatgattgtacacccttaaacgtatgtcggtaataacatactgagccatactcacgggtaagatgccgctagtaacaccgtgggacctggatagttggactgtccgaacctacaaacacctgcgaactgcaaattagctttgcgtaccgcttggatgcaccagcgatccggaacatatgccattgaaacacactcttcaggatcctcagaaaaaagtggtagataatgtgccatccattaactctggggttgctcctaatcaggacatccttggtccttga

SEQ ID NO: 74793 - DNA, 379 bp, Glycine max
  Clone ID: PAT_MRT3847_38551C.1
ggctcgagagtgtaggcgtcagaatattattgactacataggcaaatggcctgtgacggacgatggcaccgtaccaatcccgacccgagatgctcaaccttgatattgatacaaaatacccaaattattgtcaaaagaaatgctacgctagcctgggtgcctgctattaaaccttttctatcaattaaactataaagtttgatcgtaacttcgctcagagcatgaccagcctggctgaaagatactagatcgggtaaaagggggctcgaagctcacgagtctatcaccatgtagcaatactaaggtccacatagaaggacaaagcagggcaagacggcgacgatttgagctggtatacgccctcactgaatcactaacc

SEQ ID NO: 74794 - DNA, 123 bp, Glycine max
  unsure (1)..(123): unsure at all n locations
  Clone ID: PAT_MRT3847_38552C.1
cgctcgagncgattcggctgagcaaaccctaactattctactatgcaagntaactattgcacctcagatctctcacttgaaccacagtggtgccttatcgctgtggttttcatcgtcttcctt

SEQ ID NO: 74795 - DNA, 315 bp, Glycine max
  Clone ID: PAT_MRT3847_38553C.1
agagcacatccccgagttttctaacttccaagaatcagacagaactctacatgtcgtccctatagggcttgctcctcaattaaagagaaaacacttgtcctgttaccactcataacctttcacaacctttattttaatccttggtgacgcatactattagatgaccactccagttatgaccgcaacacaacgcctactcttatctaaaccttcttttaagtcgtagctcaccttttctaaaccatctctaacaaagtgcatgtaccatcacctgactacccttattcatttgagattccctccttacgactttta

SEQ ID NO: 74796 - DNA, 525 bp, Glycine max
  Clone ID: PAT_MRT3847_38554C.1
ggcgaattgctggacaatcagcaccagaatatccttatgtgcatgagtgatttgtgtctaattgaaaattagaaattgcgttttatttatgaagatgagtctcatatgatttggaagtttctacaaatgcatacacaaataatgccatgttaaaagaacggggaaacaacaactagatagacctatacgctacaacattgttgacttgatttgaatgaaactgagaagagcaatgctattttgttccattattttataatgaaaaaattgatcttatatctttttcatatattagcatctcgaaacggcttctcaaaatcataggaaacaaatttttgttagctaaatttgacgtgtacaaaacatttttcaatgttatttacacactgtacagttccattatttctttatcagataattgatatccatatgatcatttttaattgttactctgttttcatattcatagggacccatacaagtagcgaaaaaaactgctaataaagctcagtctgttccaaagat

SEQ ID NO: 74797 - DNA, 406 bp, Glycine max
  Clone ID: PAT_MRT3847_38555C.1
gcaagagcctatttttttttcaaatgtttattcaacgaaagaaaagggcatggtacctaaattaatgagggatttttcttaacaaatgggagggtaacgaaaaactccccattgtttggcaactacttgaacctgttcttgtataacagacttggtagagttcttatcacggtcttgtgcacttccaaacaaacagatccgtgcgctatacccgtgcgttgtattatagaagcgggatatctgccatagaaacgttgtaaggatgacatcagctgcttttacgacagagcccttgcatgcataaaaccttccattgaacccaaaaacatggggacgtgttgtctacacttgccgaggacacgtttaaatgcgtgtaacaatatataaagaaaggaatcgccacttt

SEQ ID NO: 74798 - DNA, 177 bp, Glycine max
  Clone ID: PAT_MRT3847_38556C.1
ggtgtcagatgagaacatcatgatgttacatggggggaataatttgctcacagagttagcaatacacattttactcttatttcttatatctcttcctaagaagaatctaattctaaacttcattacacatatatctacagatttcttactttctatctcaatcttttcttctttctt

SEQ ID NO: 74799 - DNA, 328 bp, Glycine max
  unsure (1)..(328): unsure at all n locations
  Clone ID: PAT_MRT3847_38557C.1
cacgtattactatatgcaatactnacactncatcggtgctggtttaagttatacgataagcggcgcctgggttcaataactatatctaacaaagtactacagctaaaagcatgctgctctatctcttgaaaaagtgattgaaggggataactttcacattaatctaaagcatgcattgcaaactaataatatagggaatattttttgtagaactgaatcttaagaaactggttttgattgtgggtggagcttgtttaaatataaaataaaaattatgaatgtcttttttgttgaaagagtgatgacattttttatggaaaaactaata

SEQ ID NO: 74800 - DNA, 359 bp, Glycine max
  Clone ID: PAT_MRT3847_38558C.1
aattcggctcgagctcagacactgctgctcctgctcaaactgttctcttcaaaggggaaaaaactcatggttattgtcacatcaagtgagcaggatttataggaataactcaaattccagaaggccttctctgttacacacgcacttcctaatccgataacgagggaccgcctcttgaggactagaacagtttaatgaactgactgatgaaaacatttattctgcggcataggcggtgaatgatatgcctatcaataaactatacatgttgatcgagatggcagcgcaacgggagcatggtggatctgcacaaaccatcattgttggcgtatagaatattatgtacaatcacttccatg

SEQ ID NO: 74801 - DNA, 488 bp, Glycine max
  Clone ID: PAT_MRT3847_38559C.1
gtcattggttacaagattcagttcgacacaaaatcttgtggagttgactgcggcggggtcggaatccttggcatcgcgtgggcttttggtggcatgatcttcatccttgtctactgcaccgccggtatctcaggtggtcacataaaccctgcggtgacgtttggcttgttcttagcccggaaggtatcgctgattagggcggtgctttacatggtggctcagtgtttgggtgctatttgtggagatgggttctgtgaaggcattttaaagctctcactatgttaattacagtggaggagccaactttttagctgacgggtacaatacaagcaccggactcgcggtagagatcatctgaacattcgtgcttgtctacacagtctatgtcgcttctgaacccaaacacaacggttgagacttccacgttcccgatttggcgccactttcccatggtgttgcggtgtttatggttcaatttggcccttttt

SEQ ID NO: 74802 - DNA, 217 bp, Glycine max
  Clone ID: PAT_MRT3847_3855C.1
gaacaacggcctttaaggtgagatttattttggtcgggacagcacaacactttgtagcttccgcctgaacgggatccctccttcaccttgcggtgacccccactccgaggtctaatttgacattgatgccagagccatactaacagagggtgctatagacaaaggcccagcggagagattagatacctaccattactaggtcttgcaccttgccttc

SEQ ID NO: 74803 - DNA, 213 bp, Glycine max
  Clone ID: PAT_MRT3847_38560C.1
ctcacacgtaatgctgacgctcagtaatctgtttaaacactctgatttatattgctcttgcgggaaagagccaagttaatgcatcgctagcctgcgaagcacattgacatgccgtatcaccaagcactctaactaccactgcactccgagagcttataaaggccctggctgcaagtgatgagatacgtaaactctctaatcatattgaccata

SEQ ID NO: 74804 - DNA, 1086 bp, Glycine max
  Clone ID: PAT_MRT3847_38561C.1
gccttgcatattggcataacctttttctgttattttcttaactgaataactttcggtaaaggatgcatctgattcagtgaagctgtgggagattaccaaaggtgttgtgattgaagattacggaaaggtttcgtttgaggagaaaaaggaagagctatttgagatggttagtattcctgcatggttcacagtggataccaggcttggaagcttgtcagtccatttggacactcctcaatgtttctctgcagagatgtattcagcagatcttaacattgtaggcaagcctgaagatgataagattaatttggctcgagaaacccttaaagggctattggctcattggttgagaaaacgaaagcaaagaatggaatccccagctccagctaatggggagttattatctggaaaggatatttcttctagaagtcttgcccattctagaattgaggttgatggtagttctgagaatgatgctatggtttatcctccatttgaattctcagttacttcccctccttccattattactgagggcactcatggaggtccctggagaaaaaaaattactgatttagatggaccaaggatgagaaagacttcccctggtggtgcctggactgtgttttgaataatcggttacctcccagagaaaatactaaatgcagtttctatttgcaaccatgtgaaggctcttcagtccagatcctcacacaagggaagctaagtgccccacgtatattaagagttcacaaagtgctgtctcctgaaatgagcttagccactgtgcgagcttatatatggaagaaatcagatgacttggttttaaattaccaactacttcaaagcaggtgactacaaattgcatatgcatcagaggttttcttgtgattatgtaaaatacttctgagcgccgattcttcttgtgttgcctgcattgatcggtggaattataggaatttgtaaattctgagccgcatttattaccaaatttagtgacattctccaaacctgcttggatagttttttctttagtggagagcttgtactagaaatttttgactgtatctagctggcatgcatact

SEQ ID NO: 74805 - DNA, 1091 bp, Glycine max
  Clone ID: PAT_MRT3847_38562C.1
aaaaggttgtgcgtgtctgggatgcaagatcaggatcaaagactctaaagctaagaggacatacagataacatcagggctctgcttctggattctagtggcagatattgtttatcaggatcttcagactctatgataaggctttgggatataggtcagcaaagatgtgtgcattcttatgcagttcatacagattctgtttgggcacttgccagcaccccaacatttagtcatgtttatagtggagggagagacttttcattatacttgacagatttgcaagctagagagagtagtttgctttgcacaggcgagcaccctattcttcagttggctttgcatgatgatagcatatggggttgcatcaacagactcttcagttcatagatggccagctgaaggatgcgaccctcaaaagattttccagagaggcaattcttttttagctggaaactacgcgttttcaagctcaagagtttcaccggactaatgttaataggttcctgtatataaagaacctatcttaactatcttgggtacacctgcaatagtacaacatgaagttttgaataataagagacatgtgctgacgaaggatgcatctggttcagtgaagctgtgggagattacgaaaggcgttgtgattgaagattacggaaaggttttatttgaggagaaaaaggaagagctatttgagatggttagcattcctgcatggttcacagtggataccaggcttggaagcttgtcagtccatttggacactccccaatgtttctctgcagagatgtattcagcagatcttaacattgtaggcaagcctgaagatgataagattaatttggctcgagaaacccttaaagggctattggctcattggttgagaaaacgaaagcaaagaatggaatccccagctccagctaatggggagttattatctggaaaggatatttcttctagaagtcttgcccattctagaattgaggttgatggtagttctgagaatgatgctatggtttatcctccatttgaattctcagttacttcccctccttccattattactgagggcactcatggaggtccctggag

SEQ ID NO: 74806 - DNA, 4300 bp, Glycine max
  Clone ID: PAT_MRT3847_38563C.1
attttgcacactcacgttcgctcccggctcgaatctctttctctctctaaagctgaaacttcgtcactgcaacaagacaagcactcaaagtgcttcgaattcgtcactgatcacgtttcggcaatgcaccgcgtgggtagtgcaagtaacggaaacaattcaactcgccctcgtaaggagaagagaataacctacgtgttgaatgattctgatgacacaaagcattgtgcaggcataaattgtctggctctacttacatctgctgcatctgatgggtctgattatctcttcactgggagccgtgatggcaggttaaaacgatgggcactaggtgtggatagagcaacatgctcggctacctttgaatctcatgtcgattgggttaatgatgctgttcttgttggtgatagtacacttgtttcttgttcttcagatacaacccttaagacatggaatgccttgtcctttggaacctgcactaggactctccggcacactctgactatgttacttgcctcgcagcagcagaaaaaagccgactcgagccgggaaaaaatagcaatattgttgcctctggtggccttggtggggagggttttatatgggatatcgaggctgccatcactccggtttctaagtgtaatgatgatacagttgatgaatcttcaaatggtatcaatggttctggcaacttactaccattgacatccttgcgtactattaactcaagcgacaatatgtctatgcacaccactcaaactcagggatacattccaattgctgccaaaggccataaagattctgtttatgcactggctatgaatgaaagtggaacaattcttgtctctggtggcacagaaaaggttgtgcgtgtctgggacacaagatcaggatcaaagactctaaagctaagagctgttaccctctcacaagcactctctctctctaactctctaactctggaaagtgcaaacttgtattaaaaactcaatatcaaattctttgtcccacaaaagatggggttcactcccacaagtactgcaacatgctttctcataatagcacctctggttgtgctatggtgttggaagctactaaagtgggtgtggctgaggccaaagagattggagagagcattaagggcacagggccttcaggggaatccctacagcctcttgattggggacactaaggaaatgtacacagtgctcatgcaagctgccagatctcaacaatctacaagttcttttctctctaaggataaggatgcagcaccacatatcacaacctttaaccatcacattgtcaacaaattcggcaagaattcatttttttgggaaggtaccaaaccaaaagtggtaatcactgaccctgagcaaatcaaagaagtcttcaacaagatccaagactttgagaaacccaagttgagtcctattgtcaagttgttgggctctggacttgcaaatttagaaggcgagaaatggcgtacacatcgaaagattattaaccctgctttccatttagaaaaattgaaggttatgttaccaatatttcttgaatgttgtgacgatatggtttccaaatgggaaaggttgttgtcttcaaatgacaaatccgaaattgatgtgtggcctttccttcaaaatttaacatgtgatattatatctagaacagcatttggaagcagttatgaagatgggaaacgtatatttgaacttctgaaagagcaaactggacttatgatgaaattgcagaacgcttacattccaggatggtggttgctgccaacaactacaaataagaggatgaaaaaaattgatactgagatacgagcattacttaaaggtgtcatcaacaaacgagagaatgcaatgaaggctggtgaagtcttgaacaatgacttgttgggcatgcttttggaatcaaaccgtatggaaatacaagatcatggaaagaataacattattgcaatgactagcctagaggtaattgaggaatgcaatgcattctacatagcaggacaagaaaccacatcggttttactagtttggacaatggtgttattgagtagatatcctcattggcaagaacgtgcaagggaggaagtattgcatgtttttggtaaccaaaagccagactataatgggctaagtcaccttaaaattgtgaccatgattttatacgaggttcttaggttatacccacctttaatttattttgctcgagcgatcaagaatgatgtgaaacttggaaacctttccctacctgcgggagtgcaagtttccttaccaatactattgattcaccaggatcgtgatatttggggtgatgatgctacagagttcaacccagaaagatttgctgaaggagtagcaaaggcaacaaaaggccaagttgtgtttttcccatttggatggggtcctagagtgtgcttaggccaaaattttgctttattagaagcgaagttggttttgtcattactcttacaacgcttctcatttgagctttctcctacctatgcacatgctccagtcactgtgctcactcttaatccaaaatttggtgctcatatcatcttacataagttgtagtgtcatctattaatttgtatcctgcacacctaattatctccattcctttcttatgttctaatctcttgtatttatagagggaaacctctttattatattgaatgctatttttatttcctaaaaaaaaaaaaataaaaatgaaaaaaaaaaaaaaaaaaaaaaaaataaaaaaaatttttaattgactctgttgagaattagtgggaatcatactggcacagtggggtgtttttcaggaatcaggtagttgatttagagatgacaataataactgggctgtgttgtgttgtgccggttacctcccagagaaaatactaaatgcagtttctatttgcaaccatgtgaaggctcttcagtccagatcctcacacaagggaagctaagtgccccacgtatattaagagttcacaaagttattaattatgtaatagagaagatggtgcttgacaaacctttggatagtttaagtggtgatggtagttttgcccctggacttactggatcacagtcacagcttcaagcagttggggatggatcttttcgatctggatttaagccttggcaaaagcttagaccttctattgaaatattgtgcaacaaccaggtgctgtctcctgaaatgagcttagccactgtgcgagcttatatatggaagaaatcagatgacttggttttaaattaccaactacttcaaagcaggtgactacaaattgcatatgcatcagaggttttcttgtgattatgtaaaatacttctgagcgccgattcttcttgtgttgcctgcattgatcggtggaattataggaattgtaaattctgagccgtcatttattaccaaatttagtgacattctccaaacctgcttggatagttttttctttagtggagagctgttactgtaaattttgaactgtatctagctggcatgcatacttctgcggacatggcggaatcgtctgcatctggcatgatgatgaaggttcttaattgactgtgttgagaattagtgggaatcatactggcatagtggggtgtttttcaggaatcaggtagttgatttagagatgacaacaataacattgtaaatttgaattgtgcgttaaatatctggccatagaaattatgttgtccaggtgcatatttacatcataaaattttgttaattgttaattgctaataatattaatctcatttgttcaaattaaaaaatagaactccaaaacatctccgctttgtgaactattatctggaaaggagactgcttgtagaagtagtacccattcaagaattgaggttgatggtagttctgagaatgatgctatggtttatcctccatttgaattctcagttacttcccctccttccattattactgagggcactcatggaggtccatggagaaaaaaaatcactgatttagatggaaccaaggatgagaaagactttccttggtggtgtctggactgcgtcttgaataatcggttacctcccagagaaaatacaaaatgcagtttttatttgcaaccatgtgaaggatcttcagtccagatcctcacacaagggaagctaagtgccccacgtatattaagaattcacaaagttgttaattatgcaatagagaagatggtgcttgacaaacctttggacagcttaagtgctgaaggtagtattgcccctggtcttactgggtcacagtcacagcatcaagc

SEQ ID NO: 74807 - DNA, 234 bp, Glycine max
  Clone ID: PAT_MRT3847_38564C.1
gggaaatgcttgatatcaggccaggcgaggccttggctgtgatcttccccttgcaactctatcacacagctgatgtgagtgttcatgttagcaacccaagggttggacttttgagcttggtaaggttactttctcccaaggtgaccacatttgtggagcaggaatcaaacacaaacacaaccccttttttcaacaggttcattgaaaccttggattactacttggcaatctttg

SEQ ID NO: 74808 - DNA, 352 bp, Glycine max
  Clone ID: PAT_MRT3847_38565C.1
ttttcatgtacggaaggggcgagaaaggacacacctactgcataggaggcgcccacggcttgcacttacatataaagatggcaggcgcgatggctgtagaatccactctggatttgcggaggcagttcacactatttgaccccttcaagggacacttaatacacatatctgtggataaggacgtgaacaggctacagctgcatctgtgctattacaatacgtcagagaaagcgatcattcgagtgtatgtggtgataatcactctatgagagctgatgattagtcgacaccttactatcatggctgtcattaaagaagccggctatgttgacatgatattacctttactgat

SEQ ID NO: 74809 - DNA, 246 bp, Glycine max
  Clone ID: PAT_MRT3847_38566C.1
ggccggaatcccgggtcgacccacgcgtcgcacgcgtcgacgtggaagcacaagggagatgggtagcacattatacagaggacatggtgaaatgcatttttttgacccaaagctaatgtgcctgttttaccgtaggctttttctatactaactacatcaagccacacacaaaagaaagataatatggagtatggcatgcactacatggccctctgtacttctcgcgagcaccgcatgaccaatggg

SEQ ID NO: 74810 - DNA, 234 bp, Glycine max
  Clone ID: PAT_MRT3847_38567C.1
atcctgaatccttcctcaagttcatcagttgattatcaagtgtcaagggttaactgaatcgccatctatcatgaggtgcaaaaagcagagccatagcaattagttcgaatcatggcatcgcaatcaaagcactgggaaaagcacgtgtcatgtacgtgtcggacattaagaacttgcggccagcacttaggttactagggtggcggggacccaagggaaagccgccggaaggtc

SEQ ID NO: 74811 - DNA, 400 bp, Glycine max
  Clone ID: PAT_MRT3847_38568C.1
tgaagaataccgagtgactttctatatttcataaactccaaggtccgagttgaagtaaaagcgaacattgctcttatttaagccagatgcaacatgctcgttcaactcagtgaaatctcaaacaaactaaaaatgacaaaattgactctactaatcacgtacatgagtacgtgggcacttgatctagtgaacaataacactctgccaggcaaaacgcgagactgtactagctcgattgcttcacagcctcatccttttattcagatctccgctgatccgcaatccggaaaccctcaatcttgcgtgaaacctgatctgcagattccttcacctgatcaactgaaccatgtgcagacacagactctgagttatccggggtcaaggggccagtctgccatat

SEQ ID NO: 74812 - DNA, 262 bp, Glycine max
  Clone ID: PAT_MRT3847_38569C.1
agaagaccaacaaaaggggtaccgaaaaaaaataatgttgggtgtattagtccaagttcaaccacattatcgtggggtactgcgcaaggaagagtgaactactactggattttaacgcgtgtaaaagatggatcttgataaataccacttcttaaactaatatagttccatcctctcaaacttgcattttagcaatggccaaatggatctcatttgctgctctttttgcaatacttttactactcatcttttctgagcttgc

SEQ ID NO: 74813 - DNA, 1434 bp, Glycine max
  Clone ID: PAT_MRT3847_3856C.1
ctaaacccgcgtctcttcactcttcaattcaatggcttccacgcccttctccactttctgccacttccacaaacccaccctccttttcttagcttccgacgggttcaggctcggtggcgctccggcgatcgccttcggaaaggttcggaagaaccgcaaaatgggaatattccccgtttgcagagctggttctgccgtcgtcttccgcgacctcgacgccgacgactttcgccaccctcttgatcaacagaatacgctgctactgagagcaattccgggattgaacgaactgggaaaagctcttctaggaactgtatctgagcaggttatgctccttgaaaacattgggacatccgtccttgtttctaaaaatcagcttcctgatctttaccacctaatggtcgaagctgccgaaatattaaatgtagatgcccctgatctatatgttcgtcaaagtcctgtgccaaatgcatatacattagctataagtggtaaacgacctttcgttgtcattcatactagccttgtggagctcctgacaaaagcagagttgcaggctgttttggctcatgagctgggtcacctaaaatgtgatcatggtgtgtggcttacatatgcaaatattctaacccttggagcctattctgtacctggtattggcggtatgatagctcagactttggaagagcagctgttccgctggcttcgagcagctgagttgacttgtgatcgtgcagctcttcttgttgctcaagaccctaaggttgtcatctctgtcctcatgaaattagctgggggatgtccatctatggctgatcaactaaatgtggatgcattcctggagcaagctcgctcttatgaaaaagctgcttccagcccaattgggtggtatataaggaatgcacaaacaaggcaactgtcacatcctctgcctgttctacgtgctagcgaaattgatgaatggtcaagaactccagcttataaatctcttttgaaacgaggaattcagatcaaatcttagaacgaaatgtctagcagtgcatgcatggaatttgttgaaagtgcacagcagctcaaggttcttcaagttagtgcgtggtggcagatgttcaaatggtttcaggcggaagtagcatttattatgcatctatctacggctgctgcaaacgtgtatgtattcactgtgttatattagtcaacctgtaagtagaattttggtgagttggattattatttcatagaaatattggttctggaaagaaaagaattacctgtacaattctagcttagaaaatttctcggagtagaaaacactattatgtaagttttatgaccgaaaatttttatttgttgtattttacactataagctaagctctttttgaatagtactaaaacattgactgttacaaaaaaaaaaaaaaaaaaaaaaaaa

SEQ ID NO: 74814 - DNA, 593 bp, Glycine max
  Clone ID: PAT_MRT3847_38570C.1
aaggttggaatttcttaaaccactaatggagtcactaacagcacacagcttgagagcctaaatctttaatgctagctgatgtaaccaatggcaaaagcatctgagaagtaaacttttgatagtacctaacatttcaatgaacccgttgcttcgcttacatcattgtatataaaaggtctacataccggtctgggattgcatgaacattcactccttatttgctgacacatatatagcatatgatcagttaactataaggtgatcatgtccactacgaaacacgcaacgcaaagatgaatgtgccatatatgagagtcaaactgggactattatgtgtatacatgaagactcttcatctgcgtccatattgcattggctctgactaagctgccaatggtggtactggccaattgtatatcccacaatggatttgctggcaccgccatctttgacaaatagctattaaaggtcatattctggacatactcattagcacacatcttcacaaacgctttccttgcatggttggacctataaaacaccttctggtgaatatccatgaccttggaaggtggcccataaggcttggccca

SEQ ID NO: 74815 - DNA, 123 bp, Glycine max
  Clone ID: PAT_MRT3847_38571C.1
aagtccgaaaatatgtgtcatttgacaacacttacagcatttggaaccatgtactcaagttatacaaaaacaacttatggtgaggttaataactttgaaggaatgtgagtggaatatgcaaat

SEQ ID NO: 74816 - DNA, 346 bp, Glycine max
  unsure (1)..(346): unsure at all n locations
  Clone ID: PAT_MRT3847_38572C.1
gtcgcatgcacgcgtacgtaagctcgganttcggctcgattgtgagcagcnngnangtnnacagtcacacgtcgntncaatgctngaccgcttgcnanntgcctgnctancncatgnctccatntacntcttcctngntacaaggnctgtgaacagatgncngntnttgngganantcaaccgncctcnntttncngncggnannggngcnnntncacggangacgnnntnagatacnangacnntcgntncgncntgcantncanccacncnccagnatnnncnacnncnnncacnggntanngcganngacnaggaanacnaagncgangaccgcnncgccacc

SEQ ID NO: 74817 - DNA, 198 bp, Glycine max
  Clone ID: PAT_MRT3847_38573C.1
gggccgaggcaaagatatcataattaccctaatgggataatggtccacaaactcttaaccttaagttcttggaaaaattaaattagagtggtggcaaaaaaaaggaccccaaggaaccttgggttggatgtccaggtcaaagccaggaaaggaaaaaaaaatcttttttacttatgccatgggtggtttggccccttt

SEQ ID NO: 74818 - DNA, 234 bp, Glycine max
  Clone ID: PAT_MRT3847_38574C.1
aattcggctcgagagaatatggaggagggaaggatatggaagccagatgctatcgaagacgagggatctcatcggtcacagtctgtgctagccgagaagctatttcttctgcgacaacccgtgtcaacacataagcaaggttctctacgagggggctgttttcactcacattacggaagactagatggttcctttgtacgagaccctagccggcgattacatgttggactagca

SEQ ID NO: 74819 - DNA, 734 bp, Glycine max
  unsure (1)..(734): unsure at all n locations
  Clone ID: PAT_MRT3847_38575C.1
tggcccatatnnngtacacattnnnttttttggccagacaacaaccattacatgcatatacagtttgtgcagctgtatataacaaccattaattattatatatatatacatatatatatatatatatatatatatatatatatataacaattattagcattatattacatatattatgtgcaacaaacattgtgtacgtatacaaaccatggtaagcctagcctgagttctcccaataagtggacaaaaggatcgacaattcagttgccttgaggggttataatggtagctgttgggatgaaattgaagtcccttttggaatgaacttctgacaacgaatcagacttctggatcctcgatcagctcctcagtgttaggcacagtgtccctaggagtataaatgcctgagtccggttcattaacctctttctgtagcatttgaattgtcctgttcttgaagcttgcgccgataatgttgatcaaatctgtctaaggcatgcaactgatgatataattcctgcactcaaagaaaaaagtcaaactaaattaaatgacgtcttcataaaatcagttgtacagctaaagaaataagaaccaactttccatcaagatgtctattggttctcatattttgcagaataaagggagatgagttagaatcagttgatgcctcatttttcagtttataaaataaataaagcagagaataacaaaatgtagnnncagaaccaagg

SEQ ID NO: 74820 - DNA, 103 bp, Glycine max
  Clone ID: PAT_MRT3847_38576C.1
cgcgtcctcgcgtagagttcaagttcgagacacaattgcgtctcgcgacaacatggcagggcagcacgcaacgacgctcgctcgcaataacgtcatagtggcg

SEQ ID NO: 74821 - DNA, 164 bp, Glycine max
  Clone ID: PAT_MRT3847_38577C.1
cattgctctgttatgcctgcactgtttaaccaagatactggcaacggctccacatgcatcgtctgatgctctcgatctggcaattttgctctatcctgaaatgcacttcaccggggccactgctgactatggcagttgcccggtaggggttgctacctcttttg

SEQ ID NO: 74822 - DNA, 465 bp, Glycine max
  unsure (1)..(465): unsure at all n locations
  Clone ID: PAT_MRT3847_38578C.1
acccaaaacaaaaaaaaaggggccaggggggggaaaagaaacagaagccacacccccacccaccacgggaancaacgaaaagggaccacaacggggaaagcacaaacgaggggaaaagccnggaaacccaccgcagccaaaagaaaaccacgcgcaacaaaccccggcacgagaaaagacgggaaaacaccaaaaagaaagggcaaccaaaccgaannnaaaangggagcagaagcaaccccnaaanggaaaacagaacacaccgcccacggagcagcaacaaggaaagcacaagccgcgacaaacgccaaaccaagccccgcaaaaaagacaggcccaagaacaacaagggggccccccaaacgaacaacaacggggacccncagggcaacccccggggcagcaaacacaaanccacgggcaaaaacagcacacggcacaagacccccaaaaaaggaaaccaaa

SEQ ID NO: 74823 - DNA, 521 bp, Glycine max
  Clone ID: PAT_MRT3847_38579C.1
taaacattcaatatcgtatttaatatctagagaaagtgaaaaaaaatataaatataataaaactgataatgtgtaataagaagaaaaaaataaagaaaaataattaatataattaaagtgtttaaaattatcaataattcatgtattattagttatctaataataaaccccgaaaacttttcacaatagatgatttccttggtagcaattttattcctccaaaccgtaataattaataatgctagcacaaattatacacttcaaaatttgtccattttacattgctccacacctaaaaaaaagaaactagtgaaagggttgagtttagttgattaaataatgtgaattctcggataaaaaagaaacacttacaaaaggaggttagaggtttctttatattagaattatttgctagccatacaatactataatgagccaaactttgagaggataaaattgaagaaaaaacatgaggggtttctaaaagaagaaaaataagtactcgtaatcaagatgtcgga

SEQ ID NO: 74824 - DNA, 477 bp, Glycine max
  Clone ID: PAT_MRT3847_3857C.1
aaaaaaaaccccccccctctttggggcccccccaaaaaattaacaaatctttccccacccttttaaaaaaagggccccccggggccccccccttttttaacccaaaaaaaaaacctttcccccccaattgggggggttcccccccaaagggggaaaccccacccccgggtttaagggggagtttatcttgaaaaaaaggggggggccccaactaaccccacccttttgggggggcccccccaaaaggctcgtttttcccccaccccgagggggggttcccatacaaaaaagcccccaggggattctttaaaggagggaagcggttccgggacggacccacaaatttttttatcaggggcctgggattaacccccccggggggcccaaaagggggcataagaaaaaccaaacggggggtaagcccccctcccccccgggaaaatttggggcttgggcgcttgaaaaaggaaacaaacc

SEQ ID NO: 74825 - DNA, 116 bp, Glycine max
  Clone ID: PAT_MRT3847_38580C.1
atcgctcctagagcgactaattcgggtatgttttgtggactgatcaagaggaacttggtgggctatatagaattggctggaggcctcttacattttgtggtgtatactagcaaaat

SEQ ID NO: 74826 - DNA, 403 bp, Glycine max
  Clone ID: PAT_MRT3847_38581C.1
aagagaagcaaaccaaacaaacaacactcaggttaatttgatgtcaatttaatatcgtgattaaattaacaaaccataaataagtgagaagaaaattgaaacatgatgctttatatatacatggcacaacaattcaaagacagttctaattttaggcatcattgcatcaatcgcagaaacaaaatagttacaaaattgacacaaactaattttggaaagatacatattggctgcctatggataatagttgcacatgatatgtatccatcttgtggactaattttttgtgtggtttggtcgggttacccgaatcttgtggtataatcttgttttcgttttttattaataaaactattttgcgtttcccaaaaaaaattgcagacacaaaaatgaggtggtattt

SEQ ID NO: 74827 - DNA, 555 bp, Glycine max
  Clone ID: PAT_MRT3847_38582C.1
aaaacttgatgtgcatattaatgccatcaagaaccttgaacttgcaagtgtgttgtgaatgtgtatgtttaattgatgtgttggctaatcctttattttctttgtgtgtgatcataaacgtaattgtttaaacttgtgattccttaatacatcattagtgattgtctaattcttacttcttatatgtacgttatatacttgttataggaaccttataattttatgtatgcttgtagtacagtgttttgccttaattgcataaatagtatggttgtttgtgatttcttgttcttagcaatgctaataccctatagttcgatgacccatatcgagatatatttcataaggaatactcttttgaccataccttccagttctaatacaacccattttcttgtgtggtttgctaaagtcaagtagctcgattatacttgcaagcccaagtataattcactctttgtgttgtcagcctacgtcaaacagtttgattactgatgtttctatcacgatcatgcgattgttgatgtctccctatgtgtatatattgtggtcatg

SEQ ID NO: 74828 - DNA, 494 bp, Glycine max
  Clone ID: PAT_MRT3847_38583C.1
aaaaaaaaaaaaaccccaacctataaaaaaacgggaacttcaacatttttaagggaaaggagccccccacaaaaaaaggagtaaaaaaaaccctccctccaacctttggaacaaaaacaaaacaggattagcaggcctcaaaagcttatctaaaaaaaagcaacttagggtttcaacccccccggggaaaagaggaatcccttttaaaaattggccaaaaaccctttggcaataggggaattaacaggcttaaaactttaaaaggaaattacaagctttggggccttaagcattaagagggggagcttcgggctgaagaaacttggaccaccctcccccccaaaatcaaaggggggccctttaacaaaaaaattttgaaagggaaattctctccaacaaccctctcaaagaaaaaggggattggtatttccaccaaatacacaaggcaaacgggtttctctaagtcaaatcaacactccatcaactttaagcca

SEQ ID NO: 74829 - DNA, 544 bp, Glycine max
  Clone ID: PAT_MRT3847_38584C.1
aaaaatggaaagcaaaagaaacttgttgtgggtgatgggcatatgcatgtggttggttctagcacatcaccgaagcggtgcggcggaagaaaaaataggcaaggagctaattaagagcatatgcaaaaacaggggaaacaatgaattgtgcatgcaggtgctttcctcggacccagacagtgatcacgcggacctagaggagctggcaatgatatcgctgaaggctgcggcgtcaaatgcgagcagcattctaaatgattgtaagagaatgatcgacgaccagaatttggaacctaaggttcaacagggtttggctgattgcaaggagaatctgttggacgcagagggccaaattcaggatgctattgcgtccatattgaacaatgacaagcttgatgctcaggtatggctcaaggctgcattggctgcgattgatacatgtgacgattctatccccggggacgatgatgttctgtctagaaagagtgtgtcgtttcgccaattgtgcaacattgccgtcgccatcaacaaggccatgttggcc

SEQ ID NO: 74830 - DNA, 316 bp, Glycine max
  Clone ID: PAT_MRT3847_38585C.1
atcctacttggatggcagccatccgggtgactatggattaaaccctctgggactttcggaccctgaaggaacaggatggttcattgaccttaaatggctagcatatggtgagataaataatggtcgttgtgcactgttgggagcagttggtgcaataacacctgaaatcttacgcatggctggattaatgcctcaagatactccactcccatggatctgaaccggtgtgtctctacctgctagaacctacacctactgtgcagacttctactcacagttcgtttcatagataggactgatggtactagcacgacac

SEQ ID NO: 74831 - DNA, 486 bp, Glycine max
  Clone ID: PAT_MRT3847_38586C.1
tcgacccacgcgtccgcccacgcgtcagaattcgagcgacgggtgtaagtcgtctgctccgaacaagatggcatcaccagagcacgagatgcggtggtggacgctgacaatcgatgagtgaactcggatctagtcataggccgcggagacatatcgggatccacatgagggaccttcagtcgaaggcgccctcccttccagggattctccgacacggcaagaggaagtaggttgcgcataccaagcgctggtagagccatgaggggcctcaatacttgtgtcaacttggcttacccaacttctgacgagccttatccagtgactaccgaacacttggtccctaacgtgaacatccacaaccacttctactagcactcactcttcaagcaccaccgtaaccgcgacataaccagctacaacacttgaatagaccaccctgactcgggaggctcaaaagcgctgcgatgccctgacaatatcaacatg

SEQ ID NO: 74832 - DNA, 372 bp, Glycine max
  Clone ID: PAT_MRT3847_38587C.1
gttcttacatatttttttttaaaccaataaactcgcactactatattaatttcatgatctgatcatcaaaatacatatacccaaccagaatggaagagagaaatgtgatcaatgaccactagggtttgtatggtataagtcaacttaaattacaagaatgtaaaaagtacccgtttaaagtatccttaaaggaaaataaataacaaagtcaagccacattatataactcaaatagttgcctaatggattaatattctgccaagaggacgaattggagtgaattgatttgtaaaacatggggatataatgttttactaatgacattgattaaaccaatccataaattaatttggccattcaaattccaaattt

SEQ ID NO: 74833 - DNA, 399 bp, Glycine max
  Clone ID: PAT_MRT3847_38588C.1
cgccgatcacggcttctggttcggtctcgagcaagaatacacgctgctcgacgagtttggctggccctacggctggcccaagaacggcttccctgctccccaaggtccttactactgcggtgtgggcactggcaaggtcttctgccgcgacattgtcgaggcacactacaaggcctgcatgtacgccgagattgccatctcaggcaccaacgccgaagtcatgcccgcacagtgggagtaccaagtcggtccctgccccggcatctctctcggcgaccagctctggatgtctcgtttcctgctgcaccgtgtggccgaggaattcggtgccaaggttacttttgccccgaagcccattcccggtgactggaacggcgccggtctgcacaccaacgtgtc

SEQ ID NO: 74834 - DNA, 489 bp, Glycine max
  Clone ID: PAT_MRT3847_38589C.1
tttcctttttttttttttttttttttttttttttttttttttttttttttttttttttttttttttttttttttttttttttttttttttttaaaccaaaaggccccacccaaaaattcccatggaagcccgaaaacagaaaccaaaaaaccgggggggggaaacccaaaaaggctgcccaaaggggaagggagttaaagaacaaacaaacaaaggggggggggggccacaaacccctggcaaattttcaacactaaaaacccggggggcttctgggcgaaaaaactgaagcactgccctgggcaaacggtggcaaacccgaagaaacggaaaaacccgggggggaatgcaatcttaacctctggaagccccttcaacaccggaaaagcctcagggcaaccaaacatagggagcttccacaggggccagaagcgcccatcgaaaaacccgggggaccgggggggctcacggaacacaaaaccgggcccc

SEQ ID NO: 74835 - DNA, 525 bp, Glycine max
  unsure (1)..(525): unsure at all n locations
  Clone ID: PAT_MRT3847_3858C.1
cttggccacccccgcattaccttgggttggggttgttggacgcgaacacgccccccccaccccgttttaatccggttccctctgggttaaccccggttttggccatcctcctccgttggacagaactactggacgcactaccccaaggacgagnacgttaccccggagactctttctttggacatccccgggaaaaagccttccccccctactccccagagacatggccctggggttactccggttaggacaaacattggccctccaatgggaacttttccaaaggacacttggacatccttggccggttctttccccaaggaagccccaancggccccggtggccttttggccactttggccaaagagacaagccttggcctctggaagggccactaaccccttttggttttgggggccttcttttttggagggngaccaccttaaacccccctggttggttggccccactttccaacgccccaaaaggccgttggttaaaaccccnactttacatgcccccca

SEQ ID NO: 74836 - DNA, 241 bp, Glycine max
  Clone ID: PAT_MRT3847_38590C.1
ggcgagaaaaaaaggtacacaggctggaaaagtttatgtcaactgacgctcctttctatcaagagatggaactgttgggtgatcttgaacggacgggggaaggaatgaaggcttactctgaatcagatcgaccatatttaagcgcctattagttgaaggtcgcataaaagggggcggagtgtgataacttaacgtgctaattctctgtagaacagaactatatattacaccggcccttgct

SEQ ID NO: 74837 - DNA, 387 bp, Glycine max
  Clone ID: PAT_MRT3847_38591C.1
gggtcatcaccactcggggtcttgatgatctaatcaggggatgacacccgcctcgcgttcgcgaagcgtaaactgcatagtgtctatcacagaggtttccaacatctttcttgggttttaaatacattcttaggatggacgtttttaatgcaacacctctggatgcgatttattttcctcctatggtcaacactgttgctttagaggctaaacacagcacgaaattttgttatgtctgcgcgaaaccaaccacgcctgattcctggagaaaactctgttggttattcctgacttttataaggtggatccttgggctgtcagacacttgcgaggtagttatgcaggaaagatagtctaggcttgaacaaaggggccatcctaacatgc

SEQ ID NO: 74838 - DNA, 652 bp, Glycine max
  Clone ID: PAT_MRT3847_38592C.1
ccacgcgtccgattacgtgttgcttaacgtttttttatgaccttccaaaattctaattctttctcttctctgaatttcaacgaccatttcatggactctctttctctatccctcactcaacgcatcaaaacactatgggcctcggtttcggcttcgggctaaatcccagactcagatattgtctgcttcttcacactcctcattccttcaccaattcacctctctgcctttctccatcttctgctggagtcagggaaacttgtttcaacttcacgaggttatctttcccctcaacattttatgaggaaggagaagctttgcaaaatttggaatttgcattttcatcatcagccttggaaaccttggaaaatgattcattaggaagagaagaaattcaggaaaacaaaggaaagcggtcactgagtagtgtaaataaaatgattgataatacccaaatgcattttggagagaggaaacgtttgctgattatgaagcactgaggttggaaaaggctattatattgcaactagaaaagcttggtgctcttaagttattcaatgtttgtctatcaagatcacttggaacctcacctgtgtcagactatgctgacaaagtgaatgactataaggacaaagttgttgtacagtctaga

SEQ ID NO: 74839 - DNA, 660 bp, Glycine max
  Clone ID: PAT_MRT3847_38593C.1
ctagatcgcgagcggccccctttttttttttttttgaacaaaacacatctattttttatttacaagcaaacacaaatctactgatatgctcaaactcagagtgaattagcatcctaggtaggcattcagccataaaaaagtatagcaaattccactttctgaagtgctgtaagcagccgatacagtagtatgattaaacctaagcaacactgttacaaatttaactagtctaagtctttcttcttcctcctcaaactatttcttcattggaagttgaatgcacctgaccttcaccttgcaataggaaacccctagaaaacctattcaaagcaaaaaggaatcaatctaaactaagaggaaaaataaaccatggaaatcccattaaacattctcaccaaaatctcatttgcatggagtcctgctgtatttgtataaaaatgttgaatcacagttctttcattccttcaatccattatcgcgacttttagcagtgcaaaagtcttttagttcaagagagcagtcactagtttccagcaatggaaaccactgcagcaggagcaactagcaatagtttgtatgggggattttgaaccttacagcaaatggcttacaaaggtaggacaacagactcttgaagaggtttctgactttgccttctct

SEQ ID NO: 74840 - DNA, 386 bp, Glycine max
  unsure (1)..(386): unsure at all n locations
  Clone ID: PAT_MRT3847_38594C.1
gctaaaatttttctcacttgttcatcncannatnnnnagagatgctagacaagtttttctaaaaccnntacattcctatataaacatgcatcttaatttccaattacttctcgtgaatctgtaccattttgttataacaatttactacaataagcaatcaaatattttgaagaatgttcaaaatcaatccaaatctatcatgttgccattagagctcttaaagaaactgctaataaggtttgcaccataaaaaatcatagttcttgaacatcataattatctacatcaaccaattgaagcatgttttaattgcttgtatcatattaagatgttccaatcaatcaatctttggcctaaaatcataataaaatattaaaattgacttc

SEQ ID NO: 74841 - DNA, 262 bp, Glycine max
  Clone ID: PAT_MRT3847_38595C.1
ctctctcctggggtcgaacatacctttaatgaagcgtttctacgttgttcaaacaagtctaatgaggtcctagctatctgtggccgagaaatcataggatgcagattgagtctaatcttaatctcctcgctcgtattacgtacccatttgtaaatagacgacctggagaagatctattcaagatggagtattgacactcagagtgcacaagcggtgacctcccgatacgtgtaaattgataacactcgtcacaaagcgctca

SEQ ID NO: 74842 - DNA, 312 bp, Glycine max
  Clone ID: PAT_MRT3847_38596C.1
acggccttaaaaaaaaaagccgtttcctttattttcaaaaaaaaaaaaaaaaaagggggcccccttttatagaacccatcacacgagcacttgcttacagcccattaacttttttttagtgccacccaaactcaattagctgggccgcgatcacaaacgaatgctatggggaaaaaccttgcagtgcccacaataacagcgtgaaaaaaaaatcccttttagccggctgccataaaaaaaaaaagggcctaaccgcttaccctttcaaaaaaagggccaccccttttgggcaacaggcctccccccatttcg

SEQ ID NO: 74843 - DNA, 344 bp, Glycine max
  Clone ID: PAT_MRT3847_38597C.1
gctaaattctcaaacacaagccccacgacatgctggagttctgcgcaaacttctttaatcgccgtctcgagtcgcagcgaaccgaatatctgctgtcgcaacagcactccagtccccagggccgtgccgagaacacctttcccggcaacaaccccttcagcacctcccccagcagcggcagcggcttcaccaaatccacaatgcagcgtctcgaagaagaggaggagaacgacaccatgacctcccccactgcctcgacctttgcagccgtcgactttagcaggtcccgcggcagcaacaacgactcgggtgcgagcgcatttggcgactttggcggctttggc

SEQ ID NO: 74844 - DNA, 233 bp, Glycine max
  Clone ID: PAT_MRT3847_38598C.1
ggaagccaaggactaggtggttaaggttttctgtgctccgaagaagggtctcaccagggtggaggctaatcccatcatggaaaagctcaaggcgtttggcgctgctggtgtcttagagtgattatgaatttctgactttcttttcgtactccatatttttgagttctgaggcagaatactttgtatttcactctccattacaacaagcttgtaccaaaaagttttgcttgttt

SEQ ID NO: 74845 - DNA, 224 bp, Glycine max
  Clone ID: PAT_MRT3847_38599C.1
tgacaatgcaggcaacagaccttattctgctgggcctgggattgatcatcgtcgcgtgggggtggccgagcaagtgcagaaccatatgaggggatgcgttcgaccatttcagagtgtgcaaacggtgggtagcttttcaagtcctcagcatgcgtctagcgcactgaagctgagacagcatattccgcgaatgacgtccaacacattgctcaataggcctgcag

SEQ ID NO: 74846 - DNA, 576 bp, Glycine max
  Clone ID: PAT_MRT3847_3859C.1
atacaaaccaataacctcgttaaatccgcctcaatcaaaattctgaacttttatgtttaaattaacttttctcttttctctttggaccttaacaaaagtaaataacttttatttgtttccgctacatcactcactcaaaatttatatcaaaatcgagactgaagaaagaatcaacttccacaatctctctttcccatcatcaccgcttggcttggctttttaaatgctgctcttagtagcatcaccaccgtttggctgtgttggactttcatctgcagtggtttcttccaagatgatagtttgaaaattagctgtaagattattgtgtgttgacccactaggagatattgagccagaattagatcgtcgctgagcagagggcagccatctcatccactcgttaagtctccttaacttgtcaccttgcacttccacaacagtagaagttctgagagagtcaagtatcaactgaatgttggttgtcaaatttttaacctgaaaaaaaaatccatatagcaaaaacaaacctaaggtgcaaaatatttatgaaaattcatcattcatgtcagaagcatg

SEQ ID NO: 74847 - DNA, 1218 bp, Glycine max
  Clone ID: PAT_MRT3847_385C.1
ggaaccgagcattagttatattcccacgaacccagtccctgtttctctgtcttttttttctttatccatgcgcgttgtggaggacagacagaatgcaccaagtttagatctagcctgtgataccaatcgcatatatagagcaagctctataacactgcatagaacattgtacggatccgtgtccagaacagaatatactatataacatcgttgtggtgattgaatcatgtcgcggagaccggtgaatccgtctcggcgattcggagacagtggaggtggattgttttcatcttcgaaatcaaagtcgtcaccggttgtgtcggttgggctcataattgtgggatgcctgtttctcattgcgtatgtgtacaagggctcaggcgtttttggtagccgtttggagtctgtgagcagggttgaaggtgattatttgtgtgctggagaggtcctacgagcaattcccattttgcagaaagcatatggtgatagcttacataaagttttgcatgttggtcctgatacttgctatgtggtctctaaattgctaacggaggaggaaactgaagcctggggtatagcaccttatgatatagaggatgctgataataattgcaaaacacttatacgtaggcagtgtgcgtgtgtctgatatcaagtttcctcttccatacaggccaaaatctttctctcttgtaattgtttcagatgctctggattacctgtctcccagatacctcaataaaactcttccggatttggtgagggtagcatctgatggtgtagtgatatttactggttttcccaccactcaaaaggccaaggtagctgatgtttctaaatttggaagagcggtgagtgtattttacataaagaaatattagaatgcaatccatgtttttgttgttgctttaaatttaaggtcaattactaagcctggatgaatagaagatccttgatcctagactctcaacctttttaatgctaaggatattatcacctaggtatatcttttatttattttatgtacaaaaagtggggaaaaaaatttaactgattcctctggcttcaggccaagatgaggagttcatcctggtgggtcaagtttttcctccagattaacttagaggagaatgaagctgctgttaagaagtttgaacaggcttcaacccagagttcatatgttccaaaatgccagatattccacttgaagtcactcca

SEQ ID NO: 74848 - DNA, 576 bp, Glycine max
  unsure (1)..(576): unsure at all n locations
  Clone ID: PAT_MRT3847_38600C.1
ccacgcgtccggctattttctttctatcctatcctttaaatatcaacttcattccttcatttaagaccacaacaccaaccaccaccatcttcttcttcttcaggcaatcaagtggaggaggaaaagatgcagttaaaactttaaaaagttttatatttttagttaacagagtttttatatcctgaagaatcctataagaaaaacaaatttttaggttcaacagttgtgaatttgatgagtaatatcatcactgaagggcactctatttcgaggccaccatatttcaatggaagaaactacactgagtggaaggaacgtatgagagtattcatacaatctgttgacttcaagctttggcttgtgataaaaaatggaccaaaagttccaaccaagctagtagacaacaaagaagtggagaaaagtgaagatgaatatgatgaagacgacatgaagagtttggaattagaagcaaaagcaaaaaatattttacattgtgccttaaatncagatatttttgaaatattttcagatgacccataatcagccaagcaaatgtgggacgagcttgacagattt

SEQ ID NO: 74849 - DNA, 452 bp, Glycine max
  Clone ID: PAT_MRT3847_38601C.1
tgttttttaaacataatgcataaacaaaaatataagtccacatgtaaatggaccatcatttacatgtgctcaaagacaatgatgatgctactgccgctaccattatttatgagaaaagataaacgtggccgactactaacacctatcatgaatgaaacatactaccaacttgatcatttcccccccaaggagccaccaagaccactcatatgagaagtccatatcgtacgtcaattccttatcagcaggtatgaactgagagtgctttgttattttcagttacctcaagtactacaaacatagacggtcaaataaacaaaaatctgaagtcatgacattagcccacataagcaaacacgatgaaacaggagcggaccttttccggcgtctgtacactggacacagggatcaaattgactctcttaaaagttcttgttgacttctctaattca

SEQ ID NO: 74850 - DNA, 229 bp, Glycine max
  Clone ID: PAT_MRT3847_38602C.1
agagagagaggcatactcattgtgggacgtgtgctactttgagagagggtcggtttcactaatcaaggtgcgatgatgaagctctctgagatcgcaccaccggtatggcgatgagtattcatcacagggttccagttctacttaggagttggagcgcttatcgctggctgcataaacttcgcaaccgctacacgcgcgtggggatggtatatctctctctcccttgtaa

SEQ ID NO: 74851 - DNA, 335 bp, Glycine max
  unsure (1)..(335): unsure at all n locations
  Clone ID: PAT_MRT3847_38603C.1
gttcaacnacaatagcaagatcncnccgccatgctccgcccnncngcacccgcannncccgtttttccgcatgcgtgntgtccggnccgcaaagancggaggaacgtagncgactnatgcggncggcgaacggagnctcaagnattgctgcgtggaaggaaacttgggtncagncgccgngaggnagncggcgtgngtctggttnattncgttgnggggcggagngnagttcccggctggncggcagggtttgtacgtctgggtttnagggggtttttttcgcagnagcaaaacgggttggggatggaaaggaaaanacttnaaaggaaatttnc

SEQ ID NO: 74852 - DNA, 1793 bp, Glycine max
  Clone ID: PAT_MRT3847_38604C.1
gggagagtacttagcgatctccgtgaatacatagtaacacaataaaccacctccgcgcgagccaccttacccagtgaaccctaccgcaccgaaacaaaaccctcgcaaaccctaaccctaatctcataggaacatggacggcgacgacgagacctcgggtccgatgatcgacgaaatctacgccaacggcggtggcgtcggcgacgacggagacaagcggagccgccgcgcaatcatgagcggcgaccagctcgacatcgaggcgtacgcggcgctatactcggggcgcacgaagatcatgaggctcctcttcttcgccgacaagatgaacaacgcggcgacgcagctcgaggcgctgcgcatggcctacgacgagattaagaagggagagaacacgcagctgttcagggaggtcgtgcagaagatcgacgggaggctgggcccgaactacgacatggacgcggcatggtgcgacaccgtggatcggagagctgagcagaagaaggagaagctcgagaacgaactcaatgcctataggacaaacttgattaaggaaagcattaggatgggattcaatgattttggagacttttactatgctcatggtcaattgggggacgcttttaaaagttatgtccgtactcgggattattgcactacatcaaagcacattattcatatgtgtatgagtgcaattctggtcagcattgaaatgggtcaattttctcatgttacaagctatgttagcaaggcagaacagtcaccagatgcccctgaagcagtaacagttgcaaagctacgatgtgctgcaggattggctaatctagaggccaaaaagtacaagcttgctgcccgaaagtttctagaaacaggacctgaactgggaagtcactataatgacgtaattgcacctcaagatgttgcaacatatggaggactttgtgcacttgcaacatttgatcgggcagagttaaagagcaaagttatagacaattccaacttccgcaatttcttagagttagtacctgaagtaagggaactgataaatgatttttactcaagtcactatgcttcatgtctggaatacctcgggaacctcaaagcaaacctattgcttgatatacatttgcatgaccatgttgagacactttatgatcaaattcgtcacaaagcccttatccagtacacacacccatttgtgtctgttgatttgaacatgatggctaatgcattcaagacaactgttgctggacttgagaaagaactagaagcactgattactgataatcagatacaggctcgaattgattcgcacaacaaaattttgtatgcgcggcatgcagatcaaaggaatgccacctttcaaagggttctggaaactggaagggaatttgatcgtgatgttcgttccatgttactgagatcaaatcttatcaagcatgagttcaatcttagagcattacggaaactttgattatgaactgatgataatgggaccaagttgctattttatttatagcaggcattgatcaactataacgaagcaagtttctggagtgaatcaaggttgcaaacgtactttgtgcaaacatttaacggcatattatggtttcttttgtatatactctttcataatttctcaattaattcgtcacaagatcttcatttcctgtttttaacctgcacctcatttttggtaactccgttgcgtaagacttgagtgttgatgaaaacattctcatgatctgtcttaagaattctttgttctggtaaaaaaaaaaaaaaaaaaaaaa

SEQ ID NO: 74853 - DNA, 497 bp, Glycine max
  Clone ID: PAT_MRT3847_38605C.1
tgggttcctttaaagcggccgttttttttttttttttttttttttttttttaaaagaaaaatctggggacaatttattggaaaatttttgaagaagtttttccaaaaaaacccttatttggccgttaattgttggcccaaagtccgttggcacccttgattccctccaaaaactggtttcgttacagtggatcaaggcctgctataaataaaatagcacctgggccccattatcatcagttcataatcaaagtttccgtattgctctaagatggaactcatgcttgataagatttgatctcagtaacatggaacgaacatcacgatcaaattcccttccagtttccagaaccctttgaaaggtggcattcctttgatctgcatgccgcgcatacaaaattttgttgtgcgaatcaattcgagcctgtatctgattatcagtaatcagtgcttctagttctttctcaagtccagcaacagttgtcttgaatgcattag

SEQ ID NO: 74854 - DNA, 636 bp, Glycine max
  unsure (1)..(636): unsure at all n locations
  Clone ID: PAT_MRT3847_38606C.1
ctcatggtcaattgggggacgcttttaaaagttatgtccgtactcgggattattgcactacatcaaagcacattgttcatatgtgtatgagtgcaattctggtcagcattgaaatgggtcaatttcctcatgttacaagctatgttagcaaggcagaacagtcaccagatgcccttgaagcagtaacagttgcaaagctacgatgtgctgcaggattggctaatctagaagccaaaaagtacaagcttgctgcccgaaagtttctagaaacaggacctgaactgggaagtcactataatgacgtaattgcacctcaagatgttgcaacatatggaggactttgtgcacttgcaacatttgatcgggcagagttaaaggcaagctctccattatattgttgtgatggttcttcttttcaatctgaaacattgatggcattgtctttgttttttcttttttctttttcaatatctggcagagtaaagttatagacaattccaacttccgcaatttcttagagttagtacctgaagtaagggaactgataaatgattnttactcaagtcactatgcttcatgtctggaatacctcgggaacctcanacanacctantgcttgatatacatttgcatgac

SEQ ID NO: 74855 - DNA, 325 bp, Glycine max
  Clone ID: PAT_MRT3847_38607C.1
cgcaacttctggatagcacaaagaaaacccaacactgcctcaccaagagcgtgcaaagggcagagggaaaaagacgaatttgtgtcactgtaggcacaggattgcctgccttatgcattatcaagagccttcttgtacatggatatgctgttaataccactataagatctgacccacgacgcaagagagatgttagctttcttacagacctacctggtgcatcagagaacgccaaaatattcaacgcttatctcagcgacccatagagtattggttcatcacctgaggggtgggtgggtatttttgacactgacaccccaattga

SEQ ID NO: 74856 - DNA, 425 bp, Glycine max
  unsure (1)..(425): unsure at all n locations
  Clone ID: PAT_MRT3847_38608C.1
atatgcattgtttaaaaagacacattgtttacatgtgaattggatttataaatataattactaatttttgcaaaaaacgaaagcatgggtttactagtagatctgataccttaaattttcaacaaaactagtaaaaaatcactccatagggggattgccccaggaaagcaccaatgaacacaatcattatatagtgtcatgttcaaaattggccaaaacccatataaaaaggggtgaccatctggtctcaacaacattagctcgcgtcgtgtctagaaacaagaacttcaatccttaaggaaagccttctttctttgcaattttgaactcctccaattgaatcatgagcaattgtaaattagggccttctaaatttggngcgttattcctaaatggcttacaaaaacgcaatttccacctttatt

SEQ ID NO: 74857 - DNA, 619 bp, Glycine max
  Clone ID: PAT_MRT3847_38609C.1
gttgggtctctagtttccaccgtaaccttaaacactgctgaaaatttctatggggaagttgactcttccgtttgtgggaatgattatggcagagtttgctcaggttgggttaatcatactgagcaaacaagtcatggcacaaggaatgaccaatttcatcttcatcttctattccaattcaatcggtgctctcctccttcttcccatttccttacttatacacagatttgaacgtcctccaatcaccttttccaccctttgtggattcttcttacttgcactactcggttatttggcgcaggcttttgggtatgctgggatttactacggctcagctacactcagcacgtccatactcaacctcgttcctggttttactttcatacttgctgttctttttagaatggaaaaattagactggagaaaattaagtagccttgctaaattgttaggaacaatagtatcaattgctggtgcatttattgtgactttgtacaagggccctgcacttttgatgggagtgtcatccgcaaacacatctcatcagccacttttatcaaaagattctaattggatactcgcaggtttattttttgcggccgattgtgtaatggcttca

SEQ ID NO: 74858 - DNA, 467 bp, Glycine max
  Clone ID: PAT_MRT3847_3860C.1
ccgagttagttaaaagtgctgccttacgatctattactcgatcgaaacgagtaaattttattggtcaaatttcaccaccattatcaccgtcaccgtcaccatcatcatcaccaccatctccaccatcaccatcatcatcatcatcatcacctgctgaaagtatcataactcctatccctgaccatggagaatacctaatgagattctctttaggcactccgagtgttgaaaggcttgcaatttttgacacggggagtgatctctcttggctacaatgcaccccttgtaaaacatgttacccgcaagaagcaccattgtttgatccaacccaatcttcaacctacgtggatgtgccatgtgagtcacaaccatgcacactattcccccaaaaccaacgcgagtgtgggagctcaaagcaatgcatttaccttcaccaatatggtacggactcattcaccattgggaga

SEQ ID NO: 74859 - DNA, 227 bp, Glycine max
  Clone ID: PAT_MRT3847_38610C.1
aacccaaaaaatcaaaaatttttcttacaaccccaatcaaatccctcgctggtttttaaaaaaaccggttcccaatatacacccttcacaacccccttcttattatacttatattatcctatactctcaagcaattttcaaatattcttttccatactctaacaatatcaccatcatcttccatttttacaccctacaacctgaacccatccctacatacaagatac

SEQ ID NO: 74860 - DNA, 363 bp, Glycine max
  Clone ID: PAT_MRT3847_38611C.1
tttttatggggaggctcccttatttcatggagtactgcggtttatacacattcttcacaaatacaatgattggttgtctagaattgtggaaatcgaatacagagggtgcaaacggaataatatcatgtggctgtaatgcacaaatcctttactaatttaacgttcttataacaaatactctaaggcatatactgagacatatcccatttggcaatatacctgctctcttcaaagatgtgggcaaggtaatcacgggtctaatattatgggtgacattggtaaaaacaccctttcttggaaaagacatcccatactcggcgtgttaaactgttccataccctctcaaattagggtaccactgat

SEQ ID NO: 74861 - DNA, 155 bp, Glycine max
  Clone ID: PAT_MRT3847_38612C.1
tttttaaaatgacctctcaattattgggggggggtacatttctttgccatcttaaacaaaacactctggaaaagatgcgttcatctgccctactacatttagtaattatcattttgtagggattttaagatcccattaagactctattcaaaagg

SEQ ID NO: 74862 - DNA, 255 bp, Glycine max
  Clone ID: PAT_MRT3847_38613C.1
acaaacccgaggtgcatcctctgaatcaattaatgctctgccgacttataagttcaaaatgaagagaaataaaagcaaaggggaaagcaactcagctgttggtgaaggtggagttgtggctgcagaactgaaaaggaacgtatgatctctggagaagatgcagcttgctgcatctgcctggctaagtatgaaaataacgatgagctgagagaattgccttgttctcacctatttcataaagattgtgtcgacaag

SEQ ID NO: 74863 - DNA, 365 bp, Glycine max
  Clone ID: PAT_MRT3847_38614C.1
tttactcttggggtcacgcgggctaacagcggggatagtattgaagtttacatgaccgtaaacataagggactgtttgtatgttgctaggatttggaaatcttgttggactcacctttaatcttacggctttccacaagaaactagagctttttgtgtggtgtccagaaaattttgggttgaaatttcttctcattgatattatatttgctgagcaatttaagattcgtattactactcctagtgagaatgaaggttgtccagttaagttttcagtggtccgtgaatttttaagcgctacttgtctaaatttttggtttgtgttagcaaacttctatatgttaaaccacttttgggcctgacttt

SEQ ID NO: 74864 - DNA, 482 bp, Glycine max
  Clone ID: PAT_MRT3847_38615C.1
gacttaacttgtttcaactaaccaatgtttttaaaatcggattgatgattgaatcgatcaaaatattagttcaaaacttaatgacttaatcatgtttgaatcgtggttgactagtattaataaaatataataataattaatacataaaattatactactaaataaatataataccacaactttataatattaaaaactaacataaaaacatcatttcttaggttcttaacatttaaagtaaacataaaattataaatcaaatatatcatgatatttaggtttttattttaataattaaaatgcaacaattcattaactaacatatagaataaaaaataaaatgagaaattaatataactaaaattataagaaattaagatataaaaatataaattaatataaataactaaattatatattttataataataataataataattaatataataaaatataaaagaatttaaactttattaaat

SEQ ID NO: 74865 - DNA, 594 bp, Glycine max
  Clone ID: PAT_MRT3847_38616C.1
ggctcgagctcgagccgctcgagccgattcggctcgaggattgctattgcccattggtcgtccggcgctcctctctctctctctctctctctcctcgaactccgacgcacccttccatctctccctttcactccaacccaaacctgaatctctgatcccttctccctctcctttctctttcctctcctccctttgctgtactacatcccagccacatttccttttcactccgattttcacccccaattttcaccagggaatccaccgttaattttcgcttaactgttgaactaggtttttgtttattgttcttgttgtgtcaatcgagaatgcctcgggggtgattccgattcgtgtcttagatctcgttactgttgcgtccgtggattgaatttggggggagtttatcgatcccttagcggtgtttatacaatgtggttggagaagtatttatgagttcggatgagtccttgcttttggaatcgtcggattctcgtccagtgattcatcaccgccgcgggaaatcgggttcccggagctacctctccggcaatggttccttctcatcttccgcctttgatgatgctttcgctg

SEQ ID NO: 74866 - DNA, 433 bp, Glycine max
  Clone ID: PAT_MRT3847_38617C.1
ccacgcgtccgcccacgcgtccgcgccggaaggggttggtgaatacattcagcaacatctatacagggggggagatgcttatactgaatcagtatcttgaaaattgcatctgaattctgtacaaaagacgttgcttacgggaatgtgcatctttggcagtactgattctgacatacttgttattaaccagtgctcaggtgcgtctatgcaagcactatgggagctgtctcagaagcatgctgaaattaccataaaaaatcatggggaagctaacattaggtatgcttggcttgcttcctatataggagaactatctacaatgatgaactatggacttagtcattatggactatctggatcatagtgcacatatggcagtggtgttcatcttgctgatgacacttgccgtgatgccagtgttcgttaatgtgat

SEQ ID NO: 74867 - DNA, 257 bp, Glycine max
  Clone ID: PAT_MRT3847_38618C.1
ataacagccaataatctgtatgtaataagagggggcctatgacaatttgttaagtagacagatttttcagattaaggaagccgccttttatattttttttggcatcattctttcttgcccatgttgttccttttctaaagtatcacttatcattacttgttgcttttaacaaaattattggtgcattttatttgtttacaatgtgcttctacaataacttacaacttcaatatttgtgattgctatgatacttaatg

SEQ ID NO: 74868 - DNA, 463 bp, Glycine max
  Clone ID: PAT_MRT3847_38619C.1
gggcgcgattccagatgtagtagtcaaattgatggggctggacatacttgctgacaaagaggaaatggaatcataacgggcattgctccagaaaagagaaggaacatctgccagagcatgctgctgaaggaagcactaaaaacactgaactgacgagccaagagacagattgtttgatgcctatgaacaaccaaaacgtgatagagagcctttaaagtgcctgcatctcacggcaaagagatgatcttcggagcatataagaagatgcttgtcgagaagaccagctttgaggtggcagatcggaacggaataatatcactgaatggatttgacgaacccaccataaaagcgcacgggcctactaaaagttgcccttacaagaaccttaccagagaaagtcaaactgctgttcaggagatatgaagaaaacagaatcacccaacttaccattgcagggaacaga

SEQ ID NO: 74869 - DNA, 230 bp, Glycine max
  Clone ID: PAT_MRT3847_3861C.1
cgtacgtttggttgctttctagcgggcggccggttttttttttttttttttttttttttcggagggggcgtaactcatatgtcccccttggaaaaggcagaccttatagggtgggaacaccctttttcttaaaaccaagttggggttggcccaacttacttagaagagtaccttgggatgagaaaagcacgtggcttttttgcctgtttagagaatactggtggcgtgtt

SEQ ID NO: 74870 - DNA, 156 bp, Glycine max
  unsure (1)..(156): unsure at all n locations
  Clone ID: PAT_MRT3847_38620C.1
ggnangcncgcgtncgtnagctcgganttnggctcgngntgaagctgaacctcnnnnccctngctgtncgcntgttntgcaacggcgtccgttntgntcngttgagnntccanaggnnttcgagtcgnntcatctgaccggcgncngttntgtaca

SEQ ID NO: 74871 - DNA, 434 bp, Glycine max
  unsure (1)..(434): unsure at all n locations
  Clone ID: PAT_MRT3847_38621C.1
ccacgcgtccgcaattcattcatacattataagattcaaagaaaattgcaattgatcttatgatacgaattgatagctagctgaatcgcatcaaatcactatgattaaaatcactgaatcgtaagacttttactgctgactagttaagttgcaagccgttgacaattcaaaccttttgtttatatgtactggtggttaaaatagtagattttttagatatgcttctcaatatttgccttttctctatctacactgacacagatggattagaatgttaattttgtcagaaccttccatgtttttggcagtgctagtatttgctggagtcctgatggaaaagcttatgcaatagagaaattgatttgaagttgtcaattttgtgtacaacaaagtgagagatggaaagagaagaaagaagagtgngagatangatg

SEQ ID NO: 74872 - DNA, 521 bp, Glycine max
  Clone ID: PAT_MRT3847_38622C.1
ggaacataataatgttacttttgatttttttggatttcattcatcgttttgatttaatagtctcaacaaagcgtataacagtagcctattgaacgattgtatgtgtgaatgcaaacgtgtttcaaccttagttgttgcctgttggtgaagcttcttgtctcctcagtcaaaaccttcaccgtctaactaaaaaaaaagaagaagagagaaaactagaaacaacccaaaagtttgttttatgaactgatggctgaaaataaaactagctacagcttgcaaacatgattcaacggcaagttatgaaggaaaagcgttgaatcttttgtcattgggtttgacatttttggcattgaagagaggattagtagtgtatataatcattctcctttgacatgtgaatggaaaattcaaaaatggaaagccacctccctgtcttgaagtccagctccaccttgtaacaccgtcattctaccataaagatcaacgcaacgacccgagttgatgctaagataagatttgag

SEQ ID NO: 74873 - DNA, 620 bp, Glycine max
  Clone ID: PAT_MRT3847_38623C.1
taacaacataacattttccctagcaggaactaactttatgatgaaattgcacaagctcaaaagcacctagtacgtattaattgacacttattttgagtatattatcaatgaacatataaactctaattgaaacatgcctatatgaaatacaaagagacaagtgctcttgataagaaactaaactatttaaggattaatcttaattgagtttacattttccttctactcagtttgatccaaatggtggtatataaattaaagacacttgtcatatatgatcctgccttttaattgatgatatctaacagccatatatgatcctagacgcagaagctgatatcacgaattgacgaattacatggaaaggaaagaggtatatgcacccagatttgtgaaggttctgctaataatcatattcggctacaagatgcacaagtcaatcaatttgaatctgaaacaacagggtatgattatgttatttgctgtatgggtgtatgcatatataactagagtatttgacaaccaaattaagatttttttgttgttgttgaatagaatcatttaagttggactcacttgaaacacaattccattaagtattatttaacaagtacatatat

SEQ ID NO: 74874 - DNA, 274 bp, Glycine max
  Clone ID: PAT_MRT3847_38624C.1
tttcattggtttttccccccttggcaagtctagttgcatacacttgacccaatggctttctttcttcctttattatttctttcacttcaaaagttctatattcttatttgattactcaattagctgaactatgcagatttttttattttactctgcctgtaaagtctgctccaagtctaaagttctctcctctcttgtgcaacagacaactcgtttggtgaaccatgaacaacagtattcctggttgggattttgagagtgatacatgtctcac

SEQ ID NO: 74875 - DNA, 310 bp, Glycine max
  Clone ID: PAT_MRT3847_38625C.1
atccggctcgagcggacaaccaccgaagtagaccccgaagccccacggccggagcccgggcagcagcggaaaaacacacgccaacggcacacaccgagaaagcagtccgggcgccgcacccgacaaaccgaggcaacaggcccgaacacgacgacagaatgacggtcctccacaagaggacccacgtgcgcccaacggagacccgcccgccaaccgccaaagaaagcagcgaccaaaagcgagccaacaagaacaagggccagagaaaacaccacgagacaccctcagaggccccggcggcaccgacagc

SEQ ID NO: 74876 - DNA, 231 bp, Glycine max
  Clone ID: PAT_MRT3847_38626C.1
cttcacacccaccataataataatatcttcattgttcttttcatctttgttaccattaaaaacacacacacacctccaacaacactctcaaactaacaacaacaacaaaagaccatgtcggtgaaggcatgcgagcaccacaagggcaagaagaggaagatcctccggcaagtgttcccgtgcttagtggtgctcctttcatcgtgctggtcacaattcccctgatatggg

SEQ ID NO: 74877 - DNA, 243 bp, Glycine max
  Clone ID: PAT_MRT3847_38627C.1
gaaaaaccgaaaagcaaagagtttttttgggcgaattataaatgtcctaattttattgaagggagcccatcatgttttttttatgcttttaaaaacaaactccattcactcactttatgaaccccaaccaaccaaccacatgattctgtttttgaaaaggaaaggggaagggtttcaaaatgattttcttaacaccacaatcccctaaacgacgacccgagaaaaaaaagctggagccgaatt

SEQ ID NO: 74878 - DNA, 808 bp, Glycine max
  Clone ID: PAT_MRT3847_38628C.1
ccacgcgtccggcaaaacagagcaagaaagaaaacgtgtgatcatgtctttctcacattccccttcttcatcatctcaccctccgtccgctcagagtaaccctttaatccccgcaaactgctgtctagaacttggcaaacgaatgcagcaaagcacttgtcacaactgtgatcaacgaggacattggtcttattactgtccttccaaatcccccaaaaccaaacctttctcacccggaaaagattccactgttccctccaacaagaagatacagtgcccttgtggccatggctcttgcgtaatcaaatcacgctatggcagggactactatgcctgccccatcaaaaggggggaaaaatgtactaaagaggttgttaagtggtgcaatgaagcaattgttgagagagattttcagcctccaccttttaagtatcctcattgtgcatgttctgccggagtgtgtaaaagggttaagggtacatactctaagtactattttatttgccctattaaacagggtcagggatcttgtggatacattgtgtcagaagatgacgttaaattgcttagtagaaaaagcactgttcctgtccagcaaagtaggcaaagaactcatgatgatttttgggagggatgcctaaatgatgagatgggtgatgaattgggtaagggagatggtttgcatgtacagatcaaaaggatgagaatcgcagacagtcccgcgagtccattttcggtgaatttatccgagactctgggaaaaaaagaatgcagtgcagcactaaatgcagccaattcaaacgtgatg

SEQ ID NO: 74879 - DNA, 216 bp, Glycine max
  Clone ID: PAT_MRT3847_38629C.1
ctcgagcaatatcggctccctgaagaatcatacttggagggacagcatgcactctagtagacttcaaccagtcatagcgatggggtgactactctaggtagcagcgatatcctctgtttccggcgagcacacggtgaagcaccagcagctaatccctgatattgtcgctcaggattgtaaatcatacgtcgatctcgaagtagaggaagatgaggt

SEQ ID NO: 74880 - DNA, 225 bp, Glycine max
  Clone ID: PAT_MRT3847_3862C.1
ccacgcgtccgcggggcatcaaataagaaagagggagacgtagcagataaattgtcgtatttccaagcgataaccggtttagaagatccggagctctgcacagaaatcctggctgcccacaattgggacctgggagactcgctatctctactttcacctcttactcaaaccctaacaaccctacagcggctgccaatctggcttggaaactcatcaccctacccg

SEQ ID NO: 74881 - DNA, 343 bp, Glycine max
  Clone ID: PAT_MRT3847_38630C.1
cggacgcttgggtcgaccacgcgtatgtgaggaactctactctgacggtcacacaagcagcgtatggatgactagtcgtcacttgaacttacgaatgtggaagagtgcattgtgctttggcttagctggcgtagagcttggactatgcatagcttatgctgctgtgtccgtggacatgacattgtaacacaacaaggaggatgagagttgatgcgaacaatgtgacttggaggttcattaactgaaccaaggtctctgatccacatagtgtagtgataaggatgtctcatttgcagggtatgacgatgctcttgatgagcttatcctgtaatccctggctcag

SEQ ID NO: 74882 - DNA, 385 bp, Glycine max
  Clone ID: PAT_MRT3847_38631C.1
gcaaagaaatttcattaaaagaaggaaaactgaactgtagcacaagaaatgccactatctagtataaaagagtctgatacaaagaatataccaaactaaaccaaaacaaaaaaaacaaaacaaagacctccaacacttcgagacatagataaaccccagtgacacataaaaaagaagttgatgcttacaaaagcattacaataaaaaagaagcaaaattcctccatgttataaaacccgccagcaacaaagcttcagcttgctgagagaaaaaaccataaacagatacatgctacctccaaaatgtattgcaatacctgaggatagagtgttcaacagccagctagacttgcaacactgcaaacgagttaagaggagatgcaagc

SEQ ID NO: 74883 - DNA, 724 bp, Glycine max
  unsure (1)..(724): unsure at all n locations
  Clone ID: PAT_MRT3847_38632C.1
ggatcgagctcagcttaacatgctactctcgagcattcatcagtgcatgtgtaaacaccctctctaggcgtctcagcaagactagcagttggacagtggctttaaaaacacttattttgattcaaaggctgttatcagatggtgatcctgcatatgagcaagaaatattcttctcaactcgccgcggaacacgcctcctaaacatgtctgatttcaggggcaactcaaaatataattcatgggacttctgtgcatttgtgcgcacctatgcgttgtatctagatgaaaggcttgagtacatgatgcaaaacaagcgtggaaagcgtagcaggtttgctattgatgaggaagaagaggaaactatggaaagagaaagtagatatagtagggaaagagaaaagaatagagaaatcttgaaagtcacaccattgtgtgaaatgaagactgaggagctattttccaaaatgcagcacttgcaattgctggttgagcgctttctagcttgtcgtcccacagggagagcaaagacacatcgaattgtgatagtggctctctatcctattgtgaaggagagtttccaaatatatgacaacattacagaaatactgtgtatcttcattgaccgtttcattggcatggagttacctgactgcattaaggtatatgacattntctgtcgtgttgggaaacagtatgatgaactagacttgttctacagctggtc

SEQ ID NO: 74884 - DNA, 163 bp, Glycine max
  Clone ID: PAT_MRT3847_38633C.1
tagggttccgacgacacaagggcaagggagtacaagtgctgctgttgatgcatactatgcgacagcattgctgggtctagcatatcgtggctcacggcttgttgacactggatcaacgctggtggcgtttgtgactcttgctgcacgaacctggtggcacgtg

SEQ ID NO: 74885 - DNA, 331 bp, Glycine max
  Clone ID: PAT_MRT3847_38634C.1
ggctcgaggagccgcatatagaatcagagcatgcgatgcttgagcttgcagagagggatgagatcgttgggagagggggtctcaatgatccaacgaagaatggaacctattggaagatccctgggatgctatagctacttgaacgaggcgctcaacctacaggaactgttcatgacatttcaaaacggggtggagcgcatacggaacttaacgcggatcaacgaccgaagggccattaatgaagtaaccgatagggggtgcggatgactggtatatagaattctaaaactctactctgttttatccgaccggtctatagggctattgatac

SEQ ID NO: 74886 - DNA, 747 bp, Glycine max
  unsure (1)..(747): unsure at all n locations
  Clone ID: PAT_MRT3847_38635C.1
ccacgcgtccggaaccatcattgtacataccatgagcatctccaccactaccactcctctcttcagcttcaaccactacttcacaagagaaagagaaccctccattcaccgttccaagccaaagccattctctctcacttcttcttccactctcaccctcttcaactccaacaacagctgtaactatagctttgcctcttgcaaactccacaagtttcacactccaaagtttgaggcttttgcagctaacactgataccctcgagtcccttcagtcctctgatgtcttattcgaccagattttccccatcaaccgaactggtggagggaaagatctttgcgagattggatcggggggaaggatttgggaaattggaagcttacaagggttgcaatctatcagggaaatggattcttcactggggagtttctcgtgtggatgatgttggaaggtacatcatgttaaataaggtgtttgaattagctttcattttgattttgagatatgtggtgattcatgattgtgctttatgttttgcatcatggtattagcttaatcttaatattaatgatccaatgaagatatatgattaaggtgtaagtttgattctgcagtgaatgggatcaacctnctcttgatatgatagcccctattccccctggatctattcctattaaggacctatgcatagagacacctatgaagaaatcattgtcatccactgaaggagatattttacatgaagtc

SEQ ID NO: 74887 - DNA, 497 bp, Glycine max
  Clone ID: PAT_MRT3847_38636C.1
gaaattcgttgttgagagtcagagttccttcgcggaagctgatgattctctctctcgccattttcgccattctccctcccattttcttccacttccgcctccgacgcctccaacagctgcaactcacaaagtgccgttggctcaacgatcctcctctagtctgcgcccacggtggcgattcctccaaggcttctccaaacactatggcgtcgtatttccacgctcttcagtctcgcgtcgactgcattgagatcgacgtttctcgttcttctgacggagttctctttgctctccatgacagggatttgcagcgcttaaatggaaacactagttctaaagttggttacatgaactcagaagagattagagagctcagtgcttcacgtcagtctacctcaaagtttactgatgaaagtatacttacaatccaagatgctctgatgttgactatcagtatgatcccaagataggtctagatgctctttcttttcttccct

SEQ ID NO: 74888 - DNA, 451 bp, Glycine max
  unsure (1)..(451): unsure at all n locations
  Clone ID: PAT_MRT3847_38637C.1
gcgagtgacggggacgaagatgggatcggtgccttgattggactcgtcactatcgtcctactgcttcgactacagccttggtgaaccaaggccatcactcgaagcttacttttanctagtcgacgacgcagagtgtcctagacttactgaaaagcagatgctgaacatggcacgtctctttctgaacgtgactttaggagctgcttatgttgaaacctctagacactctgttgatgtaatagtgtacatggtgctctacggcatgacagattatcatactgaggcccctaacgctctggttgagccggtgaagactagaacttgcatcatagcgcttggcagtgacttactacgggagaatggatggaggccactcttgtatgacatgggatagcgcctgttaagatcgctgtccatgagtgccgtatacatcatggagcgggctggcctg

SEQ ID NO: 74889 - DNA, 133 bp, Glycine max
  unsure (1)..(133): unsure at all n locations
  Clone ID: PAT_MRT3847_38638C.1
ctcaaaaggaaaaggatgccggaaatgcangggatatttagaaagattttggtgcttcaaaccaacattacacaaaggctccggagtcagataacgacgaactatcctccgttatcaaccccacaggggcatc

SEQ ID NO: 74890 - DNA, 1198 bp, Glycine max
  Clone ID: PAT_MRT3847_38639C.1
ctaagagtgtggatcgaagcaatagaaatagagagattgagatgatgcagagttcaagatcacgaaaagcggcattgagagtcagagttccttcgcggaagctcatgattctctctctggccattttcgccattctccctcccattttcttccacttccgcctccgacgcctccaacagctgcaactcacaaagtgccgttggctcaacgatcctcctctagtctgcgcccacggtggcgattcctccaaggcttctccaaacactatggcgtcgtatttccacgctcttcagtctcgcgtcgactgcattgagatcgacgtttcaaaaaggtgtatgcctggacagttgatgatgtagaatccatgcaaaaggtgttgttttctcacggagttctctttgctctccatgacagggatttgcagcgcttaactggaagcgctacttctaaagttggttacttgaactcaaaagagattagagagcttagtgcttcacgtcagtctacctccaagtttactgatcaaagtatacttacaatccaagatgctctgatgttgactgcaaattcagtacgccagatagttctagatgttaaggttgggcccccattttatgagaaagagcttgccaaagatgttctctctattgtggagaagacggagtgcagcaattgcctcatatgggctaaaagtgacattttagcaagagatgtaattaaactctcatcagaaattacagttggctacattgttatgagagaaccttctactggagctaggacaaatttgttgagaatgaaaggtgctgaggttgttggtgtctatcatccactgattgatgaaaagcttatgaaagttttgcactggaggaacaaaaaggtgtatgcctggacagttgatgatgcagaatccatgcaaaagatgttgtttgaacatgttgatgctattgttacgagcaacccaactgttcttcaacgcctaatgcaagatatcaaaacacaatgtcttgaagaaggttattcattaccacgctaaaatttgtttcaagaattttagagatgccttctatgttgtgattattaaaactctaatcctttgtgtaacctccattcttctcttggttgcaaattgatactgagctgggaaaaaggatgaatataggggttggacccttggctttaggatgtttaatgtatc

SEQ ID NO: 74891 - DNA, 675 bp, Glycine max
  Clone ID: PAT_MRT3847_3863C.1
cggtccggaatcccgggtcgacccacgcgtccggtctcttacaaggctgtactctactgcttcaccttctgctctagaaaattcacaggcgatccatggctaacgctactctgtctgtaaccaaaccagcccttcacgcatatgggaaaggcttatctgaattctctggccttccatctgatcacgcttccttccctttgctagaaaatcttcagaggatggacattctgtcattgccttccagacctatgcagctggaagcagtggaggatacaaaatgggtgtgacagaatcaaaactgagggttgccataaacggatttggaaggatagcaaggaacttcttgaggtgctggcacggtcgcaaagactcccctcttgatgtcattgccatcaactacaccggtggcgtgaaacaagcctctcaccttctcaagatcgattcgatcctacgaaccttcgatgctgatgtcaagcctgttggcagcgacatcttctctgtccctggatatgaaatcaaagttgcttctgaccgcatccttgccaaccttccttggaaggattcggggattgacttggtgattgaaggaactgtggtgtttgtcgacagagaaggtgcagggtaacactttcaagccggagctaagaaggcgctcgttactgctcctgggggagg

SEQ ID NO: 74892 - DNA, 307 bp, Glycine max
  Clone ID: PAT_MRT3847_38640C.1
atcacgcgtcggccgacagactattgacggagccggagagtatgcgcagtatacggtgctagatcatgcggcgagatctttgaagtgcgccgtggctttacatgtggagacaatagcacgctgagctcttgaaactggatacacgatcgtccaagactgagatgacaggagtgtagagtggaagctggatatggagctacatacttcgggactggggtccacggctatgttattgggtgttgcatccattatactgctattggcaaatgagatatgagtctatgggatcagcatctgatgcgggaaa

SEQ ID NO: 74893 - DNA, 264 bp, Glycine max
  Clone ID: PAT_MRT3847_38641C.1
ggcattcaaactggactacattactactggagaaatggtacaaagtatgtttgataaccgacgtttcaaaacaaaattaacacaatctcctgaaatgacattaatcctactgtctactggcaagcaatctacttagaatcttctttttcctttttgggctttttttctcctccatccacacaggcaatttccaaaccaatttttttttttttcccagtgatttaacctttaccctgatttcggccaaactggaagacaagtctt

SEQ ID NO: 74894 - DNA, 328 bp, Glycine max
  Clone ID: PAT_MRT3847_38642C.1
ttcatctgaatttccattctcagataaccaattcatactcagaatggtgccatctccaatgtgcacatacactaaacactgacaaaactatgtgaatacttggtttaatcaaccatcccaaaagaccagaatacagttatctcaacagattaagactgtcaatattatccacaagcctactgctggatctctcacgcctattgctcatggccaaactctgaaatacaacatgaaagtcatagcccgtaaaggattttcactggaagaattgactgctacaaaaattcccaagaaacttgctccaactattgggatttctgatgatcac

SEQ ID NO: 74895 - DNA, 331 bp, Glycine max
  Clone ID: PAT_MRT3847_38643C.1
gatacttctccttcttttgaaataattttatgctctctaaaaaagttgtaaattttatgagatttggactcgaatatctgcttgcgttttttgctacactgaagtatacaatagaaagaagcatgacattatcttttatatgagggggcattgcacatggtcatgaggaagcgaacatcatataaattacaaagttaaaagcgaacgatattatcaactcttttatgccatttctattaacacgtgctgcaccaaatttacagatgcatttaacttattgtgtctgaacatttacatacaaaactatttgaatgtcaaacgtatttttata

SEQ ID NO: 74896 - DNA, 736 bp, Glycine max
  Clone ID: PAT_MRT3847_38644C.1
ttttttgatatcaaaaggtttttgatcattacactcgccgtttcaagcgatggaaagcaaataatgaaatgcccgtatttcaaatataagggcgttagaagagaggggaaacaagaaaaagacaagtaactgagtattaatttatcttttatgactcctctatgaaaaccacgctatggagttaatgagatccaaatcaacaacctaaacacactcgacaattcagcataggcatgaattttcaacacccaggaagaacaaaggggaatgcttgcagctgcttatggtattccccttaaaaaaagagacttcacactcaagtcttgttaaatgagacagttatctttctcgacaacggattttgcttgtcgggttggatttcttagacgacgaaatccaggtgcgtcactaatggatgtggcaaattcatttgtttggccagaattattctctgtagttgaatttgccaccttgtccaaccccgttggattattttcctgagtttcaatactgctgctattttctggagaggaagatattgggtcattggtaattagctgaattactggtttccgcgctttctttttcttaccttgcttttgatcatccaatttagccattgagttctgaatgtcacgtaatggcttctttttgggaaccagattgtccttgcaactagcaggtttctgaacagtgcactctggagtagtttaacacattcagaagcaatcacact

SEQ ID NO: 74897 - DNA, 154 bp, Glycine max
  Clone ID: PAT_MRT3847_38645C.1
tgcacgcttccgtacgctagtatcctgtacaacccacgcgcccggtaagtctggactatgattattgagaccctaggatgagcgaactgagtacagttagttaatgtttgcacctttatgttgcaatttatgtaacagcttttttcgtggctta

SEQ ID NO: 74898 - DNA, 288 bp, Glycine max
  Clone ID: PAT_MRT3847_38646C.1
gacatcaagaacacttaatacagatgggtttgatctacacaacatgccggtgccaaaagtgtgtatgttgcatctggccgtgtgggggttacagctgcacgcatgggactgagcttcttcaaaagtgatcagtcatcaagttatgattatgatgagtattcaacaccatgctgtgatcaccgcatgtgcacacgctcaatgcctcctcaatgcaactgtgcagatattacgctgagttcatgccactcacattggtatagctgtatgtgcacaccctcacattcacga

SEQ ID NO: 74899 - DNA, 250 bp, Glycine max
  unsure (1)..(250): unsure at all n locations
  Clone ID: PAT_MRT3847_38647C.1
agcgggaanaacgaaggaaggacagacgcgcgagcaagcnccacgagcngncaacgccggggggaagcagaagagcngcggcggnaacaagaaggaggccacnaccccgaagnacnctaaggcaaggaaagaagaaacngcgaaggaagccccnnccaacacgaagaagggnggnnacaactcttttaagagcacagaagagcccaacnccggnnncgagggagacaacaggaangagagggccacaaag

SEQ ID NO: 74900 - DNA, 400 bp, Glycine max
  Clone ID: PAT_MRT3847_38648C.1
gtgcagcggacaatcatgcaactaaaatacccctaatggcgcacgaagaaattctgccttgtagggcaagggatgtcccaactgtgatggagagtaaaaatagcaagcctcaaactactgtaatgcatgcgggagctatagaaatcataatggatagtatcgcatgtcccgactgcaacatataaggtgcaatgctttcggttgctacttatgataccaatcctgaaaatgcagttcgaagtatctctgctgcgccttacagagggggaaggcccatacaggtgggtacatgtgcgacgaccatcgggcagattgaaccagtcatgaagtcaaggttactgctattgaggaccactaccaatggtgatattgttcaaagaaaacatctcgcaatggttaa

SEQ ID NO: 74901 - DNA, 178 bp, Glycine max
  Clone ID: PAT_MRT3847_38649C.1
aaggccgaagtcccgcgcgttttcctcgatttttttcacaacaacgagggacttttggggggctccgaattgtcggtgagcctatgacgtgtttttttgtcattttctacccacactgataccctttttaataacaaattctctaactgtttaacatgaccgaaccgatttctctaaa

SEQ ID NO: 74902 - DNA, 1326 bp, Glycine max
  Clone ID: PAT_MRT3847_3864C.1
tatttccggggttccgaactccccaattgggggccgcccccagttttttttaatttgttttttttttcaattttattaagttgggttttttttattgtttttccattctttttttttttttttttttttttttttcaactgaatgataagcttattattaaatccaaaatgtgaatctgacaaaaaataaaaatacaaagaggtagtatgattgcagcctgtggtctttctgtacaacagttttgagtacactccctctgtaattctcaataacaatatgttgctgcaaaattctttaattttctaggaacagagatttacactgcttcactgtatcatcagggcttgtaactgtgtgcccaatagtcctttcagattcatagatttcatggtcatttccacccttgtaagttttgtcaccaaagaagtgaatttcattgaaaccatcaaggtatctcaggcagtatgttttgtcccaaccttgagggaaaacatcaaaacttatctgtcctccaatggagaatgtcaagttaagatgagcaaacttctcacgaagtacagaaaccatttttgggcgtatgttgtgaaccttgtcatatttctcaaactcatctctttcttcttggctacagtttcggccaataggtgacacattcagcatcccactacggaactccataaatgttcccctcttaatggggatgtccaaatcagcaatataatgaagtgtaaagttaataaactccttgagcttttcttcaccaaggaatgacttcaagctctgagttccaatgagctttccttccttgtgagccacaagaccattctcagaaaatacgtaatcatactcattggtaactgtgctgccaagttgctctgatatctttataaggtcagaacccccaacaactccaaccgttacaacctttcgtagttcttgcatgaatgtcaacatttccggtgtgaccaccttcctgggagctgtaagagtcccgtcaacatcaaacaaagcaattaaacccggtctcctggcagccattatagctcactcttatccacaaaaacctgagaggagggtggaagtggaagaaggggacagagcttgaagcagatctcgaaaggggtttatatataagaattggttgagatctgcgagggaaatagacagaggaagaaactgtgtgggacccagcaagttggagaaacttgtgtctcgtaacattcaaaatttccaaagtgaagcttcaacaacaaattcatcactcaaattcaagtcgatgctgtttacttttctgtcatccccttctgtcgtcttctcgcagccgt

SEQ ID NO: 74903 - DNA, 256 bp, Glycine max
  Clone ID: PAT_MRT3847_38650C.1
gaaagacccctcaagtatttcctcagcatcaaaagaacgcttctgcaccataattaccagatcccgtgttgggaaaaacagatccgcgaaggaaaccctaaaaacgcatccagcgctccgacaggggaaaaattgggatcgatcgccgcaaaaaatcccgagctagcgagaggcggaatcgattggagaggtggcgggaagattgggggaggaatcgagggagagaggaaaaagaaatcgcgatcggacgcgtggg

SEQ ID NO: 74904 - DNA, 447 bp, Glycine max
  Clone ID: PAT_MRT3847_38651C.1
accagcaaaaatagattaattaattccttttgggagtagataaggaggaaaaggttcttgagcaaagaaaccagtcctcctctccatggcatattgatatgtatatatgttggtagttatgtatgcatgtatatattgggtgagcaatagctagctagcattatattaaaaatgaaactggctacccctaaaataattagaaagatcccaacccctctgaagttggtatccagaagctcaagttcagcagcaaagaagccactattggtgtcaggatcaggacaaccgtcgtcgtcgtcggatggaagtagcaaccaacgggtaattcccaaaagatccctagctatttacgtaaatcccaaccttcgaaaatttgtcattccaataagcttctttaccataccaaacttcaaatttttaatagatcgagtgcagaaaaatatagct

SEQ ID NO: 74905 - DNA, 176 bp, Glycine max
  Clone ID: PAT_MRT3847_38652C.1
ctcaatgtctagcatcgcttgctcaaagtcctgaaaatagggttatctgcgctgccacatgcatgagagcgcgacaggttttggctaaattgagactccctccatctcaaccgcgctcacctggtgaaaaggttcatgctctgcatcctctatcgcatctaaccatgcataactac

SEQ ID NO: 74906 - DNA, 1419 bp, Glycine max
  Clone ID: PAT_MRT3847_38653C.1
ctccgcgtccgctcttcccaatgccctctctccaccttctccccggcgccaccaccgcccccaactccacattcctcctccgcccccattcccctctcctcccctccaaaaccctaacccccaaaaaacccaaacccaaaccccccagtgccctgccccaatggaaccgcaagcccgagctctccggctccatcccgcgcgtcaccgtcattacctccggaaagggcggcgtgggcaagaccaccaccaccgccaacatcggcctctccctcgcccgcctgggcttctccgtggtcgccatcgacgccgacgtcggcctccgcaacctcgacctcctcctcggcctcgagaaccgcgtcaactacaccgtcatcgaggtcctcaacggcgactgccgcctcgaccaagccctcgtccgcgacaagcgctggtccaacttcgaactcctctgcatctccaaaccccgctccaagctccccctcggcttcggcggtaaagccctcacctggctcgtggacgcgctgaaagcgcgtccacagggctcccctgacttcatcctcatcgattgccccgccggcatcgacgccggcttcatcaccgccatcactcccgccaacgaggccgtcctcatcaccacccccgacatcaccagcctccgcgacgccgaccgcgtcaccggcctcctcgaatgcgacggaatccgggacatcaagatgatcgtcaaccgggttcgaaccgatatgataaaaggagaagacatgctgtcggtgttggacgtgcaagaaatgttagggttgcccttgcttggggctattcctgaggacactgaggttattagaagcaccaatagaggctaccctcttgtgctcaacaagcctcccactctggctggcttggcgttcgaacaagccgcttggaggctcgtggagcaggatagcatgcaggccgtggtggtggaagaacaacccaaacgagggtttttctccttttttggtgggtaggttttaaacaaggttatgcataatagtgtgtatagctagttagttggttgggttagtgcatgtttggatgagggttgacaatattgattttggttaaaattgattttgaagtcatcttatttatgtttttattatagcatcaattctgaacttctaacatgaaaccaaacatgtgagaatttattcaaaatcaattctagactcaaaatcaattctccaatgctgaaccaaacacacgcttaattagtttaaggtgtttgtttttgtttaattgattagtccagtaatgactagtgagtatatttgttttgagaattgagagagttctgactagtttgtaaagcctgctgtggttttttgagaggtgtgggatgttggagctctgctggaatgaataattatttttttgttttgttta

SEQ ID NO: 74907 - DNA, 175 bp, Glycine max
  unsure (1)..(175): unsure at all n locations
  Clone ID: PAT_MRT3847_38654C.1
gnncggcttcaaccttgtagttattctctttcttcttttttagtatccctctcttgaaaaatctagatctcgttcttcttgattacgttacgctttagtgacggattgtnggactgacagantaagcgagtgttgctgctcaaacgagagagnancatgaaaggggnagcgcnnt

SEQ ID NO: 74908 - DNA, 338 bp, Glycine max
  Clone ID: PAT_MRT3847_38655C.1
tgtgtccgtttcttgggacgcgacagggcacgccatcgttcacgcccactgtgacgggcgatcgcaactaccgccacgccgcactggggccgcgaacgagaccgaccacaggaccctactcgcaccagtgcaagggtcagctccagacactgtgccgtacactgtacctgtgggaggaacccacctgtagaagaccatgatggagctgtacatagcgcagtgcaaagtccagctgggcaaacagaccgtcaacgtgcccattctcgggagtgatctattcacgcatgctctgacagaggggactgctacagctattgatcatttgcagcgcactcatc

SEQ ID NO: 74909 - DNA, 481 bp, Glycine max
  Clone ID: PAT_MRT3847_38656C.1
tacggctgcgagaagacgacagaagggtcaccccttgaactagcttttggattgagttaggctcaaactctaagacaaaggaatctcttataagacctccacaagcagcttggcacattagcggcggtgatatatattttgtacttgatctaaaataagatcatgaagctcaaggctgaatgcagagacttgtgctaaaatttagctcatcattttttttgacatttctttctagaaaagaatgatctaaatttgcaaaggttgactttctgacttgaaatagaatggaagagattaattataattctgctaataatttcctgtacgtacttatgacaagttttgcttcagccacgagaataacgccatcagcaaagaattggtgagagattcggagcaaattaaagattaatgatagaatgtgtgatacattttcatgaaggttaggcatactaaaccttaagcaggaatgataactttc

SEQ ID NO: 74910 - DNA, 352 bp, Glycine max
  unsure (1)..(352): unsure at all n locations
  Clone ID: PAT_MRT3847_38657C.1
acgggnccgaaattccgggccgaccacacccgtccggtcaattccaactttgcgttttaagggtttcttgaaaaaccatgcaaaactgtagggggggaggcttgattggcggaaatgtcccctgaaccgaacttccagccagaggttaaaattcaacaggtcgttccagaaaccgttgaaggggagattctggaatccgataatcttaaaccggtttttcagggaaaggtttgggatgatcttgggggaactttttgtgagaccgattttaagaggggggtttattagggaaatgtgaaaccctttttaattgcaatgactactgcgttttaaaggtaaacaaggagtaatt

SEQ ID NO: 74911 - DNA, 316 bp, Glycine max
  Clone ID: PAT_MRT3847_38658C.1
cccggctcgccgagtctactgggggcgggccgtccttttttttttttagaatatgcagcaaaaaccagtttggtccaacccagtgctgacaaatgatgttctccatcacatctcaaaactactttggatcgaggagcgaacacataaagtgtgtgcacatcaacactgtcctactagtcaggcctagatctctgataaatgcgcacgagttatatttagcaagataatgatatttcagaggccgaagcgcagcatgttcagatcctgagagaagatccgatgacgagagcaacggggggcggtgagaaaacccggg

SEQ ID NO: 74912 - DNA, 278 bp, Glycine max
  unsure (1)..(278): unsure at all n locations
  Clone ID: PAT_MRT3847_38659C.1
gaaattttgtcaaaattcggcaacactgttcctcattgatccaatantacggtttcagtagggagcgggaaatttgaaatacaagaatctgattggtttagatgcttctttgatgggtgaaatgagttcctgattggtcaattttgaatttcccgnttttcataaaaacgtctatnngaaattcgcttcttccgtntctcttaattatccattgtcgtaccgactcagtcgagtcaacggtaattacgaaatccaggagttatgtaattttccccgga

SEQ ID NO: 74913 - DNA, 246 bp, Glycine max
  Clone ID: PAT_MRT3847_3865C.1
gccagtccacagatcttctcagagggaggcctagactacttgctcaacccaagcctgatccatgctcagagcattcttgctatctgggctgttcaggtcacgctcatggagtttgttgaatgttacggattcggtgaaggaccactcgttgaatggctagacccaatctaccatggtggtgctttagacccttttggtctgtctgatgaccctgatgcatttactaagttgaagttcttggacttc

SEQ ID NO: 74914 - DNA, 280 bp, Glycine max
  unsure (1)..(280): unsure at all n locations
  Clone ID: PAT_MRT3847_38660C.1
ggggggagcttaatggaccattactttgaaattttttttgcaaaatttgcaattnaaaaatagaggtgtgtgtattcccttgggagaagtcccacctaacaggcctacgagtggggacctcctttttgtaaacaatgaaataaacctttgcccaaacgttgaaaaggaagtttttaacgttttgtttacccaaataggttgcaccgtcaacccaattgggttggagaattcccactccaaagtccacaactttttcttttggttcggaagggtccagggt

SEQ ID NO: 74915 - DNA, 512 bp, Glycine max
  Clone ID: PAT_MRT3847_38661C.1
gctttttacataaagagaaatgtttggcttgtcttttccacacaatttcgtttatttttgcaaggtcaggaaatgggaaagccctgcctaagaataagacgatgtatatattgtatgagcttgaaacagaccctatcaggaattaaattatcagaatctacgagaaaagagatttgtaacagaaagaaatgatactcctgttgattggactcccaagtggaaagtcccaaatcccaatgcgggaaaacttgagtttgtccccaacaaacatggaagtctaccaattctggagcatgctttagccactgcacttgaagcagcacatctagttgcaaccaagttcatcagatggccataatcataaaatgctctgcctcagctacacagctgtagattaaatagcatcagaagaatcctgagaaagcctacttacaaatgatttctgcttgataggaatgtatattttttgagggcgagccctggtgcagcggtaaagcctcgtgccgaattcc

SEQ ID NO: 74916 - DNA, 321 bp, Glycine max
  Clone ID: PAT_MRT3847_38662C.1
aggatgacgaagacgacacatggatgacgtatgcacgatgaagataatggacgagcggacagggggttcatgtctgagaagatagaaaggctttaggaatggttgcacacgatagcccgttgatatatgagggctgcactgcacagagagaatctcgtgatcaatatacgctggactcgctcgtaacttcgctagagcctatataacctgtatatgtatgcctgtcctcatttacaagggcgtcgtgctggcatctcgtttgcaagatgaagataatggtcggccgtacaggaggttcatgtgtaaaagattcgagagtct

SEQ ID NO: 74917 - DNA, 700 bp, Glycine max
  Clone ID: PAT_MRT3847_38663C.1
cttttctccgcattctgtttcttcacccagaaaaaaataaaagcgatttttttttatctttcttttaatttttcaattcaaagtgagaaagaaactctgctgctaaagttttctgtgttctctcttatcatcatctgaggatttggctcttacgagggcgatctgtgtgcaattttggggctggaaatcttgctcgcgtttcatgcttttgtgaatttccctgcggaatgaagaggtcaagggatgatgtttacatgagttcacaactgaaacggcctatggtgtcttctagaggagaaccctcggggcaaccacagatgacgagtggcggtgctcagaaactaaccacagatgatgccttggcatatctcaaggcagtaaaggacatgtttcaagataagagggaaaagtatgatgactttctggaagtcatgaaggatttcaaggctcaaagaattgatacatcaggtgtcattgcaagagtgaaggaactgtttaaagggcacaaagatctaattttgggatttaacaccttcttgccaaagggatatgaaattacacttccattggaggatgaacaacctccccaaaagaagcccgttgaatttgcagaagccataaaattttgtgggcaagattaaggctcgttttcatgacaatgaccgtgtttataagtcatttctagacatattaaatatgt

SEQ ID NO: 74918 - DNA, 465 bp, Glycine max
  Clone ID: PAT_MRT3847_38664C.1
cttttctccgcattctgtttcttcacccagaaaaaaataaaagcgatttttttttatctttcttttaatttttcaattcaaagtgagaaagaaactctgctgctaaagttttctgtgttctctcttatcatcatctgaggcttgttctgcagttcgtgcacttcacaatcactctttgatttggctcttacgagggcgatctgtgtgcaattttggggctggaaatcttgctcgcgtttcatgcttttgtgaatttccctgcggaatgaagaggtcaagggatgatgtttacatgagttcacaactgaaacggcctatggtgtcttctagaggagaaccctcggggcaaccacagatgacgagtggcggtgctcagaaactaaccacagatgatgccttggcatatctcaaggcagtaaaggacatgtttcaagataagagggaaaagtatgatgactttctgga

SEQ ID NO: 74919 - DNA, 241 bp, Glycine max
  Clone ID: PAT_MRT3847_38665C.1
acgaataacgagaggtttatttatgattagctactttgtatcctatattttgaactactcattttccgcagtcctaggtgtaactgtatcaagtggaccttataattgctttctgatagtagaaaggatttgcttcctggttctttaaagagtacagtgttttctgttttgatttcattgttgtagttgtattaatcgattaccctgcgaagccacattaattgcattgcgctaactgaac

SEQ ID NO: 74920 - DNA, 679 bp, Glycine max
  Clone ID: PAT_MRT3847_38666C.1
ccacgcgtccgagcaatatgtaggctaatacgttcaatgaaccccgacttctggaggggatgcatttattcgataaaaggctgcacaggctctgcctggtgctttgatgattcatgataactcggtcggatcgcacggcctttgtgccggcgactcatgattcaaatttctgccctatcaactttctatggtaggatagtggcctaccatggtggtgacgggcgactgagaattagggatccattcctgagagggagcctgagaaacggataccacatccaaggaaggcggcatgcgcgcacattacccaatcctgacaccgggaggtagcgacaataaataacaataccgggctcattgagtctggtaaacgtgatgagtacaatgtaaatcccttaactaggatccattgtagggcaggtctttatgccaacaggcggggtaattacagctcctgtagcgaatatataagttgttgcaggaagaaggtcttacgaggaccttgggttgggactatcggtccttctcctgtgtgcaccgatcggctcgaaccttctgccgacgatgcgctcctgttcttaactggccgggtcgtgccttcggtgctgttactttgaagaattagagtgctcagagcagtctacgctctgtatcattagcatgggatacaccacaggat

SEQ ID NO: 74921 - DNA, 378 bp, Glycine max
  unsure (1)..(378): unsure at all n locations
  Clone ID: PAT_MRT3847_38667C.1
ggctcgagcttttgacttcattcgtgggagttgttangacgggcagcaacaactcaaggggggagggtcattgttaatgacaactatcaccacaactcccaggtcattggctatcgcaactcttggaaaaccaataccactgggacaacaccatcacgaattcgattgccttgccaatccagacattaaaaggttcgacaacgaaactacttacatgaacaatacgtcttctaagactccctgggcgcttgacaaaaccaatgctttacctgaaacgacaactaccaatgctattgcaacgttgaaagctgaaacaacaaacaattattgcacagctattgaagcgcccggacatatggattttattaagaatatgat

SEQ ID NO: 74922 - DNA, 185 bp, Glycine max
  Clone ID: PAT_MRT3847_38668C.1
attaaattccgatacagagatgcattgtaatcaatcccatttccaggcttataatattattatgaagtgcctatataagggtctacaaccaatgaaataaaatcagacatatccccaaattacaagaattagcaccaacctaacggtgagtttggccaaaaccagattggaaaggacccatttcc

SEQ ID NO: 74923 - DNA, 773 bp, Glycine max
  Clone ID: PAT_MRT3847_38669C.1
acatacaactctatttttattaaaattgaattgatgactaaattaaactttaactctttttacccatgtctcttaccagaaaagcaaatacaagatgtatttaaaaactatatatcaaacttcaatgtgcgtggaacttcaacagtttgggatactataatggaggatccagcctcagacagcaaaacctgattggttaccttccaggttcactggtacaatatagtgacttcttcttggctgatagcattttttcaatctcaacaattgcaagtctgaagcacatggatgccaagtctgaagcgctcatgtgtgaagtgtcatttactgccagaattttcttgggacaccagtaaagtctgaaccctctccaactgatattatgccctgtcaagctctttccatagttccatcacccacatcatttcaagttgataaaccccaccacaccctccttttgtttactgcataccttttgccataaagcccacaccacactctttccatttccggcctggcccgtcacagtgtcttccttcttcaggtttcttccctccctctctgtgtttccacgttttcttcattctcattctcagtcttaaactgacaatcaccttgataaccatcatgttgttgccttgttcaaccgcatgctttttaagcgatctccccctcctatcatccactttaacagtcttctcagttctcacgtgaagatgaagcactatcccactgtgattccccttttcaaccattacagtcaacctcgagcc

SEQ ID NO: 74924 - DNA, 675 bp, Glycine max
  Clone ID: PAT_MRT3847_3866C.1
tctacgcgtccgatccaacttccctaaacttttaaataaataaaatactaatagtaccccgcagaaatataatactgcgagtgaacttgaggcgaggatgagccattttcctccttatattatccaatccatcccgaaaaccaactctgtataattcggaaccactcatcgccaaaccattaaaaatcgctctgcttttgtgttggccaagatttgtcaggggaaacaaattggagaagcaagaaaaggatgacataatattactcaagattgtacctcccgtggaccagatttatgctaaatggcttgccagagaccttgcaagaattcacagctttactccaaaacgtattcgtgcagtgcagccgccggatcattatgtagaacatatgaagttgaatggatggctggatgtggacttggatgatcctgatcttgctcatttgttcaagtagataatttctatatgccatattggcagttagcatgactttgtagctgcattatgattacattaaattgttcagagagcgaaaaaaatgataatcacattgttgctttgggttggctataaaattcctgtagatggttgtattctgaaaccctagtgttgatcaccactcaccagtgggtacagaaacatgctatatgttatacaatataattttttgtccc

SEQ ID NO: 74925 - DNA, 221 bp, Glycine max
  Clone ID: PAT_MRT3847_38670C.1
ctcttcccccactgcattctatatcactttacaatgagattgaactttttttttcatgccaaactaatcaactttgacatggtcattttcataaatgtggccgcctcatccacataacccttactcttcatccaccacttttaattaccactttctacacattgactcctccctttccctactttcatccctagatctccccctctacctatactacccaa

SEQ ID NO: 74926 - DNA, 124 bp, Glycine max
  Clone ID: PAT_MRT3847_38671C.1
atacgatacaaattttgaatgacacaatgacttctgaattcccgatgcatttaccataaagaacttcatgcaagttcagttctatctcaaatctctaactctcgaacacattccaaaccaccca

SEQ ID NO: 74927 - DNA, 315 bp, Glycine max
  Clone ID: PAT_MRT3847_38672C.1
tgtcccaaaccggttcatgtccggttagcccggggaagtaaaccagttttacattctcaagaggttgcgcatctttccccacaagtcgtgttacccatttgcccggagttggatcagactccatacacctctaccaaagaagcgaggcagggtaccatcgcgaggccttttcaaagttccactagcttcaactacccggtacagtttatagaagctccagtgcagggttcttgtctgtccgccatcgcagcaaaatcaacccaaggacctccctacactgaccactcccctactgcccttgcccctttcaggtaa

SEQ ID NO: 74928 - DNA, 119 bp, Glycine max
  unsure (1)..(119): unsure at all n locations
  Clone ID: PAT_MRT3847_38673C.1
cncaaaagtttgtttgcttgtgacagacacggagcnggacgagggggagttaccacnnngcatgacgccaancaaaaggaggagangagacgaaagcagcaacagcaanancgcgaggc

SEQ ID NO: 74929 - DNA, 145 bp, Glycine max
  unsure (1)..(145): unsure at all n locations
  Clone ID: PAT_MRT3847_38674C.1
ccaattccgtgttccaatttaaaaccctaactccgttcgaagcaccaaatcgtgatggcaccnaaggcnngagagaagccagcagagaagaagccctggggaggagaagaaaacgacggtgggagacatggctccggcggagaag

SEQ ID NO: 74930 - DNA, 363 bp, Glycine max
  Clone ID: PAT_MRT3847_38675C.1
cgggaatatagtgaatgttccacttgtactggatcctgctttgtgtggagaccaatccaatccctttggggacatgtgaaaatgctgcccatctggaactgcctctgtatcatgtgtgcagagggtcctcgctctcatactatatacgtatgtattgcaaatgttatctcctccttcataatgcacatttgcgattgatgatgaaagatttccttcgaagagctctccaacgagtgatgctacacttgaacaagcctcatttctcgttaatgaggaaggggttacttctacagctcaaaatatgaagtgggagatacatgacctgttggcatttctatcttagaaattgaatcttaagcatat

SEQ ID NO: 74931 - DNA, 291 bp, Glycine max
  Clone ID: PAT_MRT3847_38676C.1
aaaaaagctcatcgacggcttattatgacacaagagcttttgtaagtgttataaagaacctataaaattagcttatgtgcccataaacttttttcaacgtatttcaatttacttgctgggaaaacttataaaaaaaaaaaagctacccttttattttaaaataagtttaccctcttttctgttaaatttttaaaaaaaaaaaccctttacaacaaggcttttttgataagaactttttcactaaccgcttttttaattttaacaatcaaaagcccctttttttttttttaa

SEQ ID NO: 74932 - DNA, 407 bp, Glycine max
  Clone ID: PAT_MRT3847_38677C.1
gattaacgaaatccaatcaagcaaattttgggacccgtgggaaaaacccggaaatccaaaccggaacccgcgggggaccacctgggaaaaaagggaggggaaatagagtggggcgaaatgttgctcaaaggggatgccagagagaaactgggaaccgcgcacaattgcccccaacagagggaacggaagcccggggggaaaacccggggagcccatagagtgagggaaaaaagaaataacggggggggcccaaagagggaaaaccggggggaaaaaaggggggggcccccgggccaattaagaagggaaaaacccgggagagggggggaaaaaaaggcgcgcccagggggggagaaaaggacccaagaaaagggccaaaggggggggccttccccgccggggggggg

SEQ ID NO: 74933 - DNA, 220 bp, Glycine max
  Clone ID: PAT_MRT3847_38678C.1
cggctgcgagaagacgacagaagggggagatgagaaccaattcatctttgcagcttagggagttatttgtagggacgcaaaatttattcaagttttagatttatttatcttaaattcagaagtaatgacagattcactgggtgctaattcagttcaattctccataccatgagttagttcaccaaaaaaaaaaaaaaaaaaaaaaaaaaaaagggggccc

SEQ ID NO: 74934 - DNA, 504 bp, Glycine max
  Clone ID: PAT_MRT3847_38679C.1
tttgccgtgctacatgtgagcacgtccgcctgcttgggggggggggggggggggggggggggggcggggggggggggggggggggccaactaaaaggggggagtttagagcgagggaattaacccagcagcaaagggctttctatagggcaacccaaaatatgtccggagccttagaatgtatgagtatctgcaaagaggatattgcctttggggtatatggtagctgagctattagttgagctagggatatggggtaagagtgcccaaaaagtaccaaggggcagtattgaaaatggtggttgggtcaggagattttactggcttcaaaaaccacaaaagtattaaccattagacccgaaactaacagagcataaaatgccaaacgggctttaatagcgggtgctagaccttaacggaaaggggttaaatgtcggcgggagccctggattgcttggggaccaaagccgggagtaccttggacaatatcgcatggtgcccctaa

SEQ ID NO: 74935 - DNA, 772 bp, Glycine max
  Clone ID: PAT_MRT3847_3867C.1
acgagaccatacggctctgaatgttggaagaaagcttgtacactgcagtacccacactgccagtatcgttatcttgattgtcaaagcatgggtgacccagataggattgtttggttaagatcaagcaatctctcacgtctatgtgatcagaacagtgatttctttcaatttggcatttttgttgatgctctcaatttggaagttacagcttcacaattcttcaacaaatactgctactgtctatggtggggactaaggaatctaagctctgtgggacagaatctcttaacaggtacacgtgttgcggagatcaattttgccatgattattgcagttcttggattggtgctttttgcattgcttataggcaatatgcaaacctacctgcaatccaccactacacggctagaagaatggagaatacgaaggacagatacagaaagatggatgcatcacaggcagctcccccgttacctgaagcaaaacgtacgacgtcatgaacaattcagatgggttgctactaggggagttgatgaggaaactattctcagagaccttcccatagatctaagacgtgacatcaaacgccacctttgcctcaatctagtccgacaagtaccactatttgatcacatggatgaaaggatgctagatgcaatatgtgaaaggctgaaaccttctcttttcactccaggcgcttgtgtggttcgcgaaggtgaccttgtgaatgagatgcttttcattgttcgaggacgcctagattcttgcacca

SEQ ID NO: 74936 - DNA, 1418 bp, Glycine max
  Clone ID: PAT_MRT3847_38680C.1
aatccaactctctttctccctatcccaacaatctcactcatacctcttcaatctaacaaacttaatttcttttgttttgagtttcttagagaatggatgaaaaaggagcaagaagtagcaacacccttttaagttgtgaggacgagatggaccttcgaagaggcccttggaccgtcgatgaagacctcactcttatcaattacattgccactcatggcgaaggtcgctggaacacgctcgccctctctgctgggctgaaacgaacggggaagagttgcagattgaggtggctgaattatctgcgtcctgatgttcgacgtggaaacatcacacttgaagaacaacttttgattctggagcttcattctcgctggggaaaccgttggtcgaaaattgctcaatatttgccgggaagaaccgataatgagataaagaactattggagaacccgtgtccaaaagcatgccaagcaactcaaatgtgacgtgaatagcaagcaattcaaggatgccatgcgttacctttggatgccaaggctggtggagcgcattcaagcagcggcgacggcccaccaccaccgtaactgctgcggtttctccaacggcatctgccggtgctaccacaaccatcaccaccaacaacaacaccaccacatacaactactacgacaacaacaaccttaacaacagttttgaggtgcacagtgggaacatgatggtgagaaatccaacaatcatgaacaacaataacttttgtggttcacatagttacactcccgagaatagtagcacgggtgcatcatcggattcgtttggtacacaggtttcacctgtctcggacttgactcaggattattacaataatgtcacggctgggaataataacaacaataaccctaatcctgatcagtattaccaacaagcacatgatcaactgagtttcttagactgcatcacaagcccatcagggttgttcgatttccaacccatggaaccaaacaccccgtggattaatctgagtaatgttggggacacgtccaacggtttctggaatgttgaaaacatgttgctctttcaacaattctctgacaacaacatgtgaaacattcgtaggagaattcatggtgaaaaccgtgacgaaggggggaaatattgttaaatttacagatgataaagttatataagtagaaaattgagcaaatagaataaattcatatgtaggacacacgtaggatccacgacatggacatagattttaagctaaggatattataagagcaaagagaaggaaactgtgaattactttttttaagtttaatttgtacggacttttttttgttctttgattttccttattttaaagggggtgtgggaaatatttgtaatttgagctttctcagtataagatttcattctttg

SEQ ID NO: 74937 - DNA, 414 bp, Glycine max
  Clone ID: PAT_MRT3847_38681C.1
aacaaattaagcgtgaagaagccttctgttatctcaggatacaacaaacaagcatgtctgccctgaattccactcatttcacttcattgagggaccaagtgctgaatgtattcaaggaattgcaggagatcctcattaaattcttaacactgtccattgctttgatttcactaacaaacactgagtcagggaagcttttgtttacagaacagcacaagctaatgatgtttctgattttaaccattgtcttatacttcttatttgcttccactgggacaatacttcagatatataagggaaacctccttccacttgtaatttgggtcatgcttattgtgggaggtattgtttcagttctggctttgagcttcatttcagccaccgtagcttggatcactttggccatgtgggttg

SEQ ID NO: 74938 - DNA, 254 bp, Glycine max
  Clone ID: PAT_MRT3847_38682C.1
aacagattcaagcacaaacagttctcgaagcaaggacaaagcatatataaaagcctcttcatcattatattggggttcttcaaagttcaaaccaagttcatttttgaacgaccacaacagattttcttgtatcaaacatatatggccacactagctacagttttcctcccttctaagcttaagccatcgcattcggggaaccaggtctctccattcacgcacaaaacaccactctggaagaaagttaaccaacc

SEQ ID NO: 74939 - DNA, 346 bp, Glycine max
  Clone ID: PAT_MRT3847_38683C.1
ttgatactctcttcctatttttactttctcaaataagcaaagtttgaaattgttattttgatgtataaatatattattttgggttttttattgctgattctcaaaacagtgtactaaataaatgaaagtatgtagccaacttggatctttagttacaggggcaagtcgctgcagtatattagtttaacccctgcatctgaattcaaatattgaattggaaaatacctgcatactaaagcaatgcagattcatgaaaagttttgtttaattttgctcaactataagacataagttattacttagacagtgcttgtaatagtgatctaggagccacacagcactacat

SEQ ID NO: 74940 - DNA, 274 bp, Glycine max
  unsure (1)..(274): unsure at all n locations
  Clone ID: PAT_MRT3847_38684C.1
cctccacaaaaaactcgaaaggggaacnacagggccaccaaaagaagcagcgccccggagcacaccccgccgagaccggcacccccaggacgaccaacgaacaggcgcccaaagacgggcaaagaaaaaagcccaaaaaaaaagaaggcccccgaaacaaacaacggaccggaccaaaccagcgcagaaggagcgacgccagccaaacggccagccaagggcgaagccgaacaaacaagncggaaagcaacgccaacgagacaagggaaaacac

SEQ ID NO: 74941 - DNA, 337 bp, Glycine max
  Clone ID: PAT_MRT3847_38685C.1
aaaaaaaaaaacaaagttcctttttcaaaggttttgccgaaaaaccatcttttatccaacattgccagttttagtgttgcatttgcgggggcgggaccttaaaaggattaaattttttttacttaaagaaccagggggagaatttcccccttgattcgggacacttttgaaaccccccaactcttccttagggggccctttgaccctcccaacaaaatttggggaattcccactttgggacctgagcttatatgcaacaaactccattgaacccccacacccgggaaaaccccattgaagggactttttccgcgggggaggtgctatctgcttcccg

SEQ ID NO: 74942 - DNA, 143 bp, Glycine max
  Clone ID: PAT_MRT3847_38686C.1
cacacagccccgcctacttgcgacccccacgaccctccgaagcccgatcacgcctcgaggccgttgacccacgtcgtccgagctggcgactcattgggccatagcgtgcgcccgccggctgacctcgagcgactcaggaatgg

SEQ ID NO: 74943 - DNA, 965 bp, Glycine max
  Clone ID: PAT_MRT3847_38687C.1
gaagtaaaatgaaaacatgactggagcatttcaacatttatcaaataaaattaacaacaaaatgctgggtaatagctcaactactgttaaataatagtaatgaacatggattaacaacagattttatgtttttacaaaccagaatacagtccacatgggggggggggtgcaatccgttcatagataagataattccataaatcccatctaacgcttagctaccaaacaccccatgaggcctccaccaatctcataatgtcgagcagcagaaaatccaactcccaaggcaagtttctccaactccttccctgttaaaaattctcttattgaacgtttgaggtatctgtattcctctgaaagaccataaccagtggcaacagggacaacaatattgtcaatcatccattccgtaactgcagaagttagcaactcattgcttttattaaaatccaggatagatactgtagagccagtttttaggacgcggaaaatttcctgcatggccttttgcttatcaaccacatttcgaagaccatagcccatagtgatagcatcaaaccaaccatcagaaaatggcaagtcaagagcatcaccttcaacccactcgatattcatgaagcaattctttgaaagtgattgctgccgagataaggcaaaggatagctgatccttcgagaaatcaagaccaatcaccttgccatgagagccaacttgatcggacaagagaaaggacaaatccccacttccacagcaaacatccaacacacagtctcccattttcgctccagtccaggacactgccattctcttccaaatccggtgttgcccaaggctcagcaaatcattcaggttatcatagacaggagcaatgcggctaaacagcgcctgccgctcattggagttggcgcagcgaatcaacgtcggtcggaaactggaagaagttgaaggaacaaacgtcatcgcca

SEQ ID NO: 74944 - DNA, 262 bp, Glycine max
  Clone ID: PAT_MRT3847_38688C.1
caatataacatatttcattgggatggtaatgcctatttaatttttgccttacagagttaactttttagtgctgaaataccatccagcctttggcattgcagtgttctgcatagcgttccaactgcgatgtcctagtaaactcgagcgtttttctctgacagcaactcccttctaggtccatagagtcttgaatcgttggatgaaagaggctacctgttaaagcatgctactataactcgttgagcacttccatttttaacgc

SEQ ID NO: 74945 - DNA, 222 bp, Glycine max
  Clone ID: PAT_MRT3847_38689C.1
aagttaatatacacctggtgataattaattgtttgtttttcttccctatagttgttcctagaaattctcaattccttatgttgttatgaatagtttcaagtgtaggaaattaattgatctacttagttgtaattagtaaatggtgcgtaatgatccatccctcatttctgcatctaactgtattaatggtaatgaattcaagcacattattgtttgtgataa

SEQ ID NO: 74946 - DNA, 407 bp, Glycine max
  unsure (1)..(407): unsure at all n locations
  Clone ID: PAT_MRT3847_3868C.1
acgcgtccgctgaaatatgcttttatacttacatattttatcactggtttatttaactatttgaattgttgacttggatatgcttttgtgcttacatatantatcacaggcttatttaattatgtttatttgtcttgctagcctagcttattcttttatgatgatttagaagattttggaaagggtgattggatatagtattgtcaatattttctttctatgcctaaaattttgctatgatattctacaaaatgtctacgtgacctatcacagtagctattgcttttaatggattctgtaataaaaaagggtgacttactttcttattttatttcaacacctacgtaatcatgatgctatatctgttcctgtcagttcttaacattgttgaaacttgtctttaaaat

SEQ ID NO: 74947 - DNA, 126 bp, Glycine max
  Clone ID: PAT_MRT3847_38690C.1
gtaggagcaaagttcataaataaaacatttttcatcatttcccgtggatatttattggtttagggaaacaaaaatgcccaagttctgaattttgattggaaaatgaggggaaacttagggggtaaa

SEQ ID NO: 74948 - DNA, 688 bp, Glycine max
  Clone ID: PAT_MRT3847_38691C.1
tcgcccacgcgttcgctgtcctatttgtatagtcttctggttgtttcaactaacaattatcatattcacttattgaaatccttgtagacaatgctatttgtcccttccaattctttggttgaaactgttatatatttgagattgaaatgtagttttatccttgtgtcttatgctgggcttgtgtttggcatgataacctaaaactttacattctgaagctcttaattttttttgcctatcctgtaatttctgtccatttcagtctagaagtttagcaattattatgttttgcttgtttttgttttctgttaaaatatttgtcagctattttttgtaccccacttgtcttctccttaaattccctttcagttcaaatagttgttgtgtatttgtgcttttttattgatggttcttctaaggttgatctcttagattgggtggagggaaggttgagagcacacttttctatttacccggagccaagagaaattgtctagacggtttgtataacttggatttatggatgctcctacttatgttgttattgtgttggtccataaacttagccattttaattaatgatttataatgtaacaattggatacaagctttgaattttagatactatatagtggatgctttgagcacaagacatagctgtgctcattttggcttctttctccatcgt

SEQ ID NO: 74949 - DNA, 270 bp, Glycine max
  Clone ID: PAT_MRT3847_38692C.1
tcctgctgtgctctcgttactaattaaatgattctgtattttgatctttgtcttttatgttggaatcttgagaagtatacctgcaatatagaaaactcttatattagaaaagctgacagatgcaagagttttgcattaacattttaactttactgatttgttgcaagtaggtcttttatcattttcctcaaagcttgattttctggatgatatgctttctatattggttcaaatatcatttatgcttaagattcaacccatagtttacag

SEQ ID NO: 74950 - DNA, 1097 bp, Glycine max
  Clone ID: PAT_MRT3847_38693C.1
gcaccaccttttattcgttgcatctttctggtggagattacaagttattggagccatatagggagaagaaaatacctctccaaaaaaagtagcacctattgttaagatgaagtatccagagtcaaaagatccaaagcaagtctactttcttcttctcaaactctataacatggcagataatagagttatatccagaaacttttattggttgcatctttctggtggagattacaagttattggagccatatagggagaagaaaatacctctcaagataacatcgaaggtttcagttgaagaatccatttataatattcaagtgcttgtgaccaacacatctacaagatcagactctacaagttcaacaggtaggttaagtgatggtttttatggggcacacctcattggaaactctggattgtggggttggaatagaacaagaaactggtgggtccaagagcatacataaatgtttatctggtgaaagtcatcgtttgaaagctactggaataaatggacctggtggaggcgttgctttctttcttcattcaagaatctggttggtttaagaggatacataaatgttttgctgggaaaagtgatggtttgaaagttactgaaataagtgggcctgatgtaggcgttgctttctttcttcatttttctgttcatacttcaaagagggaccacaatgaagggaaagacacaagaattcttccggttcattactcagataactatttttcactagtcccaggagagaccatgcctataaatatatcttttgaggttcctcagggtgtcactcctcgagttattctgcatggctggaattacgatggaggtgaaatcatttgtgaagttgtatagtaatctcccgaaaccttgtgaaatgataaagtcttgtgtgtgttattaaaaatgcatcacaaagagagaccttaatgatttcaattttatttgttggtttactataccttaaaaggctaatatatcgttgcaacgtttgaagattaatctttgcaattgttcatgtcacagataagaccaatatttctggtgattgtttttcaacctgtgcaatacaaaaggaaagg

SEQ ID NO: 74951 - DNA, 474 bp, Glycine max
  unsure (1)..(474): unsure at all n locations
  Clone ID: PAT_MRT3847_38694C.1
cccacgcgtccgtctacgcgttcgcatgaaggggcttgaagaggttaacattactcctacctcctcccaggcttgacttttatgctggatgaacctgaagtgtttgttggaggaaccaacgtttgaagctgagttgaagctatggcgagcgattattcttgaggtgaagctcaatgtttcaccaggctcttccttcaattgttctgagcctggatggtttacggtttgctttgacggcatggatgatgaaactgtggatgctgcactcaacaggattcgtgcattcgtgggtaaagaaactaaganacctgtgggattcaaacgttggcaaccgaatcttaggctcagcttttcttcatggatgtttgaggagagcgttatgtctcctcattcacctattcctacgtcaccacttgttggagctgcttgattaatttgattcaggttctgcacgagcgtttatatctttcaaga

SEQ ID NO: 74952 - DNA, 2109 bp, Glycine max
  unsure (1)..(2109): unsure at all n locations
  Clone ID: PAT_MRT3847_38695C.1
ataagaacctacacaaagcagctactacttggactcgagtacttgcacaaaaatggaatcatgcacagagacattaagggggccaatattcttgtagataataaaggatgcataaaacttgcagactttggggcatccaaacaagtcgttgagctggcaaccatttctggtgccaagtccatgaagggtactccatattggatggctccagaagttattctccagactgggcatagcttctctgctgacatatggagtgtgggttgtactgtgattgagatggccactggaaagcctccctggagtcagcaataccaacaagaggttgctgctctcttccatatagggacaactaagtctcatccgccaattcctgatcatctctcagctgcagcaaaagatcttctgctaaaatgtttgcagaaggaaccaattttgaggtcatcggcatcagaactgctgcagcatccctttgttactggtgaacatatgaattctcttcctctgtcatctaatgtcacggaaaactttgaagcttcttcaccatcatgtgccccaaatgatgatgaatccttccttttccgttcaactgtaaatcctctggactcgggaaataaacagtcgtggggaatgagcaatgatgatgatatgtgtgtgattgatgacaaagaagatttctcgcagagtgattccaaatacaaatcatttatgtcaactaataatattgagagtttcaacccaatgtctgatccctctgatgattgggggtacaaatttgatgcaagtccagaactggaaaatagaggggttagttttggcactgatgtaagttacatgccacctgatcagtcaggggatgatgataaggggcagaaagatttctcctttccaggtgtgccatctctgtcagaggaagacgatgaactcacagagtcaaaaattaaagcttttttggatgagaaggctcttgaactgaaaaaattgcagacacctttatatgaagagttttacaacagtttaaatacatcttgttctcccaatgtgattgagagcactagtgaggatactgcttgtcgaaaatatttgaaattacctcctaaaagcaggtcaccaagttgggtaccaattagcactccatctaaagccgttgataattctgaaagtcctggaagtaatggccggtcatcatcaactgttggccatgtaaataaccatagtccacaggatattccagcatctccccttaatgaatggaaaggactgacagttgactctcagcagcagcccagtagcccaagtctaagcttttctgagagacagaggaagtggaaagaagagctcgaccaggagcttgagagaaagcgagaaatgatgcggcaagctggcatgggcggaaagacatcttcaccaaaggatcgagctttaaatcgacagagggagaggacaagatttgcttctcccagcaaatagagactcgttagagcattcattctgctttaactactgggattgcaaacatgtcttactgcagttttgttggggttgttaatgttatatattcatccaatttggccgttttgccatatgaaaaatctcatgcttatcttgtccgtgttgttgtgccatgtaaagctttttatacgtgtgttgcttgaaatttttttactttcctttggggttttgagagatgcatggcgtcaactttatgccctttctgtattatgaaaatagaaataatcagaactatgtggcgcaagattgcctaagaatctgttgccacttgtttctctttttcccctgnnaattgtttctaaaactaatcagtgtcttaaaaattctatctctttgtttccatctgggaggcttcgcctattgcgtatatttgtttcaatgtacataaagttgagtttgggtatatatgccggaattcattgcagactcccctatggccaaggatcaatttttggattcttcagcctagataatggacacgttggggatatcatcatcaaagatcaagtgtgttttttgccctctatttattnnnnnnnnnnnnnnnnnnnnnnnnnnnnnnnnnnnnnnnnnnnnnnnnnnnnnnnnnnnnnnnnn

SEQ ID NO: 74953 - DNA, 492 bp, Glycine max
  unsure (1)..(492): unsure at all n locations
  Clone ID: PAT_MRT3847_38696C.1
cctcgtcacagttgctagtaattcggctgagttcttgttcgatagaccaccgaaggggacagagtgctaagaaaagaaagagaaataagagagagaaagttcagaagaggcctcaatcgctagctccaatatattacaccactgccaaattttctgaagcagagatcattgctttcttacatttttttgtgcggggggttttcnccccaacaccgctctttcgaaaaaaaaaccccccccgggggtgtcccggggggttcctctcccccccaggggggtcccccctctcacccccccgcccgcctcacccctcccccctccccccccccctttccacctttcgctcacctcccccccgccccccctccctcccctcccccccccccacccctccccccccccccccacccacccccccccccataccgtcctccccttatatacccctcaccccctcgctcctcctcccttacttattctttcccccccccc

SEQ ID NO: 74954 - DNA, 1361 bp, Glycine max
  Clone ID: PAT_MRT3847_38697C.1
tcgtggtaatccaatcagaatatgggttcagagattccggtttcataagcaagttggagaaagtggtcaggggagagtgagaagtagtcactgaaccatcaacgtcggaaaccgaatccgaaaccaaaaacggttccaaatgttgaaccccgaaccgccgccgccgccgccgccgatgatggttccgccggcgacgccgatgaaccgcgaaacgacgtcgctaaggaagaagaacagactccgaactcgaactcgaattccacctttcgacgtggactcctccttcttcaccacgccgatctccttgcaaggcaccacaaaatcaaacgcgatctccgtggagcaatacgacggcgtttccgcttccgcttccagccccgtccacgtcatcaacctctctgataccgaggacgacgacgaagtccgaatcctcaacttcactcccataaacacgtccttcggaaaacgcagcaagaaatcatcatccaaaggagagtgctccaactccgcatcgttcgtctgcgaaatctgcaccgaaacgaaaaccgccagagactccttctcgatcatcggatgccaccacgtgtactgcaactcctgcgtggcgcagtacgtcgaatcgaagctcgaagagaacatcgttagcatcccctgccccgtgcccggatgcaggggactactggaggctgatgattgccgtgaaattctcgcgcctcgcgtcttcgatcggtggggaaaagccttatgcgaggctgtgattgctgctgaagaaaaattctattgtccctttgcggattgttctgttatgttgattagagggatcgaggaaaacaatatcagagaagctgagtgtcctaactgtaggaggcttttctgtgcgcagtgtagggtgccctggcacgataatatgccctgcgaggactttcagaagctgaacgcggacgagagggataaggaggatatcatgctgatgaacctcgccaatcaaatgcagtggaagaggtgcccccggtgtaggttctacgtccccaaatcggatggatgcatgtacatgaaatgcaggtgtggaaacgccttctgttacaactgtggagctcccaacttaaccagctcccatagttgcagctattgttttcgttaatgatattatggaaccaaaagaggatttgaacaaattacttcatgcaaactacctaaactcatcccaaacaccccacacctagtgactttatttatgcattaacattattcagtatagcttataactatttagccttttcaagtatgagaacaatttcaaaatctgtttgcagtatatgactttatgaatgcataataatggctatgtatctttagccgca

SEQ ID NO: 74955 - DNA, 311 bp, Glycine max
  Clone ID: PAT_MRT3847_38698C.1
gcttgcggacgcctactaactccttcctcataactgatctctgattattcatcatgcaacagatacaccgattgcatggtcccgatcttccgacgacgacactcatcctatgtgcctgatggactacctgctccagtccaggcaataccatcttctgaccgtgccgcattcggccatcgacggcagaaacagacactcctacgacgacgggtacacgctggtcctcggccacgaccacgttttcatgcacatagacaggagattcctctacatgaccgatcttgacatcaacctaagtattaccgggtggt

SEQ ID NO: 74956 - DNA, 336 bp, Glycine max
  Clone ID: PAT_MRT3847_38699C.1
gggaaaaaagcaagccccttccttttttaagcagaaaattttttcgaaagaaaccagttttggaaaacacaggcagaaaaacattgcttttcttttgccagtattaaaggccaaaccaaacttggaagttcctccgaagtaatattacatgcctaatctcctaaatagggaaggaggacttttgtttttctattggggatatacctacttccatcacgtggaaaaaaatctgaagatcttttttccaagggacacctcacccggatgtccctccttttcctcctcctcctaataatccccttttgtggttttctcgaacccgtacggacccgtggg

SEQ ID NO: 74957 - DNA, 462 bp, Glycine max
  Clone ID: PAT_MRT3847_3869C.1
cgaccttggtggtgaatcacatgctcacaaggatatcacgtcacactttatgaacctagagatgggaatcgataagctattcgtgttaaatggatcatcagtgtgatgaaaacttatgatactgcatgtagcgcacttagagaaaggggactgaagatttctttcatgaggagaaccgatgctaaagtcttccgaacctatcttacaagcagtgggactgctaatgatgacaaactatcttttactgcaccaattgatactgactctttggagaggacatcgcatgataacacaactactgaggggacactctgtacatgataactagaaacatctctgtgacaactcatttcgctagatcctaaagtttatcacacatagaacccactctctctccagcgagatgatggtccacctgaaatggtggtttatccatgtctgaaatcgttggcctgggtaatg

SEQ ID NO: 74958 - DNA, 438 bp, Glycine max
  Clone ID: PAT_MRT3847_386C.1
acggctgcgagaagacgacagaagggggcacaatgcaagttctataggctcgtttggttttgccgattagtgtttactgaaacaacgttttttgtgatatcgagaaaaaaaaaaaagagtgatgtcgaggagaccggggaatcctactagaaggttcggtgacaatggcggtggattgttctcttcgaaatctaggtcgccaccggttttgtctattgcgcttgtaattgtgggaggtttgtttctcattggctatatgtatagaggctcaggtggatctagcagccgtatagattctgttagcagggttgaaggtgattatttgtgcagtggagaggtccaacaagcaattccccttttacagaaagcatatggagatagcatgcataaagttttgcatgttggtcctgatacttgttatgtggtctctaaattgct

SEQ ID NO: 74959 - DNA, 619 bp, Glycine max
  Clone ID: PAT_MRT3847_38700C.1
gatcgaggaaaacaatatcagagaagctgagtgtcctaactgtaggaggcttttctgtgcgcagtgtagggtgccctggcacgataatatgccctgcgaggactttcagaagctgaacgcggacgagagggataaggaggatatcatgctgatgaacctcgccaatcaaatgcagtggaagaggtgcccccggtgtaggttctacgtcgccaaatcggatggatgcatgtacatgaaatgcaggggaaagacgcagaagcagctgcttttgctgatccactatcgaaaggtagccagtgtttactaaatacccactggtgtggaaacgccttctgttacaactgtggagctcccaacttaaccagctcccatagttgcagctattgttttcgttaatgatattatggaaccaaaagaggatttgaacaaattacttcatgcaaactacctaaactcatcccaaacaccccacacctagtgactttatttatgcattaacattattcagtatagcttataactatttagccttttcaagtatgagaacaatttcaaaatctgtttgcagtatatgactttatgaatgcataataatggctatgtatctttagccgcaaaa

SEQ ID NO: 74960 - DNA, 141 bp, Glycine max
  Clone ID: PAT_MRT3847_38701C.1
tcttcttcttcttcttcttcttcttcttcgttgaatcgcgattgttctgtgcgagagagagcagagcgagatcgaaaatggcgttggctttcgacgaattcggacagccgttcctactcctgaaggagccggagcagcagc

SEQ ID NO: 74961 - DNA, 825 bp, Glycine max
  Clone ID: PAT_MRT3847_38702C.1
ctcaccaaaacacgttttcttcttcactaaaatggctttccctccccacgtagtagaggattgcatgggcctcctcacactcttgagcgacggcaccgttttgcgttccaacatcaacttccaagaacaacctcaacccacccaacacgacaacctcgtacaattcaaagacttcctcttccacaaaaaattcaacctccacctccgtctctacaaacctaaatttgacgacaacattaataatgatgacgacaagaacaacaacaataagtcgttgcccgtggtgatgttcctccacggcggcggcttctgcttcggctcgagagtgtggccacacattcattcgtgctgtgtgcgcctagctacgagcctccatgccgccgtggtgaccccggactaccgcctcgctccagagcaccgccttcccgccgcagtggatgacggcgtggaagccctgcggtggctccagcgacagggccaccacggcggggatgagtgggtgacccggggcgttgactttgaccgtgctttcatcctcggtgactcctctggcgggaacattgcgcaccacttggcggttcagctcggacccggttcgagggagatggatccggttcgcgtacgaggttacgttctgctgggcccgtttttcaagtgggggtggttcggaccagggtcggaggtgggcccaccggaacaaatgctgacccttgagttgctcgacaaattttggaggctgtcaatacctattggagagacaagagatcacccattggcgaaccatttggagctaacagtcaaaccttggacatggtgagcttgacc

SEQ ID NO: 74962 - DNA, 218 bp, Glycine max
  Clone ID: PAT_MRT3847_38703C.1
ggatagatattagagatatttattcattgtcaccaaatcttgttccctgcaagagacatacagtagggagagaagaagttgttgggttgagttggattggatttctaatctaatctatacctttcttttttcctatgcttttaaggcacaaacccttctttcttccctcttctatcttcttcttattgttataccttggctttaccctttaggaagga

SEQ ID NO: 74963 - DNA, 299 bp, Glycine max
  unsure (1)..(299): unsure at all n locations
  Clone ID: PAT_MRT3847_38704C.1
angttaanncacgcgtacgtangnncggaattcggctcgagcaaaaangncnncttnataaacncntttcttctccntntccgtttcctcgttcgaattcgntntttgatctgcgaanatgngagngtgcatctcnntccacattggtnangctggtatccaggtcgganatncttgctggganctctactgcctcnagcacngnatcgngnccgatgggcaaatgtcnagtgncannacagttggcggtggtgatgatgntttcaatactttctcagcgcgactggtgctggaaagca

SEQ ID NO: 74964 - DNA, 483 bp, Glycine max
  Clone ID: PAT_MRT3847_38705C.1
ctttaacttaacagctgcaggaccctggaatccagtataaatgaactcacaggacccaactattaagggaaaaaacaaacatatcaaataaggcctgcccttgtcaggcaaattgtttagccaacgataattagtccaggctatttacataccccaccaaaatcaggcctaattttgatccacatttttcttcccgagccacaaagcacacaatgaattgccggcggattgttatggcagtatgaataataatatggtagttatccagtcgataatttgactggctagacataagaattatttgcatcaacagaccgcgaccgggttttaatcgaagtagagaacaacaaaaaatacacaaatcaaacactacgaaccaatggaactctcaatgcaaataagtagagcaatcgaacatcaaaatatatgcaataaaagaatcgcaaaaagatggggcgcagccttaggccgcgcggggctggt

SEQ ID NO: 74965 - DNA, 714 bp, Glycine max
  Clone ID: PAT_MRT3847_38706C.1
catagaaagtagaaaagaaagactcagttcttctccttgactttgtttgtgagttgaaatctgaagctgaatcgtatcgttgagtttagggtttgaaattggatctgacagcatagcatagaatggcgggggttcgtagagacgcattgctgacgagagataaaggccaatcatcggtccgatttcgaatcgtcgtcgctgtcgtgatcggcgttctcctcggctgcgtctttgccttcttctcctccgctcccactcctcttcacattccctaccctattaagatggtttcatctgcatgtgaatcgccagaacaagttaatgcgcttaaagttgatattctatcagcgaaagtgaaaaattctgagctgaagaaacgggtcaaggatcttatggagaagctgcgtctggccgagcaaggaaagggtcatgctcaggaacagtttgttgtgcttggtgagagccacaaggctgggccttttggaactgtcaagggtctcagaaccaatccacctgtcattcctgatgaatctgtgaaccccagattgaccaagatcttgggggaagttgctatttataaagaacttattgttgctctcgctaactctaatgtgaaggagatgttgcagctatggttcaccaacatcaagagggttggcatacctaattatttggttgttgccttagatgataacattgaagaagtctgcaaat

SEQ ID NO: 74966 - DNA, 214 bp, Glycine max
  Clone ID: PAT_MRT3847_38707C.1
agtctgactaggctgcggccgcgcacgcattaccttctttttttcactcttctagccccttgatttgcttttcactacgaatcgatgtttgccatacccgatatggctggaaccgaaaaattcgggcactctgatctgactaagactacagacccgagagaacctcggccgccttcggatgaaccgatagatcaggtgaagcacgcacgcgatt

SEQ ID NO: 74967 - DNA, 501 bp, Glycine max
  Clone ID: PAT_MRT3847_38708C.1
actaaattctcgcttgttatttattaaaaaacaaatattctggagagataaagagaatgttccacgcctaataaaagacgggctctaattattttttgaagggtgcctcacaaaatgtttttatggtgataaaacagactccattcactgttataacgaaccacatgacactgattttttaaaaaggacaggcaggattcaaaggggaacggtgtctaaatggacttccattacccccgggttccctaagctaggtgtggaagaaaaaaaaatgggcaacaccactcccggagaaacccctcattggaagcccccgacccatggatgaaagccttgggttcccgttttttcttttagaaaggtgaccccagttggcgacgaccactggttgggcgggcctcccggggcggggatccccttttttttttttattggagaccgcccttttcctttatggccttgtcaaaaaaatagtgtttttcttaaacccctctttttttt

SEQ ID NO: 74968 - DNA, 458 bp, Glycine max
  Clone ID: PAT_MRT3847_38709C.1
atctaccgaaaaaccgttctatattgcctctagcgaatcaaactctctttgccccttccttcgaaaaggtgcacattaacactgaactatcggcaactgaattacattaaaaattcttgaatagtgacgattccatttctatcatagatgcgtacttcatttcagataaaatcgaatacatgctaacccaccgaggcatcacttctatggtcggttatcagcatatggttttcacaataatagaagccacatcctttggatatggatacttgtctttgccataagctgcagtatctgacgaactgggtatgattattgctaacgatacttgctgttccgccttcaataacgcaactcctttttggagacatgaatattggaagtgtcaatgcttattcccaaagctgaaatgcttaactcaagacatccctcaacatgtttagataggctacaaacta

SEQ ID NO: 74969 - DNA, 228 bp, Glycine max
  unsure (1)..(228): unsure at all n locations
  Clone ID: PAT_MRT3847_3870C.1
tcaaccaactaactaaccattcgacgaccttccttttttggttggggggatacataacatctcatcattttatattcacatatcatataccatattatacttatcttatcttcaccattccatctacatccaacaacaaaaatcaacttatcctcatactcatcctaaccaatctccccatacaaaccacaatacaggtttgtcncgtttccccaacaactaccaacc

SEQ ID NO: 74970 - DNA, 371 bp, Glycine max
  unsure (1)..(371): unsure at all n locations
  Clone ID: PAT_MRT3847_38710C.1
atgcgcgacaataacaaatcttccaaacataccagcttcaatctcaactctatcaacaactacccttccataacgagatgggtgcacataccaagcaggcgcgtcattctttataacctacaccatccattacaaataaattgatacatcttctatctcacanccactacatactattaatcgatgatcacccttttccaatttaacatacactataccccattgctttattctataaacaacaccttcattctaacacccaatctcattgcaataaaagaactcctcacataaacaaccatccagtaaagcaacattattaattgtatttacatacactactacaacaggttctagttttgactaactat

SEQ ID NO: 74971 - DNA, 349 bp, Glycine max
  unsure (1)..(349): unsure at all n locations
  Clone ID: PAT_MRT3847_38711C.1
ttggttattanggcaagccgcgcacggagggcgccgggccttataaccggaagcagaggcgaacgccacatgccttcaggaatctcgcacacagttactaccactaggagtacgaatgcgaagcggatagaaaatcactctctgaactgaccgcacactgctagaactacaagcttgtccacacaaagcttaaaaaatgaacactctccgagtggatataggactgataaccaaattaaaactcatgaagacgccaagccagacctctgtggaactacaaggacaagctggtgaactggtgataaaatccccccaccctactatctggactaagctagcgcgagttgac

SEQ ID NO: 74972 - DNA, 302 bp, Glycine max
  Clone ID: PAT_MRT3847_38712C.1
gccctttatttaagggcttgcttatttcagacgcatgcctggcctgaaataaaagaaggcacgccagaacctaagagttgacgcctacatccctatctcaatgaaaggggcagtttctgagtcactaaataaaccaaatggtttatatgtgggcaaccattatgccctaacagggcaacaaaaaccagacctttttcttttaatacaaaaaaaccagacttaccttgcgggagtttttaccacccaataaaggtttttcacaaaaaggacaccatccatcctccacaaataatttttttcct

SEQ ID NO: 74973 - DNA, 1292 bp, Glycine max
  Clone ID: PAT_MRT3847_38713C.1
tattaaatactcaaattctgtggtaggtagtgatagtagatgggatcagtggaaagatcaagaaagaaagtcatgtcatggaagaaagccatggtgcatttttctctctgttttgtgatggggttcttcacaggctttgctcctacaggtaaatctatatttcacagccatgttgattattcaaataggtcagagtttgcaccacaacctattgaagtgtcacagaagacaacaaatgtcaatagaagttggatagctccaacaccaaggtctttagtccacaagcaaaaattgcatgtaaaaatagggccccagttgaagcctagaagacttataatcattgtaactccaacaagcacaaaacttcccttccaaacagtgattttggcaaggctggcaaacactataaagctggttcctcaacccttgctgtggattgttgtggaagggcaaactgattccacagaactttctaagacacttaggaagactggcatcatgtataggcatttggtttcaaaggaaaacttcacggacttggaagctgaactgaatcaccagagaaatcttgcactcaagcacattgtgcatcacaggctaagtgggatcgtacactttgctgaactttccaatggttatgatctcgaattcttccaacaactaagatatattgaggtatttggaacatggccaacggcatcgttagcagcaaacaggaagaaagtgatgatagaaggacctgtgtgtgattcttcaaaagtcatagggtggcatttaaggaatatgaacaatgaaactgatataattactcctccgattcatatttcaagttttgcattcaatagctccattctctgggaccctgagagatggggtcgcacttcctctcttcaagacacctctcagaattcaatcaaattcgtgaaggaagtagttcttgaggatcaagaaaagttgaggggaattcctccagaggattgctccagaatcttgctttggcgtttcaattttcatgctcgcaccacttcaaatcataaatttccgactactgcatctggtgttatccgaaaataatgggaaataaacagaaaataatgtatagcaaaatattcaacttccctacaccaggaatttattcattattttttacttgtacaaatttctcctgtgtgcttataattttatacgtccctgctattttcacaagtttttttagcttctataagtgtaacttgtaagttctgatgggaagcaaaaacattttatcatatatattttgggttctgctaaaa

SEQ ID NO: 74974 - DNA, 578 bp, Glycine max
  Clone ID: PAT_MRT3847_38714C.1
gaatccgggccgacccagcgtccggaacttttttatctatctcaatgagactatacccaggtggttttcttactcctttgtccttcatcatttgcctcatgacagtaacatctttccacttatttgcacgagcatatatgttggagagtagcacataatgaccactatattctggttgcatctctaacaaaatcttccccaccctttccccaacttccacattcttgtgaatcctgcaagctcctagcaatgctctccatattggagcatttggcttcacaggcattttaagaacaaacttctccgcctttctcaactttcctgcacgaccaagaagatcaaccatacatccatagtgctccagtctcggctccaccccatgatcacgtttcatgctttcgaatatttccaaacccctttcaaccattcctgcatggctgcaagctgtcaacactgcagtaaacgtaatgtctctaggaacaaaccccttttttgccatttctgaaaaataccaaagtgctttctctgcataaccatgcatggccaatccagcaatcaaagctgtccaacaaaggaca

SEQ ID NO: 74975 - DNA, 333 bp, Glycine max
  Clone ID: PAT_MRT3847_38715C.1
aacaacatcaagctttcaaggattcgggaaccatgacatggatcaaatcaacccttcactccattccataatacactattaactaattacctacatatgaaattctctctaacgccaaatccctttcactaggccctaaaaggcaagctccgttaaactgaactatttctccacagattatacagcatctgccacaacattaaataccacattttacctgatgattaatgacaacgtgaacggagatcatcaaaagggacaagggaaatggtgttagccagtagatccgggcgcatgtaaacacctttacacatgacttgattgaccgcaatt

SEQ ID NO: 74976 - DNA, 387 bp, Glycine max
  unsure (1)..(387): unsure at all n locations
  Clone ID: PAT_MRT3847_38716C.1
cggtccggaanncacgggccgacgcactcacgcgtcggcccacgcgtccgcccacgcgtccttccacgcgtccgcccacgcgtccggccgtatttataagaatggccaaaacaacatctaaagacctaaaacaacacaatctaaccactctatcatagaaaaccctgattctgacaacacactcctcataactcctaaactcaaacacatcattaacaacaattccaatcactctgaattctctctctcattatctcatgttctacttgaaactaaccatctattgaatctgaagatacccaagacttgcctttcaagagtgctcactttaatgtcttgggcttatacaggggtatttaattctgggatgacatagatacttgcctt

SEQ ID NO: 74977 - DNA, 341 bp, Glycine max
  Clone ID: PAT_MRT3847_38717C.1
catttccaaaccattctttgagactctgtcctcactactcccttagttcagctacaatggaagtaagtctttttctcatgtcttcaacattcattaactcatcttcttaattgatatatccttgatccttatcagtcttggttgttagtattatgttacaatgttaacagggttggggctttgaatcacgacttcttctctcttcgcccatagagagcttctaaaattttcaaatcaatttaattgtccataatcttaagtcacatagtcttcctaatgctagaactgacttatgtaatggtgaaactaataatcaattaattcgatgaagctattatcaa

SEQ ID NO: 74978 - DNA, 330 bp, Glycine max
  Clone ID: PAT_MRT3847_38718C.1
acacagtttttgaagccctggttggttcaggattgaaaatgggccgattaggggatgttcctcccattccttcggttggcccacgtggaaggggtgttggaaggggtggaagcctttaaacttcctattttggggtggctttatttaacttttaatgccaaagggaatggtggccttttgatgttttttaggtaaaaatcagaccttttattgcttttttgggggggttgaccagaattttggtggggtccccatttaatatttgtggccggggattttttaaagttgagctttgtttttcctaggttgggaggtttattgtttttttta

SEQ ID NO: 74979 - DNA, 455 bp, Glycine max
  Clone ID: PAT_MRT3847_38719C.1
gagaacaaattaccaaatcttgaagatgacattggcgatgatgatgatgaatacacatgtggggaaagtctaggataaggatgaacaaaaagaggcatttttctttgaaggataaacccatgtgcttcatccatgttgagatttttcggatcaagaccacttttccaactcccaaacaaatgtgtgggctaaggtggcagtgagcaattgaaccacctttaggcctaggcccataccaacacatattctacgaccagcaccaaagggtataacctcaaagttggggcccataacgtgaacaccagctcttctcaccaccaaggaggaaccttgcatgcttaaactccaatgggtcaatccactcggtaagggcaccccctattgcccaaatattgaccaaaagagttgtaccttgggggatgaggcaatcgaatatctcgcaactctacgttgca

SEQ ID NO: 74980 - DNA, 124 bp, Glycine max
  Clone ID: PAT_MRT3847_3871C.1
ctcaccaaattaaactaaaaggtgatccttcatcttcagctgccctatcctgaaagtgaacattcagggggggcgtgatgttaaccgaaagaacaaggttggaaagcagaagagacttacccga

SEQ ID NO: 74981 - DNA, 111 bp, Glycine max
  Clone ID: PAT_MRT3847_38720C.1
aaggtttctattgctttttaagtaataaagtacccatactttttctgagggcttgggttgaccaccaacagcgatgctctccataaaaccatctctcattatgttttgatc

SEQ ID NO: 74982 - DNA, 984 bp, Glycine max
  Clone ID: PAT_MRT3847_38721C.1
cccacgcgtccgtacggctgcgagaagacgacagaaggggaagacagaggcagaagagaagagaaaagaaagcctctccctccgtaccaaacccttccaacactgaataatgatctctcccgcaacctctgaagctgcgacgacgacgtttcccaatcgaacacaatcgcacaaaatttgagcaatgaagaagcgcaaggaacttggccatggctctccttcaatttctccccctccgaaatcaagaagactggagttggagcgcgacgtgatgatggaggaagaggaaaatgtaatggtgaagcaaccctgtgtggaccccacaccttcgcctgtgacggacatggaagagagagcgattgttctttatgagccaaccgctactacgccttttctcaagtccccaagctcgcctgagttctctattgttatcaagtctgacttgattcccggcttaaaggattatttgttgtcatggggtatcgccaagcaagatgaccctgttgaagatgaaatgaggagggagaagagttctgaaatgtcaaacgactgtttggctgttgtcccatgggttgccttccattctcctatgacatgtgaagaaatagttccagaaactggtcaacctttagaggtggaagaaggtgacatgatggaaatggattaaacctatatctataataacaacgacaaggctattggaatttttgagaaggtggaagcagccggagcatcatcattatggtgaaaccactaccatgtgacgtccaattttggtcaccccaatccctccgattacattttatgcatattgtattatagagcaactattggaggtctctgcaacaaactgtccaattttcgcactaggattggtttatttgcatataatattgccatatatcccagactgttttctaaaatggtatacatatattattgagagtagagttgtaaatgaatcaagttgagctatttataccc

SEQ ID NO: 74983 - DNA, 368 bp, Glycine max
  Clone ID: PAT_MRT3847_38722C.1
atggacttcttcgcccagggtcaccaccacaccaccgcctaccccaccatctccgccacgggcaccatctcggtcaacccgcccggtgggacgcacaccgcccatgaccccaagcacacgggcgggcttccgccccctcacactggcttcccggtcccggtcaacaagttcatccaacactcacacgtgggtcagacggccctctgggtcgtcttcggtctgttcactgccggtctcgtcggcatcttcatcctctcccagcgagtcgagaagcgagctaggctgtaccactttactctatggccttgtgctgaccatagacatggtctctcacctcgccatagcgaccgggctgggcgttacgttcg

SEQ ID NO: 74984 - DNA, 990 bp, Glycine max
  Clone ID: PAT_MRT3847_38723C.1
ggaagtagaagagtttaaggttaatttaaggtgaaggtcctgtggtttgagtagccaaagggccaaccttaccttagttatggatgttgaggcagagattgatcgcttgccaattgatttgttggctcatatttttgttctgttcacttccttcactgatttggcacaggcgagtggtgtttgcaagaaatggaaacaaggggtgaaggagtctcttgctcggagacacaatctcagctttgccggttggaagatggatgatgactccactgctcgccttgtttatcatgcctacaacctcactaaactagatataccgaggagccgctggggttgccaaataactgatgctggacttctcagaatatctttcgctaagtgtataagcaatctcacatccatatcactgtggggtttgactggcatcacagatgaaggtgttgttcaactgatatccagaactagatctttacaacatctgaatgttggtggtacgtttataacggatgaatctctgtttgtcattgcaagaagttgtccaaagttggagaccattgttctttggagctgtcgtcatgtaacggagagtgggctttttgcgctagttgatcaatgtttgaagctcaaatcaatgaatgtgtggggaacaagagttcctgtggagtgcctcaataatttacttattgtaagtccagcccttcagataaaagtttgaaactggactgcctttatagaatggagttcaaggtgctccaataacagcggtattttcactgcttaattttttatgtatatgtcaaaatccacttcttataggaaatattctgtgacagtgtatatatattgtacttaatcaagttgctatttactgtaaaggatcaattcataaaacaagtcataatcaacgtttattgtactttattgattcatttagtgtatatatttgaaagtctccaaaaaaaaaaaaaaaaaacaaagcaaaaaaggacg

SEQ ID NO: 74985 - DNA, 1023 bp, Glycine max
  Clone ID: PAT_MRT3847_38724C.1
ccctttcgttcgcccacgcgtccgacaaatacatcctgtgactgctgctttaaatagtcaatgtgggtactcctcagacacccttgaaccaaaacaagacaaggctttgagccatgtggaatcacattcaccaagctcatcgtttggggaatactttcagaaaagctgcgatgacagaaattttgataaccaaacatatctgggaatatcaaaataagtcaaggagaagcatatttgcctcatgacagaggtggtactcctgcttctaatagatttccatcaaatcagtctgtgcttcctactgctggtgttagtcgcatgtttgcttcgagatatgtttcaagatttctcaactcagaatctgcttcttcaagggaaaaagtatctcaatcctctggctctgtgccagttaacaagtcaactcaggttgaaaagcagatggagcaaatacagattaaaccaaatgttgaaatccgtctcaatgatttgaagcttgtgcttggaccagagttgaagatagtttatcctttgattcttaattttggtgtaagtggagagcttgagttaaatggtcaggcccatcccaaatggataaaacctagaggcatactgtcatttgagaacggtgaagttgatctagttgcaacacaggtgaggttaaaacgagaacatttaaatattgcaaagtttgagcctgagtgtggactagatccaatgcttgatttagctttggttggatctgagtggcaattcagaattcaaggtagagctagcaattggctgggcaaacttgagatgacctcaacacgttctgtggaacaggatgcactttcacctgctgaggctgcccaaagatttgagagtcaattggctgagtccattttggaaagacaatggtccagcttgcttttgaaaagcttgcaactgctactctagaaaaattgatggcacgaaatagaaaggaagggagagttggggcagcctaggtggaggctaatgtatgcacctcagaatcctaagtta

SEQ ID NO: 74986 - DNA, 449 bp, Glycine max
  Clone ID: PAT_MRT3847_38725C.1
aattcgggtcgagtacggctgcgagaagacgacagaagggtatgctttatataagtataaatattatggttagaatttacagaataaccatgcccaagtgagtcaacatatgcacttgaaaaaatttatttttgatattcattattttagtaagtagttgtgatttcatgaaacacttgaaaacattgccaaagattactactaacctaatccttcgctacctatatatgaaggaaatgcatttgggaaccaaatctatgtatgctcaagaaaacattgccaatacaaaacaagcctaaccaattcatatacagtgctaaaacaagttaaatgatatgagaaaccagacccacaacctgatcaagagagaactcttctgaatgcttcaaacagtgaggtaggtccacaggtgtaccttcgggcattgaaagtgaaactcgccaactgca

SEQ ID NO: 74987 - DNA, 570 bp, Glycine max
  Clone ID: PAT_MRT3847_38726C.1
ggcccgcgtttacttgtttcttaccaaaaccgcttcctataagcctacgattaccacatcgccaccttcacattgagagtactctcgcttctgaaaatggtagggcaagagatgaggatgtatgagcatgagccaattggtatggagagaggcaaccaatacgaacagctgctcagacacaagatgccaaagactgcacagaggcaccaccagctccctggtttgagcctagagagttaacatcatggtgctttctacagagcgggcatagcagaatgagcggccactttgttggttctttatgtcactgtaaagactgcgatgggtgttgcacaatgttccagcaagtgctccactggaggtgaacagggcgttgcttggccctttgggggaatgatctttggccttggctatcgcactgctgggatctaacggggacacactaacccatctgcgacattggggctggttttggcacgcggttatcttcactaggacagtggtctacatcatcatgcagggcttgagagctatatgaggcgctgctgaggccaagggattccaatccaa

SEQ ID NO: 74988 - DNA, 193 bp, Glycine max
  Clone ID: PAT_MRT3847_38727C.1
ggctgatcctatatgatatgattgatatgatagagcgactaagaaaaagagagctatatctaacctttccattaacgcgacgtgtcgccatatttaagaaccgttcgttctgcgcacctgctgctgctacaggagtcggaattactctgctttaccgaataccacagcaaagagtggacacctctatctggga

SEQ ID NO: 74989 - DNA, 472 bp, Glycine max
  Clone ID: PAT_MRT3847_38728C.1
cttctttcttctggagggaggtgctgattttttagatttctttttttttttaacacaaatagaattatatggtttcgttatgaacttttgtttgtttctcttataatgttacaggcgtagaatggcttgggctaaatggattcaccattgccatcagtgcatcggtcctgacatttggttctttttttgtaagtgtatgatatttccgttttagccttttaggttgtaggtatagcttttattccttgtttattgttacctcaaattttggcttttccgtatgatccattatttacgttacctcttgcattagagttatatttttttgtaagtgtataatattttggtatctcaattgccatatctactttacctcttgcattagatgcatgcgtatcatttcataagtactgaatacttttctagacttacaacagtcaggcctggcttgtgccatttgacaacttatttg

SEQ ID NO: 74990 - DNA, 159 bp, Glycine max
  Clone ID: PAT_MRT3847_38729C.1
ttcacttttcttttttcactcacaactacgaactttatttgctctccgcattctcacatttccacaagatggacgaggatttggacatggcggcggcggtatcccatgggcgaggacttagacttacggcgtagcgggagcaaccccgtcctgaaggtc

SEQ ID NO: 74991 - DNA, 503 bp, Glycine max
  Clone ID: PAT_MRT3847_3872C.1
cccacgcgtccgtccacgcgtccgcccacgcgtccggctacctgaggctgaagccactcctccccttgcagcagcagcacgtaacactagctttggtattcgaaattgcaagccagtttatttgctgtggtctttagccaccactgtttttggggccttgctcgtggcattttgaacagacatttcccttcataaaatctaagtagaagagagtaggagaaaagaaagtgtgtgaagaaaccatttttgggggatcacgctgaatgtgcgtgaacatttggtgcagtgcaatggtttttgttattttattttattttaattttgaaagaggagctttggaaggtgtagttgtaattttatagtcatagtgggtatgcaaatgcaatgggctctctgaacttaatattgttaagttattagtgtgcatcatgtggtgagggtatggtatcattgatttaacgtgcattcaaaagaaaaatatataagtgaatttgggaaaaacc

SEQ ID NO: 74992 - DNA, 226 bp, Glycine max
  Clone ID: PAT_MRT3847_38730C.1
ggatctagagtaaatgttaatgttgtagtctaacgataacctagtgaaaatttcatatacattcagattcaacatcctctcctaaccgcttgagtcaccctttcacatacaaattatctccaattaataatatatcgtttgaatgagcctcacgaaaactgtcatgttcacaaaatctgcgtgtgtagcaaatctctttgctttcaccatacataatgagtttgtc

SEQ ID NO: 74993 - DNA, 555 bp, Glycine max
  Clone ID: PAT_MRT3847_38731C.1
gctaggttcatcaaccatagttgtgatcctaacctatttgttcaatgtgttctgaactctcattatggggtcaaacaagctcgactcgtactatttgcaggaagaaacattcgtcctaaacaggaacttacttatgactatggttaccgacttgatagtgttgttgatgccgatggaaaaatcaagcaattgccatgttactgcggtgaagctacttgtcgcaagcgtttatactagttcggtaacacagcaatgcacatttgtctgattttagagtggagttattacacaaaattgtgtttaaaaatgatgacccaaaatttgaaagcgtgtatgagttgattaaatatggatcttgggtttgcttgaatgtctaataagatgaacaatttttccttttctttttatgattgatcgatgaacctcatgaaagacttcaaggaaattgagtcaattgctgtataagaagggttgaatgttatttggcatggctactatgtttggttttatatcatggcccttattacccctcatttaatacattgattttcttgc

SEQ ID NO: 74994 - DNA, 382 bp, Glycine max
  Clone ID: PAT_MRT3847_38732C.1
cccttcggaaaaaaaaacaaaggcgggtaatagcgtcaaaattgaagggggtttttgaatgaataaacatccagcattttttggtcctccccaattcgataaattttttttttaaattccagggcaagcccttgttccttaacaaaaaaaaattctgggggtatcaggtctggtttttttaactgaagcttccttccaaggtttcctggggaaaagtcaacttattacaaaaatttcccctgccctttgggtttaatgaatcaaacgttgaccatagtctgaaatcgtccatccataaaattaaaattttgatttataaaaagtggttgtgggggggggaccaaaagatgatggcccaaaggaaaacggggggggggataaa

SEQ ID NO: 74995 - DNA, 514 bp, Glycine max
  Clone ID: PAT_MRT3847_38733C.1
cggctccgagaagacgacagaagggggtgccgaaccacgttaaattcttgtgtttgttattatttttcttacggtgtaatctttgttgtgttctcacgatcctttgtgggtttgaataattttatttgtgtgagcgttgattacccaacatatcacataatgtaaaaagacttcatttaagtttagaaagttacaccttgataaatatgttttgaacttttgatattcatattatgtttttggttgaatgctaacttagattactcataatctctgtattagatccactgataattaggatttacctatgtcaaaaatgtgtattattatgtaaatgtcttggttcaatgtattatgtaaatagtaggaaaattgtaccttgtatttgttacatttattaattaatattgtgttcggttatacatctagttgaaacttgaaatgcacattttcagcataagctcctcttttctctctatctgtttttctcaacatagtatcataccttctaaga

SEQ ID NO: 74996 - DNA, 341 bp, Glycine max
  unsure (1)..(341): unsure at all n locations
  Clone ID: PAT_MRT3847_38734C.1
gangggggcgggcggcaggttaattccgcaagaggggctgccntcccttttaagaagaagcatcnattggacaggggcaatatataatcttggtaacaaaatggtctagggaaatgcaaaagaaagctggtcaaggtgagtccctatggcggttagggacccctatgaatgcaagcaatttacccaaataacttgtgggtttanaatcataattaggttcantaatataaaaaaaaatttgaagttcataaattggtgtttttttgtctntctggttgttcaagtataacctcaaaaagattgttaagggcctaaatcatgcaattgcctgggccaaaaaa

SEQ ID NO: 74997 - DNA, 189 bp, Glycine max
  unsure (1)..(189): unsure at all n locations
  Clone ID: PAT_MRT3847_38735C.1
tatgttaccttttatgttaagctttcagatattgtgcggctttattgctaattanaacaacgacgancagatcgccgnantgcagggaggcctncagccaannacgaagggggngcnncngttgtatcacnaccccncgancttggnactnngatgcgggcactagggcnnaacccanctgccncagaa

SEQ ID NO: 74998 - DNA, 282 bp, Glycine max
  Clone ID: PAT_MRT3847_38736C.1
gagggcataatgaaaaagagccaaagaaaatccctggggacaccattattaagaattttggatgctgacctatctacgttaaaaatattaaaatatacttaacaactaggcttgatagttatatgctgcacacagtggaaagtgtcatattgttaggctcaaataccgtaacaacttatatcactctgatcagcacaaccttgaggaaccaccatatttcctggcccggcttgcttgacgctaaaacaactatggttagaaactcaccctgatgagttcatc

SEQ ID NO: 74999 - DNA, 350 bp, Glycine max
  Clone ID: PAT_MRT3847_38737C.1
gacacattacaacgtgttagcataaccattaaaaacgtggatgggttttccatactatggacatgtttatataaggcctcattttgccctgctttcattgcaaccaaatgcacttattgttatgataataattcttcttattgttccttaccttctctcattcaagacaggcctgtctatgctgcccctgcccccatcatcaccccaactgtgatacaggatatgacataggaatacgatcaagctattgaagatctccagatactgacgagggattttagtgaactcattgccacaactgctgagaaagtggagcaaataacagcttctctgggaacatcataatgcga

SEQ ID NO: 75000 - DNA, 267 bp, Glycine max
  Clone ID: PAT_MRT3847_38738C.1
aatgcggggggaaaaaccgaatgaatctttacgttgcctcctgccaggcccaaacaacaacaggaaaaaaactggccgacacaaaccgcgacccaactttttttgggggggggaaaccccaccaaagctgggtgggaaaagaaccgacccccggggggcaagtatcttccccctctagccagaaatgaaattaacttctataaccaaaaaagggggagccggatccacccgccacccgaaaaacccctggaaaacgaaaaagggccc

SEQ ID NO: 75001 - DNA, 238 bp, Glycine max
  Clone ID: PAT_MRT3847_38739C.1
ttgtgaagtgtgtgttattttaaaaaaaaaaaaacaagaaacaaaaaaaaatgaaaagtagaaatagggcagggctttaatgtggttctcgtgcttcgtgctcgtgcattcacgggtataactcttctttgtgtgatgtaaacacagttcacgggccactcatttacaaattcttcgctggttaaacccacgctttaccattttatattggattgctacacatccttaatccgcttgt

SEQ ID NO: 75002 - DNA, 496 bp, Glycine max
  Clone ID: PAT_MRT3847_3873C.1
cggccagggcctgcttgtaagcgcccccgtcagtggaaacatcgatggcatattcaatccggtacccgccgacgtttccgctctcgtcctggcgttgaagcgctggccacgccaggcgcatgcgcacagcggaaagctgggtgttggtgattgagcgcacccagggcgaatcgctgcgcaactcgatgttcagcgaggtctcgttttcgaccgacgggatgccagggatgtaggcctggtcaaccgagccaccgcgccactcccatttcacgttggggaagttgacgttgccgctcgcatcctcaatcggtgtgttatccaggtagatatcccgattggtcgggacaccttcgaactcaccctcgcctactgcgatcaggatcttggcaaggttcgtcgagcgcaggctgtcagccgcctccacaggcgacttcgggttgctctcgccgcccttggcgccgtggatttcgatattgcgtattgcgcccatgttttc

SEQ ID NO: 75003 - DNA, 479 bp, Glycine max
  Clone ID: PAT_MRT3847_38740C.1
catcgggcttcggctcgaggatttgttcaccagtttcccaaatgctggccaagtgcttatatgatcatatatttagtagctgtcctcttattttgctgaccattgatattctttatgcctttggaaggttatggtatttataataataatattattattgttgttttggttgtagttgttgttattggttgtggttgttgttgttatatgtctctttaataactttttgttttattattcctaccattaaatatgtagatattgattcaacgatcacacacatcaagttttatataaatcagacatttgtagttaggtaatcttatactcaacatttacttatatttttacaaaaatattatatactttaaattaatttttttttaacgaaggatcaaatagttttataattttattaaaagttgtagacttgatgtactaaaataaaactttttattaaccgtggattaattgaattt

SEQ ID NO: 75004 - DNA, 231 bp, Glycine max
  Clone ID: PAT_MRT3847_38741C.1
ttttaaggaaaaattaattatttttcattttatctgtcattaaaaaggaagaaaatcaggggggacaaaaaaaacaggggggatgcttccatatatacctccgcgtcctgcgatttcatatttctcagttccgcctgtgagtccgtccttttcctcatccactggccattttcccttccctgcattagaaataccactattcttcgcttatacattagctttttgctacat

SEQ ID NO: 75005 - DNA, 696 bp, Glycine max
  Clone ID: PAT_MRT3847_38742C.1
cctcgtggctcgagctcgagccgaatcggctcgagatttatctttcttttttccataaaactcacaaccaaatggagaaagcagaagaagaaagcgttgatttgggtgaaatatgtcttcggccccttcaagtctcagacctggatgatctgttggtgtggaccagtgatgaaaaggttgcggctttttgctcttgggatccttacagcagcaaagacgagggcattaacttcatccagaatatagcaagcaagtttctgtggtgcagagcaatatgcctcaaggatcgtgctattggctgtatttccctgtcctcgaattcagagcacgataaaagcaggagcagatccgcggaactagggtatgtgctgggttccaaatactggggcaaaggggttgccacggtggctgtgaaaaaagtggttaaggctgctttgtctgagttgccacacttggagaggatcgaagctcttgttgatgtgttcaatgttgggtctcagagagtgctggagaaagctggtttccaaaaggaggggattctcaggaagtatatcttccaaaagggaaaacccagagatatggtcatcttcagtcttctctctactgatcccaagccttcatttccttaatttgttttacacttcggaagaaatatgtcatttcaattataattattccaacgaatatttcttttac

SEQ ID NO: 75006 - DNA, 319 bp, Glycine max
  Clone ID: PAT_MRT3847_38743C.1
atatattctgttgaagccataagttaaattgggttgatatttccttttaattaccaaccaaaccaaaattaaattactggttttcttccataccttttttattaaagcctgactgaaaagttttttttgggccggttggtgaccatataataaacccccatggtcaaaaactgaatttccatgccttatggcaaatgccaattgataggaaatggcccgaatggaccatttttcaagatccatgccagaaacctttaaaggccagggaaattggtaaggggaattaccaccgatttaacctggaaggacctgggaaagg

SEQ ID NO: 75007 - DNA, 191 bp, Glycine max
  Clone ID: PAT_MRT3847_38744C.1
actctttttaccaaaaaaacatttgacatgtgggggtgttattatacaggtgcaactcaatttacaaaatttctacctcattacattagttctccatctaataccttatttatctacatactctctatcttttcttacctcacaaattaaatataagccctatttcacttaaattcattctttccatctta

SEQ ID NO: 75008 - DNA, 446 bp, Glycine max
  Clone ID: PAT_MRT3847_38745C.1
tttttttttttttttttttttttttttttttttttttttttttcccttttttttttatttttttttgaattgtcctttattgaatacttgttaaatttatataattgccccctacaaaaagaaaaaatcctggaatcacccaacagaaaaaaaagggaaaaaacaaaaaatttggttttttcctaagaaggatcccgagcaaccacaaccagcggggaaaaaaacccctctcctacctagcctgaaggcaaaagagaccaaagaaaaaaccccttgccacccgagcccaaaaagaaccccccaagcctcccgggggcaaacggggccccagcaaatccccggggagtcaaagcgaaagaaaaacaggggcgcatttttgccgaaagggggcgccccgccccccttgggggggcctccccaagggggaaaccgggcccctttcctcg

SEQ ID NO: 75009 - DNA, 326 bp, Glycine max
  Clone ID: PAT_MRT3847_38746C.1
tacagctgtgagaagacgacagaagggggacattgtgggggtgaattagccaaatcatctcgtggagaaaggggtcatatactacatcactttgtaatctaatcattgtgaatccaagactctgtttgaaacaaatgattgagagagatcatatttgaactccaaggaaggtctttacttcagacccatcagctttagaactatgccgtggtgggactagtctttttaagggtacccaaatatatggtggcaagctcacagttgagctaaaatctattttttataaaggaatccaaagcccccttatatatattatcctggtgaaa

SEQ ID NO: 75010 - DNA, 390 bp, Glycine max
  Clone ID: PAT_MRT3847_38747C.1
cgtgatatgtccgtccggaattattcccagctcactagcctgctgccggcctgtcgtccttttttttttctataactgacaacatgaaattttctagttgatacacgtgtatggatccacatcacatttgacttatgcgatgagatcttcatagaaatccacgtcgtcgaatacgacacccaatgatattgcacagtcggattggattgcacaaatgaaccatttgctgtgcactgtctaccatgtacataatcaacccctgctacttcggtgatgcagtacggggtgattacttcgatggacctagaggaagctcttgtccagactattgaccaatcctcttctcgagctccctcagatacgaaccagtcccaacttgtgaggagacaa

SEQ ID NO: 75011 - DNA, 801 bp, Glycine max
  Clone ID: PAT_MRT3847_38748C.1
cccgggtcgacccagcgtccgcactcactcactctcgagctcgacgccgcgacccactcaggcacagcgccacaaagatccactctccgccgcgagcccgcaacccactcacaaacacagctcgccgccgcgaccccgtgccactgcttttccgcgaccctgcgccgccgcgaacgctcaccctccatctttcctcaccgtgttattgtgactgaaagtgaacgattgctgctctcttttggtgttgtcattgaaagaatttggtagctgagaagtaaacatttaactggttctatttgaaaatttggctgtcgtcttcattatcaatctgtcacatttgcacgtgcaatatgcttattctgctttgcattctccacatcatcctgaatggcccaactctctgccttgggaataaggttgaggaccaaattttgaagttggagagagcttggagaggacagacaccagaaacaaacaaaactcacatctgggaaaaacccagaagaattgcaatggttctatttgaaaatttggctgtcgtcttcattatcaatctgtcacatttgcacgtgcaatatgcttattctgctttgcattctccacatcatcttgaatggcccaactctctgccttgggaataaggttgaggacaaaattttgaaagttggagaagagctttggagagaaactttgccattacaagttctttgcagggtatctttcctctggaaactgacatacactaactaaaaaataccagatacctgctagcttttccatacaactgaagagaaacaagtc

SEQ ID NO: 75012 - DNA, 364 bp, Glycine max
  Clone ID: PAT_MRT3847_38749C.1
actcgaacctcaattccgggctagacctacgctttcacttttatatatgaaaaaactcatactcatttcattcagccagataccatgtcccaaagaaaaagacattttacttattaacctattgaacttgcaaagggattcaaaaatttggtccaacccttaatcaatttaaaccctacaaggttcttaccactcattatgacattaactttattagtcaaaacttctagtttatcccatttaacatttgaaaaaagtcatattctgtaattacattttggtttcaaatctttcactttactcttgcttgatttctttaaaggttttatattttcacaaaagatttaactttaatttatattac

SEQ ID NO: 75013 - DNA, 494 bp, Glycine max
  Clone ID: PAT_MRT3847_3874C.1
gggggaaaaaaaaacccaaattttagtttttaaaaaagcaaaaggcccccctcccccaaaaaaaacaagccttattaaacccaaatgggtttaaaaaaaaaaaaaccaaaagggggccgccttcctccttagggggcccccccccttaaaaaaaagttttaaaaaaaaaaaaaggggtacaatttttttaccccaaattggaaagggctaccccccaaaatcaaaaaaggggaaattaacccctccaacccggggggaaaaaccggttttgggctttcccccccccccttttgaggggaacatcccaaccccttaaaacccggagggagcaggcttggagggcccctcaacaggccccctgggggaatcacccggggacttggtaagcggggccaacttaaccccaagtttgcccaggggaagggcccccccctttctataaagggggtggggaaaaaagaaaacctttttttggaactgggggggactttttt

SEQ ID NO: 75014 - DNA, 608 bp, Glycine max
  Clone ID: PAT_MRT3847_38750C.1
ttcccttttttttttttttttttttttttttttttttttttttttttttttttttttttttttttttttttttttttttttttttttttttttaaaaaagggaaacagggcccccccaaccccgggaaaaagttcccccgaaaacccaaccaaaaaggggggggcccaggatttttctttaggacctaaaccccccccccaaaaaagcaggcccgggggacccctaaatcccccccccccaaaaaaattaaacaacccccccccaaacaaaagcccacggggaaaaacgcccccggttttttccccgggggcccccccccccccgggggcccccccaaaacccggaaccccaacacaaaagggggggggggaaacgggttaaacccccctaaggttcccttaaaaaacttttttcccccaacccgggggggcaccccccccttccaggggttttttcaaaggaggccaaaatttccccttttcaaaaaaccccaactgggaaaggagctgggccctggcaccggacggggtcccccggggggacaccaagggtcaaagaagggggggagcaaaaaacccccccccccccccctggggctccccgggaa

SEQ ID NO: 75015 - DNA, 1965 bp, Glycine max
  Clone ID: PAT_MRT3847_38751C.1
aattcggctcgagggaaaaagagcaaaaccaatcacttcccttatttaagttattttttgtagcatagcttatagtagcaattgacatttattagcactgagtaacacgcccgaatatggcaccctcaatctccgacgaaatgccaagcaccaccacctctctcctccgccgcaaccggtggctcccctccagcatcaaactgaaaacaacccttttctcagaactctccggcgcggtgggtgacctaggcacctacatccccatagttctagccttatccttagtgaacaacttggacctcaccaccacactggtcttcactgctctctacaacatcgccaccggtctcctcttcggcctccccatgccggtccagcccatgaagtccatcgccgccgtcgccatctccgcagcgcccccccctcaccatcccccaaatctcggccgctggcctctccgtcgccgccgtgctcctcctcctcggtgccaccggcctcatgtccgtcctctaccgctacctccccctccccgtcgtccgcggcgtccaactctcccaaggcctctccttcgccttctccgccgtcaaatacattcgctacgaccaagacctcgccaaatcaaaatccggtcccccccgcccctggctagcagtcgacggcgtcgccgtcgccctcgccgccgtcctcttcctcgtcctcaccaccggcgccggcgacgagccacctccaccaccaccacaacaacaagaagaagaaatcgacgatcgccgtgaaaaagttcggcggaggttgagggttttgtctacgattccggcggcgctaatagtgtttttgttcggcttagtgttgtgttttattcgtgacccttcgattttcggagatcttaggtttgggccttcgaggatttctttgattaagattacatgggaggatttgaagattgggtttgtcagcgccgcaattccgcaaataccgttatccgttttgaattccgttatcgcggtatgtaagctgtccggggatttgtttcccgaacgtgaggcttcggcgatgcatgtttcggtgagtgtggggcttatgaattttgtagggtgttggttcggagccatgccttgttgccacggggctggtggtttggcgggacagtacaggttcgggggtaggagtggtgcttcggtggtgttccttgggattgcaaagttggtgcttgctttggtgtttggaaactctcttggcagaattttgggtcagtttcctattgggattctgggagtgcttttgttgtttgcgggaattgagttggctatggctgctaaggatatgaacactaaacaagagtcgtttgttatgcttgtttgtgcggctgtttctctcactggatcaagtgctgccttggggttctttgttggcattgtgctttacttgctcttgaaattgagggaggttgaatgtagagggtttggcttttgtggatcaaaccacaccaagtcttctcttgaggacgaacaagctagcttgattgcctagacaacaatttgattcacattttgcaaattgaagtagcttgcttaatgtactactactatatatgtgcaattatttgcaaattggctttggtccagaaaatgatcaccaatgttgtgatcatgtgggaaatcttgtgtgatatgtattagtgtaatgcttcaaaaatagagtgaacaatatatgtgtagttaactagttatagatattggatagagttcttcatccatttgaataaaggacttttgccgaactacaaggtaatggattgttggaaacatccgaaggtggttgaagatacttttaggacttcatagtctatatgtaattcagtgttttggattttggatgtactcgctttaaggatgctctctctgaactctctagctcaaagggattgttgtttgctcattacttaattaaaaaatttgagattcaatt

SEQ ID NO: 75016 - DNA, 483 bp, Glycine max
  Clone ID: PAT_MRT3847_38752C.1
tcgtgtttgcgtggtgatgaactgccagaggggcagagggtggaccaatgggagccggtgttatgtgattctgttaagacaccattagaggtgtttgaggaattgcaagtggagggatatcttgctgtttatgagcgtgttgctataactgatgaaaaatcaccaaaggaattggattttgatattctgttgctgatgaactatggcttaactatccaagactcaagggttgtattatttgggactatacctattaacgtagaaaagtccatactcttcattttgttatttgaggttaataaaaattatcaagctgatgtaaatactgagataggttgtaattgctaaatggggagtgggacaactacagctggaatggatattgcaactttggtatacctgaatcgaattgcgggctctggattttcaagaagcaattaaatcgggagaatttttttatagtatgaccaatgttgctgatca

SEQ ID NO: 75017 - DNA, 239 bp, Glycine max
  Clone ID: PAT_MRT3847_38753C.1
cactgtggccgcgcctgccctttttttttttttttttttttttgagtttttttttacttggtggggggggggaagaactttgcttggagacttaactaaacattaccatattacggttaatatccgggtatatggttggcccaccaagccaaaccctgctaatcagaagggggtcatattcttatacccaaaaaaaaggggcctaagtgagggcaaaaaacaccttttctagtcacttt

SEQ ID NO: 75018 - DNA, 127 bp, Glycine max
  Clone ID: PAT_MRT3847_38754C.1
ctggtacagagctccaacgctacttaatacacttaaccagattattaagcccaagaatccctctgacaagcccctcagacttccgcttcagaatatatacaaaattaaagatgtgagaactaggccg

SEQ ID NO: 75019 - DNA, 236 bp, Glycine max
  Clone ID: PAT_MRT3847_38755C.1
cctagctacataataggatgtgttgagtactttaaaacattttcagatactcaaacatatgtcatagcaaatcttatttaccaacttaacgctatagatataaggagaattccacattatggttgagtatacattattaatagaatggtaaatttaaattgtcatatattactgatgtgagaattttttttttcatgttacctttttaaaagcaaaagtcttgattttttcatttg

SEQ ID NO: 75020 - DNA, 1715 bp, Glycine max
  Clone ID: PAT_MRT3847_38756C.1
catgtaagtccggggccctcaaggatctccgggctgtttttacattctctcccaagcagcggcttgctcctgaccgttcccctggtgctccggagatcgaacctacacaaccggctgttcagcagtggagtcaggctgattgctggatgcagttgtatgaccgatggtcctctgttgatgatattggttctttggctgttgtacaccagatgttagcaaatgacccggggaaaagtcttttacattttcggcaatctctccttctgctacggttgaattgtccaaagtctgcaatgcgtagtttgcggctggctagaaattattctacttctgatcatgaaaggcttgtctatgaaggatggatactgtatgacactggccatcgtgaagaagcattagcaaaggctgaggaatctatttctattcaaagatcatttgaagcttactttctcaaagcttatgcattagctgactcaaatcttgattcagagtcttcaaagtatgtgattagtctcttggaggaagctcttagatgcccttcagatggtcttcggaaaggacaagcactgaataatttagggagtgtctacgtagactgtgataaactggaccttgctgctgactgctacatgaatgcactcaacatcaagcatactcgagcacatcaggggttggcacgtgtatatcatcttaaaaatcaccgcaaagcagcatatgatgagatgacaaagctaatagaaaaggcacggggtaatgcatcagcttatgagaagcgttcagaatattgtgaccgtgacatggcaaagagtgatcttggtatggcatcacaattggatcctctaaggacttatccttacagatacagggcagcagttttaatggatgatcataaggaagttgaggcaatagaagagctttcaagagccattgattttaagccagatctgcaactattacatcttcgagcggcattttacgactcaatcggtgattttgtcttcgcagtccgggactgtgaagcagccctttgtcttgatcctaatcataatgagattcttgatctttgtaataaagcacgggagcatattcgagaaccgaagtgacggaatcagatatttaaaaaaaaaaaatcatggtttcctagtgttccctattgggacaagcctattcttgccaacctgtactttttctactcgtgaaggtagtaatcatcaatgtcattcacctgttgttagattgactccagaagcggcatggtctacatctttcagctggccttccggagagtggaaccacagaaaagggaaaagaaaaattagaaagctcatttggattgaaaccaaagaggaagtagagaaggatagcttgtaaatatatgtaatgacttatgtttttgtcagagaatggtcaagtagtgcaaacaactgctgctgctatgctccagtatgccacaccagcaaattggtgatgagttactagttagacaaaacatgtacatgaaaaaaccaatttgttatgtaagtcccaagatttagataactaccattatatttttgtctgagcaattggccaattcacattgtgttataacattctccacttttctctgttgtataaacacaattttccctgacgaccctttgaacatatattgatgatgagttatccttggagaagctatacccataaatagttatataggttttcgtctgctt

SEQ ID NO: 75021 - DNA, 418 bp, Glycine max
  unsure (1)..(418): unsure at all n locations
  Clone ID: PAT_MRT3847_38757C.1
acgagatttgtcaatttttattctacttgctcatgtagtttgatatgaacctagttgatgtgtccgatgtggattgttaacttgggctgagcttaggtgagtgttgaccgtggtgtgctctaagcaaacctagattcaaggtctttggagttcagcttaccctctggcaaggttgagacaccatgggggatgggtgtgtacctgcaaaaaagacactcanactctcantcattaaggaatctaccancgtcaatataaaatcccggtcaacacccaccggagttcaattcaagtcaatagttcaccttgaacacgtcaattangtccagttcagacaaatcataatcaatcttattcatattagttaattagattaattttcattcaaaattttccacctactcaacttattactatt

SEQ ID NO: 75022 - DNA, 481 bp, Glycine max
  Clone ID: PAT_MRT3847_38758C.1
gtgctttttcactttatccatcataaccacccaatcctagagatatttttcctcgcacttttatcccttcctgcctcatctgccgtcttcctctttcctggggaccaggcgaggaatggcatcaaatcgatgcttctccaaggggtgcagcgtgtacttcggccgtttagtgttgatcccttctgggctcccactcctggaaatccctgtacttgccttacagtgcagccaacacttgacaatcaatattcccagtcaaagccaagcttcagctccacaaatcaacccagtttctcaaagccacaccatcaggaaaatcaaacatcttactctgggttggttgatagcagagaagataagtctcaagaagaaacacctgcaataatctctgagctctttgaaggttttctaacaattggaactcttggtgcagaaacagtcaccaatgaaccaggaacaccaacatttgctatgccttcag

SEQ ID NO: 75023 - DNA, 313 bp, Glycine max
  Clone ID: PAT_MRT3847_38759C.1
cccaaaacaaatatgagaactctgaggttgaagtccaaaatcgtggtgttttttactttctcggtaagaaaaaggatgaataatacaagcctcatcctcaagaggaggtcatcgccaccgagtttcaaaaagtcactgtctcataccaatgatagaacaagcacagcctcttagaaaaacttcacctatctgacagcagctctatctcttcaaattaggaggaatgataagattgatacaaaatgaataacaataataatgaaaagaaaagccttaaagacaacatcgatcagaaaataaaaggttatcatca

SEQ ID NO: 75024 - DNA, 389 bp, Glycine max
  Clone ID: PAT_MRT3847_3875C.1
ttgggggggggggggggggaggtggggggggggggggagagagcaagaagatcggaggactacaatcccattaccggaataaaccaacatgcatcccgacaaagtcaacccacaatacgaattaccgacatagtgaaccaaatgctaacggctataccctgagaaagttcgattagctgcacgcagatatagccaaagcccgggtataccatgtacaaatcaatacagtatctgggtcacaaccagcctcattgtgcacgtcgcattccgcgatgtgtaataaacctcccccccgaaaatccatgaacatttatgtgcgaattgcttgttgataatgagcttacatcgcatttacagatcgttgctgaacaccaagcaaatgctatacg

SEQ ID NO: 75025 - DNA, 516 bp, Glycine max
  unsure (1)..(516): unsure at all n locations
  Clone ID: PAT_MRT3847_38760C.1
atcttcgtctactcctggcttcgtctgtcactctgtttctcccagcggcaacaaacaaaacaaagctaactccttacttctttcactaatccaacgaacaaacaaacaaacacctctctctctctctctctctctctctctctctgcttctgcttctctctctagggtttggagtttcgacaccatgacgagggagaagcgttctgcgccataattctagtagagtttttgctctttctccatgccaattccattcaccgcgaacgtgaagaaagaaaaggaaagttgaaaagagaaagttcagatgacaaacctgtgtaagtatcacagtcacctggacatgatcagttatttcatactaagatccttaaatcatatgatagaagtaagcttcctccaggtaaggatttctntccctggtcaactcgcttcctccaaagaagcttcatatttcgttccaacaatattttcaaataatgctattgtttgcagaactgggaaattcagatagctctt

SEQ ID NO: 75026 - DNA, 309 bp, Glycine max
  Clone ID: PAT_MRT3847_38761C.1
agatagcaatggcaaattttcaaaccgaaaaatttggtacatgaaataacacacactatgcggaggttccacgtggaaaataattgttcaaaatacaaagcaaactcctaatgcgactcctgaaaaaaaaattggacactttaaatagtgatagttctgtcaagcacaacactttcagaggagggaaaaaacttttacacttttgttactgcaatttgaccttcaaatatagcagaacatctttagtttctttatccaacacaggttttcgaatgcttctgagaggattcccattaatttttagtgcct

SEQ ID NO: 75027 - DNA, 381 bp, Glycine max
  Clone ID: PAT_MRT3847_38762C.1
cggggctcgtggacggccggaataatatccggcgggacgacgagctcagtacggcggcggccgcccttttttttttttttttttttttttttttttttgtttttttttttttttttttgtggtttttttttttttttttttaaaaagggcaagaaacgtaactttttgaaccctcaaattcggtatgcccttaaagggccctcctaatgaactccagggcccttttttacatgggagctttttgccgtgggtaacttggggggtcgctctcatttaaaagaaatattttttaccgtctaagggaagggattatgtgatcgacttcgcctttttaaggctccaaaaggggaactggtttcggcaggggtacgaaatttttgg

SEQ ID NO: 75028 - DNA, 293 bp, Glycine max
  Clone ID: PAT_MRT3847_38763C.1
gtgtctggtttttttttttttgtttccgttttttttttttattttctttttttacttttttttggccgaaaaaccgggggaaaaggggcacgcaaaaatccctgtttacccaaacccaaaactttttaaaccctggggcgggccccctggaagggaatcccctgcccctgaccctaaaacccatggggaaagggtgccccccttccattccaaaccaaagggggattttccctttgggggcccagttaataaccttggggggtccctttaaaccccccatgggaacggaaggg

SEQ ID NO: 75029 - DNA, 343 bp, Glycine max
  Clone ID: PAT_MRT3847_38764C.1
ggggctctcttttccgcgaatccaatacctctcccaacccctccctctctctaggatgatatctctctcttccgcattccaccgttcgctctccgcgaagacggaactacgcgggttttccatgactgcgcgaacatcttccgtcactctcccgacaaaatcacgatacgctatcctcttccccctctccgctcattcgcattctccgatgctttcttccgtcccggattttgatacgttcgaaagcggctaagggtattgataggttcgcgatttcggtggagaaagagagggacggagatagatagatagagagagggagaaagagttcggtagggttttt

SEQ ID NO: 75030 - DNA, 459 bp, Glycine max
  Clone ID: PAT_MRT3847_38765C.1
attttcccacaaagtcaaaggtccttcaggaaatgtttcctgtcctgtttacattggttaagagcacagaaccctttttggatgagtattacttgcctgatatggatgaaaccctaagggaagctggttttgggaaaataacatcaatccttacggaccccaaacacgtgacaattactgcaacagtgccttaatgaaacatcccattttgaaattattttatttttattttacttgggacatgaacatctttttgggtttggcttcaaactagtcagtccgtggttaatgtatgtccaataaaaaagcgtgtcaaaaattgattaaattatgtatccccgtgccccgatcttttattattagttattggttttgtaaattatcccaagatttggtgcaccaataattaaacatggcaatggggtgggataaaaatgaatattattttttttccaaccc

SEQ ID NO: 75031 - DNA, 340 bp, Glycine max
  Clone ID: PAT_MRT3847_38766C.1
ctaaatccaaaactcttcagtgcctatttgattcaaacttacgtttgactgagaccaatctagtacatacacaaaggcccatttccaggggagttcttattgaggggcataaatagctcactccatcatctgaaaagcgggagaaagaattctactatcagatccgagaaaataccttgagcctccttgatcaaagattaaacatccctttttaagtaaatgtttctttccactgagttatgtgaaaacctacaaagattattttcgtctcaggggactaaggtcatcctttctaggatagcatgatcatcacaatgatcagagcacatgtggattgaga

SEQ ID NO: 75032 - DNA, 550 bp, Glycine max
  Clone ID: PAT_MRT3847_38767C.1
ggggggaatcttgatacagaccatgcctgagaacgtgtgtaaaacttgattgcaacgagggtattgtgaggtgatatgtccatgcattggggagaccctttgtgtgggagggctcttgatagaggaggagcatacggctgagcaccatgcgtgaataagtacaaactgtatcaccatggggaacatggttgcgagtacataggagaccttattgggggacactgctctgtgcagtgccatgacgagcgcaggccacattacaaagaggggcttcgtagacaaatgtaaggacaatgatcatggtgagggcgtgtgcctacgagggcgagaagaagcaagaaagattataaaaggagagaacatgggcatgggcatggacatgacagcgggaccttcagtagacagtgattaaactgctggatcacctatatatttaaaaggtttatgggaccatagtagcgagggctgggccttaatttctctctctctctctctctatctatgtctaatctgtctgtttgtcctttttacgtatatagcgatctattga

SEQ ID NO: 75033 - DNA, 215 bp, Glycine max
  Clone ID: PAT_MRT3847_38768C.1
aaccaacgggtggaaaaggcaaatgagggcttggttctggccaatgaaccactttaggccattggttttaggccattgaaactaacaacccctagcttgggggacctaaaccatctgattcttgcacccatgaggggggttacctgtggtctgaggtttccgggccaactgaactttgacctaaggaagctggctggaaatctgtttccatttcc

SEQ ID NO: 75034 - DNA, 242 bp, Glycine max
  unsure (1)..(242): unsure at all n locations
  Clone ID: PAT_MRT3847_38769C.1
gggcagtnctagagagagaaagagaaggatcatcagtgaaagattctncttctcctctattctaaattcctaatctaagcgaacgatgatgatgaagaattagaattcattttgacacttgtaccctaccncatttcaatggccgatcactacagantcttctcctcttgttcctccccganccctcggtganccttnngagatcganctcgaagccggtcnctccgaacanatncngtgct

SEQ ID NO: 75035 - DNA, 480 bp, Glycine max
  Clone ID: PAT_MRT3847_3876C.1
ttttagaattgtcacaattttcgtttgaaacgcatcgtctgttcatcacaccatggccaacggacaaacagcaaacgctgcgatggccatcgaccttggctccgagttcatgaagatggcattgatcaaaccgggcgtgcccatggagacggtgctgaaccgggactcgcaacgcataacgccaatggcactgaccatccgggacggggagcgcttactgggcgacgcggcgctgaaaaagttgcttgtccgtccgaagaacaccttcatattctttttggatttggtcggcaaacagtttgacgacccgacggtgactgcattccgcaacgaattcccatatttgcgcctcaaagcgcaccccaaacgaggcaccgttcaatttgagacggatgttggtgacatgtcgctggagtgtgcgttggccatgctgttgtggaatgcgcgtcaagatgggatgcatatgcttgacaacctgtg

SEQ ID NO: 75036 - DNA, 369 bp, Glycine max
  Clone ID: PAT_MRT3847_38770C.1
tgaatacacatgaccctggtgtgctccatgcggttttggtagcaggtttgtatccaagggttgggagatttctaacaaataaaggtggaaaaagggttatagttgaaacaacaagtggagataaagttcgcctgcacaatcattccacaaattttaagttgtcattcaagaaaaatttaggtaacactttaattgtgtacgatgagattactcgcggtgacgggggtatgaacataaggaactgcacagttgttggaccacttccacttttgctgctttcaactgagattgccgttgctccagcagaagaaaatgacgagggggatgtggatgatgcagtaggtagtgaagatgaagctggaagtgaag

SEQ ID NO: 75037 - DNA, 610 bp, Glycine max
  Clone ID: PAT_MRT3847_38771C.1
tgcaaaatcaggaagtgttgttgttgacatagccaagcctcaaaagccttccagcattaataagctgtctggtttgcaccgtagtgatggcacaacaaatggtccctcttcagaaaatattgaagatggtgaagtgattggcattatcactttggaagatgtatttgaagaacttctgcaagaagaaattgttgatgagacagatgaatatgtggatgttcataagagaatacgtgttgctgcagctgcagctgcttcctcagtggcccgagctccatcatcacgaaggttgactaaccagaagggagcaggaatccaaagtaagccagggcaagctcagaagaaatctgcagaggaaaatggattgaattctacaaagcaatgaggaaattcgtgttagcctgcaggataatgaacctttaagcaatgtgatgaaaaagaagccaaggagagttctttagtaatttgatcttatgatgtatcaaattaataactttcctttttggaagggcataaacggatgtattgctatttatataggtcatgaagccggtgcttcatgcatgctgcaattttatgttagataagtgtttgttagtttcatttaccc

SEQ ID NO: 75038 - DNA, 1966 bp, Glycine max
  Clone ID: PAT_MRT3847_38772C.1
aagaaacacatgctattttgagttgaattgaaaatcgagaaacggaatgatgaaataacgtagggagttggatctgtggtttggttgcgatgcggtgtgttgcgaatcactgtccaatcccgatcgcttgatccagacagtgaatcagaatcagaatcagaatcagaatcagagagaaacgatgagggcagtaagtgcgttaatggtggctcggatgttgacgcgggaccactcgctccctgtccttggcaacgaaagcatacccttcggatcggtgtggtggttcgcctatgccggcgtctcctgtttcctcgtcctcttcgctggcatcatgtccggtctcaccctcggactcatgtctctgggcctcgtggacctcgagatcctcgaacgcagtggttctcctgccgagaaaatgcaagctgcgattatacttcctgtggttaaaaaacaacaccagcttcttgtcaccctacttctctgtaatgctgttgccatggaggctctgccgttatacctagataaactattcaatcagtttgttgctatcattctctctgtaactttcgttctgtttttcggggaggttattccacaagcaatttgtagtagatatggtcttgctgtaggtgccaactttgcatggctagtgcggattttaatgattatctgttacccagtttcttatccagttggaaaggttctggatcacctattggggcataatgaggctttatttaggcgagctcagttaaaagcccttgtctccattcacggccaggaggccgggaaaggtggtgagcttacacatgatgaaacaacaattatcagtggagcactcgatttgactgaaaagactgctgaggaggctatgactcctattgaatcgacattttctttggatgttaattcaaagttggattgggaagcaatgggaaaagttcttgctcgcgggcacagccgagttcctgtctattctggaaatccaaggaatattattgggcttctactggtcaaaagtcttcttactgtacgaccagaaacagagacacctgtcagtgctgtatccatccggagaattccacgggttccatcagatatgcctctctatgatatactaaatgagttccaaaagggaagtagtcatatggctgctgttgttaaggctaggggaaaaggcaaagaaactccacaaatcattgatgaagagaaaaatgaagaaaacaaaagcattggtggggattcacagttgaccactccgttgctacagaagcaggatgcaaaatcaggaagtgttgttgttgacatagtcaagccttcaaagccttccagcattaataagctgtctgttttgcaacgtagtgatagcacaacaaatggtccctcttcagaaaatattgaagatggtgaagtgattggtattatcactttagaagatgtatttgaagaacttctgcaagaagaaattgttgatgagacagatgaatatgtggatgttcataagagaatacgtgttgctgcagctgcagctgcttcctcagtggcccgagctccatcatcgcgaaggttgactagccagaagggagcaggaatccaaagtaagccagggcaagctccaaagaaatctgcagaggaaaatggattgaactctacaaagcaataaggaaatgcatattagcctgtcgggataatgaacctttaatactgaggggctgtttatgtgtcagcaatatgatgaaaaagaagtcaaggagagttttttagtcatttgatctttatgatgtatcaaattaataactttccttttaggaagggcataaacggatgtattcctatttatataggttattaagccggtgccatgctgcaattttatgttagatccaaaatgtcttttgtttttaccgaaagaaaagtgtgtttgttagtttcttttaaccatttctctcaataatctattatttac

SEQ ID NO: 75039 - DNA, 550 bp, Glycine max
  Clone ID: PAT_MRT3847_38773C.1
atcccaagctgactgcgctgttcttatcattgattctaccactggtggttgtgaagctggttttaccaatgatggacagactcgtcaacatgctctgctttcattcacccttggtgtgaaacagatgattcgctgctgtaacaaaatggatgctcctactcccaaggattacaaggtcacatctgatgaaatagttaaggaagtctattactacttgtagaaagtaggatacagccctgactagattccttttgtctcctatcctctggttttgagggatacatcatgattgacaggtcctcaaaccttgactggtacaatggtcacagctctgcttgatgcacttgaccagatgaatgagcctatcaggccctctgacaagcccctcatgcttacactacatgatgtgtacacgataggacgtattgtagctgtgccagtgagacgtgatgagacctgtgtcttgacgcctgaaatggaggtgacttatgcacgaactggactgacatctgaaggccagtctgtggagatgcaccatgaatctcttaca

SEQ ID NO: 75040 - DNA, 995 bp, Glycine max
  unsure (1)..(995): unsure at all n locations
  Clone ID: PAT_MRT3847_38774C.1
cggnaattcccggngtcgacccgcctctccctcgagccgaatcggctcgaggtaaccgtttagattttacacttaattaataatacttaaatacttaatatacacacacgagagggacaacgcggagagattcagaaacagaacgactcggtatttctcttcctctaaagaccgagtccgactcggagggcgaagaaggcaaactcagtaacctttccttccttcactacacgcgagagagacctcagtgtctgagacgcaggcaacgtgcattttcccatacgaaggacaccatcacgccgttttcgcgtccccgtcgtttcggatccatcgtcatcgtttttgtcttcttcttccattagtttagttgagaatcaatcccaagacaccgagctggagcctccgcccgccaccgccgctgcctccaacggtcagatccggtaccgatcgccgtcctccgccgagctcttcgacggcagcagcaactctccgccctcgcacgccgccgaccagcactcgccggagttcgagtccagcaaaatgctgaagcgccccggccgccaggagtccctcgccgacaagatctaccggtttcgcgggacactgctcgtcgtcgcgatcccgctcctcctcatcacattcgtcctctacgtcatgccgtccagcacctccaacgagtccgtcggagactacgccctcgttaaccggaaaatgtcccccgaaaagaaatccgtcggctcctacgccgtcatcttcgacgccggcagctccggcagtcgcgtccacgtcttccatttcgatcacaacctagatctcgttcacattggcaaagatctcgaactttttgtccaggtcaaatcagtatgagtttattcgctctattactattattctaactgatctttcgatcgcaacgtaaaagcttttggattcacgcgaaattgaagcctcattgggtcgcaaattgaaccctggttattgctgttatttgcttg

SEQ ID NO: 75041 - DNA, 329 bp, Glycine max
  unsure (1)..(329): unsure at all n locations
  Clone ID: PAT_MRT3847_38775C.1
agccgcgacgaagccggaancgcncgagccancaaccgacacacgcancccccaaacgccgncgattttcaaagcaacgcgcctacaaanccaatccgcagtcccatcaagcagcactggagacgctccaagtgctgaagcctccctcccccttcgtcgtcggccagattcgctttcgctccccttcctccgccgaactccttgccaccgacgagctggatctcgaaaccaccaaaatgctgaaacgctccggccggcccccgtcgacgacgccggagtagttcaccgacaagatctaccacctccggggtgcgttactgatggtggcg

SEQ ID NO: 75042 - DNA, 647 bp, Glycine max
  Clone ID: PAT_MRT3847_38776C.1
cagtactttacaagtaagtctgttattagcttatagatatcattgtaaatcaaactatgtgctgttcaatgaaagaactggaccagaaacagaggaaaagattgtactgttatggtggtactttcaacacccaagaccgaatacaaaatgagttcgaggtctcaccaccctccacttctcaattttctctctaacccctaactaacttctctcaattctatttatagttataactaactacagttagttatcctagctgttataactaactaacaacactttagctcttccaaaaatatctcctaacatacacctttccccatctatcaataccccctcccctcaagatggaccttgttctcaaggtcaagttgaggaaaaacagcctgcatttcatcagcaagttcccaactatcttcatggtggggtaagcctcgccatttgatgagaacttcttttctgccatcttctcaagttatactctgcattactttctctggttggacttgcagttcccaattctcattcacggctgttggtaatagttgacgggagcaagtgggcttaaccgctttcttgagcagagatatatggaacaccaaatgcatcttgctaccctcttagagttccaatttataagcgacctc

SEQ ID NO: 75043 - DNA, 1853 bp, Glycine max
  Clone ID: PAT_MRT3847_38777C.1
cccacgcgtccgagtgaatgccccatctgcttagaagagttctatgtagggaatgaggtccgtggcctgccctgtgctcacaattttcatgttgaatgcattgatgagtggcttaggctcaatgtgaaatgtctttggtccctttgctcagcattcccaaaccttgatcttagtgcactgtccagtttccgttctgagcctgaacaattttctgccattgttgtgacaacagccagatatgtgagaggccaaccatctagtctaagttaccggctaagattgcagggtcttctgtgtccagtccgtgctgaaattgcaggaccagttggtgacatagataatgcgttgaaaaatgctcagaatggcgttgtatcaattgtgactcaaaatgcatcatcatctggagaccaagcctcttctgtcgaatgcatgcctgttactgtctgtcattcctctgcacaaagttaggctacattgtttctgaagtcctattatatttctaacccattcttgagaaggtgaagaatgcatatccatatctggcccttgtaaaaacgatgttttgatccacataaagaattgggtcagttccttgtcggggcagcttggagttgtaggacttggaaaatcaaagtataatttttggcttaactaacatagattagagctgcaaatgtgtagttgtctttacgtttaataataacttgtaaagagagtttgaaattccaattatatattgaattctgcttttgccttttaccttcctactcggggataaaatattttcatacttttttggaattggggtgagtagggttatacacacagcaagtgcttgtaggtattttgtaaaagtcagataaatcgatttgtgattgaatgagtaaataagataattttctccagcccagagagaagcagttgaagctttaattcaggaactcccatcgttcaggttaactgctgttcctactaattgcagtgaatgcctcatctgcttagaagaattccatgtaggaaatcaggtccgtggcctgccctgtgctcacaattttcatgttgaatgcattgatgagtggcttcggcttaatgtgaattgtcctcggtgccgttgctcagtatttcctaatcttgatctcagtgctctgtccaatatccgttctgagtctgaacagtcttctgccactgctgtgacaagcagagatatgacaggacaaacttctagtcagagttaccttctgagattacaggggcctctccacccagtttgtgttgactttgcagggccagctggtgagacagacaatgctttggaaaatgctgaaaatggtgttgtacctgttgtgactcaaaaatatgtcaaatagagatcaggccacttctggtgaacacatgcctgttggtctttcctcttcccaaaattagattgcttctcaactctgttatattcctaacccattcgtgagaagttgcaggttacatatcagtatccagccattgcctgaagctttatatatgatgtactttctaacatgaaaatttctggactgattcataaagaaatggatcagcttcctttttttctgagggatcttgtagaaataaagacttgaagggtgaaaatataccttttttttacttcgctaagaatattatattgaatattttttcctacccttgtttttacttggggtgtttttcatgtcttgaaaggtgggtttgataacttgatacaacaacaaagcttcatcccattagacgaggtcgattacatgaatcacacgacaccattttgacacggttaaaacccaaagtttcagtatatcgaaataaaagtagacatttgtttttca

SEQ ID NO: 75044 - DNA, 213 bp, Glycine max
  Clone ID: PAT_MRT3847_38778C.1
tggcggaaggcgccgaatcttagaggggagtggatctgaatcgttttaccacttacataggacctctctttgtcactagaaaagatgtcaagttgttttacactcattcattgtgtctcatatagggatttctagtcagtattatttaagtgaaagtagattgattgatctacttcatgtgtcagaatattgtcttacctatgaacacatggt

SEQ ID NO: 75045 - DNA, 254 bp, Glycine max
  Clone ID: PAT_MRT3847_38779C.1
ggggcgggcagacaaccgtatgaccattcccgggcccatggaagggtcctaaaaacgatcctttacggccaaagaggagactactccaaagagaaactcacccgggccgtaaatcacgctttgatcacccgggcttgattcatccaccagacgtagggtccgggctccttaaaactcagggacccagagggacgagcctataaaaccccacgcctccgcggacccgggggcggacccctgggcggacccggggg

SEQ ID NO: 75046 - DNA, 164 bp, Glycine max
  Clone ID: PAT_MRT3847_3877C.1
ggctcgagctaaaattctttcttctctgatctagtgtctaactatctttgatgattttctaccgggaacagggccctttgtgaaagcagtgttcagctatactatccaatacgacgaagaggatacattccacacaacgcacttggtttcttgtattctggaac

SEQ ID NO: 75047 - DNA, 155 bp, Glycine max
  Clone ID: PAT_MRT3847_38780C.1
cgccgtttggagcagggtcctcagcctcaaccaccactccatttggtggaacgccctctgctcctacgacgccgtttggcgcagcttcctcaacggccacaacaacatccacgactctgttcggaggagcgtcttctgcttcagcgacgccgttt

SEQ ID NO: 75048 - DNA, 341 bp, Glycine max
  Clone ID: PAT_MRT3847_38781C.1
tctttttttgctttttttttttttttttgggtttttttttttcttgtttttgagcgcgaaaataaaaataaggggccccacttattcagctttctattagcgggggggttttcctttttttgaaaaaaaagcggggaattgaccaatcttggctccgcgggggaacatatcttggcgaggcgcctccccgtagagccctgggggttttaaatcacggggaaaggcgaactttctgggggagatctcaagaaagattatcttccacaggaggagccggcaaaatattctgaaagaagaaaagcccttctatctttttttccgtgggggcgtgcacccccctt

SEQ ID NO: 75049 - DNA, 1386 bp, Glycine max
  Clone ID: PAT_MRT3847_38782C.1
ccacgcgtccgggaatgggagaagtgtcagtagaagcccagtgagaggcaggaatgggagaaatgtcaatagaacccctgtgagaggcgggaatgggaaaagtgtcagtagaagccctgtgagaactcgttctcttaaaagtgtcagtagaagccctgtgagaactcgttctcttagaagtgtcagcaagagccctgtgagagctcgttctcaaagccaccggagcaggagttctcctagagcaccatcaggaaaaactatcagcagaagccctgtaagagtgttgagaaagagtataagccgcagtccagttagatcacctgcaagaagtttaagcagaagctctggctgggttccttcaaagaaaagcatcagccgaagcccagtcagagcacctagtagaagcattcgccgtagttattctagaagtcctagccctgttcgtaggacaaggacacctcgtgggagaagtgtgtcaaggagcgtatcacctgatgcttcaccaaagcgtatcagaaggggaagaggtttcagtgaaagatactcttatgcaagaaggtatagaaccccctcccggtctcctgtgttctgctgcgagaagacgacagaaggggaccgggacagatattctagttacagaaggttttcccctaggcgtttcaggagcccaccaccgcgtggaagaactcctccaaggtatcgaagcaggaggagcaggacaccatctgtttcacgcagtccacgatatcgagctcgacgatatagccgaagtaggagcccagttcgtagtaggagtccagttcgcagtcgttccccagttgatcgatcccgccccactcgtgtggagaggcgtgcatcttcttctcggagcaggagtccatccaaatcccggtctaggtctaggtccaggtcatccgtggaatctctaccaagagcaagtagagacagcaggtccaggtcatcgtccagaagcccagatggaaagaaaggcttggtctcatatggcgatggttctccatactaatgtgaaaggtgaaatatgtggtgctgagggctttgggtcacactgtaacctttaatgagttgcaggcttcaatttttgaacttcagcacctgcattgcttgatggaattcgtgaatgacacttgtttttcccctttagagacagcaatgacatgttgaaatattctagtcctagaataagttagacaataggcggtacttgtgacattaggatgcagccttagctgtgaagttgttgcggtatttgttggaatcgagactcatgttgttgctccagttatgtcttcgttggttaggacatgcgtttgagtttattgagtttaatttataaaatcaggtttagcttcgctagaccatttttat

SEQ ID NO: 75050 - DNA, 261 bp, Glycine max
  Clone ID: PAT_MRT3847_38783C.1
gagacagagcagcactcacattcacaacgaagggtttcctattcatcagacatggtggaaggcaatcaagagtcacgaactcggtggccctcaagttctgaagtgggaagatgtgggaaatgggagatccaaaagaaagcgaggtccggtgtgaggaacagagccattgggggttaatttcattgatgtctactttcgcaaagagtttacaaagccgcttcttttcgcttcactccaggtatggaagctgttgggggtgtg

SEQ ID NO: 75051 - DNA, 273 bp, Glycine max
  unsure (1)..(273): unsure at all n locations
  Clone ID: PAT_MRT3847_38784C.1
ctagtttcttacaagcctctactatactgcttcaccttctgctctagaaaattcagtgctgaaacatgggcttcggctactctctctgncagccaaaccagcccttcaggcaaatgggaaaggcttctctgaattctctggcctccgaagctcatcaggcttccttcccttttctagaaaatcttcagnggntttccattctgtcatngccttccagactntgcagttgncaagcagnggannanaaanggggggtgnnaaaganccaatgnt

SEQ ID NO: 75052 - DNA, 3201 bp, Glycine max
  unsure (1)..(3201): unsure at all n locations
  Clone ID: PAT_MRT3847_38785C.1
gggtccggaatacccgggtcgacccacgcgtccgcgactcgggtaagagcctagggttctttttctcttctgctctcactccttgcaaatctcgcgtaacgcatgcgtttcttcactcaatcggagcccagcactgatctatttggaactcttcgaggtctgtggttttactgttctaaattttgataaattaaggcaaagacgatgactaagaagaagaatcccctggtgtttatggatgtgtcgatcgatggggatcctgttgaaaggatggtttttgagcttttctatgatgttgctcccaagactgcagaaaactttcgtgcattatgtacaggagaaaaaggcatcagtccaaatactggaaaatcactgcactacaagggttctttcttccatcagatcataaaaggttccattgtgcagggtggagattttgtcaatcgaaatggaactgctggagaaagcatatatggttcgaagttcccagatgagtcacctaagctaaagcatgatgctaccggacttttatcaatggcaattgcagaccgtgacacactcggttcccatttcattatcactttgaaagctgatcatcatcttgataggaaacatgtagtctttgggaagcttgtgcaagggcataatgtattgaagaaaattgaagaattcggtgatgaagaagggcatccaactgtaactgttaaaatcattaattgtggtgaatatagcgaggatggaaagaaggtaaataaatcaaaaatgggaaagaataaaaaatcttcaaaagacagaaggaaaaggagaaaatactactcatctgaatccgggagctcttcagattctgatacagaatctttggaaactgatagtgattccgagtcagatatgtcctcatcatcttacatgagttcttccagtgatgacaggcgaaggaagagaaagagatctaagaaagataaatatagacgggaaaaaagaagagataaacgtcgtgacaagaggcgaaggaaaaaggataagagatcaaagcgtaaatcaaaaagggaatcgggcagtgactcagatagtgagagtaacagtgacaatagctctgaaggtgaaaatattggtgctcaacataaagggcttaagcgtaaagataattctcagaaaaatgctgaaacaaagtctcccttggttgcggagaaagatttgcctcctgcgcatcatgaaaaggaggaaatgggtatgctagaaaatgaggaaaaattctcaaaggaaaacggagagcgacgtagcaatggcattggaggagctgactatggatctgacagaagtgaagagaggcagcctgacgttatggatgatcattcaggcaaaactaggagtcgaagtgtgagtcctaagcgacccatcagtaagagtatgagtattagtcccaggaggagtgcgagattgagcaagagcccaagtgttactccaaaaaggagattgagcaagagcccaagtgttactccaaaaaggagattgagcaaaagtccaagtgttagaagccctcctccatcacagaggagtttgagcagaagtcccgccagaagcatcagcaggagtccaagcagaagcatcagtagaagcccagtgagaggcaggaatgggagaagtgtcagtagaagccctgtgagaggcaggaatgggagaagtgtcagtagaagccctgtgagagtcaggaatgggagaagtgtcagtagaagctcagtaagagtcaggaatgggagaagtgtcagtagaagcccagtaagagtcaggaatgggagaagtgtcagtagaagcccagtgagaggcaggaattggagaagtgtcagtagaagcccagtgagaggcaggaatggtagaagtgtcagtagaagccctgcgagaactcgttctcttagaagtgtcagcaagagccctgtaagatcccattctagaagtatccggagcaggagttctagtagagtgcgatcaggaaaaattatcagcaaaagccctgcacctgcaagaagtttaagcagaagctctggctgggttccttcaaagaaaagcatcatccgaagcccagtcagagcacctagttgaagcattcgccgtagttcttctagaagtcctagccctgttcgtaggacaaggacacctcgtgggcagaagtgtgtcaaggtgcgtatcacctgatgcttccacgtgggaggagtgtgtcaaggaagggatttccttatacttcaccaaagcgtatcaaaaggggaagaggtttcagtgaaagatactcttatgcaagaaggtatagaaccccctctcggtctcctgtgaggtcattccgctacaatggaagaaatgaccgggacagatattctacttacagaaggttttcccctaggcgtttcaggagcccaccaccacgtggaagaactcccccaaggtatcgaagcaggaggagcaggacgccatctgtttcacgcagtccacgatatcgagcccgacgatatagccgaagtaggagcccggttcgcagtcgttccctagttgatagatcccgcccctctcgtgtggagaggcatgcatcttcttctcggagcaggagtccatcaaaatcccggtctaggtccaggtcatccgtggagtctccgccaagagcaagtagagacagcaggtccaggtcatcgtccagaagccctgatggaaagcaaggcttggtctcatatggcgatggttctccatactaacgtgaaaggtgaaatatgtggtgcggagggctttgggttactgtaatcttcaatgagctgcaggcttcaatttttgaacttcaccacctgcattgcttgatggaattcgtgaatgacaatcgttttcccccctttatagacagcaatggcatgttgaaaacttgaaatattctagtcctagaataagttaagacaatagacggtacttatgacattaggatgcagccttggttgtgaagttgttgcggtatttgttggaatcggagactcggatgctgttgctctacttatgcttggttggttacgaccagcatttgagtttgaatttataaaatcaggtcgcttcgctagaccatttttaaaaaaaaaaaaaaaaaaaaaaaaaaaaaatttttttttttttttccccacccacccaggggaaangaaaaaaaaaaaacacaaaataacagtctctcaaaaa

SEQ ID NO: 75053 - DNA, 456 bp, Glycine max
  Clone ID: PAT_MRT3847_38786C.1
gtaaggaggaaagagtggagagacggagattggaaagggagagaagtggtaaattagtccgtgatccaaaagcgatatcatagatcatatctgcatactacggtcaatttggccatgaaattcatcaaattcccatctcagttttctagtcccaaagctcagtcctcatagtcattggcttccatgcaagatctgaccacagagaatttcacactcctcctttttacacttccctcacccctggctcttccaacccccttttctccagatcaccttatatatatattttttccctaacttgctggtagctggtacgttccacactaggcgtctctaagcccatttattcattcattagtccctgcctctcataatgcaattcctcagctggatgcaaaacaaaattggtggaaaacaagatatcagaaaaccaaacacatatacagctactagtaa

SEQ ID NO: 75054 - DNA, 358 bp, Glycine max
  Clone ID: PAT_MRT3847_38787C.1
taataataacaccctcttgtaagtcttggccattctattctattaaaagcaaccaccaaaaaaaataaaccttagctactacgaccacagcctttagtcatggccacaagttgctcctacatggtttccaccaaattatccatgctaggctggagtggaggaagaagaagagaagcgagaaaccggagagcattcttggtctcagctcaacaacaaagtgatgttcaggaagcagagagcgtgtaggtagtagaagaggagatggagcatgaacaagtgcaaacccaaacaccaaagccaaaaggaacatcaccaaggccagtggaaccttagttgaaagtgtagagtcagaacatgt

SEQ ID NO: 75055 - DNA, 637 bp, Glycine max
  Clone ID: PAT_MRT3847_38788C.1
aaatggttcgaggaagtaagctaagctagccctaacctaactctaaacatacatagcatcaccaacctatgtcttcttccttccaacaagttccaactcgaaacactcactcactcctctctttgctctcaactccacactctcactctgatcggtttcaatggcttcaccggcgtggttgccgcaggagtcgcagccaccagtgtctggtgaaacgcctcttcccatggcttcttccgctcatacaacttcttctactgggccgcaaccggcgtcgccattcgctcatggcatgcttcagaatgttaacgcttctgggagttcccagctgttatcgacgcatcccgcgattatatccaattctgcagtgaatcccatggttgttcaacctccaggtgtctcttcacatgccgctccttcattttcatataatattccccaaagtggtgccattttttctagcaaccagcagcatgcacaatctagcactctacttcatggatgccaactgccctgtcttttcctgtgcatccagtaatgcctactcaagggaatcctggtcctcctggattagcatcatctgcgataatatcctccaatcctgctgctccatccatacctgccttggctgctcccc

SEQ ID NO: 75056 - DNA, 340 bp, Glycine max
  Clone ID: PAT_MRT3847_38789C.1
gtagctcggatcggtcgagctcatggctcaccaagcgcttcgccaaacaaacaacacatgcactcttctggcctcttagaacaaacgtccaggaccttgcttgctataaaaaacaccacaactccttccgcactgcattgctacactcttttccgggctctcgacgggccaacagatggcctttacgaccgcttttacaaactcaccgcgctgcaacatattctgcgattcatatggttcttcactcctgtagacgagactccctggtttctggcttctcctggatctcctcctccgagtcgtaattccggaagcatccgtacatggcatgaaatgacca

SEQ ID NO: 75057 - DNA, 722 bp, Glycine max
  unsure (1)..(722): unsure at all n locations
  Clone ID: PAT_MRT3847_3878C.1
aaactttcatagctcagaattggccttcaatttatcccttgttggtgatccttgagcttgtctgaaattatcaccataccaaccctctagatcagggccataatcttggtcatttcaccaacagaaatatgcacctcccttggttagtcaaatatcaattagcatcaaccatcttcattatcattacccttaccaaagttacctgcttttatttcaatttccctaccttccaaaaagacaatgaatctgagttattgctgagcaagaattcacaaatatacttcgatgccatccaagtgaccccagatattcgtggtcctatacaagattattctggacgcgctttctacaaaaagccatacaaactttggaataaaaagaagaaccaaattgcttccttcaacaccacttttgtgctcaacatcaagcctgaaacaacccctggcggagaaggcttggcttttatcttaacttcagataccactctcccacaaaacagttcaggagagtgacttggtattgtaaatgctacttccaatggaacctcacaagctggaattctagcagtggagtttgacacaagaaagagtttctcacaagatggccctgacaaccatgttggcgtcaacataaacagcatcaactccatccaacaggttccactaatcaacacaggggtcaatgtttcatcangtataaatgtaacattcaaaattcagtac

SEQ ID NO: 75058 - DNA, 383 bp, Glycine max
  Clone ID: PAT_MRT3847_38790C.1
gagacttccatttggagcacgacaggaaatatacattttataatgcacttgaaacagactgagagacaaacacaatggctttgggtaaaacaaaactaatgtattcctatgctcaaaagcttctcgttgtttaaaatgatgggagacaattattgtacatacttacccttacatatgctaaaggagcattttcgaattctaacctataattatacttttaccaaggaacaactctatgactaaatatataaaaatccatatgggcccctgcaggaataaaaaaaattaaggaattccccatatcctatctctcctaatccatgaaatttacccaatgataaatttacagtcttgaaacacaaaagaggccaaagaattactca

SEQ ID NO: 75059 - DNA, 561 bp, Glycine max
  Clone ID: PAT_MRT3847_38791C.1
cactcctctctttgctctcaactccacactctcactctggttcgttatcattccctctctctctctgctctgttcatttcattccttaattgctttatatcgaatttcgcatccctatgtctgtcgccttataaattacgattcgcctttgccaaaattctcgttcgttgccgtgtttccgccatcgccgattgttctgaccgcagatcggtttcaatggcttcaccggcgtggctgccgcaggagtcacagccaccactgtctggtgaaacgcctcttcccatggcttattccgctcatacaactccttctactgctcatgcaaaattatttaacgcaaccgcgtttgtagctccggcaccggcaccgccattcgcttacggcatgcttcagaatgttaacgcttccggaagttctcaacagtcatcgacgcatcctgggatgaaatccaattctgcagtgaatcccatggttgttcaacctccaggtgtctctttacatgccgctccttcattttcatataatattccccaaagtggtgccattttttctagcaaccca

SEQ ID NO: 75060 - DNA, 249 bp, Glycine max
  Clone ID: PAT_MRT3847_38792C.1
tatgttcaatatcgtaggatagcttaatgaacaatgtaaggtactatgatgtgagcacggttcccattactggtgctgggacttgttttcctggcttcagtttctgtctcatgtggcattgcttactgggaaaaagagaccccaaacacaacaagtgtctccagatttgcaatagcgagagatactcgtacaggaactaagcatgccacgctcgttgcaacctcgttaaggtgtgtgaagaagtgtgtg

SEQ ID NO: 75061 - DNA, 399 bp, Glycine max
  Clone ID: PAT_MRT3847_38793C.1
aaaaaaatttacgctgataatataaaaccattaaacaatttggtttaagtggtactcaaaaccttattttgaatcaagaaatataccaaatataataatgaaatcatcaaaacttatttttaaccaaggtattataatgataataacttgagactaaatatgtattataatgatcgtcagtatttacgggaccaaaactaaaacttcaagggcgttgtttatagatatagacatacagcccatgagtaaacggggatccaaaatattaaaaatatagcttaatagtttttttttctatattatttccacaaatagtttgaaattttatcttgttttatgtcctttttatccaaataaatgtaataattagaaaaatctcttgggtattttttttgttac

SEQ ID NO: 75062 - DNA, 751 bp, Glycine max
  unsure (1)..(751): unsure at all n locations
  Clone ID: PAT_MRT3847_38794C.1
ggccggaataacccgntcgacccacgcgtccgcatgattatactataaggtgattttaaaattattctggtgaacccaagacaacctctggccgaaagccaagtaaactgaaatcatttaaagggttgacctttcccaaaagacgttctgccataggcacaaacttagggatcaaatggttaaacatctgagatccccgagtttagggaaagtatcagtaaatctatcatgtttatacatcactaaataagagaatggctgaagtgaagagtgaatgcgatacgaaagcctaataagtaataaatatgacatccccactctcaatctctcataccataatgcaaacaaagcatctattaaactaaaccaactaaacccaccaaaagcgttaaatagaaaaaaatagaagcagtaatagtagtaactagtaattaacaagatagataccagagccagcagtgccggcgacgacagcttgcatatacctctccggcaactcgccggcgcagcccacaatggagccctgcaccaacgcatcggccacggcggaaagtccaacggcggcggcggtgacgtagaagccgctatacaagccgaccctacccttgagataaaaggcgtcgaggagggggatgatgaggagagaaacgacgaagagggcgaggccaacgttgatcctcacataggcgttggacttgtggctgtagaagaatatgagggagatccccacgaggccgatcacatgtaaacg

SEQ ID NO: 75063 - DNA, 362 bp, Glycine max
  unsure (1)..(362): unsure at all n locations
  Clone ID: PAT_MRT3847_38795C.1
ttttatcnngggaacaagggcgcatannnnattaaagccacgaaagagaaaacaacatagtgaagtctcttacattacttgttgacacacatcttaaacaacataaagttaagcttgtgcccctatttgaacgcatcttattacatatagatagatcggagcctgcttaattgttgagaggttaaggaactacttaatgtatttcaggggtttaggaagcttaaaggtcctgcttttgcctttgtgtccttctaggagatcgctccatttttctccattgatcccaacattgttgtatccctgtcttataaattttttctctcgctgcctttttttttttattcttgcattttaagtggatt

SEQ ID NO: 75064 - DNA, 155 bp, Glycine max
  Clone ID: PAT_MRT3847_38796C.1
aattgaaaagagaagtggtttgaacgttgtatgccaaagcagaaagagacgtgtttcatctgaaggaattaaaacgatgacctccttatgacaaacggagcctatttgagatactaaaacagcctacgaattgtactaagggcacaatcaggtta

SEQ ID NO: 75065 - DNA, 349 bp, Glycine max
  Clone ID: PAT_MRT3847_38798C.1
agcccaaggaagactacaaacacactctaaggactaccctccctgctcaaataagcccatttcctgccttgctgaagatttataaactggacattgctgaggaatttccaggcaggctcatctataatttgcaaaatggtgaatgaatacaaggaaattgttcttataaaaggattagaggatatgaaggactatgcatttagaaccatcaagtccttactaagaaaagaactaaacctaactaaaaaaatgcaagatgattatgacaggattcaactggctgacctgttggaggacaagttcccccaagatgctggacttaagcaaatgatagaagtgtgtgagagca

SEQ ID NO: 75066 - DNA, 348 bp, Glycine max
  Clone ID: PAT_MRT3847_38799C.1
tcgcttacgcgcggttttacattataatatatcagggtgtgtttgatacttgctgtgcttggttgctctgattcattcttaagccaacagggtgcagcgttcttgagcttattagccaattggtgcaccgccgctctgactggcgcgcgctgcaccaatatgctgataaccatttggcctatcaaaggttagccatcgatgatccagcttatggcgatcaactcctatataatgaagacaacacatgtgtggctacagtgcatggagagatccacacatatgaagaactcaggtgacagtagactaatcacacctttcgtacaggaagtgattgagatgctattgctc

SEQ ID NO: 75067 - DNA, 412 bp, Glycine max
  Clone ID: PAT_MRT3847_3879C.1
tttattttcgcgagggggacttcgcgtcagatacaagcgtcttctgtgtctttttcagttctctgtccaatttcaagttcaagctggcgaaatctgggattagtgctcccactctcctatctggtataggacttagtgggtagactgttctatttctctcctttctttgactctcttcttctgactgatccgcattgccgttcaaagcggtcttatgcgaaacacacttgggcgtgggcgcaaatgtctgcttccgtaaatctctctggagacaacaggttcactgagacaacacattttaattgcacagatttggacatcgtggctgtttattatacaatagcaactcaatttagaaaacttgtaccacattcccataagtggcatctgtataccttgctgatctacattc

SEQ ID NO: 75068 - DNA, 704 bp, Glycine max
  Clone ID: PAT_MRT3847_387C.1
ctaacactatagtactactctttttttcttgcctgaagtgaaggaataatggaaagatttcatgaggaagaaattgaagagccagtgagtccaacagggcaatacttgacaagctcttcactaagtgtgtacattcttggtgtcttggaaagtgaggttcccattgatgactctcaaaccgtgccacttcttcagaatctcttccttcccatcaactcacgtttctcctccatcatgattagggacaaaaatggggagaagaagtggaagaaagttgaagttaagctggaggaccatatcaaagttcctacatttcccaatggcaagtcatccaacttgttcttatatgatgaataccttgatgagtacatgtccacaatagctgtggaacatttaccacaaaataggccactatgggaacttcacattataaaatacccaacaagcaatgctaagggtaccttggtgttcaaactccaccatgcccttggggatggtttttctctcatgggtgcccttctttcatgcatgcaaagagctgacaacacctctcttcccttcacactcccatcaagccaaaggcccaaagcatcatcaatttccaacaccaaagggtttttcaagaaattgccctccattttcttccaaactatatccgaatttggatggagtttcttgaaaagtaagttgattgaagatgatca

SEQ ID NO: 75069 - DNA, 250 bp, Glycine max
  Clone ID: PAT_MRT3847_38800C.1
tgcatgcgtactctaatattgggctcaggacctgtgtttgcactgctggaatgtcaaggatgtgcatcatctcatttcaaggtctgaatttgtcaccacttaaatccgaacttgttctctgtacgatcgtctaattctatatgggtaatcgagagctatcccatctacatcgagatacgggacactagacaaacccgactatcttcagagtcacctgcattgaaagagtgtcctagttgtaactaacata

SEQ ID NO: 75070 - DNA, 210 bp, Glycine max
  Clone ID: PAT_MRT3847_38801C.1
ggtatctaatttgtcattgtgaaattagaatgaaaatgcatggtctcgagttccggtgtaaactcaatttgtatacttggaagctgtgacagatctacattgataaggacacatgtctccactcaatttcaaactttttactattatagtaataaattgtctctaaaaaaaagcattatattgtaaaaaaaaaaaaaaaaaaaaaaaaaa

SEQ ID NO: 75071 - DNA, 436 bp, Glycine max
  Clone ID: PAT_MRT3847_38802C.1
ctgtaacttcaaccatctcttttctctcacatacagcatgcattccccattgaggctcctcatcctattcctaattaagagttgttgtgacactgcccagcttggtcatcatccagctatatttgcttcaaccgatatcagttttcactccacatttggtacattgaaaaagtttgtttgagagtgttgaagcacactgcaatttatgagaagaaaacagaagagtaatgccttccatgagaaaggaagtgtggacatgaaatatctgtaatccccatcatggtgttttagattttagagtatgcacaaaattttattacattggactggtgggaagagtacagaggcgtgtgaacaagaggacagaaaaaattaatgaaagggtgatgttgacatgattgggcagaagagattaaccagggcacaaaaaacaact

SEQ ID NO: 75072 - DNA, 641 bp, Glycine max
  unsure (1)..(641): unsure at all n locations
  Clone ID: PAT_MRT3847_38803C.1
actgagcatcgtctagctatctcgatcgaactgtccaaggtccatgtcaccaagccaattttacgtggccatacctaaccgccaacatggtaccaccacaggtgcgtaacgtaccaaacccaacggtagcaggacgcgtggccagtacatgtggccgcgtggagaaccagacggggccaccgtggtgcccacgtgcggtagcccaccaagcttaagcttgttaaccatagacgtaaaccgtaaaaccccaaccattagacctgtaccgaaaggggtacaaaaaaagccaatantggcggtagtaatgcgccatggaaaggtatagaggtggacaaaaaacaaagcacaacaaacacaagttatcgtggagcatggaaaacggaaccgtaagtaaatatggataatacaaaacacaacaccacgctgattacgatatgtgggatggggcaggaaaagggaggcgaaaatgattaaagtagcgacggacaatgtaggaacgaaggacgacccatgaataaaaggagagaagggtctagaaaggggacgttagacgacacacacaagcgcggtaaaaacaagagcgtaacacacgagcagctgactacggggcacaaaagacgaagttggggtctggcgatata

SEQ ID NO: 75073 - DNA, 719 bp, Glycine max
  Clone ID: PAT_MRT3847_38804C.1
tgggtccaacaaatcaataccttccaaaaatagtttcagtgtttgctgaggttttatgtgctggtaaggaccttgcaacagaacagacagctggtcgtatggttaatttactcagacagctccagcaaactttaccaccctctacacttgcttctacttggtcatctttgcagccccagcaacagcttgcattgcaatctatcctttcttcatagttttcattgctttgctgcatatccatcatttcttcatagcatctggcttggcagttggtgtcttgctctttttgggaacaagctttttccagtttggtggtctccatatttgttacccattctttttaccatacggtggtttccatcattcattcttgcatggtgttctatagcaacatggcttcagttttgagattgcagagtcaattgtgattggaaagggaactttctgtagaatgtgtatattatgagtgttaatagtgcgattgagtccaaaagaggaggttagggaattgtggcgtgggagcttctcgttgtattcctctattgttttttcttaccatattgcgtgagaatatagggttgtctgtggggcaattcttgcagttttggccgattgtattggttttatttccttatcagtatgaagttgtaccatatgaaatttgaatgctatttattaacttttcagacaattgtttcttcaaacaacaatttgttctt

SEQ ID NO: 75074 - DNA, 3095 bp, Glycine max
  Clone ID: PAT_MRT3847_38805C.1
ccacgcgtccgggtcctgacttccttccctgaccaacacccccgtgtaaggtgggcagctattaatgcaattgggcagctgtctactgatttgggtcctgatttgcaagttaaatatcatcaaggagtgttgccagcactagctggtgccatggatgattttcagaaccctcgtgtgcaggcacatgctgcttcagcagttctcaacttcagcgagaactgcacacctgatatcttaacgccatacttggatggaatagttagcaaactacttgtacttcttcagaatggtaagcagatggtgcaagaaggtgccttaactgctttggcatcagttgctgattcttctcaggaacacttccaaaaatattatgatgctgtaatgccatatctgaaagctatattggttaatgcaaccgacaagtctaaccgtatgcttcgtgctaagtccatggagtgtataagtttagttggaatggctgttgggaaggagaagtttagggctgatgctaagcaggttatggaagttcttatgtcccttcaagtatctcaaatggagacagatgatccaacaacaagttacatgctacaggcatgggctagactctgcaaatgtctgggacaagattttcttccttacatggagtttgtcatgcctccactacttcaatctgctgcacttaagcccgatgtaaccattacatcagcagattcagacaatgatattgaggattctgatgatgaaagtatggagactattactcttggggacaagcgaattggaatcaagactagtgttctagaggaaaaagctacagcatgtaacatgctttgttgctatgctgatgagctgaaggaaggattctttccatggattgatcaggttgctggaactttagttccactccttaaattttatttccacgaggagggtagaaaagcagctgtttcagcaatgccggagctattacgatctgcaaaattagctattgagaagggacaatctcaagggcgggacgtaacctatttgaaatttttgactgacagtatcatcccagctttggtggaagcattgcacaaggaacctgacacagagatttgtgcaagcatgttggattcattaaatgaatgcttacagatatctggaatgcttttggacgaaagccaggtcagatccatcgtggatgagataaaacaggtgatcacagctagttcaagtagaaaacgagagagagcagagaggacccaagctgaagattttgatgctgaagagggggacctgattaaagaggaaaatgaacaagaggaagaagtttttgatcaagtgggtgagatattaggaactttaatcaaaaccttcaaagccaacttcttgcctttctttgatgaactatcatcatatctgacacctatgtggggaagggacaagactcctgaagagagaagaattgcaatttgtatttttgatgatgttgcagagcagtgtcgtgaagctgctattaagtattatgatacctatctcccattcctgttggaggcttgtaatgatgagactcctgatgtcagacaggcagctgtgtatggtctcggtgtttgtgcagagtttggtggatctgtgttcaaacctctggttggagaggctcttttgaggttaaatgctgtgatccagcatcctaatgctcttcattcagataatgtaatggcatatgacaatgccgtttccgctctgggaaaaatttgccaatttcatcgtgacagtattgattctgcccaggtagttcctgcatggctaaactgtttgccaatcaaaggtgatttgattgaggccaaagttgtgcatgatcaactttgttcaatggctgagaggtctgacagtgagctgttgggcccaaacaatcagtaccttccaaaaatagtttcagtgtttgctgaggttttatgtgctggtaaagaccttgctacagaacaaacagctggtcgtatggttaatttactcagacagctccagcaaactttaccaccctctacactcgcttctacttggtcatctttgcagccgcagcaacaacttgcattgcaatctatcctttctacatagttgtcattgctttgctgcatatccatcatttcttcatagcatctggcttggcagttggtgtcttgctctttttgggaacaagctttttccagtttggtggtctctatatttgtacccattctttttgccataagatggtttccatcattcattcttgcatggtgttctatatcagttttgagaatgcagagtcaattgtgattggaaagggaactttctctagaatgtgtatattatgagtgttaatagtgcgattgagtccaaaagaggaggttagggaattgtggcgtgggagcttctcgttctattcctcaattgttttttcttaccatattgcgtgagaatatagggttgtctgtggggcaattcttgcagttttggcctattgtattggttttatttccttatcagacagcatgaagttgtaccatatgaaattttaatgctatttatttattaagtttgcagacaattgtttcttcaaacaaaaaagcatctggcttggcagttggtgtcttgctctttttgggaacaagctttttccagtttggtggtctccatatttgttacccattctttttaccatacggtggtttccatcattcattcttgcatggtgttctatagcaacatggcttcagttttgagattgcagagtcaattgtgattggaaagggaactttctgtagaatgtgtatattatgagtgttaatagtgcgattgagtccaaaagaggaggttagggaattgtggcgtgggagcttctcgttgtattcctctattgttttttcttaccatattgcgtgagaatatagggttgtctgtggggcaattcttgcagttttggccgattgtattggttttatttccttatcagtatgaagttgtaccatatgaaatttgaatgctatttattaacttttcagacaattgtttcttcaaacaacaatttgttttttaaaaaaaaaaaaaaaaaaaaaaaaaaaaaaagcaaacac

SEQ ID NO: 75075 - DNA, 1053 bp, Glycine max
  unsure (1)..(1053): unsure at all n locations
  Clone ID: PAT_MRT3847_38806C.1
gnnnacatnnannatatgnngtcatttaacanngttaaaacccaaagnntcggattatttaatcatacatctcccttgatgatttcntnnnagtgatattttagactaatagtatttctgaatgacttcgaattttacatatagtttttgtttaccattttgtatctaagaaattattccttgtagcttgctagaaagttacctattgtaaattcaccaatgatgttacaatccaacttgttaggttgtagttgatccaagaccctgttttcagggagaacctacttggtgttactacatttccaatgacagcgacgattgaactgaggttacctagtatttatatatttgcttgtgtttatggcgacggggcattgtaagtggcagagtggccttgctgccacgatccactgagattcaggattggatctgggtctgaaaaactcaaagattgagtgttgtcatcagcttgatctcttgtttaaccacgggataggagttaaataacagcactacatcttgtttaaaaacatgttataacatttttgtggaattttttcattatgctctatttgagttcttgatagtaagttaactttcttctaaaatttattcaattgtatgtccatattttgttgccttcacattagtaattcgtaatgtaaaattcaatgaaattcggaagtcatgtttgttgcaaatgactttggagttgttagtgactttgtcgtgcatgtgagatgatggtattgattgtagatgtggcatagctttagatggcttctgatgatggtgaggtgagattcgtcttgcctttacaaaaacatgaacacatgaatgatcagtcactggagcttgaacatgggtaatttagactagtacagcgcgaatgtgtttttttggaggtacaaaagctttgaacaagactacaagagtagtttagattagcgcaaagatgtttttcttcgttttgacaagaacattcaggttgtggtgataaagtatggttcggttttaatgaaatgcaattagacagagaatgatacaaacccc

SEQ ID NO: 75076 - DNA, 1343 bp, Glycine max
  Clone ID: PAT_MRT3847_38807C.1
cgacccgccccgttgccatgcctagttttcccctcccctttcttctccccctcccctccactagaaaggcatttgattaacccgtcaacccattcgaacccacccgttttggacatcttcttgaccggttggaaaaaactgcacacgtcgcgcatcccctttcttcacttcttcatgcttcgactcttctgcgccttacctccgccgtcgtctgagtcgcgccgccgtgacgccgattggcttcgccggatttctcctatgttcgcctgacgagacagagtgaatcctgaatcgcacttcgaacgtgttctcttcgacatcttcacttaagccttcgatttgtcagataagatgcttccgagggctttattggccaaattcgttctcaaaccctccactgttgtttctccattccagttcaatcagcagagagcattgcatagtaggaacaagaaagccttggagttcattgcaaaaggctggaatgctttgaaggaggttgatagagtcatcgattattccgatcccaagcattcgggcattgtttctcttctcaggacagctaaggagaatttcgagcttgctttggaagctgataataccaatacccatgctaggtattggttgtccagattgcatatgaaataccctgttccaggagctaataaagctgtaggggcagcattattggtagaagcagcagaaatgggtgatcctgaggcacagtatgcattgggttgtcatctaagagttgagaatgacggtactctaacccttatattatgatgacatcattttggggaaaactgtggaccagttcagcacccaagtgctcaagagcacctggatgctgtatatttgacaggcgactgtgtcaagaaagatattgcttctgcattgtggtgtttccacagagcatcggaaaagggccatgctggggctgctatagcatatggatctcttcttcttaaaggtgttgaggttccagaatcggtaataaagttcagtttgacgagaggtgctgcagctcatagacgggggaggaataagggagctcttgcaattgatccagtagagatggcaagagaaaagtttcagatagcggcaaaagcagggtgtgagcttggattcaaatggcttgcaaggttagaggaggaagagaaacgggcactcacggaggaacattgagatgaaattgagaagtgtagtgtgctttttttctctctcttttttttttttttgtagcagaatgcgatctgaattatatgatttagcttgtctgaattgtggattttaatcatcggtgaaaaacaataaataaaggtgaggatttttgtcattgt

SEQ ID NO: 75077 - DNA, 1171 bp, Glycine max
  Clone ID: PAT_MRT3847_38808C.1
ccacgcgtccgacagaaggggcacacaatcgccaaagagaaaaaagaaccctcaaccaaacaacaacaacaacaacaaaaaaaagccctagaaaagattttggagaagcaattcctcactcctgaaaatctcatcctcttcttttacatttgttttggataaaacattttgctgatattgaatttttattttctcttgttttcgtttcttttcgacattttcttcttcttcttctgcttcggtgttttcagggagatagggataggagtaacaaagggagagtgcaatcagtttggttcttcgcttcgggactcgaatcttcgatgcctctctgttttttcttctctgccgcctctttttctgttctcaaattagggtttctgtgagagtgcctcttttctcgattctccgcaaactatcatcattgtaagggaaagcgatttgcgtttggacataatgtcgccaaaatatcagattctccacaatcgccccatcaatcagtggaaggttacagagctgaaagatgagctgaagaggaggaagataagtaccaagggtttgaaggatgatttggtcaaacgtttggacgaagtccttcgtctggaaagggaggttgatgaggcttctgagaaggatgaggccaatggtttcgatggtcatgcagatgggaaaaaagttccggaagcagttactgtggatgctgaaatggttgattcaactgacagggccagtgccaaaacatttgatactgctgaaaagggcaagggtggttttgttgatccaattgaaacgggaaatgtggaaaagattcaggagattgtggatcatgacagcgataagaatgacaagcaggacagtgtttccaaccaagttaacattaataatagtgtgtcagctatggatcaagaggttgaacctaagggcttgccagctggtggagattatgcaaatgtgggacatgaggcaattgcccatgcttctactgtggagactatcattacggtcactgagagtgtagtaacagaagtagtggccagtggtgaggatacttatcgtgccgaaaagaataatgaggattcagcagcacagctggagaatgaggtgtcaaaggcgcagctggatggtgaggactcaaagccccaactggattatgacaccaagcccttgcatg

SEQ ID NO: 75078 - DNA, 397 bp, Glycine max
  Clone ID: PAT_MRT3847_38809C.1
atccttatcggagaggaggcaaggtgctactagttttaaaagaccaaactatcactatgcaatgggtggcacccattttagaccgaatacatagccttatgggtcatggctcttagaacctacaaagggtcctgtgtcttccaatctccgaaagggagcagagcacttgagtgctactcattgggaaacacaacacatgctatggcaggttagatcattacgaaatgagactctagatggcatttgctttttcaaagacagagcctccctaaatgctctccacggctgtggcatgaaaaaaattgacctttatgtggcgggggatgacccatcggaatttggatcatcgaatttgaaaaggaaggtgacacattgctccaaagcccgggcaaaaata

SEQ ID NO: 75079 - DNA, 294 bp, Glycine max
  unsure (1)..(294): unsure at all n locations
  Clone ID: PAT_MRT3847_3880C.1
gtggcangcgcgcgtacgtgagctcgggnttgggctcgagggttaaaggggannntaagancgagtgnagtgttgtgtagtgtgnnggnacgttnggcggnggtgtgancnntgagcggttgnacagtgnncaggacggggnnccnnngnngcggnnggggnagngtgtgggttggagaangnnncgggggggggggngnnggggnngngggggnnngnggngngnnnnnnggggnnnnnggngnngnnggngggnngggngnnnggggngggngnggggngnggggggnnggg

SEQ ID NO: 75080 - DNA, 709 bp, Glycine max
  Clone ID: PAT_MRT3847_38810C.1
gacctaccgctgcgagaagacgacaggcgggggggatggtgaggggaggaaggagagagagaggatgaagggaagcagcaagaggaagacggagaaggagaagatagaggatgaagtggaagaaatgttgcgagcggcgcaagaccaaatcctcttaaatctcacccaagcccacatagcagcccgtccttctccggatcatgatcatgatctggatctggatctggatctggagcgtcgattccaggccctcaaaatgaaaaccaaatctcaacctcaagatgatctctctgccagattcgatgccctaaaagccaaatcatcatcttctgttgtcacagcatccaattccaacgcccaatttgattatgctgaagaagacccagaggctcaagttcagaaactcatccagtgggctaaggatgctgcacgtctcgatccttctcccccctcagatcacgaccaagatatctagaaacctatcattacaaattcatacatataaacttccttttccttttcttttctttttttatatgatttggtgcatttgatctgttaatgtgtcaggcaatttagtaattcaaagcagtatctgcaaggacatgaaatcttagtgatctgtaatttagtaatttagttcttttcccgaaaaaaaaaaaaaaaaaaaaaaaaaaaaaagcggccgctctagaggatccaagcttac

SEQ ID NO: 75081 - DNA, 445 bp, Glycine max
  Clone ID: PAT_MRT3847_38811C.1
cgaacgcgcccggtcctcacctcacgatcggcacgctaggtattactagggttatcacgcctggcatgagactgaggcgacgctcgtgtgccggagagacgctagatttcaacgatgcgcgaggtgtaggcatgaatcaactgacgatgctgcctcatatatccatgcagcaactgacagactcacaacaagctgacgcttgccgcgaccaagctctgacgttacgacgacagaacggacaccggctgatcacgcgacagcgcgcggacaacgacgtgtcaacgtacaagagacgaatcacgatgatacatgacgtcttagatcgctagcactacgtactcgagaccaaccatatacatttaccaactcgatgcaagccttgtgagcagcaacatcttctagaggatacggtgcgtactggatcatcacggttactacacgcgca

SEQ ID NO: 75082 - DNA, 495 bp, Glycine max
  Clone ID: PAT_MRT3847_38812C.1
acgagaaatcattgggtctcagaggctcataggaactactggcatgttctgcttgatgcttctgcattggtgctgggaaaggacaggctacatcttggtcttcacaggcctgacttcttagtctgttgtcttcatagcactcactccaatccttcaagaatcacttgcctcttggtgagaacgaaatcttttggcacctccactgcttcttctcaggtcaatggctgagtgagaatgaatacatgtctgatactcagacaaaatttgaactgcaatgtcttaacctgtatcatgaactctcagtttaacagtgaaatatcctggcgtactttgtagattgaataaaacttttaacacaatcatagaaaaaaccacttattactggtttagatgtaatatcggtatatgtactcgggattcctgatcatttgggtggtttacatttaccagttgttgatactgtcatccatgcttggtttttgtggctaaaaaaaa

SEQ ID NO: 75083 - DNA, 580 bp, Glycine max
  Clone ID: PAT_MRT3847_38813C.1
acgagctgtggttggtcttgcttgtggcagcctttcaggaattgcatcctcacacaacatttcctttggatcttgtaaggcgtagaatgcagttagaaggtgttggtggtcgagctcgtgtctataacactggcttgtttggggcatttgggcgcatgaagacgacagaaggggtgcgaggtttgtacagaggaattctgccggaatactacaaggttgttcccggcgtgggcattgtctttatgacttatgaaacattgaagatgcttctatcaagcatttcaagttattagcatactcaattgccaaatgtgcgccatttatgacgcttgtgggttaagttaattgaaaagtacaatttctggggaatttgatcttttagaaaatggtattctaatatcatggttaacattttctaggaagttttgttgaggtgatttttgctgttattgccagcatttttgttccgtataggtataatttgagtgacagcaattgtaacaacttcgaatattaggttgaaaccattatgtagttgatgattttgtcaacaaagcagttttgttttaatggtacgaaa

SEQ ID NO: 75084 - DNA, 768 bp, Glycine max
  unsure (1)..(768): unsure at all n locations
  Clone ID: PAT_MRT3847_38814C.1
cccccgtccgccgctcactcactcattcattcacccccaaatgaaagaagaaacaatgaggatttcaacgcttgaaattgttatcctcttgttcttttcttttgcactcttttgtgatggcaatgagagtactatgagagtgcttttggaggtaaaatcatcgttcactcaagacccagaaaatgttctaagtgattggtcagagaacaacacagattactgtagttggagaggagtgtcatgtgggtcaaaatccaaacctttggatcgtgatgactcggtggtgggactcaacctgtccgagtcgtcactcagtgggtcaatatcaacctcactcggtcgtttgcaaaacctaatccaccttgatctctcttctaaccgtctcagtggccccattccacctaccctctccaacctcacttcgttggaatctctcttactccactctaaccaactcacgggtcaaatccccaccgagctccactcgctgacgagtctccgagttttgcgaataggtgacaacgaactcactggcccaattcccgcgtcatttgggtttatgttccgccttgagtacgttggcttagcctcatgtagactcaccggtccaattccggccgaactcggtcgactcagtttgttgcagtatctgattctgcaggaaaacgagttgactgggccgattcctnccgagtttgggtactgctggagccttaagtattctccggcgctgcaacagactcaacgactccatcccgagtaaactga

SEQ ID NO: 75085 - DNA, 681 bp, Glycine max
  Clone ID: PAT_MRT3847_38815C.1
cccatcgcgtccgcgcacgcgtcacgagtccaaccaaccaaacacagcaccctcaacgagagagagagagagagagaaattgctaaaagacaaaaaatacttgaaagaacaccatgaaagttctgattaacaatccgaaaccatttctctcatcaccaaactccattttccccaacaacaaccctcgctttcatcttcgcccattccccaaacgccaatggatcgggccaaggctctgtttggcgagggccgcgttggattgggccaccatcgagcaattcgggcttcccgagttcgacgtccggaacccggcgctgtcgtcgtcgtatcgccgttcggagttgcccaggcccaaccagacggtgctggaggcccaggctagggtttgcaccggcccgacccagacccgccccctcgacgaacaacaggccttcaaggtcttcgaccttatcctcagatcagctaggggaggaatgaaagatgaagatgaagtttctaaagcacaacttggggcatttttcgcggggatgacaatccgtgcaaatgcatttcctgaggcgacgcaatggagtgaaggggaaacacgtgcaatgaagacattctggccacttctggttagagttcttccacctgaggttatattcattgcagaccccggagggttaatgatgggtgggggaa

SEQ ID NO: 75086 - DNA, 1031 bp, Glycine max
  unsure (1)..(1031): unsure at all n locations
  Clone ID: PAT_MRT3847_38816C.1
agatttcggctcgagcgggagtgtctcaaaagggacattcttaagaatcctgtagcgattatattgcagagagatgggggaagacaccggcacaagtttcccttgattctggactcattagtgctcttaggcagcacactatgacctgtttgcagtccccgcgtacggctgcgagaagacgacagaaaagggaacctcaaaatcagcctctaatatttttctcactgtctctccagagaacttgatagagagatggcagctgcaacatctggtgctgtgttaaatgggttgggatcttccttcttgagtggaggaaacaggagccaaacccttctggcctctgctattggaggcaaagttggtgctgctgttactgttaatcccagaagactcattgtggtagctgctgctgcaccaaagaagtcatggctccctggtgttagaggtggtggcaatctcgtcgacccagaatggcttgatggatcgctaccaggtgactatggttttgatccactaggccttgggaaggacccagcattcctcaaatggtacagagaagctgagctcattcatgggaggtgggcaatggctgcagttctaggaatctttgtggggcaggcatggagtggagtgccatggtttgaggctggagctgacccaaatgcaattgctcctttctcctttggtactcttctgggaacccagttgatcctcatggggtgggttgagagcaagagatgggtggatttcttcaacccagactcacagtcagtggaatgggccactccatggtcaagaacagctgagaactttgccaatgccactggtgagcaaggctacccaggaggcaaattctttgaccctttgagctttgctggcactatcaaggatggagtttacattccggatacagagaagctggaaagattgaaattggctgagattaagcatgccaggattgctatgttggccatgctgattttctactttgaggctggacaagggaagacccnccttggtgctcttggctt

SEQ ID NO: 75087 - DNA, 418 bp, Glycine max
  unsure (1)..(418): unsure at all n locations
  Clone ID: PAT_MRT3847_38817C.1
gctgtgggaagttgaggggaagtgggttgttaaaggagcagttgattanacattggtgcaaacccttctgctgagggtggaggagaagatgagggagttggtgatgcagttgttnaggttgttgacattgttgacacattcagacttnaggaacaacccgcattcnataaaaatcattttgttaccttcatgactaggtctatcatnaatttgactccctatcttcttgcataccancatgagtttgtttactattcacattctaggtaatcacttaaatcccttgctctcttaaaatttaactattttccattttcttgttgttgactagcattgccttattattccttgctttctccttttccctactttcactcactgcttctttcttattcccacccttccttctcctttttct

SEQ ID NO: 75088 - DNA, 1273 bp, Glycine max
  Clone ID: PAT_MRT3847_38818C.1
cccccttggtgagcccatccattcacacataaaatctctcccaagtggtgcatttgcaaagtgaacctcaaaatcagcctctaatatttttctcactgtctctccagagaacttgatagagagatggcagctgcaacatctggtgctgtgttaaatgggttgggatcttccttcttgaggaacctcaaaatcagtctctaatatttttctcactgtcttgtctctccagagaactgtatagagagagatggcagctgcaacatctggtgctgtgttaaatgggttgggatcttccttcttgagtggaggaaacaggagccaaacccttctggccactgctattggaggcaaagttggtgctgctgctgttactgttagtcctagaagactcattgtggtagctgctgctgcaccaaagaagtcatggctccctggtgtcagaggtggtggcaacctcgtcgacccagaatggcttgatggatcgctaccaggtgactatggctttgacccactaggccttgggaaggacccagcattcctcaaatggtacagagaagctgagctgattcatgggagatgggcaatggctgcagttctaggaatctttgtgggccaggcatggagtggagttccatggtttgaagctggagctgacccaaatgcaattgctcctttctcctttggtactcttctgggaacccagttgattctcatggggtgggttgaaagcaagagatgggtggacttcttcaacccagactcacagtcagtggaatgggccactccatggtcaagaacatctgagaactttgccaatgccactggtgagcaaggctacccaggaggcaaattctttgaccctttgagcttggccggcactatcaaggatggagtttacattccggataccgagaagctcgaaagattgaaattggctgagataaagcatgccaggattgctatgttggccatgctgattttctactttgaggctggtcaagggaagaccccccttggtgctctcggcttgtaaactaaacatttcatgtagataattgaattgagaggctagacagttgcaaatcaacctttgtcccgtttgtgttacttcatgacaaattcaaattctatgctctattattggatgcattcactttatgtctgtactctaatgtagccatcgtataaatacttgcatttttacttttctttcccaaaccaggagtagttgaagtcatatggtagacttgaaaaatattattatctgtgtgcc

SEQ ID NO: 75089 - DNA, 239 bp, Glycine max
  Clone ID: PAT_MRT3847_38819C.1
gcactttcggattcccctcccattttcttcactccgtttcccgctttaggtttttttcctggatggttgtttctcgtccccatactcttcgattccgtggtgcgttccatttcgttcaagattcactcgggtcccttttctgaagccaggcctcgctgccatctgttgaatggttcccgcattatgctttctatcacttatcttgccgagtgctactctcttttcggacccccaaactg

SEQ ID NO: 75090 - DNA, 408 bp, Glycine max
  Clone ID: PAT_MRT3847_3881C.1
gttggaacctttgggctgatttatgtgcttgcatggtcgtgagaagatgatagaagggggttccccaataataagaacccggacacaagcccgcccgcccctaagttaatcaccgcaactacagacgattccgcctacggatccaaatatcctcttccaattatcgagagttccggccgcgcctaaagtctcacacccaggagtacttacggaaacacgactacacggcacggagtacggtagaggtggctgagcaaggaaaaagaggagtcgattctaatttccaaactaacgccaagtaatacactaagtacggtcgcgccaaccgaatatagcccttccgaagtacatggcggagaactaagagacggtcccctagtcgtaaaacctcttatccgggatacaaca

SEQ ID NO: 75091 - DNA, 711 bp, Glycine max
  unsure (1)..(711): unsure at all n locations
  Clone ID: PAT_MRT3847_38820C.1
ccacgcgtccggctgtttctggcaatttttcttcccttcagatggtgatgtttcagatatctccgtctgttataaattactatcgttaactactattctcattctcacacttatcatacatgaattttctctacccttccatattaaatatatagaaatattgcatattgattgctagtgtgtccaagaataaacatgtcggccaagttcctgaccgtgccgccatttgagtgcgcctggagagaggatttgaaattccgggaggcaggccggggttgcgtcgcctttgaagcattcgcctgcaacgatgtcacactggttttccgggagaatgtgggaagccagggctaccattataaaagagatagcagtcctcactacacaatcatattggggagtcacaggaatcggcgactcagaattgaggtcaatggaaaagctgttgtcgatgtggcaggggttggcctctgctgctcttcctcctttcagagttattggatcagcatctatgatggcttgattagtataggcaatgggaaataccctttccaggatgttgttttccagtgggtggattcttatcccaattggaatggtcagtatattggcctcagcagctgggataaacatgttaagtatagaaatgttaatngtcttgtctctaacacacactcatgtgcccctctcgaagcatgtcggttttggtgatta

SEQ ID NO: 75092 - DNA, 407 bp, Glycine max
  Clone ID: PAT_MRT3847_38821C.1
gttacgcgtccggcagcatggatagtacaatggatactacactcattgtacaaggcattggacaagtcgatagaagaggttatataaaacgcatgggcttacccaaggtgcagacaggtacgcaaactgggccacagctgccgatactgggaccgtagatgggattctttatgcagttctctatgcaggaaagagagccaggaggaatgcgatggttacaagggagctaacagctggcccaaacgcacattagagcgtatatttgattgaaggggtgcagagagctactaaaggggctcatttgtgtgcacaaatgggtgcggctaaagcatactctagagcatgcgctgaagcagacgataatgaaggctatatgaaagggaggcaggagcatgagcgagaccaga

SEQ ID NO: 75093 - DNA, 1053 bp, Glycine max
  unsure (1)..(1053): unsure at all n locations
  Clone ID: PAT_MRT3847_38822C.1
acggctgcgagaagacgacagaaggggcttctctttctttgtcacaaacacaacacagcacccttcacacactgcacagtgcctcctttctagtttctactatctgcttcttcttcttcaattagggttttccccttctccgagatcagcgccaacatcatgaacatgaatatcttcaagaagaaaacctcacccaaagaggctctgcggtcaagtaagagggaaatggctgttgcaaccagaggaattgaaagagagatagcatcacttcagatggaggaaaaaaaattggtggcagagattaaaagagaagcaaaaacaggaaatgaggctgccaccagaatcttagctcgtcaacttgttaggttacgtcaacagataaccaatttgcagggaagtcgagctcagggcggtgtagcaactcacacacaggcattatatgcaagcacttcaatctctacaggaatgaagggtgcagctaaagcaatggtggcaatgaataagcaaatggccccggcaaaacaggttaaagtgatcaaagaattccaaaagcaatcagcacaattggacatgacgattaagatgatgtcagaatctattgatgaaaactttagacaaagatgaagctgaggaagaaacagaagagctcactaaccaggttcttgatgagattggagtagatattgcatcccagttatcttctgctccaaaagggcgtattgcttcaataaatactgaaaatgttgctccaagaccagcagaatcccaagatgttgaagatcttgaaaagagattggcttctcttcgaagaatataaatatctgatcatctatatgttaatgtacaaatcattatatatatgcaatggagagattgtattattggcacctcatataattaccaattttatgctgtgatgtgtgtttggatataaagaactagtaaaaatagttttagactggaatatatattactatcccaaacatttattatatatactatatagcaatggagagattgtacaaaannnnnnnnnnnnnnnnnnncccnnaa

SEQ ID NO: 75094 - DNA, 180 bp, Glycine max
  Clone ID: PAT_MRT3847_38823C.1
cgcgagtgtcgcccttttttttttttttttggggaaaaaccataggcgaggcaagccgagatatgttacttgaaatgttaaatgaggttcagtaaaatacctagaaagagatggaatttggttaaaaaacccggttcccctaaaaacaaatttcaaaatccttgagggaaccttttgaaa

SEQ ID NO: 75095 - DNA, 214 bp, Glycine max
  Clone ID: PAT_MRT3847_38824C.1
caagacaggcctattacattatattcatatacaatgataatcactatcaatattggtgccgatacatgaatggtaaacctagtggacgttaacatttaacgtatcagcctaatgtattctgccattcataattccatgaatacaaattctatatttgaaaagggggggattgactagcctgatagttcaaaaaaattttcttattatatcttcc

SEQ ID NO: 75096 - DNA, 211 bp, Glycine max
  Clone ID: PAT_MRT3847_38825C.1
ggtcatttgggccatggggcaaacacttttttttttttagttttggacctctatttgagtctagtttagctttcttttctttaaatcattgttggaccaaattggatcatggaggtggttggaacatcaatgatgtttgaatcttggaatgtcaacttgttgggtgagcttttaccattaaactttgttgcatctatggttgacagctcag

SEQ ID NO: 75097 - DNA, 1130 bp, Glycine max
  Clone ID: PAT_MRT3847_38826C.1
ttttatatataatgatttgtacattaagaaacatatatatgagtacaggctgtagcagagatttaaattcttcgaagagaagccaatctcttttcaagttcttcgacataaatgtttgggatagtaatatatattccagtctaaaactatttttactagttctttatatccaaacacacatcacagcataaaattggtaattaaaagaggtgccaatagtacaatctctccattgctatatataatgatttgtacattaagcaacatatatatgagtacaggctgtagcagagatttaaattcttcgaagagaagccaatctcttttcaagttcttcgacatcttgggattctgctggtcttggagcaacattttcagtattccttgaagcaatacgccctttgggagcagaagataactgggatgcaatatccactccaatctcatcaagaacctcaggttagtgagctcttctgtttcttcctcagcttcatctttgtctaaagtttcatcagcagattctgacatcaatctcaactcgtcatgtccaactgcgctgattgcttttggaattctttgatcactttaacctgttttgccggtgccatttgcttattcattgtcaccattgctttagttgcacccttcattcctgtagagattgaagtgcttgcatataatgcctgctgtgtgagttgctacacccctgccctgagcacgacttccctgcaaattggttctctattgacgtaacctaacaagttgacgtgctaagattcgggtgggagcatcatttcctgtttttgctactatcaccaagtctgggaccactgttgacgtcaccatccaaagtgacgcgctcagactttcaattcctctggttgcaacagccatttccctcttacttgaccgcagagcctctttgggtgaggttttcttcttgaagatattcatgttcatgatgttggcgctgatctcggagaaggggaaaaccctaattgaagaagaagaagcagatagtagaaactagaaaggaggcactgtgcagtgtgtgaagggtgctgtgttgtgtttgaaccctaattgaagcagagttgaaaggaggcactgtacagtgtgtgaagtgtggc

SEQ ID NO: 75098 - DNA, 378 bp, Glycine max
  Clone ID: PAT_MRT3847_38827C.1
cgcgtacgatttatttttttcaattccgacttttattttttagaagaggcaaaaacaatcttgtaacggtaaaattttacactggcactaaaataccttaattttgattacaaacatatatttatataaatgttatttaacttgactacttgctcagaaattaaatctaaaaatgttaatttaataatctttttcaaatgaatatatactcatattgcattccctatacttaatatacacatttcatatatatcttataaaaatgtttgctgtcactacacattttaaataataaactaatttaataaaaatgctgaaaatttctagaatttttattttaaaatataatgccaaataaggtaaaatatttttttttta

SEQ ID NO: 75099 - DNA, 566 bp, Glycine max
  Clone ID: PAT_MRT3847_38828C.1
atttccctattaaatccaattggggattttttttttctagaagaggattgaaagtgaaaaaaaggaaataacaaaatgaagaatattcctctgattctaatgggttgtggaggagttggtcgtcaacttctccaacacattgtctcgtgtcgttctcttcactctacacaggggctgtgcttgagagttgtaggagtcggtgatagtaaatctttggtggttacggaggatttgctgcatgaggggttgaatgatggcttcttgttagaactttgccgggtcaagagtgtcggcgaatctctattaaaacttcttgattttgggaaatgccaggcatttgtgcatccggagtcacaaggaaagattctagagattgcatttcaacttggtaaaaagacaggtttggtatttgtagattgctctgctagctctgacactgttgcggtgctaaagcaagcgattgatatgggttggtgcgctgttatggcaaataagaagcctcttacatctacaatggaggattttaaaaaacttttcatctatccacgtcgtattcggcatgagtc

SEQ ID NO: 75100 - DNA, 631 bp, Glycine max
  Clone ID: PAT_MRT3847_38829C.1
cccgcgtccgcccgctcgtgtgcacgctcacatggaggacccggtcttggacctggtgttgaacgccttggagggcgccaccacaatgtccatctacgaggaacactacgcccaagacgatgcccagaacgctgacaggaacacatagttgctctgacggcggatgaagtactacatgtactactgcgttttttatggtgatcgatttgcttgcccgactccttgtgcgacatcttactacacacactactgctacagggcacgatgcccggttcaacgttactccaaacgttgctctgccatatcccgctgcctgagatgatgtcgatgagagttccgatctgatcacacgcttgatatcgcacttggaattggagatgccgattaccgatcatggtgccgttgatggtggttgtgttatgggtggactaaatggagatcgaggattatagggggcattagatgcgctaatcatggcgcttcacgtgacagtgtcgtgtatgaggtaacggttgatgtagctgcttcagttgcatctactctttgctctgctcaaatcactctgcttgcgtattggttgctttttgtttacttgggggtttatccctgcggttactttgcgggttctttg

SEQ ID NO: 75101 - DNA, 251 bp, Glycine max
  Clone ID: PAT_MRT3847_3882C.1
gggtcgagggctcttcttgcctcccgctactttccctggtcccgatgaatctgctaccgaggatgatgactcatgataccctaaccctaatgctcatcctcgtgactcggtttaaaaccccattcccattgctatcgcgacatcttgcgacaaagatgatgtctgtcttccgtttggctcttccaatgtgaggcctgatatggcgcatctgtgttccggtcgagcatatgaccagggacgatatcggaact

SEQ ID NO: 75102 - DNA, 227 bp, Glycine max
  Clone ID: PAT_MRT3847_38830C.1
agccacacgacaagggggttttttcaattatttactggcgtaccaaaatgcatttcggagacatgggggaagtgacaaaaagagaggacacaatttttcatttgcatcttcccaaggataattgctctttacttaggacaacacaaggaagacagggtcccccagttttttactccacattaagggttataatcttctcaagaatgaccatatgaggggagggaaaa

SEQ ID NO: 75103 - DNA, 109 bp, Glycine max
  Clone ID: PAT_MRT3847_38831C.1
tcgcgatctacagccgcctgattcttgttttcgaaggaagaaccggggcccggtaccagccggggtcccagggttctgaatggtgtcagggctcaaagaaagccttccc

SEQ ID NO: 75104 - DNA, 634 bp, Glycine max
  unsure (1)..(634): unsure at all n locations
  Clone ID: PAT_MRT3847_38832C.1
gatgagagcgcggatcccattactgttgctgggagttgttttcctggcatcagtttctgtctcatttggcattgagtattgggaaaagcagaaccccagtcacaacaagtgcctccgaagttgcaatagcgagaaagacttctacatgaaccaagcatgccacgctcgttgcaacctacttaaggtggaggaagatgaagaatgcgaatatggtcaaattccacgaccacgaccacaacacccggagagggaacgtcagcaacactgtgagaaggaggaagacgaaggtgagcagacacgtccattatcattcccacgcccacgccaacctcatcaagaggaagagcacgagcagaaggaggaacacgaatgttatcgcaaggaggaaaatcactgaggacaggtaagtgaagaggaacatgatgaacgtgaacacccacgcccacaccaacctcatctgaaggaagaggaatagcacgaatggtagcacacgcaagagaagcaccatggaaaggatagtgacgaagatgaagaagacctagacgatgatgaggagcatgacatagagagccaagacagtgatggatctgagtctcatagagtaccacgtagacatatgaatgagacncttttc

SEQ ID NO: 75105 - DNA, 634 bp, Glycine max
  unsure (1)..(634): unsure at all n locations
  Clone ID: PAT_MRT3847_38833C.1
gatgagagcgcggttcccattactgttgctgggagttgatttcctggcatcagttactgtctcatttggcattgcgtattgggaaaagcagaaccccagtcacaacaagtgccttccaagttgcaatagcgagaaagactcctacaggaaccaagcatgccacgctcgttgcaacctccttaaggtggaggaagaagaagaatgcgaagaaggtcaaattccacgaccacgaccacaacacccggagagggaacgtcagcaacacggtgagaaggaggaagacgaaggtgagcagccacgtccattcccattcccacgcccacgccaacctcatcaagaggaagagcacgagcagaaggaggaacacgaatggcatcgcacggaggataaacacggaggacagggaagtgaagaggaacaagatgaacgtgaacacccacgctcacaccaacctcatcaataggaagaggataagcacgaatggtcacacaagcaggaatagcaccaacganaggaaagtgaagaagaagaagaagaccangacgaggatgaggagcangacatagagagcctagacagtgaaggttctgagtctcatagagaaccacgaagacataagataagtaccctcttc

SEQ ID NO: 75106 - DNA, 441 bp, Glycine max
  Clone ID: PAT_MRT3847_38834C.1
gcgattccggctccatgtaccgcaacacatttacctcaggtattttcttcttttttccttgtttggctttcacgacagcttcgtatctaatttttttttaaccttccttttctctgcgagtattttccgttatggctgaagaatttgtgaatggctttgttcatcaaaacgacatcgctgtcataacccacaatccccctaaaggcgatttcggctccatgcccacaagttgttgaagacgagtttttaccacaacacattcacctcaagtatttccctccttttttttctttcaacaccgcttcgtatctaaatttttttaacccttcctttcttttgcagtattttctggttttgcccaaaaatttggggatggctttggtcattaaaatggccttactggcataatccacaattcccccaaaagttattgggaagaaa

SEQ ID NO: 75107 - DNA, 142 bp, Glycine max
  Clone ID: PAT_MRT3847_38835C.1
atatcaattattctcggactacttttgccttggttatggtatactgggtaaactttgaaccaatccaaagcaatggtctatgggaagaccaccagaaaagaaaaccccttttcacggttattacccaatccattcagaaaaa

SEQ ID NO: 75108 - DNA, 595 bp, Glycine max
  Clone ID: PAT_MRT3847_38836C.1
tggggcacttggttcaatatcctagtacaccgtattaaagaatttaagatatactatgatgagagcgcggttcccattactgttgctgggagttgttttcctggcatcagtttctgtctcatttggcattgcgtattgggaaaagcagaaccccagtcacaacaagtgccctcgaagttgcaatagcgagagagactcctacaggaaccaagcatgccacgctcgttgcaacctccttaaggtggaggaagaagaagaatgcgaagaaggtcaaatttcacgaccacgaccacaacacccggagagggaacgttagcaacacggtgagaaggaggaagacgaatgtgagcagccacgtccatttccattcccacgctcacgccaacctcatctagaggaagagcacgagcagaaggaggaacacgaatggcattcgatggaggtaatacactggtggaaaggaagtgaagatgaacatgatgaacgtgaacactcacgcgcacaccaaccctatctaaatgtagaggaatagcaccgattgttacacaatgcaggatatgcacatagataaggaagtgaagaagaacatgatgac

SEQ ID NO: 75109 - DNA, 655 bp, Glycine max
  Clone ID: PAT_MRT3847_38837C.1
gatgagagcgcgggtcccattactgttgctgggagtcggtttcctggcatcagtttctgtctcatttggcattgcgtattgggaaaagcagaaccccagtcacaacaagtgcctccgaagttgcaatagcgagaaagactcctacaggaaccaagcatgccacgctcgttgcaacctccttaaggtggaggaagaagaagaatgcgaagaaggtcaaattccacgaccacgaccacaacacccggagagggaacgtcagcaacacggagagaaggaggaagacgaaggtgagcagccacgtacattcccattcccacgcccacgccaacctcatcaagaggaagagcacgagcagaaggaggaacacgaatggcatctcaaggaggacaaacacggaggaaagggaagtgaagaggaacatgatgaacgtgaacacccacgctcacaccaacctcatcaaaaggaagaggaaaagcacgaatggcaacacatgcaggattagcaccaaggaaaggatagtgacgatgatgaagaagaccaagacgacgatgaggagcatgatcaagagagccaagatagtgacggttctgagtctcactgagtaccacgaagacataagaataagaccccatgtcactgcgactctagaggtttc

SEQ ID NO: 75110 - DNA, 489 bp, Glycine max
  Clone ID: PAT_MRT3847_38838C.1
tgtcccgtagtgaagaatttaagatatactatgatgagagcgcggttgccattactgttgctgggagttgttttcctggcatcagtttctgtctcatttggcattgcgtattgggaaaagcagaaccccagtcacaacaagtgcctccgaagttgcgatagcgagaaagacgttctacaggaaccaggcatgccaccctcgttgcaacctccttaaggtggaggaagaagaagaatgcgaataaggtcaaattccacgaccacgaccacaacacccggagagggaacgtcagcaccacggtgagaaggaggaaaaccaaggtgagcagccacgtccatttccattcccacgcccacgccaaccttataaagaggaagagcccgaccagaaggaggaacacgaatgtgctcgcatggaggaaaaccacggaggaaaggtaagtgaagaggaacaatacgaacgtgaacaccctcgcccacactaatcctt

SEQ ID NO: 75111 - DNA, 807 bp, Glycine max
  unsure (1)..(807): unsure at all n locations
  Clone ID: PAT_MRT3847_38839C.1
caatatcctagtacaccgtattaaagaatttaaggtttactatggtgaagagccgcggttccaataactgtttgctgggaattagtttccctggaatcaattcctgtctcattgggaatggcgttttgggaaaagaagatccccagtaacaacaagtgcctccgaagttgcaatagcgagaaagactcctacaggaaccaagcatgccacgctcgttgcaacctccttaaggtggaggaagaagaagaatgcgaagagggtcaaattccacgaccacgaccacaacacccggagagggaacgtcagcaacacggtgagaaggaggaagacgaaggtgagcagccacgtgcattcccattcccacgcccacgccaacctcatcaagaggaagagcacgagcagaaggaggaacacgaatggcatcgcaaggaggaaaaacaccgaggaaagggaagtgaagaggaacaagatgaacgtgaacacccacgcncacaccaacctcatcaaaaggaagaggaaaagcacgaatggcaacacaagcaggaaaagcaccaaggataggaaagtgaagaagaagaaaaggacaagacgaggatgaagagcaagacaaagagagccaaaaaagtgatggttctaatctcatagagaacacgaagacttaggaataagaacccttgtacttcaccttaagaggttcaaccttcttcaaaaccatattgccacgtgcgttccctccaagttcgacaacgtttcaagaacttagaaatttcgaaactacggattattgaatttaattcgaacccacac

SEQ ID NO: 75112 - DNA, 267 bp, Glycine max
  Clone ID: PAT_MRT3847_3883C.1
ggctcgaggtcaaatggactttgtgatgccgcaaaaacgtatactcaaaacccatcttatgaccatgttatgagactgcaccaactggccgtatgcgccaagtacatagatcattaacaaggaaccgatcatcgaaagcaatgctgtacatcgactatgtctgaatttgagacactgacaacagacaaaagggggagcagacagatgactattcctccagctgacgcaaaacacatggttattgatgatatagacgaagacacaata

SEQ ID NO: 75113 - DNA, 741 bp, Glycine max
  unsure (1)..(741): unsure at all n locations
  Clone ID: PAT_MRT3847_38840C.1
cggcacgaggttcaatatcctagtacaccgtattaaagaatttaagatatactatgatgagagcgcggttcccattactgttgctgggagttgttttcctggcatcagtttctgtctcatttggcattgcgtattgggaaaagcagaaccccagtcacaacaagtgcctccgaagttgcaatagcgagaaagactcctacaggaaccaagcatgccacgctcgttgcaacctccttaaggtggaggaagaagaagaatgcgaagaaggtcaaattccacgaccacgaccacaacacccggagagggaacgtcagcaacacggtgagaaggaggaagacgaaggtgagcagccacgtccattcccattcccacgcccacgccaacctcatcaagaggaagagcacgagcagaaggaggaacacgaatggcatcgcaaggaggaaaaacacggaggaaagggaagtgaagaggaacaagatgaacgtgaacacccacgctcacaccaacctcatcaaaaggaagaggaaaagcacgaatggcaacacatgcaggtaaagcaccaaggaaaggaaagttgaagatgaagaanaagacccaanacgaggattaggagcaagacanagagagccnagaaagtgaaggttcttagtctcaaagagaaccacgangaccttaagaattagaaccctttttactttcaactcttaaaaggtttccaaacttctntttcaaaaacccaat

SEQ ID NO: 75114 - DNA, 336 bp, Glycine max
  unsure (1)..(336): unsure at all n locations
  Clone ID: PAT_MRT3847_38841C.1
cactaattaaggaagtanaaagaannaatcatgttattagaatgtgtcanaangcgttctcgctctcacatgacgtncaataaaaactcatcttgtatatgccatggnttgacttgggatacctntggaaattaacccnatanntatgnatgcaatnngctaaggnaagtaannatatccaagccataactcaagtacagcgttgntgaccgtaatagcagcantacaagccatagtcnatgccttctgttttgagacngatttgaggcaatggaattngggnccangtatcaggntctaatagcncttntacgggaatgtggctactggaatant

SEQ ID NO: 75115 - DNA, 590 bp, Glycine max
  Clone ID: PAT_MRT3847_38842C.1
gatcaagaaccagttcaatatcctagtacaccgtattaaagaatttaagatatactatgatgagagcgcggttcccattactgttgctgggagttgttttcctggcatcagtttctgtctcatttggcattgcgtattgggaaaagcagaaccccagtcacaacaagtgcctccgaagttgcaatagcgagaaagactcctacaggaaccaagcatgccacgctcgttgcaacctccttaaggtggaggaagaagaagaatgcgaagaaggtcaaattccacgaccacgaccacaacacccggagagggaacgtcagcaacacggtgagaatgaggaagacgaacgtgagcagccacgtccattcccattcccacgcccacgccaacctcatcaagaggaagagcacgagcagaaggacgaacacgaatggcatcgctaggaggaaaaacacggaggataggggattgaagaggaacagtatgagcgtgaacgcgcacgcccacaccaacctcatcaaagagaagaggagaagcactaatggcaacactagcaggataagcaccaaggaaaggaaagtgtagatgaagat

SEQ ID NO: 75116 - DNA, 313 bp, Glycine max
  Clone ID: PAT_MRT3847_38843C.1
ttcactcgttccaaatattgatagtctctaatcgatagatatttatattactaggaagggttagataatgctcattatgtttgcactaaatacattatctcataataaagttaatttatagaatattcttttgagtttgcatatcagaattcagtttcaccatattacctgcttttcaaactgacttttcattttctaacttcttttacagtgaattgcttaatctataacattatattattaattcaactcattatactcaaaatagacttttcttacttctgtttttactatctatccttatcttaatttc

SEQ ID NO: 75117 - DNA, 285 bp, Glycine max
  Clone ID: PAT_MRT3847_38844C.1
acgccggcaccgacccgtacggaattaaccggccggatcagcgagcttacctgcgggcggccgccctttttttttttgaggggagcagattggaagcatccatagaaattttgccgcagcagatacacacccaggaaaaacgagaagcaatcctgaacgcacccaaccggacggaggtaacaaaggctatggaaccgccacaaagcagctacaggggagaagacacgacaagagccaatccttaagcataagaaggcgccccaactaccgagaaaaagataccct

SEQ ID NO: 75118 - DNA, 1419 bp, Glycine max
  Clone ID: PAT_MRT3847_38845C.1
gcctcaacgaagtgtgaggcttctggattttgctatgttaatgatatagtccttgcaatcttagaacttctcaaacaacatgagcgtgttctatatgtggacattgacatccaccatggagacggtgtggaggaagctttctacactactgacagagtcatgactgtttctttccataaatttggtgactattttcctggtactggggatgtacgtgatattggatatggaaaaggaaaatattactctcttaatgttccacttgatgatggcattgatgatgagagttatcattttttgttcaaaccaataattggcaaagtaatggaagtgttcaggcctggtgcagtagttctccagtgcggtgctgattctttatctggagaccgattgggatgtttcaatctttcaattaggggtcatgctgagtgtgtcaaatacatgagatcattcaatgtgcccctcttgctactaggtggtggtggctacaccattcggaatgttgctcgttgttggtgctatgagacaggagttgctcttggaatagaagttgatgacaaaatgccacaacacgagtattatgaatattttggtccagattatacccttcatgttgccccaagtaacatggaaaacaagaattcccgtcatttacttgaagaaattcgatctaaactacttgagaatctttccaagctgcagcatgctcctagtgtccaatttcaggaaagacctcctgattctgatcttggagaggccgatgaagatcatgatgatggagatgagccttgggatccagattctgacatggacgttgacgttgaacgtgagcttgtctcgagcaaagtaaagaaagaaattgctgaacctcagcccaatgatctggaggaccagagaagtggagagcatttgagagactctgatactgcagttgcggaaacctgcatgaaggctctagatatttcttctcagaaagctgatgaagataatgtgaaagtagaacagaatactgtgaatgatttggccaaagagacggacctgaagggttaagcaacataggctttaactgattggtgaacagttaaattgattttccatttatgctgtcgcatttccaaattaattgagatgtggctgctgcttggttccatcatagtccattgtatacaccagtcgcattttcctaatgttaggggcaagtttgcaaatttaaattggttttttttttatctcatccagatggttttttgtactgttacattacatcttgttacagaatagtattacgtgctattattgagccgggtttatttttcttatactgatctttgtttaaaactttatgtgtgtaatgtctaattggtaatgtgaaacatattatcttgttaaataatctagttataagttttagcggtttac

SEQ ID NO: 75119 - DNA, 426 bp, Glycine max
  Clone ID: PAT_MRT3847_38846C.1
ggggcccaacccacccttttccagaagagagccgcgctcaggaagaacatgaacatgagtgacaataagaagaggaaggagaaggatgaggtggtggttgaggatgtgagtttcgacgggtctggcttgaactacgattctgacgacttaactgagagtaattataatgaccctaaggagaagaatggtggtgggggggttagttccaatgccaacagcaccgtcaccggtttggatcagaaagggaagaagaagggaatgcctgctaagaatttgatggcccaaccacgccccccgaagaagctcaatgacagactctacatgctgaggtccgttgttcccaagattagcaaaatggacagggcttcaattcttggggatgcaattgagtatctgaaggagcttctgcaaaggatcaatgatctg

SEQ ID NO: 75120 - DNA, 635 bp, Glycine max
  Clone ID: PAT_MRT3847_38847C.1
ggcgagggagtgagggactagcacagaaagatattgtttggtgtacggtggtgagtgtcgacgctgccactctcgcctgtgtctgtgatcagaaatggaatctgatgcaccgacatggggagacaaactcatgttgaggggattgtcattccatggttttcatggagcaaagcctgaagaaaggacactgggccagaagttcttcatagatatagatgcttggatggatctcaaagcagctggcaaatctgatcacttatcagattctgttagttacacagaaatatatgatatagctaaggatgttcttgaagggtcacctcacaatcttctggagtcagtggcccaaaaaaattgcaatcactactcttacaaatcataaagaaatatctgctgtccgagtgaaggttggaaagcctcatgtggcagttcggggtccagttgattacttaggcgttgagattcttagacgcagaagcgacttgtcaggctagaaatttcatatttattgctgcacaatttttatattttcacattccacttgatacaaaagtaatgtaactctttccttcatgccccattagtcttttctctcttaagcaatcttgctaatgaaattaaaagatcaaagttag

SEQ ID NO: 75121 - DNA, 254 bp, Glycine max
  Clone ID: PAT_MRT3847_38848C.1
gatttctattgtagttacacattatcattcataccagttcatgattacataacaatgtaaaagtcttttacaatcactgcatatactttttactcgacatatttaacattttccaaattgtgctttgaatgccttgcttatgttactgttggaactaaaactaattgtcacatggactacttgccaacttcaattctaacaataggaaacaggggagcaggaagaagcccactagactgggactccagagtgaa

SEQ ID NO: 75122 - DNA, 243 bp, Glycine max
  unsure (1)..(243): unsure at all n locations
  Clone ID: PAT_MRT3847_38849C.1
tcgcgccgacttcggctcgagtagaacttgtcaagattacggtgttagtacagttcgcagaaagagtgttgtggtgtgataggtagagctatccagtcccgcgcatcgtgcactccttacttagttactcacacaaaacgncggcgcgtgagatctctactctctctctccgctgctcattctctgcctattattactccaccaccttagcttaagcttttcattcactagactaacttcctc

SEQ ID NO: 75123 - DNA, 480 bp, Glycine max
  Clone ID: PAT_MRT3847_3884C.1
gcagctcccacaaaaaccagacatgtccgagtcggaagtagcatgtcagaggtaccgtgtgggctatgctctccaaggcaagaaagtcgaaagcttcattcaaccctcactcctcgatcacgccaaacaacacagcatcgatctcgtccaaatcgaccccaccgcacccttacaacaacaaggtcctttccactgcatcattcacaaactccacacccaacactggaaaaacctcctccaacaattctcatccaaacacccaaacaccgtaatcatcgaccctcccgagctggtggatcgcctgcacaaccgggtttcaatgctcgacgcagtgacccacttacaattttccctcgaaaacgccaccattggggttccaaagcaagtggttgtgaacgaacccaaatccttcgatttgcacaaattcgaagaagaacagggcttgcggttcccggtgattgcgaaaccgctggcggctga

SEQ ID NO: 75124 - DNA, 339 bp, Glycine max
  Clone ID: PAT_MRT3847_38850C.1
aaaaggaaaaaggggccacgttttcaccgagaggaaaaatatacaattgttcatgatataaaagggggtctatagtataaactataaacggaaaggggggataccttggtccatttttttacaaatttttattttttaaactcacaattgcataaggaacctaaaaaatgaaaaagctttgaaaacgtttcaattttggcattgagctgatgcagcaaatttcaaaaacattcgaaaaaattacttgcacaaaagctggacgttaaacttatcctttttaattggaaaaagctttaataaaatctgggggggcatttgacatggggggattcacaattg

SEQ ID NO: 75125 - DNA, 573 bp, Glycine max
  Clone ID: PAT_MRT3847_38851C.1
gattcaacaaagacgtacgtacatgcacaaaactagagcgagctgtgtgtgtgtgtgttcgtcatttcctcgatcatggcgaaggcgcaggcgcaggtggcggcgaggttcatgatggaggcgccgccgccgcaggtggtgtcggtcatgcggcggaggaaggcgccgaggagcctgagcaccatcgccgaggacgacagggagatgctggcgccgtgcgggtcaccgtcggaccacggccacgtacatacacataactagagcgagtagagataccgtctcttactgtgtgtgtgtgtgtgtgtttatcaactcctcgatgcatggcgaaggcgcaggcgcaggtggcggcgaggttcacgacggaggtggcgccgccgcaggtggtgtcggtcatgcgacgaaggaaggggccgaggagcctggacaccatcgccgaggacgacagggagcagcagctggcgtgcgggtcgccatcggaccacggcctcgcacggcgtggtcgtcgctccagaggataccgacgccaccgcagccgccgcgggagcgcgcaggtgggtccgtgacgaggga

SEQ ID NO: 75126 - DNA, 199 bp, Glycine max
  Clone ID: PAT_MRT3847_38852C.1
ggaccgaggtatgtgagttattattatgaccactacacttattataggtctaagccatcaactgcatgtgcggcaccctacatgaagtcaaacataaatattaaccataatcaccgcatacaactcaactcagaacttggcaataaaataaagggggcaaaagacagaaacctgaccctttgaagcaaagacaacataa

SEQ ID NO: 75127 - DNA, 181 bp, Glycine max
  unsure (1)..(181): unsure at all n locations
  Clone ID: PAT_MRT3847_38853C.1
acgaagctcccaangcggctcaagcaatcatctcccattttttttccatttttttccagaaccacccaaatttgggcttttttaaaaaccataggcccgcaaaatctcctcctcccattcatccaaatcaatcttccatcttactcaaaacctcttctcttatactcatattaatttttcc

SEQ ID NO: 75128 - DNA, 187 bp, Glycine max
  Clone ID: PAT_MRT3847_38854C.1
gggtcccagttttagatcagattccagaattgaacccattgcttaatttttttttttggcctaatttagttcaaaacctttccttcattcaagtggtaggggttaaccttaaccttaccaggaacttttggaaccaactcaagtttcaagcctctggtacctggctttaatggtccggttggtgggt

SEQ ID NO: 75129 - DNA, 282 bp, Glycine max
  Clone ID: PAT_MRT3847_38855C.1
ccaaaccaaacttgaagctcaaagaaggaaacaacaacttgaagatgaaggtacggaatacgtgggggcaggggcagagttatctgcatgaaaagaattttgcctgattctttttaaggaggatggtaattgaattggcgtgttgcaaaggcaataacatgtttttttgcaactaaagcttctacgcccatttctatctactggttggtgtgatatgataaccccccaccaacaaatacacataaatgcattgctcgctgaataggtgacacagtgggtgat

SEQ ID NO: 75130 - DNA, 1874 bp, Glycine max
  Clone ID: PAT_MRT3847_38856C.1
aattcggctcgagcttgaccatgatgatactgaaaagcagatgctgagaaagttaagtaaacaacttagtggtgaggaccagatatagatcctattgcccagcacagtgtgttcaaattgttccatcttcttcttctttttcatcaatcatcaccagtggttcttttccttctgagaagatcgaattgtgttttaaacatttccctgctacttcatcttcttcttcttcttcttcatcaccggtggttctgttcattcttccttgcaccttcttctttgaagatcgaaattgtgtttttgaaaaaatgggagttccagagaaagaccctctttcccaattgagtttgcctcctggttttcggttttaccccaccgacgaggagctcctcgttcagtatctatgccgcaaggtcgctggccaccatttctctcttccaatcattgctgaaattgatttgtacaagttcgacccatgggttcttccaagtaaggcgattttcggtgagaaagagtggtactttttcagccctagagacaggaaataccctaacgggtcccgacccaacagagtagcccgggtcgggttattggaaagccaccggaaccgacaagatcataaaccaattaaggatcatgcactagtatcgaaacatcgcctccttcccgaaagaacactggcaccaagcttgatgactgggttctgtgtcgtatatacaagaagaactcgagtgcacagaagacggcgcaaaacggcgtggttccgagcaacgagcacactcaatacagcaacggttcctcttcttcttcttcgtcccagctggaggacgttctggaatctctgccatcgattgatgaaaggtgtttcgcgatgccacgcgtcaacacgctgcaacaacaacagcaccacgaggagaaggtcaatgttcagaacttgggtgcagggggtttaatggattggaccaacccttcggttctgaattcggtcgccgatttcgtttcggggaataatcaagtggtacaggaccagactcaggggatggtgaactacaactgcaatgacctttatgtccctacgttatgccacttgggcacgtcggttccgttaaagatggaggaagaggtgcaaagcggcgtgagaaaccaacgggtcgggaacaataattcctggtttcttcagaatgatttcacacaggggtttcagaattcggttgacacgtctgggtttaagtacccggttcaaccggtggggttcgggttcaggaattgaaccctgttatcgattaataatagtagtaatcttttaaatcggtaaataggtgggggattctttgggcttaactcgtgggggttttagattaatcctttagaaaagggaagaagaagaagaagaagaaggtgaaaattttggtcctcattttcagctaaagatgtagggtatacaaacgttcaatgaaccaatccacgagataaagcaatgacgggaccattttaatttgttacgacgtagttttcggcccacacaagcccttactcagccacatgaatcacatttgtacttcaaatgaacagcaagaattttttttactatatgttaggtttcgttaaataattccaatcatgatattactttgttaactaactaaagtccctaaagaaatgcaactcattagaagtctgagaaaaaacatgtctaaagtatttggattgaaaatcatctacctttaaaaagacaccgggggggggggtctaaacccaatctgctttttccagactgtgaaaacactgcctttggggcccctgatgacacttacgttctggatacacctgggggtgctcgagttgaacctccctactcatgctccccttgggcctgc

SEQ ID NO: 75131 - DNA, 1567 bp, Glycine max
  Clone ID: PAT_MRT3847_38857C.1
ttcttcttctttttcatcaatcatcaccagtggttcttttccttctgagaagatcgaattgtgttttgcaaaaatgggagttccagagaaagaccctctttcccaattgagtttgcctcctggttttcggttttaccccaccgacgaggagcttctcgttcagtatctgtgccgcaaggtcgctggccaccatttctctcttccaatcattgccgaaattgacttgtacaagttcgacccatgggttcttccaagtaattatcaaatcgctcacccatctccatttttttttaagttaattactttgttctaaattgaatagatttgattgattaattttgcaggtaaagcgattttcggtgaaaaagagtggtactttttcagccccagagacaggaaatacccgaacgggtctcgacccaacagagtagctgggtcgggttattggaaagccaccggaaccgacaagatcatcaccaccgaaggtagaaaagttggcataaaaaaagccctcgttttctacgttggcaaagcccccaagggcaccaaaaccaattggatcatgcacgagtatcgcctcctcgactcttcccgaaagaacactggcaccaagcttgatgattgggttctgtgtcgtatatacaagaagaactcgagtgcacagaagacggcgcaaaacggcgtggttccgagcaacgagcacactcaatacagcaacggttcctcttcttcttcttcgtcccagctggaggacgttctggaatctctgccatcgattgatgaaaggtgtttcgcgatgccacgcgtcaacacgctgcaacaacaacagcaccacgaggagaaggtcaatgttcagaacttgggtgcagggggtttaatggattggaccaacccttcggttctgaattcggtcgccgatttcgcttcggggaataatcaagtggtacaggaccagactcaggggatggtgaactacaactgcaatgacctttatgtccctacgttatgccacttggactcatcggttccgttaaagatggaggaagaggtgcaaagcggcgtgagaaaccaacgggtcgggaataataattcgtggtttcttcagaatgatttcacacaggggtttcagaattcggttgacacgtgtgggtttaaatacccggttcagccggtcgggttcgggttcagaaattgaaccggctgatggattaataatagtaatgtttaaatcgggtttatttggtgtaaataggtggggattctttgggcttaactcgtgggggttttagattcctttttagaaaagggaagaagaaggtgcaaattttggtcctcattttcggctaaagatggagggtatactacaaacgttcaatgaatcaatccacgagataaagcaatgatggaaccatttaatttgttaggacgtagttttcggccatacaagcccttacttagccacatgaatcacatttgtacttaaaatgaagaactagaaaattgtttgctatatgttaggtttcgttaattaattaattccaatctggttattatgttgttataaaaa

SEQ ID NO: 75132 - DNA, 311 bp, Glycine max
  Clone ID: PAT_MRT3847_38858C.1
gtatctacatgtcaaaaacagggtttttcttatcacatcccttcttcaacacctggcggactcttatcgctctctgcatggcttcatcctccttcaaggtgtctaagagcaaactcgttaccacaccgatcacttgcatctcttcatgcaagatagtttcttcgcttacttgttttgagtcatatatcctggattctattcatctattgacgtttcaactttgaattctatcctatttgctcctatgttaccttctgattattctagcttaatctttcgatattaatccactctcctactttaaggaacac

SEQ ID NO: 75133 - DNA, 1619 bp, Glycine max
  Clone ID: PAT_MRT3847_38859C.1
ctaatgagttgcatttctttaggtactttagttggttaacaaagtaatatcaagattggaattatttaacgaaacctaacatatagtaaaaaaaattcttgctgttcatttgaagtacaaatgtgattcatgtggctgagtaagggcttgtgtgggccgaaaactacgtcgtaacaaattaaaatggtcccgtcattgctttatctcgtggattggttcattgaacgtttgtataccctacatctttagctgaaaatgaggaccaaaattttcaccttcttcttcttcttcttcttcccttttctaaaggattaatctaaaacccccacgagttaagcccaaagaatcccccacctatttaccgatttaaaagattactactattattaatcgataacagggttcaattcctgaacccgaaccccaccggttgaaccgggtacttaaacccagacgtgtcaaccgaattctgaaacccctgtgtgaaatcattctgaagaaaccaggaattgttctggacccgttggtttctcacgccgctttgcacctcttcctccatcttttgcggaactgacgtgcccacatggcataacgtagggacatagaggtcattgcacgcgttgtagttcaccatgccttgcgtctggtcctgcaccaattgattatgattattattccccgatacgaaatcaacgaccgaattcagaaccgaagggttggtccaatccagtaaccccccttcacccaagttctgaacattgaccttctcctcgtgctgctgttgctgcagcgtgttgacacgtggcatcgggaaacaccgttcatcaatcgctggcagcgattccagaacgtcgtcgagttgtgacgaagaagaggaagaggaaccgttgctgtattgagtgtgctcgttgctcggaacgacgccgttttgcaccgccttctgtgcactcgagttcttcttgtagatacgacacagaacccagtcatcaagcttggtgccggtgttttttcgggaagagtcgaggaggcgatactcgtgcatgatccaattggttttggtgcctttgggggctttgccaatgtagaaaacgagggctttttttatgccaacttttctaccttcggtggtgatgatcttgtcggttccggtggctttccaataacccgacccggctactctgttgggtcgggacccgttagggtatttcctgtctctagggctgaaaaagtaccactctttctcaccgaaaatcgccttacctgcaaaaattaatcaatcaaatttattcaattcagaaaaaaaatccccttctttttcaccgaaaatcgctttacttggaagaacccatgggtcgaacttgtacaagtcaatttcggcaatgattggaagagagaaatggtggccagcgaccttgcggcacagatactgaacgagaagctcctcgtcggtggggtaaaaccgaaaaccaggaggcaaactcaattgggaaagagggtctttctctggaactcccatttttgcaaaacacaattcgatcttctcagaaggaaaagaaccactggtgatgattgatgaaaaagaagaagaagatgatgaaaatgttttttttttcttctca

SEQ ID NO: 75134 - DNA, 438 bp, Glycine max
  Clone ID: PAT_MRT3847_3885C.1
ttttcgcgtccgggagttaggaatccctgaagcgtaccggattccattgcgatatcatttgcgacactggatggactgccaccccaatgcaggatgttcaggtcacaatcgatcggttcattccctctcaggaatgtgctcccaggacctattgtgttctaaatccacaaaatccttttgagttaaataggtggatggggaaactgactctcccccagggcacttcccgaagagttaaaagaatgcctatatctatagggggaggagctggtgcaaagaatgctattcatatgaatatgccaaatgctgtcctatcaaatgaggaggataattcgctggagaatccggctctgaagctccctagatgactactcccctacattaaaaggcacagtctgcttctacatagcaatctggaaaataggactgatgacaccc

SEQ ID NO: 75135 - DNA, 774 bp, Glycine max
  unsure (1)..(774): unsure at all n locations
  Clone ID: PAT_MRT3847_38860C.1
ttcgatcttcttcttctttttcatcaatcatcaccagtggttcttttccttctgagaagatcgaattgtgttttgcaaaaatgggagttccagagaaagaccctctttcccaattgagtttgcctcctggttttcggttttaccccaccgacgaggagcttctcgttcagtatctgtgccgcaaggtcgctggccaccatttctctcttccaatcattgccgaaattgacttgtacaagttcgacccatgggttcttccaaatttgattgattaattttgcaggtaaagcgattttcggtgaaaaagagtggtactttttcagccccagagacaggaaatacccgaacgggtctcgacccaacagagtagctgggtcgggttattggaaagccaccggaaccgacaagatcatcaccaccgaaggtagaaaagttggcataaaaaaagccctcgttttctacgttggcaaagcccccaagggcaccaaaaccaattggatcatgcacgagtatcgcctcctcgactcttcccgaaagaacactggcaccaagcttgatgattgggttctgtgtcgtatatacaagaagaactcgagtgcacagaagacggcgcacaacggcgtggttccgagcaacgagcacactcaatacagcaacggttcctcttcttcttcttcgtcccagctgggagacgttctggaatctctgccatcgattgatgaaaggtgtttcgcgatgccacgcgtcaacacgctgncacaacacagcaccacg

SEQ ID NO: 75136 - DNA, 776 bp, Glycine max
  Clone ID: PAT_MRT3847_38861C.1
gagaatatttaacttttttgccatatctttatcttagccatactgaaattccattgatgtgcttaatcatgtgaaacgagttctcttcatgctgctgctaagattttactaattattatgcttggcttttaggaggtcctcaaagtgatgcaaacttgttccccaatgttgatagtacttggaaaacattcaatgagttacaaaaactgcttagtaagactaatggccaagttgtcggtgacttgatgactccaactccacttgttgttcatgaatcaactagtcttgaggaagctgctaggctgttacttgaaacaaaatatcgtcgactacctgtggtagatgatgatggaaagctggttggacttattacacggggaaacattgttaaggcagctctactatcaaaacgtgctggatagtggtgattgtctttgtgaaaagttattcaaatagatttgcttgaaggccaaaggaggagctggaggcaacttttgatggccttgtgagatcttagtggtggataaaaaaccatatagagtgatgtgatttatcgataacctttattaagttgtcaaaattgtttcggtgcattggattgtttcgagcttggatatactacatcctgttcttgatgcagtctctgttaacggacatttatgaggtcggaatagataattttgtgccctttattataacctttgtattgtaaattgcataggattttaatttatatgtaatttatgtcctagtccttcattattggattatttgcc

SEQ ID NO: 75137 - DNA, 2221 bp, Glycine max
  unsure (1)..(2221): unsure at all n locations
  Clone ID: PAT_MRT3847_38862C.1
ggctcgagaaatactctttatctttatttcttcccccattttttctctcttccctaacaacgcggaacaacggctttttttatatatataaaaaaataaacaaaattctgacatatccgagaataatgctcaccaacagcatatcttctttttgccttctcactccaacaattccctaatcccaaactcttcactcttcttcaccctcttcttttgctttcacaccaatctcagacaaaaaaaaaaactaaaaaaaataattaagaaaccctagaaccgtgtttgggtggaggaaaacatggccaccaccaccaccagtcttggcggcggcgcaggcgcgagacgaccgcgtcctcgccacggctcagcagatcgtgaagagtctcagagcggcgaaagaggatcgcgaagacatgcttatgatcttctctgccttcgataaccgtctctccggcatctccgacctcatcaacggcgacgattcgaagtcttctgatgaggaagaactcgaccgcttcgaagccgcggagaaagtgattctcgctgacgcctcccactccggcgagccttcgcgccaatccacgtcgctcttcaaccctccgaacaatcccgcggagtacttctcagccgtcgacgaaatcatccactggatggagcagttctcgatcgcgccgccgccgtcctccgccgcgggtcgcaccatccaggtcatcgcggaccgcgccgagaacgcgattcagctcgcgatgtcgcggctcgaggaggagcttcggcacgtgctgatttgcaacacgatccctctcgacgccgtgagccgctacggctcgatcaggagggtttcgctctcgttcggctcgcatgacggcgccgccgcaattgacgattcccccctccagagcttcggcgaggtcgactcgagccgcttccacgaccgcgccgcgagcctcggcgacgacttgttcgtcgatttggtgcgtcccgaggccgttcaggacctcagagaaatcatcgatcgcatggttaggtctggttatgagagagagtgtcttcaggtttatagtagcgtccgtcgtgacgctttggatgagtgtttgattattctcggtgttgagaggttgagtattgaagaggttcagaaggttgagtggaggagtttggatgagaagatgaagaattgggttcaggctgttaaggttgttgttggagtgcttctcagtggtgagaagaggctgtgtgatggtttgtttggggatttggatgatttgaaggagatttgtttcaatgagactgctaagggctgtgtgatgcagttgctgaattttggtgaggctatcgcgatttgtaagcgctcgcccgagaagttgtttcggattttggacatgtatgaggctttgagggatgctatgcctgatttgcaggccatggtttcggatgagtttgtgattggtgaggccaatggcgtgctgagtgggcttggtgaggctgccaaagggacttttgctgagtttgagaattgtattaggaatgagacttccaagaagccggtcataaccggggatgttcatcctttgcctcgttatgttatgaattatctcaagttgcttgttgattatggtgaccctatggattcgcttctggagcttagtgaggaggatctctatcggtttaaaaatgatcttggtggtgatggttcgcagttagaggccatgtcgcccttggggcagcgaattctgctgctcatgtcggagcttgagtataatcttgaggagaagtcgaagctttatgaggacagtgcaatgcagcaggtgtttttgatgaacaatctttattacctagtgcggaaagtgaaggactcggacctagggaaggtcttgggggataattggattaggaaactccgtggtcagataccccagtatgctacagggtatctcagagcctcttggagcagggccttatcttttttgaaggatgaagggattggagggagctccaataatgcatcaaagatggctttgaaagagaggttcaagagtttcaatgcttgttttgaagaaatttacagggttcagacagcttggaaggttccngatgaccaacttcgggaggagctgcggatatctatatcataaaaggtgattcctgcataccgctcctttgttggaagatttaagtgtcagttaaagggaaagcatgttgggaagtacattaagtatacacc

SEQ ID NO: 75138 - DNA, 647 bp, Glycine max
  Clone ID: PAT_MRT3847_38863C.1
attttatcattcctctgagatagagctacagcaccattatcattcatctccattactttcctattcgatcctcgatccctctcccacatagaagattcatcaccccaaaacccaattttttttaataatacaactgcaattatttttattttctcagtaaaaaaaaaaaaaagagaaatgagttcgattcatttgttaaacactcttgctgttccgcttcgttctttttctcctccgtcgctctttccgcaatgccattctcctctccgttcttcttccgctgttccaaaacggcgtcgtttctctaactcctctgggttccgtcttgcttcaagtcaaaccgtgaattcggttccgcgtgcgaatggaacttacaccgtttcggatttcatgacaaagaagcaagatttgcatgttgtcaaaaccaccaccaccgttgatgaagctttggaggctcttgtaaacaacagaatcagtggtcttccggtgatcgatgaggactggaatctggttggagttgtttctgattatgacttattggctattgattcgatatcaggaggtcctcaaagtgatgcaaacttgttccccgacgtcgatagtacttggaaaacgttcaatgaggtacaaaagctgcttataagact

SEQ ID NO: 75139 - DNA, 435 bp, Glycine max
  Clone ID: PAT_MRT3847_38864C.1
gggttagtgcagatctgaaaatgagaaaacttggtcccatgccaagtccacctcctccacctaggaattctcctggacctggaccaggtcgacgcaaaaccgcgcgcgccgctcctccacccatgttaattaattaaaaaatgtgttaaaaaatttattgatactcctctaattaatttctaacattgaggtatagttagttaaatgcatgtttggattctcatttgtgatccatgttttaactgatttccacattgctacgcaccaaaagtaactacttgtttgctttggtaatgtgcgtctgaccccaacaaatggaatccaacaaggtaagaaccctgccattcaataatttttcgtggtacttgatcctgaaatgttacaatggacctcaagctttgattcttactttgtttatatagctttactgtatta

SEQ ID NO: 75140 - DNA, 1530 bp, Glycine max
  Clone ID: PAT_MRT3847_38865C.1
tcggctctagattggatcagggctgagaatatttaacttttttgccatatctaaatcccagccatactgaaattccattgatgtgcttaatcatgtgaaacgagttctctttacgctgcgagaagacgacagaaggggacttttcattcattttttttccaattattttatcattcctctgactgagttagagctgcacatctccgttacattactttcccatttcattattcgatccccaattcctctcccacgcagaagaatcatcaccccaaaacccaaattaaaaaaaaaacccaaataatacaactgaagttattttaattttcttagtaaaaaaaaaaagagaagaaaaatgacttcgattcatttgataaacactctcgctgctccgcttcgttctttttctcctccgtcgctttttccgcaatgccattctcctctccgttcttccgctgccccgaaacggcgtcgtttcgctaactcctctgggttccgccttgcttcaagccaaaccgtgaattcggttccgcgtgggaatggaacttacaccgttgctgatttcatgacaaagaagcaagatttgcatgttgtcaaaaccaccactaccgttgatgaagctctggaggctcttgtaaactacagaatcagtggtcttccggtaatcgatgaggtctggaatctggttggagttgtatctgattatgacttgttagctattgattcgatatcaggaggtcctcaaagtgatgcaaacttgttccccaatgttgatagtacttggaaaacattcaatgagttacaaaaactgcttagtaagactaatggccaagttgtcggtgacttgatgactccaactccacttgttgttcatgaatcaactagtcttgaggaagctgctaggctgttacttgaaacaaaatatcgtcgactacctgtggtagatgatgatggaaagctggttggacttattacacggggaaacattgttaaggcagctctactatcaaaacgtgctggatagtggtgattgtctttgtgaaaagttattcaaatagatttgcttgaaggttgtgctggcgacggtcagcgtaacctctatattattagctacggataatgttaatgtatgtagttatatctaatggatgtttagactattgcaaatgtatatggcaggccaaaggaggagctggaggcaacttttgatggccttgtgagatcttagtggtggataaaaaaccatatagagtgatgtgatttatcgataacctttattaagttgtcaaaattgtttcggtgcattggattgtttcgagcttggatatactacatcctgttcttgatgcagtctctgttaacggacatttatgaggtcggaatagataattttgtgccctttattataacctttgtattgtaaattgcataggattttaatttatatgtaatttatgtcctagtccttcattattggattatttacccccaaacccgatcacacacaatcccacaaacagcccccccccc

SEQ ID NO: 75141 - DNA, 333 bp, Glycine max
  Clone ID: PAT_MRT3847_38866C.1
aaaaaaaaaaaaaaaaaaaaagaaaaaaaaaaatttaaaaaaaaacagagaaaacaaaaaaaaatgaagatacaggaaaaattaaataaggacaaaaaaaaaaaaaataaaaataaaaggggttgccgcaacaaaggtccaaattttacgtacccgattatgcaactctttatctattcataagggtccctaaatttcaataaactggcctacttttaacaacgtcacaactggaaaacccctgtatgctcccaactaaatatccttgcagaacatcacctttttccaaactgtcttaaaatccaataggcccgtaccgatcgccattcctaa

SEQ ID NO: 75142 - DNA, 365 bp, Glycine max
  Clone ID: PAT_MRT3847_38867C.1
attctgattcttgaccatgggaagctggctgaacagggaaatccgcagattcttctgaaagatggcacctctatattttctagttttgtgagagcttcagctatgtaaccatggaactatggaagggacagtatggttggttcttggtctctactcatgagcagactagcacagatgatcctctatagtcagagtgctatcatatcctttctgtgatggtctgcttattgttaagtatcaaacccatactttatgtgatgataggagacccttgataattgctaatgatgttcaagtttcgtctacaccaatgcaacacaagtaacagatctcattgacttttcatctaaaaaaaaaaaaaaaaa

SEQ ID NO: 75143 - DNA, 823 bp, Glycine max
  Clone ID: PAT_MRT3847_38868C.1
cccgtcttcttgtggcctgcctccttcgtggacctggttggtaggtatcacagagtgtgcaagcctttttgcgaacgagaggttgcaacatattccaggtatccaaatttgcaacctaagatctgtacctttatggtaaaggaattgcattgatgtttggtgcttttaataccatagttggttggttagtacttagttctaagttctaactttccatcaagtactaagcaaatagaagaaagtaaaaatgggactttcttctacaacactgcttccaattgttgtgctgctttctcttctttgcacagcctgtgccagaaattcagctgaaaacaactttgttcactgccttgtgaaccattctgagccctctcaccccatatctgcagcaattttcacacaaaagagttcctcattctcttcagtcttgcaagcctacatcagaaacctacgtttcaacacctccacaacccataagccgttcctcattgtgaccccatttcaagtctctcatgtgcaagcagccattgtttgtgccaaaaagcacagcttgctgatgaaaattcgaagtggcggccatgactatgaaggggtgtcttatgtggcctcacagccatttttcatccttgacatgttcaatctccgatccattgagatcgacatggacaccgaaaccgcgtgggtccaagccggtgcaacgcttggcgaagtttactatagaattgctgagaagagtaaaactcatggtttccctgcaggggtgtgtcccactgttggggtgggaggtcacattagtggtggtggatatggcaatctcatgaga

SEQ ID NO: 75144 - DNA, 282 bp, Glycine max
  Clone ID: PAT_MRT3847_38869C.1
ccacgcgtccgtagcgagaagacgacagattgtggtagtggaagtagtaacaggtacgtcgcatatctagttcatctttagcggctatacagttttggcccttccaattatcagatctgaatcaccggtctcactctgcacactcactcacactgaatggctgctgaatgcaaccatcaccaccaccaccaccaccatcaatatcacgaccatcatcattatcatcatgatcaccatcatcatcacgatcgagagggacagaccaactcatggctaggtaat

SEQ ID NO: 75145 - DNA, 236 bp, Glycine max
  Clone ID: PAT_MRT3847_3886C.1
tctcgagccgatatcggctcgagcacacgaaacgataccattcaatcatgcagcggcttctgatcctctctgggcctaaacagaatgcttttccgtccggagagatgcaaaatggagtctcaaatgggcgtcggttttatcaggtgtatactacgaggagcacaccctttcctgctttatctgagcgcgtctgaaatgataccgacattcacctttacaaagaatgacctggcttg

SEQ ID NO: 75146 - DNA, 564 bp, Glycine max
  Clone ID: PAT_MRT3847_38870C.1
tttgttctttacacaattcaattccgaaagttctttaaccatttttgcacctcaattctgcgaaaacactttttgatgacgcagaatgcttcagctggaattgcttcggaatgggttttgaatagaaatgcttcaagatttatttcgtcactgctcaaaattccaaccgttaaaatccgcgacacataatcagtcgagcacaaagttgctgaaatttcaaggacaggttacgacaaactcattgtaatctcagattttgactacactttgagtcgctatcacagaaatggcgaacattgcaagacaacgcatggaatatttagtggagtttgcgttaacgaaaagaatttggagttttatgagaaggcgcatgctttggaaacaaagtataaacccattgagttctgtccaacaatgcccatgtgcgacaaaaattctttcatggaattgaggtggaaggaatctcatttactgattgttcaccagcgcttttatatgcgacaattggtaacttcggttcgaattcgagaattatcttccgaccgttgattgaatcctaacttt

SEQ ID NO: 75147 - DNA, 337 bp, Glycine max
  Clone ID: PAT_MRT3847_38871C.1
tcgtactccctttcgtccgcaccgtaaatcccgggttttaattcccgatcttatgtactcgctagtggatcggttttatatggacgaggatcatctccctttaaaactcttcacatatacaaataaactgtgaggcatctttaaaatgccttcacagcaagggatttccttgctattttcaaattaatgataaatctatagaacgctttacacaacttaacaatgatcctgtttctcatcctgcacaagatcttactgaccctaactttcacttaagcaatcagtaccaaaagccttacaattaatttcacaccaaacctacttatcaccaaaatta

SEQ ID NO: 75148 - DNA, 454 bp, Glycine max
  Clone ID: PAT_MRT3847_38872C.1
aacacaagcacgaaagaaaagtaccagtgattatttaatttataaaagatgttttcatgcgcagctctagcctatgggatctctcgtaataacacacaaagactagtatagctccacagcatagatgaagaacaaataaaccagaaccaaagatacataataaataactagggcataaaacatgttaagtttacgaccatgcgaaatgagctcgatttattgcgaggatacgaccaccgacgagagtgttaatcaacctaagtttcagatccgagtagggagggtaccttattgctgaagccccatgaaaactgcgataaagaactgctttttggtgtgtcttagcatcagaagagaactctgcatgggaagcgccaattgcactgtaccgaactattaaaaatgggaaggtgtcatccacaagatgtaagggaccgttattgacgagcaaacc

SEQ ID NO: 75149 - DNA, 389 bp, Glycine max
  Clone ID: PAT_MRT3847_38873C.1
agcctatctcatgggaaggaccctacacaggctagactgaagttggtgcctatatacttgagagcaccgctgacacaagagcgtacgtgacacaatgggccttgaccagaacgtgcattgcccagagtttactatgccattggggtctcatgagcccttgtcacgcgataggggacacttatggaactgctaagattccatgacgaggagattcttcatattgcgaaggagaattgcgacttcttacctggaatgatcaccattaacttgaaccttaccaggggtgtccataggttccttaagacagctgcttatggacactatgtaaaggatgaccctgactacacctgggaaggagtgaggccactcacgtctgataagcctcaagc

SEQ ID NO: 75150 - DNA, 381 bp, Glycine max
  Clone ID: PAT_MRT3847_38874C.1
ggcacaagtgagtttgttgatcgagataactagaaacagtgtgatgaaaatgaaggtccttgttttcttcgttgctacaattttggtagcatggcaatgccatgcgtacgatatgttccctctccgaatggaacactggcaatggtgcccttattccggaggtaaattccccaatttggaggcttgctgtgaaagcacacaccatctttggctttgaaacaatccttaaaaattcctttaaaccaccaatggatacattcaatgcgaacaatatatattaaactccaaaacactttaccaacaagcctacatttatgccagagacatccaaatctatctcacagagacatatgtgttcactatagatggcaccgtattctc

SEQ ID NO: 75151 - DNA, 692 bp, Glycine max
  unsure (1)..(692): unsure at all n locations
  Clone ID: PAT_MRT3847_38875C.1
ccacgcgtccgacggcagaagacgacagaaggggattttcttcgttgagcagaaagctaaaggctaaagcctagaaccttcttcctttacacctcgctggaaccagcgatggatcctcagcctgagccagtcagctacatatgcggagattgtggaatggagaatacgctgaagcccggtgacgttatacagtgccgtgagtgcggttaccgtattctttacaagaagcgcactcgtcgcattgtccagtacgaggcacgctgaagaaaactgctataacgtttgcaagtaatttccatgaagaaattgttactacatctgtgttgtgtgatattgaagaactacttttaattctacagtagattgctttttgggtgatgtttagcaaaagataaaaactttgaatgtgaatatattacaaacatccgtgtttcattagtttgcaattttatccctactatggttaagaaaaaagtttcatctaaaaggattggtgctcataatggatcaacttgctatgtgttagacagtttgcccatacagtctgcccacccaaagcttcaaatgtggcttgtaaaatgagatacattctgaaatagtaacatattttgttgttcggcgaggcctccttttcgtcaangaaatgggggaaacattgaaatacgagccaattgaaattgcaacaggtgaca

SEQ ID NO: 75152 - DNA, 471 bp, Glycine max
  unsure (1)..(471): unsure at all n locations
  Clone ID: PAT_MRT3847_38876C.1
tcggaaaatggtcaaagacaaaaaatattacgacatcctcgaagtaaacaccagtgcaacagaccatgacttgaaaaaggcctatcgaaaattagcgcttaaatatcatcctgacaaaaatccgaatgaaggcgaacgttttaaactcatttctcaggcttacgaagtgttgagcaaccccgaaaagcgtaaagtatacgacgaatatggagaagaagggcttaagggtggcggagaaggcggcggaatgcacaatccaatggacatattcgaaatgtttttcggcggtggtggttttcgtggcggtggtgaaaaaccgaccaaggtcagagatactgttcatcagcttaccgtttcgttagacaaactgtacaacggatgcaccaaacacttgcgcatcacaaggcatatcctttgtccgaaatgtaatggtgtcngcggcgctaaggaaggcgtcaaacaatgcgaaaa

SEQ ID NO: 75153 - DNA, 489 bp, Glycine max
  Clone ID: PAT_MRT3847_38877C.1
cttgtcaaagtaggatcatctattctatcattcataatgggtgaagtgacattcaaagatgacatcagcttcactgtggttcctgctactgtatacaaagccgtaggaccggatgcctgcgacggcatcccaaaggctcaacattctttttggagtggtgtacacgcagaaggaagtggacgcccaagaaccataagaataatcactttcggtgtggatcgaaaagccaacctcgtgctgctcaaaaagaacagcattgctgacgctaacttgggatacatctacagggtgggtgtgagcgctgccttgccagacacagtggacaagatcacatccaactcacccttgattgctaccaccaacggagggggagctggaaggatcctgtccaacacgaaacacaatgagatgctgagcaccaccctgacgatctctccactggtaaagccaaggctgatgctttttttgaggacatcgaagctgaccttt

SEQ ID NO: 75154 - DNA, 485 bp, Glycine max
  Clone ID: PAT_MRT3847_38878C.1
ccagtagcttttacttggctgttctttttggcgtttagaatgaaattctgagttctaacgccactaatcctatgctgacgcgacttctttgagaacagaaagagtctcaaatatctggttgatgagtgtcctttagcatatgagaactactatgtagtattttattcacttaaataaagcgcattactatgtgcaatgagtgtgtttaaatataaaaaaaacccgtaaaacaaaaaataagggggctgaaaaacaaaaatttcttttttacccccaaaaaaaacccccggtaacccctctgaaaaggggcttggccccaatctaagactttcccaccccgggaaataaaccccggccctttttttgagggccccccacattaccatctgtggggcgttttttaaaacacgggggggtaggaaaaaaccctgggtttcccccaatttaaaacaccggggaggacccccccttcttccccattggag

SEQ ID NO: 75155 - DNA, 585 bp, Glycine max
  Clone ID: PAT_MRT3847_38879C.1
gcacgagggcgtatggaaatcaaattctaattggaataatccgtaaatttttatgtgttagcatggagttcgctagtgacactttccactcaccacaacaataggaagtaaactaaacatacaagcgccaaaattagttggtaaaagtccacctttaaattgcttgttttatgccttttttgtgtggtaagtgatgacaaatataatcccagctctatgagaccttcgctactgcaaggtctgggatgcgcgtggtttacagttgtctgagccacgttctcaaacgttatgtacatttttattatttctctccaaataatttttaatacaccttatttgtcatgatcaaaatagattataaataatagtatctgtctagaggtcaatgtatcttgggatatttttttatggtcttgttaatagatttcatttttttatcctgtttaatttctttgtctattttaaaggaaatgtgatttgaatttggatgatttcattgatttttttatattctgatcaaaaaaaaaaaaaaaaaaaaaaaaaaaaaaaaaaaaaaaaaaaaaaaaaaaaaaaaaaaaaaaaaaa

SEQ ID NO: 75156 - DNA, 1573 bp, Glycine max
  unsure (1)..(1573): unsure at all n locations
  Clone ID: PAT_MRT3847_3887C.1
gncctctttcattgccagccatgaccgaggtcctccactcctcatccccaccccattttgttgcttcttcatcaccgccaacaaagacaaggacaacaaccactacaacaacaacctcttcattctcttctcacaataatgcctttctcctccgacctctcttggctcttcttctgacccttctcaggaaatccttccagctttctcgcaaaaacatcggctccattatggacattggctccccaacgaacgtgcgccatgttgcgcatgtcacctttgataggttcaatggtttcttgggcttgcctgttgagtttgaacctgaggtccccagaaggcctcctagtgctagtgcatctgtttttggagtttcaacagaatccatgcagttgtcgtatgactcaagagggaacagtgtgccaacaatactgctgttgatgcaaaggcatctgtatgttcaaggagggttgcaggtggaggggattttcagaattaacgcggacaatggtcaagaggaacatgttagggatcaattgaatttgggagtggtcccagaaggcattgatgtacattgtttggcagggctaattaaggcttggtttagggaacttcctacaggcattctagattcattatcacccgagcaggtaatgcaatgccagactgaggatgaatgttctgaactagtgagacatctacctcatactgaagcttcactcttggactgggccatcaatctgatggctgatgttgtcctacatgagcatgttaataagatgaatgcgcgtaacattgccatggtttttgcaccaaacatgactcagatggcagaccctatatctgcattgatgtatgcagttcaagtaatgaacttcttgaagacacttatattaaggacagtgcgggaaagaaaggattctgtggtagaatcatgtcctagattttatctacaaccttctgtagataatgaaaaccgtagaattttggagtccttccggcaagatactcctgcagaaaatgaagaggctcaagaaaactttgttttagagaaaactgccttagaccgttcccctgaatcactccaaaacaactcaactggaggagaacctggcagtttgacaaactcttctgagaatcttgtttgcaatgaggatttgtattgtgagtttccacccgtaggaaacatggggaagagtaaaactggccaatcaagtaagtcaaatgctagaaaagagtccaaaaagacaagaggcagcaacctgtgatccatcaaatagtgcctgttgagaaaaaaaaaggaattggtattttaagtcacatagatacaataaatgaatagatcaaagcgtggctgtgaagaacagaagaggcactgaaatgtaaattgattatttgacattgtggcattgtaagtttgtttatgtctcaagttgcaaattgccaggggaagtttgtgaattggtcctttatgatttctttttcctttttcctttgtttgtttaacttatctgatttcaagaatagtactatgatcccactaacattgtaatgaaatatcattccctgtgtgttt

SEQ ID NO: 75157 - DNA, 470 bp, Glycine max
  Clone ID: PAT_MRT3847_38880C.1
gggggcaaaaaaaaggcaacaaataaaccccagaaggtttgggagccaacagtttggttttcagttggaaaaaaaaaccgggggggcggaacaaagggcataacaaacccggggaaaaaatccccccgggaatggaaagggaaaaaccaaaccctaggtttttttttttacaaaatcatagggaaaaattacctaggccccccccctaaatttttttattagggggggcaacaaaccctaataaaacggggggggaacaggactaattcctttttacccccaaaataaaaaaggcaaatttgggaaaaaaaaaaaccctttatacgggcccccacccaccccaagggggattaaggggggattttgggggccggccttaacattagggggctggaaaaaaaaaattataaaaagttccttacccgggggttttaagtttatttttcggggggaaaaaatccaggcccccc

SEQ ID NO: 75158 - DNA, 214 bp, Glycine max
  Clone ID: PAT_MRT3847_38881C.1
cagagctgtagaaactaagaactaaagaaagctggaggagcttgaacctcatgaaaaaggaagtggagatgggacagcgagcgatggaatggatgaaggagaggacaataacaagcgctatagaaatgacacaataattggcccccataaagctgtacatgaaggaagatataaacaaatgaagctgcgatataaaaaaaaatacacagagaga

SEQ ID NO: 75159 - DNA, 397 bp, Glycine max
  Clone ID: PAT_MRT3847_38882C.1
gcagacaatatttctttgcacttttcgtgtaataaaaatgctttcggggccaaaaccagaacttttctgttgttgaaaatgaaagatagagcccgttatgccatctggggtgcaggattaaacactcctgtcacaaactatatttctaatggtgaaaccgtccaagggggaaataaataggccgctccccctaagattaaaattaaaagcctagcctttatagaaggtggagtgaaaaaaaaatttcccccaaaaggaatttacttttcatgactggcttcagaagaatctctcttctttatgagaggctggttaaaaactgctgatggctccccaacacttgggaaatctggcgaggaagtaatcccctcaatattttcattttcggcccaggctt

SEQ ID NO: 75160 - DNA, 972 bp, Glycine max
  Clone ID: PAT_MRT3847_38883C.1
tttcacttcgagaaaaagaaagaaagaaaggttttgcgaaactcttccttctccccccatcatactctcattcattcacatttcccagttctgaaaaaccctaaatcagtgttcctcctttctctcgccggaaaagcacctcgggatgaggaatcgctgtggctggtttgggtgacgtggatcgaaatgggtgtgtggaaggcacggttgttgtcgaccaacctgcttctgttgcaccctaacgccaaacacgtgtgttggagatccacgacaacaacaacaacaaagtccgtgtcttggtcggtgatttgctgcgtaatgctatttgggctgggcctcatatctctcttaacgggccacgtggcctctcatctcgaatggtactctcaccgactccgccaccgcgctctctactactccacaccggatgggagcgatcacgcgccgattgatatttgggaatcgcagtattcgaaatactactatggatgcaaagagagagggcgacatttccgtcctgctgtacgtgagcggaagtccaaaggctacttgttaattgcaactagtggaggactgaaccaacaaagaaatgggataacagatgcagttgttgttgcaagaattcttaatgctacactagttgtacctgagttggatcatcaatctttttggaaagatgacagtgactttgccaatatttttgatatgaattggttcattacttatctcgcaaaagacattactattgttaaaagagttcctgataaggtcatgcggtccatggagaaacccccttatacaatgcgtgtaccaaggaaatcagaacctgaatattatcttgatcaagttttgccgatactctcaagaagacgggttctgcaattgacaaaatttgactatagacttgcgaataatctggatgatgagctgcaaaaattacgtggcgtgttaatatcatgcttgagattacta

SEQ ID NO: 75161 - DNA, 997 bp, Glycine max
  Clone ID: PAT_MRT3847_38884C.1
ggctcgagtttttaaaatggaggtggttcaagagcagcagctacaaaatacagatggaagaaaattgcacaactcagacagaaactcaaatgtcacacagcaacttcaacatccaagattcagaaaatacaaatggtggctacgtgtgtccctctacataatctttcttcttgtaggccaatctgcagccactcttttgggaagattatactatgacaatggtggtaatagcaaatggatggcaacatttgttcaatcagctggattccctgtacttcttccactccttttttacttcccaagacaaacacatgccaagtttaataacaatcccagcaataatgattattcctacaaaacaaaaccaaaattctccacccttgttttcctctatctagcttttggcctaattctcacaggggacaacttgatgtattcctatggacttttatatctccctctttccacctattctctactatgtgccacccaattagtcttcaacgcggtgttctctttcttcctcaattcccagaaattcacagcattcataatcaattctgtagtcctccttaccatatcagcttctctgcttgcaatcaactccgattccgacgaggactcaaccggtctttccagagaaaagcatgtaattggattcttctgcaccattggtgcatcagctacattctctttgtacctctctcttgtgcagctttcttttcagaaagttataaagagagaaaccttttctgctgtgttggacatgcaattttacccatccttcattgctacatgtgcttgtgtagtagggttgtttgcaagtggagagtggaaaagtttgaacaatgagatgaagggatatgataagggaagtgtgcccgttgtaatgactgtactatagattgctgtgacatggtatatatgctcactagggatgctaggggggacgttggaggagtctgcattgttgtcggatgtgagaagtacctggggg

SEQ ID NO: 75162 - DNA, 840 bp, Glycine max
  Clone ID: PAT_MRT3847_38885C.1
ctcagcggctcgcggttgtactttttaagcattctagcacctttttgtacatagccgtggctgaatcaattttaggtttcacccttctcaaatctccccaaagccatggctgaagcaattatgggtttcacccctttcaaatcacacactcttagctcatgtctacaaacaaacaagtttcaagtgaaccagtcttcaatattgccaaagcaacattcaaactctagtcttatcaacagaccgtggcaggtcttagagggcaagagcaaaaaaagaggatctttgtgtaaagtgaatggcttgccagattggccactgatggccattatagtagagcaaatggaagggcagagagatttgatcactgagaaaacagtttcccatcttagtgatcaggcaataaaaaatgtttactcttggtacataatgttcaccgtttgggggtgcttattctttggtgccatgaaggatccatattacgactcagaaacatataggggagatggaggagatggaactggcaactggatttatgaaaagcaagatgctatggaagcagaagccagagaagctctgtggcgggaggagttgattgaggagatagaacaaaaggttgaagggttgagagaacttgaagaggctggcaagaagaactagtcaactgattcatacctttgcttccacccattaaccaagcgattctctgttattgtatataaaaagagtaatttcttatgcttcaaaatgcaatgctgaaccacagatagtactttgaactaatatatatggggtcgcaatataagtcaatgggtggattttaatcctattgttatttaaaaa

SEQ ID NO: 75163 - DNA, 156 bp, Glycine max
  Clone ID: PAT_MRT3847_38886C.1
cgtacgtcagctatgctccgagagagcgccgccctttttttttttttttaaaaataatacatgtatgatccttattgcgtaaatagacagtgcactaatacctctacagtatgagatttgcacggcttggtgcgatcccacactaacatcaagaaa

SEQ ID NO: 75164 - DNA, 300 bp, Glycine max
  Clone ID: PAT_MRT3847_38887C.1
gctcggtcgagccgagcacattgtctgtaaccaaattcaatgccatagtgtctcgtgttgttccactcgcaaagctcatatgaacatacgtgtcacctaaaaagcaggctgggcctaatagcctgacctattaactacccaagatccggcatccaatatgctggtgtctccatcttcacatagatacttctgatagaggtccttcttagctccacatatacattgaattgccaactaacacctcctagctagaataacttcctgatttttctgtaatgagctgccctcgcattcttactg

SEQ ID NO: 75165 - DNA, 478 bp, Glycine max
  Clone ID: PAT_MRT3847_38888C.1
gcactttccagcaatattgcacctttttgcccatagccatggctgaatcaattttaggtttcacccttttcaaatcacacactcttagttcatgtctacaaacaaaaaagtttcaagtgaaccattcttcaagattgccaaagcagcattcaaagtctacccttttcaacagaccgtggcaggtcttagagggcaagagcgaaaaaagaggatctttgtgcaaagtgaatggcttgccagattggccactgatggcaattatagtagagcaaatggaggggcaaagagatttgatcactgagaaaacagtttcccatcttagtgatcgggcaataaagaatgtttactcttggtacataatgttcaccgtttgggggtgcttattctttggtgccatgaaggatccatattacgactctgaaacatatatgggagatggatgagatggaactggcaactggatttatgaaaagcaaga

SEQ ID NO: 75166 - DNA, 310 bp, Glycine max
  Clone ID: PAT_MRT3847_38889C.1
cgggcaaaataaacaaactacagtagaatatgtgcatgagtagaaacatgagaagaatgttaattcacgagatactagtaaaagaaaagttcgggagcaaatgaaaaatgtgcttgcgctgcaatggctcccaaagttacaatccaaacatctttttgaaactcaagctattggcttcaacacatacattttgcaagaatgtggttcaacagggtcagtcaatttaccacggaatggtctttccaatgggttatgctcccaaagatctcttgattcaacaacagctgaaggatgaaggccaatatcttcc

SEQ ID NO: 75167 - DNA, 1819 bp, Glycine max
  Clone ID: PAT_MRT3847_3888C.1
tatttctcacactcgcaagtctcaagcaactcacacaggaagcggcaaacaaagcacacagaaagtaaaaagcggaaattaaggagcggtggtgacggtggtagtgaataaataaaagcagcaccataccatggggggagaagaagtagcaagagtcaaagcagagttgttcgacgacaacgaaagcgatcgcaacgacgacgacgttttgagcgagagcaaggactcgggagtgacgacggctcacgcagtgaaagaagagatggatgacggcgccgctaactggtcttcgtcgtcgtcgacttcgcccaaaccgatggaagggttgcacgaggtgggcccccctccgttcctgaagaagacgtttgaaatggtggaggaccctcacaccaaccccattgtgtcgtggagccaaactcgccatagtttcgtcgtttgggactcgcacgagttctccaaaacccttctcccaaagtacttcaagcacagtaatttctcaagcttcgttcgccagctcaacacctatggctttaggaaggttgattcggaccgttgggagtttgcgaatgaaggattccaaggagggaagaagcatttgctgaagaacataaggaggaggagtaagtgcaacaaactgcatcagggagcattcaatatgatgaagccagacgtggattctgaagtggagaagctgaagaaagaccagaacattttgaaggtggagattctgaagctgaggcagcagcaggaaaattctcatgttcagctcacaaatgttcaggagagaattcggtgtgcagagatgaagcagtttcagatgatgtatttcctcaccagaatggctagaaggcctgcgtttgttgagcagttagtccataagattaggcgaaaaagagagattgatggtaatgacatggttaagaggcctagattgatgggaaatccgtgccatgtacccttccctaagacaatggaaacaacacctaattttgattatagacaccaacaaggtcataaacaatttgcaacattgcaatctgagctcaatgtgacagaagtgaactccagtaggatggagcacccaactccctctcctttagaagatgaattaggcaactctttgcaagggttaagggctcatggttgttctagagcaagggcacaagatgcatcttcttctgcctatcatgttatgtcagaaaaactaatgagagaaaattctatagttgatgaagaactagatgtgaatgactccaatatctatcttgaattagaggatttgattactaagcctacagattggtctgttggatctgcaagtggattggtggaacaaactagttgaattaatctcactagtggaatagtgccttgtaatggttgcaagagtgtgcttgtgtggatgctctgctgcaacacaagatgaagaacttgatattataaggctcttcgattaccacttatcagtcttgaaagtgtaggacgtagatgctcgccccagctttttatatgatcaagcgagagtgcgagactttccatgtttctgtttggccgggtccaaattgttcatatgttgttgtatatatttccctctccgctttgtgttccttttgttaacttaggatctcaagtcctatattagcatatatagtaggcatagctaagcctcttgtgacgtagtaattaactatgtaaatgtaaagttgtaaatttgtaatgcagaaaatgtttttcagttccctgcttccctttgtctttcccacggaatcaaatcacttttttttttcagtcagaaataaaataactttttttttcagtc

SEQ ID NO: 75168 - DNA, 492 bp, Glycine max
  Clone ID: PAT_MRT3847_38890C.1
tataggtaaggctggttcgcctgcctgtacgggcccggactgactgggtggaccgacccatgcggtttttttcgtgaacggccacgccagggtgcacgcgctttgaacacttgcaacaagatgcgagtggcatctggatttgacgaggctggcaatcacatactacttgttggtgttccatgttgttaggaggaaagaggaatgacttgtatgtgctggacagatactatatgaatgatcagctgtgccactctaaagtgttggctgaacattgtctttttgatgtggaggttgtgtgaaagaggaactttgtttagattgtttgaaaggaaattggttgattatgagttaatgcttgcgaaaactaagtatgatggaatactactaatgatatggtggcatgggactaccttgggacgaaatttctatgtgtgtgattacaattagatgagagattggactgacagaaatggcggataagaggctttattt

SEQ ID NO: 75169 - DNA, 755 bp, Glycine max
  Clone ID: PAT_MRT3847_38891C.1
cccacgcgtccgtacggctgcgagaagacgacagaaggggaagcttaagatgactaagagggagttggaaactctcatggggaaagtgagaggtttgagccttctatctcttggtggttgcttcgatggttgctatgaccacactcaagcctatggattaggtacaaggatctggaacttcagtgatcgaccagtggagctgcagataagggtgggatcaatactgaagaaggttcacactttgaagccaggttcatgtaagaggctgagaagtaaacgcatatacaaggcatatatgcctggtaagaatggaaatgatggtgggggattgaagagcttgctgtattactatgatgaaacttgtcacccttatgtttggattcatgacatagggggtgattccatgaggatggttaaacagcagtatattagccttgagaatttgagggattcttctgagatcaggatctttagggatcagcaaagaggttgcatttcagttctcaagagaactaggccagatttctgctgaatttgagtgtaattcttgcttaattatttcactagtttaatttgtcatgggtaggaaataaaagtttacttcttgctttccttaattggatgttattaattgcaaaatgcaatataggtccatgagcatggtaaattattagctaatgtactgaaaaagtgtaagattttctgtatccacttccttgaagatatatcaaaagtcactcaggagactgatttcg

SEQ ID NO: 75170 - DNA, 492 bp, Glycine max
  unsure (1)..(492): unsure at all n locations
  Clone ID: PAT_MRT3847_38892C.1
tatgacggtcgcacgcacgcctacctaagcttgnattctctanagcggccccaatggggggcgagggggcggtccagaatccaagggatttgatgcaataacggtttagcgggtatttaacaactctataatagccatattatagtataaaactggggcaaaagatttcccatattatgcccaaacaacagtgtgattaaaaaaatttaaagcgaggggggggatgtgtntatgtatttatttgtgaacagagaatgggagaaagaaggtggagaggggggagtatctaacaactagcaagaagcaacaggcgattccctccacttgctcagtcacttaacttttcaaagaaactcaggagaccataacaaggggagatgagatcccaaacaatacaatatatggggtggaattagatcatctagccaaacaatttgagtacaagaaaggggcataacaagacaaccaacccacgcgtccgcggacgcgtgg

SEQ ID NO: 75171 - DNA, 818 bp, Glycine max
  Clone ID: PAT_MRT3847_38893C.1
tgtcgttttttttttttttttttttttttccaccaaaaaacaaaaagtttaaaattttccctgtccagaagttctcaaatgtcatgtaacagtttgtttcaaccaccgtgatttcggaatcaaatcccattcaaactgttttagttaatagatgtctgagcacactacgcaaaacatgatttcgtgttttgaaaacaaatcaacaacttatatctgcacaaataaaaaaaattaaaaaaaatcacattttttgaagtcacttcctaattgtttgggggatattcaatcaagagcgacgtctgagacctagctaagttacaacactgaatgaaatgacgaggacgcatcctctcccctcctttaaactattttgcagttgccatcatcctctctattactttaatagaaaggtcacaagaatatttaaccaagccattgttgggcacgacggtctccactagctccaacagaatgacgaatgctaatcttttcaccagcatatttttgttgaagccattcaaaagcatttacatcaagttttccattaactgacttcccttgcttccgacgagtttgttgctcccgtattgaagcccacaatttcccaacagcatccctctgacgagctgtaaatcttgccacattatcaaaggcatgcttcactaaaatatcaattacagtttgacaccagggtgttttataacgccgagcagcaatttctaaacaagttatcagggcttctctttgtgacttgaggaatctattggtttcttcctcatcctcccttattttcacagatgcctcattctttgccttta

SEQ ID NO: 75172 - DNA, 2108 bp, Glycine max
  Clone ID: PAT_MRT3847_38894C.1
cttgaaaaatgagcaagttcaattttgtaccaacaatattgaacttgaaaaatgagcaagcataagcctgagtttgagcatacgctcgcgggaatgatcgagacataagtaacattccctagctccccctgtctccaatattaattagccttagccacaaaacaatgttttccccaagagacatgccttctccatcctcaatcttctctgcctacgcctccatgacagcttccatcatgctcctacgttccatggccaacgacctcgttccccaaccaatccgtggctacctttacagcacgttccgttacctcataaagcctcgctccccaaccctcaccctcatcatcgaagagtccaccggcatagcccgtaaccaagtctacgacgctgcagaagcgtacctctccacccgtgtcagccccgaaaacgagaggctcaaaatcagcaagagcgcaaaggagaagaaattaaccgttcggttggagaagggcgagaaggtagtcgactgcttcgacggcgcgtgcttcaagtggagattcatctgcgcggaatccgagaagaacaaccccaacgaccacagcaacaacagcatctccgtacggtccgaaaagcggtcttttgagctgagcttcccgaagaagtacaaggaaatggtcttggactcttacctgcccttcattctcgacaaggccagggagatgaaggacgaggaaagggtcctgaagatgcacactctcaacacctcgtactgttacagtggagtcaaatgggactccattaatctggagcatccctcaacttttgagacgctggcgatggagccggagctgaagaatgcggtgatagaggacttggataggttcgtgaagaggaaggagttttataagagggttgggagggcgtggaaacgtggctacttgctctatgggcctcctggtactggaaaatctagcttgatcgctgctatggcgaattacttgaagtttgacgtctttgacctcgaacttgggagcatagtgagagattctgacctcggaaagtgagcgagtgcaactgcgtatagaccattttggtccttgaagacattgattgcagtgtggatcttgatcataaactaactgacgatctgatggatggatgcagttgaccttgtctggattactgaacttcatagacgggttatggtctagttgtggagacgagagaatcatcatattcaccaccaaccacaaggagaggctagacccagcactgttgaggccaggaagaatggacatgcacattcacatgtcctattgctcctaccaaggcttcaagattttggcctcaaactacttagaaactccctctgatcaccccctctttggtgaggtagaggggctaatagaggacatacaaataacccctgcgcaagtggcagaggagctgatgaagaacgaagaccctgaggccacacttgaaggattcgtgaagctacttaagaggaagaagatggaaggtgatgtgtgtgagaactctactcctgataaagcagaacctactcatcagcaatctaagaggcgcaaggttggttgcaagcaaaaacgaggtgttggaattaacaagagcattagtggtgtcactcaaataaggacaagaagaatgagagggtgtagtttgtaatcacctggtctcagaatgtggtaaaataagattgttggagctactatttgtctctagaaattaaagtttctgatgtaggctttcaggcttttgttactattaatcaattgctaagaggctagctagctacatgcatttcctatccaaactttgtgcttgaactttcctcgatgtgtatgaggagaagaagagattgaaagggcagagtgtgattgctagtatcagtagatgaacaatatcagtatgtacaaataattgcgtatatagttgtagtcgtaacaatggtcactgcccagcatattcaaacccaaggttcatcttttcccataaccggaaagtatggatctgtttgatatgagagatttgtttgtttttactttttatctttataaatgattatatttgaaattttcaaaaaaaaaaaaaaaaaaaaaaccgctcca

SEQ ID NO: 75173 - DNA, 200 bp, Glycine max
  Clone ID: PAT_MRT3847_38895C.1
ccacgcgtccgacataaggtggtaactaacgtcatcgacctgtactcttatattcacacagcgcctatttatttctgcgctttcttactgatacggaagccaagagcgctcatggccgttgaatatagcatcgcctcaactccgaaccgcaggcgatcgacccaatctgcctgcacattgaagtggagctacgcaacaca

SEQ ID NO: 75174 - DNA, 1605 bp, Glycine max
  Clone ID: PAT_MRT3847_38896C.1
ggctccaggtttacacactgacacactccttcatccaactccaacagaacaagaaaacatagtacacaccacacagtgaaaaagagagaaactccatcttctttctttctttctcactcaccacagaacacaaaaaaacatttccaaatttcaggtttgggaaatgcacgaaacacattccatcggcggcggcaggttctacggcggcggcgaccggaggctgaggccgcaccaccagcagcagcagccgccgccgctaaagtgcccacgttgtgactcactcaacaccaagttctgttactacaacaactacaacctttcccagccgcgccatttctgcaagaactgccgccgctactggaccaagggtggcgtcctccgcaacgtccccgtcggtggcggttgccggaaatctaaacgctccaacaaacccaaaacaaccaccaccaccaccaccagcaacactaataacaaccgttcttctttctcggcaaccgcaccggccaccgcaccaacgccaccggcaccagagctggagcatcattctcattctcactccagcagtgaaagctccactttaaccgtgaccgcgacggaggagatgtcggcgccgccgccgacgacatcaaacgctccgtcgaagaacagtttattacttgacaacgaccaccgtgaggcgaagatgttcgctaaccctaaccctaacccctctttggatagtggtggcattttctctgagataggaaacttcaccagcctcatcaatttaaacaacaacgaagcgtttgggtttgggaacaataaaaataacaacagcatcctcgatgcgacgtcgtttcgtttcggtattagtgttactaatcaggtgcaggcggcagcaggtggaggccatggtcagtggcagcagcagaatcatcaggagttcggtacggcgtcgtttctcgatcacactgtgccgcttgagttttcttcgctgcagcataagactgggcatcagggagggtttggatcgttggattggcaacccggtgcggatcaaggtttgtttgatcttcctaacaccgttgatcagccttactggacccacgctcattggtctgatcaagataatacttcttctctctttcatcttccttgaaaatacttaagaaatttctctcttttttctttttgttttttatgacctgagagggaaagagtaaagaatatctggaatctaaaccaaagtataaagaaataaaaataaaaattgaaagagaacctggaaggaactcgtaattaagatatgtaaatttttggttttttacttttctgttttttcggagaggtgattgggcttgatcataagtagtgatgttcatgtgcaactaacatccatgttagtttttttttcttttttatgttttattttatgtatgtatttggaatttgatttattagggggggaaacataggagcggtgttttatattaatatatagtggggattggtgctataacaattgtttgttgttttgttgggtgtttgggattgtaatcttattttggcgtgtttgagatgctatttcatccgcactattaatggctaagaatttgaaaatgacgc

SEQ ID NO: 75175 - DNA, 372 bp, Glycine max
  Clone ID: PAT_MRT3847_38897C.1
ggcaccagctcacctccgataatgtcatcgccgccgccaaagctgcttccgcacacagcgccgtctcctccgccatcacacaggtcgccgtcaccgccttcgcaattgcttctggcgcttgtctttccaccaaggttgatttcctttggcccaaactgcaggaacaaccaggtttcttctgcctcttctctctctctctttttttttattttttagaggttgctaatatatatactgacacatgatttctgatgccacatgaaagctcgctcaagcgcttatgatttattttcattgcgaattgaagacttcttctgtagatagtgtcctatgaagcacccgatacttgtttttgtttagtgtatccaaatt

SEQ ID NO: 75176 - DNA, 650 bp, Glycine max
  Clone ID: PAT_MRT3847_38898C.1
ctgagaaatattttcataaactttaaactctttggacaaatcttttaacaaattaattttctgtctgaaacttaaagtatatttaaaactcttcatctatgaatgggaagaatcttatcgaacctaaattcttcacacacgcttatgttattacaatttacacctcaattttgtccccttttgaatttgtatgctagttaaatgaatgatacatttctaattctgtgttagctggggatttaccgctaacaagcagaaccagaatacaaatttatcccaaaacagaatagtgatttccttttcagattttatcgcatcatattcatatccttcctcatgtgatatctggaaatggaatacagatttatccaaaaacagaactagagcgattttgatcaaattccattttttttttcccaatatatatatgcttaagctcactggccacagactcggactcttttaacccgagtccacccatccaattttaataacaacccaaaaaagggaaaatcaaactccaaaagataaaaaaaaataacaaactaaatcctattgtttcattgttttgaaaattccccaaaattgttaattaaccacccgccccaccctaaccctaataaattaaaaaggattatcgattgaattac

SEQ ID NO: 75177 - DNA, 240 bp, Glycine max
  Clone ID: PAT_MRT3847_38899C.1
aggggctgcggtagttggctcactctctttctctcagaaaaacactccgagtacaaagaccctctctcctcgcctctttgcattcgagttaaagaagcgaagaaaaagaaacatgtcagacgcgttctgcatcgactgcaagaaggaaactgaagtggtgttcgaacacgccgccggcgacaccgtgttctccgaattgcggcttgtccccgaatcccaatccaatcgacgaagaactcg

SEQ ID NO: 75178 - DNA, 371 bp, Glycine max
  Clone ID: PAT_MRT3847_3889C.1
actcgagccgattcggctcgagaattctttctctctgtttcagaactcagattctcccttctgtttttgttcaggttgttccaagaattagcacctttatcgacacacatgtctctccaacaaccaaatcaagaggtgccattgcaagaaccagaagccacattttctcaactaagcaaacaaaactcaatactctcactcacccttgatgagttctattgcaagaatggaaagagcttaggatccatgaacatggatgaattcctttctagcaatttggaactctgatgacaacaaccaagttaacccatcactacccacccttgatgaagctgcaaagggtaaaagtggtataccaacagaacccacca

SEQ ID NO: 75179 - DNA, 247 bp, Glycine max
  Clone ID: PAT_MRT3847_388C.1
gagaaaaattggatgtcactaaggtgttgattctggacttttaatttttgaagcattaatattcatagaggggggcaggaatgggaggctctctcaatgacataactattctggtttgcgaagagaaagtagtctaaatgtggtaatggaatgcagacctatgctgggcgatcttcacaagaaaagttggagcacctagtgctaccatcaacgctgacctgtatgctgggtacaggggcctcatttc

SEQ ID NO: 75180 - DNA, 297 bp, Glycine max
  Clone ID: PAT_MRT3847_38900C.1
accttgggccggctgaccacgaacgtaagctattagttactaagaacacgatgagagaggaagtttctaggtaaaaagatgaaggaactcaatttgcaaaggataggatcacattgtttcctagcacatggtttgttaacataatgatatattctgagggtcaagagggcaagggatgggaatatacactatctgggacacacatttttgccatgcatgctaaagtggaatgcctatgcattaatgacttacgcagtcagatccatgctatttgtatgccttgcatatgaaaaagga

SEQ ID NO: 75181 - DNA, 448 bp, Glycine max
  Clone ID: PAT_MRT3847_38901C.1
catcgccaggaggtaaggaatctgagagacatgtctccatggagtagaagttatgattatgttgtccggttgttggcgagatcgctatttacaatcctggagaggatcatacttgtctttgcaattaatcaaccaccaaccgttcaagaacaaaatgattatcagcatatgaatgctaacaatcttctacgaagtcattccttttctgttatgcattcttctgttcatccttcagagaatgatctctatggcttcaattcaggacctgttggggggaggccagtatcaaaatcaggttttttagttgacaagggcagaagaaaaaagaaacagcagcaagctcttcacgaaccagctttattcagaaagaacctgcattcagaaagcaaacagttaggacatattgtggccttcacaggctgtatgtctgctgcaaacaattctcctg

SEQ ID NO: 75182 - DNA, 308 bp, Glycine max
  Clone ID: PAT_MRT3847_38902C.1
taacactcttcccaataacaacactatacctttctctaccaaatcaaacaacgcggatattggacaactaacatacgctcaacagactattctaattcaactcaaatatactcaacctacaatatcaacatctctatctacattcatatttacatactacccaccttcattattgctccatacacacttccttacattcccttacccatccaagtacttccttacattttcacatcatactccatctttcttgaccctaaaattttatctattctactcataatacacatcttcaattattaacttat

SEQ ID NO: 75183 - DNA, 398 bp, Glycine max
  Clone ID: PAT_MRT3847_38903C.1
acgagggtgtgtgggtatggtgggacctataactcttttatctgcaattgtcctaatgggattaacactacagcggattgtttcttcatatcttcttataacaatggttttcgaaatggggttgcttggttgatctatcctgtggcatgttcttttgtttggttcttcttgtaagttatcttgcatggaacttcaacaatcaaactcatgacccagagagtaacaaatcaaaaaattctgaagggtgtgacaagttcgagtgttggaaaatttcatggttaggggggaaattatgtatgactttcttgggttaaagaatttggccattaattcatggtgtgcttctgtggcagatgtgtgcacatgcaacctataatttgaatctcctctcagttcat

SEQ ID NO: 75184 - DNA, 388 bp, Glycine max
  Clone ID: PAT_MRT3847_38904C.1
ggggagatggcgatagaataggcgactgaaattctgggctgggaaatgaacgacaaggtgaaggcagtggaaaaccacgggctaaaagcctcacaaaaactagtagaatccatgatgagtgaaaaagcacaaaacaaaaccaaacggtgcaaaataggggttttctcccaaaataagtttgatggagttgaaactccaggcacaaagatgcataaggtagacgatgcagtcactagaaatcacgaccagaaaaagtgtcagatgtgccgccaagcattgtcaagagaagttatttggcagcagaattggcacacgtgagggtgcgtgaaacgccgaattgggaagtggttgccaaaaaggactgctggaatggtggggtcaatggatg

SEQ ID NO: 75185 - DNA, 254 bp, Glycine max
  unsure (1)..(254): unsure at all n locations
  Clone ID: PAT_MRT3847_38905C.1
gncagaacaagctttaatcattcatcagaatatgcactagtactgttaactcattacttattcaggcgtatgggcctaataatgaaagcctaactttaaatcttaacaaaattactatttaacccctgattcctattcatattttttttacttctttgtgttacttatactcatattcttttggtgtattgacttattataactttcactctaattttaactcttattctgatgctactattttacctttcaag

SEQ ID NO: 75186 - DNA, 444 bp, Glycine max
  Clone ID: PAT_MRT3847_38906C.1
gtggggggtttttttttttttttttttttttttttttttttttttttttttttttttttttttggaagaaaaagggggcctttttcccttcccgtttttcaattaaaatcccattccctacacaaaaaatctgtttaagggaaaaaacttgctttgatgaaaacggggggggatggcaaacctgtgaagcccttgggatacccaaaacccccatgggggaggttttttttgccccttaccggaagccagcaagccggggaaaaatcatgtaagggaaaaaacctgcctggaggaaatgaataatccaaaaggccccggagaaaacccccctttttgggataactaccgcccacaaggggtgcggttttcaacccctttattttgttcgggggggcccaatgcggctaaaacaagggatgggggaaaagcccccccggggaggcc

SEQ ID NO: 75187 - DNA, 345 bp, Glycine max
  Clone ID: PAT_MRT3847_38907C.1
aggatggaaaacgctaaatgctgatgctggctcttatgggtttattcattctggctgtgctgttagtcgtttcagcaatgtcacagactcattctgttgcgggggatgggcagtgtcatggccttgttatgaacttctattaggaatcatgctctcgtgctgtagatatcatctcagttacgtctagcttctctacatgtgccacatgaatactgctttctcctgactcacgaacatcatccatgactgtgctgttcagagttgtgatgcgtcactgttgctggactccacaagaaggagcttgtctgacaaagaagcagatataaacgttgggttgataaattt

SEQ ID NO: 75188 - DNA, 592 bp, Glycine max
  unsure (1)..(592): unsure at all n locations
  Clone ID: PAT_MRT3847_38908C.1
cctcgagccgctcgagccgcgctcactctacaattttttatctctcacgcacttcactttcttcttcttcttctttattccttgctcttaaatggcttccgatcttgagcttaaggccaaagaggctttcgaagatgataaccatgatctcccctacgacctcttaactcaggccattggtctcagccccaacaacgcagacctatatgctgaccgtgcccaagtcaacaacctcaccgttatatgcagttttactttgaaagaattgaagcttgtgtttttctgatacccttttgcttgttttgcgtgtataatcaactttcactttgaaaactaaaaccgtgttcaattgggtcatgtcttctgtgaatagaaatttggcaaagttgcgaaattttgataagtttttaaccaagatggaaattttgttgtgtgggtgtttgtgtggatcaatggtttggagactaattgttcttgcttttttctccccagagctgttgctgatgcaaacaangcgattaagtntgaaatccttctcactcanaaagcatatttgcggaaaggtgagtctggtgccactagtttttttttt

SEQ ID NO: 75189 - DNA, 1981 bp, Glycine max
  unsure (1)..(1981): unsure at all n locations
  Clone ID: PAT_MRT3847_38909C.1
gncngaggtagtaaatcgaaccaaaggctcgagcagaacacaaaaccatggtgtcaccaatttcacacttagtaactttaatcctcctattatcagtttcattggcagcttcagcttcacttgaagaaaactttgtccaatgtctcagcttctattcagacaaagcagctccattttatgcatcaatttacactccacaaaatgcatcattcaacaagatccttgaatcctctgcacagaacctaaggtatttggtgccttcagcgccaaaacctgagcttatattcacacccttgactgattcccatgtccaagtggcagtgacttgctcaaagaagcttggtattcatctgagaattcggagtggtggccatgactatgaaggactctcatatgtttctgaagttgagtccccttttcataattgttgatttgtcaaagcttcgcgccgtcgacgttgatatagaagacaacactgcttggattcaagccggtgccactattggggaggtctattacaaaatatatgagaaaagttcggttcatggtttccctgcaggcctttgcacaagtttaggtgttggagggcacatcacgggaggtgcatatcgtccgatgatgagaaagtatggccttggagctgacaatgtcgtagatgcaagaatagttgatgcaaatggtcaaatccttgatagggaagccatgggagaggatctcttttgggctattagaggaggtggaggagcaagctttggtatccttctttggtggaagataaagcttgttcctgtgccagaaactgtcactgttttcacagttacaaggagcctagagcaagatgcaaccaagattcttcatagatggcaggaagtggcaccctatattgatgaggatctcttcatcagagtcatcattcaaccagccactgttggaaacaaaactgagagaaccatcacaacatcttacaatgctcaattccttggtggtgctgacagactcctccaagtgatgaaagaaagctttcctgaattgggtttgactaaaaaagattgccttgaaactagttggatcaagtctgtgctctatattgctggctatccaaatgacaccccccctgaagttctgcttcaaggaaagtcaactttcaagaactacttcaaagccaaatcagattttgtgagagatccaataccagaaactggacttgagggattgtggcaaagattgctggaagaagatagtcccttgatgatttggaacccttatggtggaatgatgagcaagttttcagaatctgatattcccttccctcataggaatggaacactctacaaaatccagtacttaactctttggcaagatggggataagaatgcatcaaagcatgaagattggattaggaagctttacaactacatgacaccttatgtgtccaagttcccaagggaggcatatgtcaactatagagatcttgatttgggaatgaacaagaagaacagcccaagttacatacaggcaactgcttggggcaatatgtatttcaaggataatttcaacaggttggtgaaaataaagaccaaggtggatcctgataatgtgttcaggcatgagcagagcattccaccactcccagtttcaagtatgaggctaaaagacaagaagtgcaagacatgggaatgaggcactgtgttgctggagccattggggtggtttttgttatggggttgattagctaatttagatgaataaaggatacgtttggattttgttatgttttttttggtcatttcaatgttgtaaaacaatgttggaagtgcttaatcattgctatctttgtggatgtgtgtgtgtgacaagattacaggtgacaagtgttgttttgctagcaagaactgtgtaactagtgaaggtacttttatatacgatactcaagtgtgacgcatggaatgcatattttttaagtacaaagaaactcannaat

SEQ ID NO: 75190 - DNA, 1185 bp, Glycine max
  Clone ID: PAT_MRT3847_3890C.1
gggaatagggcaaatttgagcacgggaataggagcagataatcagaaaacaatggccgtagcaataggaagaagcttctccattcagcccggctctttattcaacaacaagagcttggatagaggttcaccagctggaagattatcgtggcttggggatggtgctgctgccactccacgttataggcaaacttgtgttggggcgcaacagcgacctacatggctcccaggacttgatcccccacctcatcttgatggaactcttgctggagattttgggttcgacccacttggacttgcagaggatccggcaagcttaaggtggtatgtgcaggcagagctggttcattgtcgctttgcaatgcttggggtcttcggaattctagtgacagatctacttcgcgtcacaggaattagtaagataccggtttggtttgaagctggtgcggtaaaatacgactttgccaatacaaagacactcttccttgttcaactagttctgatggggtttgtggaaactaaaaggtatatggattttgttagtcctggatctcaagctaaagaggggtccttctatggttttgaagctgcatctcaagcctaaagagcagtgttcccttggggtcctcgcttaactgaaaggcttatagccagggtaccctgggggtcctctgctaaatcctcttggcctagctaaagatattaataacgctcatgactggaagcttaaagagattaagaatgggcgactcgcaatggtggcaatgcttggcatctttgtacaagcttcagtgactcatgttggaccaattgataatcttgtggagcatctttccaatccatggcataaaacaattattcagacccttgccaattctagctcttagttctagaaagtactgtatgaatatgtggcttgggcttgagcttatccataaaatgaaattactttttatttttccacctcgatcatactgtggtcaaggatcaagtttagatgtaagggtcttgaagcacattctattacattttcaattgatttaattatttgtttaagctttggggaaaaaaaacaaaaaaaaaaaaaaaaaaaaaaaaaaaaaaaaaaaaaaaaaaaaaaaaaaaaaaaaaaaaaaaaaaaaaaaaaaaaaaaaaaaaaaaaaaaaaaaaaaaaaaaaaaaaaaaa

SEQ ID NO: 75191 - DNA, 303 bp, Glycine max
  unsure (1)..(303): unsure at all n locations
  Clone ID: PAT_MRT3847_38910C.1
tnngaagagaagcaagtgtttgatggagannaggctaatttgctagttaaagatctnagggaganctttaattcanggnatgncataaagcagctatggatggaggggttcccagttggaagccatagctacgatgttagaagagnaagagaaggaaattactgaagctctatataaggnccttgganaacctcganntcnaagcatttatnaccggagnttcnccangnnaaatcctcatgtnantcaaggacttaaagagnnnnnnncatgggtgaaagcctgagaaggtnanttcttccc

SEQ ID NO: 75192 - DNA, 681 bp, Glycine max
  Clone ID: PAT_MRT3847_38911C.1
tttaagtttgatccagttgaattactcagcaagagtgttatttttttttttttaattggtcgtgtttagcatgcacaaatttccaattatttagtttcttgcattgagccttattgcatatatagctgttatggttgtcatttatgtacatcttttactagaaaatatggataagacaaatgttttctatgcatgtaataaaaacaatacccaagccgggatgcaatgtttctcattcatgatgtatatctttcagtattaaatatgaagatgacaaattttgtatttttcttgcatttggatatgtcatacttcaaagtttattttatcattttatataggtgaaaatgtgttcatactccctgtacttcgatccatttggaactaatcaacatgaattttaaaagtttagtttaattttgttgttgaaacattttcaattactttctagtattcttgtactagtggtacttttttttttctaaaaaaaagtgaattgttattcttaataaataaaaaatcagaatacataaacagaggagatagtcttctccttccgcaaagtgcaacttgctagctattggctcttttggttttgcaatccgtgtggtggtagctcaacattgaagcataaataaaacttctcaagagcttctccttcacttcaccctaaatatcgat

SEQ ID NO: 75193 - DNA, 280 bp, Glycine max
  Clone ID: PAT_MRT3847_38912C.1
aattcggctcgagatgatcctattattgttggtgaagaaaactagataaggaggttcagaaagtgacaccaacatgtaacataataggaacaaagatcaatgaccaaatgacagaaggttgtgccaataaaaactccatatattaacctccaatttttattctgagattgatttcaagctcttgttgctcaaaattcaggtgcccatcacagcacaattgcggataaagtgattgagctgaatgctgccacatccaatttgcctccacctcaatttctca

SEQ ID NO: 75194 - DNA, 2429 bp, Glycine max
  Clone ID: PAT_MRT3847_38913C.1
ccacgccgtccggctcgagaaagggctctctccttctccccatgttttctcttctttacttctttgtctgataaaactgtcatcaacctcctcctcttcccactctctctctctttcttcccccctcttttttttattcttcttttttcccttgcaaatattttataaaattgatatgtgttgaaggcatatttgcttaagagctgaaccacatcatcgtcttgaacgtttgaatctatggaacagcttgtcaacttcatcatccggccaccaagagctgaatatgaccccaaaagtgatttattggatcaggagttcatgctgaaaggaaaatggtatcaacggaaggatgtagagataaaaaacagtcggggtgatgttcttcaatgcagccattacttgcctatagtcagccctgaaggaaagcctctgccgtgtgtaatatattgtcatggaaatagcggatgtagggctgatgctagtgaagctgctataattttacttccctcaaacattacagtttttactctggatttttctggctctggaatttctggaggggagcatgtcactctaggctggaatgaaaaggatgatctgaaggctgtcgtcaactatttgcgggatgatggaaatgtctctttaattggcttgtggggtcgctcaatgggagctgtaaccagccttatgtatggagctgaggatccttcaattgcagggatggttttagacagtcccttttctgatcttcctcaacagcagaagaatgtgagccattgaaaggagagtcaacattccatttctaagtgaaccattcccaaaatgtggtgtcgtgaggcaattcaaaagaaggcaaaatttgacataacggacctcaatacaattaaggtggcaaaatcttgttttgttccagctctactaggccatgccattgatgatgattttatacagccccatcactctgatcgaatatttgaggcttacatgggagacaaaaacataattaaatttgacggagatcacaattctcctcgtcctcagttttactttgattccataaacatcttttttcacaatgttttgcaacctccggaagatgaggttggggaatcattttttgaccccatgaatgattactttggtaaggatgtttggagatctgtgcacgaattaggctacagcaatgaatcatcatctaaaaacaaagatgaaccatcaacaagcagcacgataaatgccattgagcaggtccgttcaagacgaccaatgagtaggatggaggttccatctgatatttcttcgaaagatgaacatcgtgaacatgaggagaagtgcggcaatatttccccatcatcatcatcaatgataagctttgaattgtcaaatgatgatccctttgggtcccatgttccagccacattggaagatgatcagtatgtagaatatcaactagatgaccttgcaggttttccatctactgcagaggaggaagaaagaatgttcatggaagcagtgatggagtcactgaaggacctggaagtacgaaatccaaatgcagaacaaccaacaagtagtgttagttctgtgtatgtagatgctgtagagccgtctgataaagatgcttcttcaggagagatttcgagaccggtggagacagaatcttcctcactcaaacacaccacagagtcaaaattcaaaaccacttcctcgacatcagaagaatttgagccattgaacggtgagtcaaattccatttcagtgaaacattcccaaaatgtggtgtcggagccaagtccagtaccaagtgtttcattagaaggaccagcacatctgcagctgcagccaccaccatcggcacctactgacacatcatcagtaactgagtccagcaatacaagtggttctgctagtagcgatagttctgctagtttacaaagttcatcagagactgatgtatcacataacacgaaagccacagtaactgttgttaggaatcccgcaggccatgtcatggatggcttaatgcgtcgatgggatttcaattttttcaaaaataaatagtcacaaccgatgatcagatgagagattctcatttatacattgtttttgtaactacaagaaaacaaaaatcatagtttgtaccaaagaaataggttgctcgtgtgtaaatttagtatgtttagattctccactaacaaatcatccaatattctttgtctgtaagtgaaaattgtcatattttcttgtttttatgaatttaatgggaaacgatgtcttcttacgcatcatttgaacaaaggttcccgtctttcgttccaaaaatttgccgaagctaagcttatatacatgatgcacttgccaggatgctatgcttgtatttgtatcctagtgtggatggaaatgtattccctacatttaattgtttcatt

SEQ ID NO: 75195 - DNA, 348 bp, Glycine max
  Clone ID: PAT_MRT3847_38914C.1
ggttaggtcttttttatttttttttttttttttttttttccttttttttttaacaaaacaaagcgacaagggctgaatctcaggggatcgtggcagaaaggccactttgccacttacaataccccggcgggtattaaaaacggctgccctcgattcaaggggtcgcccgaagggaattgccctttaaggggaaaaatacggctaatccgggtcacgaggggcaccaacagttcttgcctttggggggccgaggccccctactgttggtgggaaaacggacggggggcgccccccccgcttttaacccggattttgaattaaagggggtcagtcttaatccaacccccg

SEQ ID NO: 75196 - DNA, 1076 bp, Glycine max
  unsure (1)..(1076): unsure at all n locations
  Clone ID: PAT_MRT3847_38915C.1
attcccggngtcgacccacgcgtccgtacacattggtttgttagctgtattttccccaatttctaccatcctttatgtttttttctcttttctctctctaaaaatcaaagctttgaaattttgagttgtattctctctctattctagtggcacagtgaaatgcaggtttgttatggaacgaaggaggagggggtttgaagaaaccccaaattgaataaagtggttttgatttgagggaaaagcttgaatggaaggaagggttccaaaagtaggaggatcaaaaattgggttggggggttctgtaactctgactagggcttgaatgggtggtatttattatgctgaaatcaatgttgtttgcataattgactgcttccatggacttcttttcagctctttctttgaacagtcttttttagcctctttttctctctctttttctcttgggggggcctttatgatttttggtacttccaagttcagtgttggctttggaaatggtagctggaaactcgtgtgagagcctttggtaccatcttttgggtacttggaatttgttctagccctttggcaatttctcagcatcattaactgaagctgctctatctccttctttctgcttcttctagccttctctttttttttttttgcctcacacactaacttggacaagttttctagttccttcagtttctcaagggtgtcctggattctagttgatgaatgtcataaattcatgttgggggttgtcaggcttcatctgttagtttggtttctttgaaatttccccccacgtttgatcactgtttcatgctgtactggttagtggttaccatttggccactgttggaggtacttttggttaaattttgtctgattttgttatcatttagttttgaagagaccatagaaaagaatctgcttgtgggggtgggttttgatatcacccttgttaaggaggggtagatattatgagtgacaaagaaaagtttgaggtggatagaaacgaggatcatgtgagttattctagcggaatgcactcgggattggagatttggggggtccaaatcttgcaa

SEQ ID NO: 75197 - DNA, 933 bp, Glycine max
  Clone ID: PAT_MRT3847_38916C.1
ttctcgctgtcgcgtgggcggacgcgtgggcctaacgaacgaaagacctcgacaattcttctgatccgtttcgttcagatcaaaacttgcctctttgcaacgctgcttctgacaaaaaacgttgtaccatccgaaatgtcggacacagtggaacatacagatcaaagagctgaagctattccccaatccacagctacaccaaattggactattcatgtgtcagacgtgaggaagaaatttttacattgtaacattggttaccattgtgattgtggattgtagaatacatgatccaacaatcaatattatgtttccagggtgaattccaggttactgcaatatgaatttggctgccttaacagtaaagcctgtgccagaaataataacagcatttaaaaactcgtgatagatgtagctttggaatgaaaatgccactgtactaagaaccccccccagcaggcaaccggctgcgccgcgcgccgcaaagtcgtcaaaatcatcgcgcttcgccgtcgtgtccttttaggagaccatcatttaaggcaaagcctttgatgaacatcatcaattaacctcaaatgcttcgtccacagttgattgcattgatcgtaaaataggtttaagtgatacactaactcttggaaccgctgttttcaatggcaaggggagagagatgtatgaacggtataagctttctgaagagacaaagcctgctatggctgctggaaagcaaaaggcaaggagtgctggatctgccattatgaacaatccttacgtaaaaagtggagcttcatggttttctagggcctttactgctatagcaaaggccgccgaggatggcaacacgaagacccaggaaaaggttgaacaggctggggtgggaaggaaccagaatcatttatggtgaaaggaaagggactgttgatgaaattg

SEQ ID NO: 75198 - DNA, 308 bp, Glycine max
  Clone ID: PAT_MRT3847_38917C.1
atttcacatcacctgggataaaatcatcatgtttgttgttggggagtgactattggttgattatggtaatgttttgttttgttttgttcactgttctgtctttgatggattctgttgtaacttgtaatcacctcttccttttacttaagctgtgatttatattggtaaaatggtgttgatttcttatcaaaaaaaaaaaaaaaaaaaaaaaaaaaaaaaaaaaaaaaaaaaaaaaaaaaaaataaaaaaaaaaaaaaaaaaaaaaaaaaaaaaaaaaaaaaaaaaaaaaaaaaaaaaaaaaaaaaaaa

SEQ ID NO: 75199 - DNA, 588 bp, Glycine max
  Clone ID: PAT_MRT3847_38918C.1
cttgtatgttcataataagactcaataacctaattttcattcatattaagaaagatcattattgatgaatttaattaacagtgatgctaattaggatgaaaactactcacataaattcacaccaattcaaaactgacccatcaagttattacctaaacattcaagtagaagagaaaataaaaactacctctaatcagttaatggcaacataggattcaattcgtagaataatatttcctacttaatattatttttccttaactaatgataataaacattggctgtagtcttagatattttttttataagcaaataaattattgaatgaaagcaagacagaatgggtaaaagatgtaccaagttctgcgtatactgcaaagttaagttataaaaccaatacagacctttacctcataagacatcttttaccataactaaataaaaggagccaagaacacttcaggacaagatatttgtatcaaaacccaatcaggattctacaaaatcagaaaaattgtagtcttagatagagagggacaagaaggaaaaaaaaggggataaattattaatatgatatgtgattcgaac

SEQ ID NO: 75200 - DNA, 436 bp, Glycine max
  Clone ID: PAT_MRT3847_38919C.1
ccacgcgtcagtcctgctgccacagcgtccgtacggctgcgagaagacgacagaaggggattgcaaacgttgaataatgagatattgttgtgacaaggcatcttatccatagttgtgcatacataataaattgcaagttgagacccacagcaaaggaattgaagagcatggaaagtgaccagaaagtccaaatagcttcttggagtgaggtcatgtcaggtgctggggtggagtttcatcaaggggctcctaatttgggacaaggtggtggtggtggccttcagagacaacctagtatgaccaagaacaattgtctttgttctccaaccacacattctggttcgtttcgttgccggtttcaccgctcccctaggcttcagaggaccaaaagcatggaatcagagtccctcagggatcacgcatcaaaagtccatgc

SEQ ID NO: 75201 - DNA, 323 bp, Glycine max
  Clone ID: PAT_MRT3847_3891C.1
ctattttttttcggccgttgcggccggcctctggcggtgtgccgcccggtacatggccagattccgttccaacttcatccgctgcccgtctgccccaccgggcggcgacccttccccatggtcaccgccgacggtctgatcggcaactccctgctggccctcagctcggcttggatgccccgctgaggcgccaggccggggctgctggccgaccccaacgacctgccggcccccgccgagccccggacccggcaagggcccagttgaaagtgggcttcgagtaccgcatgatagcgccccgacctccggctgatgatggaccc

SEQ ID NO: 75202 - DNA, 1180 bp, Glycine max
  Clone ID: PAT_MRT3847_38920C.1
cgggattgcaaacgttgaataatgagatattgttgtgacaaggcatcttatccatagttgtgcatacataataaattgcaagttgagacccacagcaattttgccccaggctccaatgtctgccatcatgtgtgggtccgaaaagcattggtgtttattgtttaggggccaaactttgcgtcaggattcaatgcaactccacaaaaaagtgagaaagatgagggaaactcgatgatctgatatgattttatcccccccgggcgtggcgcgcggctccttattggggaccaggtcctggtgggggtggccgtcggtggcggccttggttgacctagtgctcttgcccgtgtcctccaaccacacctcccggtcctgtgcgttgccggctgctccgtgcccctagcccccagtgcaccaaaagcatggaatcaccgtgcgtccgctcttttctctatatctctataatttgcttctattctctgagaaagttcttcctgaatcttgaaggttcttcaacacccttcttaaggaattgaagagcatggaaagtgaccagaaagtccaaatagcttcttggagtgaggtcatgtcaggtgctggggtggagtttcatcaaggggctcctaatttgggacaaggtggtggtggtggccttcagagacaacctagtatgaccaagaacaattgtctttgttctccaaccacacattctggttcgtttcgttgccggcttcaccgctcccctagcctccagaggaccaaaagcatggaatcagagtccctcagggatcacgcatcaaaagtccatgcttcaattgttgatgctgttgctgatgccaacaaggatccagtgcattgatcttctgatgaattgaatgttaaattgtcattaagctgccatatgttttacttgtgtgtaggcgtgtcatgtttactttctatctattcataaacttataactgcgaagtgtggagatgtatgtaatgcaagtacttttactgtatttgattgtcacgtgaacaatttgggatcatttaatttcatccctgcttgattctcctttcaagtttatgttattgtaagttgaaatacccgttgtcttttcacattcccgttttttttcagagtgtcctttcttaacttgatcaataaatttagtagtttagggcctgcaggttt

SEQ ID NO: 75203 - DNA, 216 bp, Glycine max
  Clone ID: PAT_MRT3847_38921C.1
ctcttccctcttccaatgctatctactccttcctcaacaaagagcattccctctgttactacgtgtcgagccacagtctattcgttccaggctcgttcttctctattcaccaccactcacacttgcacagcacctgccaaattatgatgagcttcagcaacgagcagaccaccttgtgcaactctctcaggatacttcactgccggtagattcatt

SEQ ID NO: 75204 - DNA, 462 bp, Glycine max
  Clone ID: PAT_MRT3847_38922C.1
tacggctgcgagaagacgacagaagggaaacgtatagacaccaagcaccagtgcaacaatcttacaagtaaggaaccccgttataaatgcatgtagttttaaaagtaacaggaaattcaagcacggaatacagataacacagttttattaacacaagaaaaaatgccttccatacctgatttaaaaaaagagtaaaatttctgaaaatattgaaaacaatttgtcatttaaataaaaatctaattgacgtaacatcgaaagggatgcgaagttagagttacctggtcgtcactatcaatgtcacgagatccagacgaggctcccagacaataagatgggaaacctcggtgtcccttagatcgacccttcctgcaactccccgaagaggacgatgatgacgtggccttgctggcactggaccccatcttcaacgagaaactccgcaaaacgaatgcgtttcgg

SEQ ID NO: 75205 - DNA, 218 bp, Glycine max
  Clone ID: PAT_MRT3847_38923C.1
ctacccactcgtccgcgagaatactacataacgggacacttatttgttattctttcttaatgttgtggattgttagcttctgaaggtgggagcactataagaagaagaagatcgaatacggtatacgattactaatacagaatatagaatgtgaaagtggatgaggaacaataatctaggaggaaattcagatgagttatacataagcctttggggaa

SEQ ID NO: 75206 - DNA, 280 bp, Glycine max
  Clone ID: PAT_MRT3847_38924C.1
gaacattctagaggccgcctacgaccagggttctacgagagtgacacggttctgtttccgcaaacaggaagggcagccacaccgacagcatgggctcgacgagagcgtgatcggagaactttcctccggacagatccgggcactgaacaaacgtgccagacgtagttcaacgaaaaccattgctcttgatgttagacctttgcccgttatgatccggggccgcgtctgctgcacccggcggtggtcacgccctctgccgatcggcccatcccggataccc

SEQ ID NO: 75207 - DNA, 838 bp, Glycine max
  Clone ID: PAT_MRT3847_38925C.1
atgtcatcaggaacgggttatggtgtggcggaacagagagggattccgggtgttcaatcttatctgactcaatcataccttgatgtcaacaactttgctcttccttttctccaacaaaatggcaaagataccggatattgagaagtgcttagatgtcgttgctacattgcaagcaaagagggggtactgacacttactgctgattttgaggtgttcagaagaaaaatattcacaagcttgtgtagaggaaactgattcagtgtgtttatggctgggaccaaatgttatgtcagaatattcattagaagaggctattgatcttctacagaaccaggataatgctaaagccagtttagaagttcttgccactgatatacagttcttgagggaccaggttacattaaccccggtcagattgccaattttcacttgctctatatctgtctgtgcatttgccattacctacccatcaaaagtaaattaatggaatcagacttgcattgcatggccaagcattgcaagcacttcactatctcttagggagtgcttagtatgatgggtgaaaaattaaaagataggaaacgtagaagagaggagtagatgggagtgtttgttattgcatttttactttcatctctatatatggaaatttttatttttaagaagcatgacacattggcagtggcaaactatcatggaggtttctttttttattcgtagtaagcaatcacaaaacgatttgcacctataattttctaccttttcaattttctctagctaccaatcacatcctttttattgtgcacatgttgctaatgtatatgacctacttgacatg

SEQ ID NO: 75208 - DNA, 179 bp, Glycine max
  Clone ID: PAT_MRT3847_38926C.1
ttcctctgccttataattcttgtgacgcttttagttggtagcattgaaagggcaccaggaaacgtggagtcaagccacgatgtggtgcccttcaatatgagtgtttttccatctggtctgctattagggataggctctgcagcttaccagatagtaggagcagcagctctagatggcag

SEQ ID NO: 75209 - DNA, 579 bp, Glycine max
  Clone ID: PAT_MRT3847_38927C.1
ccacgcgtccggttcttgccacaatatgtgaggagcttccttctgatggtattctccttgtgtatttgtcagcttcaggatattgtggttctgcacagaatgaatctggctgcatacactttggtccacgtggagatagaggtacgtcttgaagagaattttcgtgtacttccattcttgtaccgcatgatatgtataatgtcaagaaacaatttgtgtcctttttcccacaaatttgccacatgcaattgaaaatgcctcagattgtagtgtatgaatctaacatgtacaagccagtagtatgctttatcctatgattctataagacataatgagtgtgatatcatgagcgtgaataacaaaatttagtatgggtaaattctccaacagataacaagtttaagggaagggagaatgaggtaaacgtaggacagaagataaagcgatagaatgagtaggttgtgcatttataactcccaatggcaggatcagtggagcgttgggcatgtgggggtgtgttgagatcccacatcataagaagtcctgataaggcttaagaagtcctcaccttataagcta

SEQ ID NO: 75210 - DNA, 223 bp, Glycine max
  Clone ID: PAT_MRT3847_38928C.1
ctgctgggcttgatcaaactagtgcagctttgtaatttacaagggttggtgatagtgactatctctagagaaactgttaaaacatggcatatgctagctggcaagcttctgacgacaaggcgagtttaaggccacaccttccttatggtacacgtcaaaatttgcaagtgcaataacctaaaggaggcaatgagctaaataccttaccagaagggtttttgca

SEQ ID NO: 75211 - DNA, 368 bp, Glycine max
  Clone ID: PAT_MRT3847_38929C.1
cgcactcgagctagatcctaatagtcacgcgcagaactatagtctttcattcatgatactagccacactatggatgagtgatgctatgaacagcaccatcaataccactcacctgaaccttacatgtccatgcgaggatcactctagctactacgctgaaagtagttaaagaggacagcgcctaaaccgagtggcggctacctcatgattctcaccttgttgatgcttgacggaaccatcatagtcctagccattgtcacacacaccgcttgtcagatgaactccgggtctgagaccctcagagactaccatcgaactgttgatcgtggggtaccttgccttgcacggcatgggtgtgccggagatca

SEQ ID NO: 75212 - DNA, 489 bp, Glycine max
  Clone ID: PAT_MRT3847_3892C.1
accgaacttcaatttcggcctagacctacgcacccgtgctacaagacgacacaacatctagcacttttcacatgttgtagaaaaatgtgaagtaccacgaacaatcaggaactttttttggtgtacaaactatatagtatgtccacattgaaatttctacgtaattaatatcacaaaacaagaaggcaggggtattattggcatacatgattacatcattgaacccgaaaaaccagaccaaatatctacagctgatagaatctgacaatttagcaaatttaattatagaatagtaagattagtagtcacaattctacacctataactttcattttatttttcttaaaattgaatcaaatctacgcgtttacattcttaccgactcatattatgccaggttttataatagtaaatcaaactttatcgacaacattgagttatcaaagtatttatgtagaatatgacatggcatccgattgtcggtatact

SEQ ID NO: 75213 - DNA, 314 bp, Glycine max
  unsure (1)..(314): unsure at all n locations
  Clone ID: PAT_MRT3847_38930C.1
cccatctccaccacccccaggctacaagtacaagtctccaccacccccagtttacaagtacaaatctcctcctccaccctataagtatccatctcctccaccaccaccatacaagtacccatcaccaccccccgcactttacaaatacaagtctcctcctgctcttgggggtggcccaccttccccctggtgcagctgggccccagcttctcccccttttgtgggccnagcttgggatggcctctggccntcctagcttaaattccttattcggggtggtcggttggggttccttcccttctcatcctttttcc

SEQ ID NO: 75214 - DNA, 229 bp, Glycine max
  Clone ID: PAT_MRT3847_38931C.1
aaacatatatttaacgcttttcataatcgaataaataatacgggcatcaagggcaacttgtgtacattataaggtctaactataaccatataaaatattaaacaatgacaactacaaaaccccaaagttctcgttttattcttaagaacacagtctaaaggatctctggttatcaccacattcaacacttaccaactatttacattctacaactgactgcagctcaact

SEQ ID NO: 75215 - DNA, 160 bp, Glycine max
  Clone ID: PAT_MRT3847_38932C.1
ccattgccttacaagtgggaaaaatctattggcctactctctattaataatgggtgctatgccctctgttaaagattccggaggactcactgtacttgaaagaccaatggagaggggatcatttactgacgaaaaactatatatcttgcttgctgaatgc

SEQ ID NO: 75216 - DNA, 251 bp, Glycine max
  Clone ID: PAT_MRT3847_38933C.1
aagagagtgaccccttaacatgtcagtgtcacaaatcctaactaacttcccccatagtcatatttcgtcgtcacaacattagaaggctcatcttgtttatgcccgacatgttcctttttgtaaatctgtgtgcatttagagttgcacttatagatgattcttgatatcatcagcaattttttatccaatattctattatgcctttgctgcttgtgtcacatgttccgtttcctcttttattaactttgcca

SEQ ID NO: 75217 - DNA, 146 bp, Glycine max
  Clone ID: PAT_MRT3847_38934C.1
ggtcctttcagtcagatactcctttacgctcttgttcattctcctgctgttatcaccttcacacattgctttaacaacaccaacactagcttacacactaacacaattagccaccaaaaataggcatacaaaccgcaacattcata

SEQ ID NO: 75218 - DNA, 240 bp, Glycine max
  unsure (1)..(240): unsure at all n locations
  Clone ID: PAT_MRT3847_38935C.1
ctctttttatacctcctcacacttttagaggatagattcctgctggtttgtggcgagccctaccgtctctctcctgctgctctcagatcaactcgtgcagtcagagcgtatgactagtttgcacagctgtatactctgattcaaccgaatcaacgcatttgggtggggcctctctgccacccacatatatttcttatcacgcgcaatgagctgatccatggactctggaccgctanccct

SEQ ID NO: 75219 - DNA, 189 bp, Glycine max
  Clone ID: PAT_MRT3847_38936C.1
ctctcaaaacatgttctgtgctggacacccatctctaaagcaggacgcctgccagggggatagtgggggcgtttttgcagtaagggacccgaacactgatcgctgggtggccacgggcatcgtgtcctggggcatcgggtgcagcaggggctatggcttctacaccaaagtgctcaactacgtggactg

SEQ ID NO: 75220 - DNA, 198 bp, Glycine max
  Clone ID: PAT_MRT3847_38937C.1
cggtgagagaccaaagagtgggacgcgttttgtagtttattaacaaaagagcagagttgccgctgatgggggcacgagcagccactggcggatcccctcttcctatgtgttcgctatgttcacacttgcacatcgctggggcccaagttccttaccggttctacaactggaataacactttatggtgataaataccct

SEQ ID NO: 75221 - DNA, 398 bp, Glycine max
  Clone ID: PAT_MRT3847_38938C.1
ggttgcatccaaataagaacaagcatgtcaagctttcaaatctgtgctcaaacagtcacatcatggaccacaaccaccacaacaacaacagggtgccaagaatccatgcattcttatcaccaacaccgccttctcctcccatgctttccttcattgctgctctttccatcacaacactaatcttcatgtgcctctacgttttgtcacccattgtttccgtggccattcttctagccctttacatcaccaccctcttcctttgcaggttcatgcaagataggagagaattgagagaaagaacctcttttcatgcacaaacaccacaaaataaccaaagggtagtaagggttttcaatagcttttttgggttgttgaggaaaaaaggggtggcaagaggc

SEQ ID NO: 75222 - DNA, 738 bp, Glycine max
  Clone ID: PAT_MRT3847_38939C.1
cggacgcgtggggtcactcacccgcacccgctacctccgatctcccgccgccgccgccgcatcccgttcccgatcttccacctgtttcagtcgcgaaccgtcgcgccaacagcgctttttcgccgcgcattccagcaggtcaccaccgcgccacacaaccatacccactgcgccgcccatttccggagaagtacacttggagcaaatcttgagagaagagcaaggagccaattgttttcttggctatagtctgctctgtatcacagatgagaaattcataattcatgttgagttgggcttgtacttttaggagctcttaactcttgagcccactttaacgccacagcacggacggtgatagggttttgtggaattttctgggaaaaaatttcctagaaaatggacgatggcatgcaattgcaaatctcccttgacaagctaccaatcaagcgcttggattctattgaagaaaatggaattgaacgattcccacttgacgtggattacgatgagaagcggctctccctaattaggcgaattgacttcgcttgggctgttgagaaggatgaggagaagaagaagaagaagcagaagagctcaaaggagacctcagctccatggcaatggcagggcatggtagaaaatttgcagttggctcatcaggagctctctgtcatcatagatctcattaacactgttgaagcaaatgatgcagtaacagtggctagcatgacaaga

SEQ ID NO: 75223 - DNA, 1036 bp, Glycine max
  unsure (1)..(1036): unsure at all n locations
  Clone ID: PAT_MRT3847_3893C.1
attcccggngtcgacccacgcgtccgttacatttgacagtatatcaaaataaaacttatgcttttatacaaaaacatgagatccttaatgcacgttggttttatattttgttatattgtgttcatgtgtttttttatttttttatacagtgttcttgtattcaatatacttaaaaatgaaacactttcatgcattcaagtataccaaacaaaattccaacactatattttggagaaatatggtttcaatgtgtattctttttcaaatttgtaagaagaatttattactgtttatggttaatatgggctgatatatatttttcctgtagggactgcaacctaatctactaactactactgacctctaatgcaggtcaagtctgatctggctaaaaatatccaatcattagaaccaaactctaaatgttatgtcttgtaatgagtgattctcttacactctgaagtataacaattttaccttataagggttcaattcaatcaaagtaaaatggaaagcgtttccttatttatcaaatatgcttatgttttgtaatgttcttctactaatatgtggcgagcttaatccaaagtgatctttcttttggaactatccagttgaatagcagcatattttcagccttgaactttatattttatttgtgactgttcttctttaagagtggtatagattgatatttgatgcacgataactggccttctatcaggtaaaggttcaacttcttattgccattactttaataacattaaatactaattctttagccgctcccagattgagttagatgagctggaaagtgtttccattctgtccatgacccttgcatgggatgaattttccttctctacttttcaagaatcccattattcgcttcaagattctctataccaggtgcctgacatgcctttttgatatcctttctattttggtggtttatttaccatcattccctgcttctatcattattcatgtaatttggaatattaaaagtgaaatggtcaattcttttttgtatcag

SEQ ID NO: 75224 - DNA, 257 bp, Glycine max
  Clone ID: PAT_MRT3847_38940C.1
atttcattattcattaaggggttgcaagcaccaactggaataacactggcttaagtaatggcagtataaatcacatgttggtaaaatgaaagatgcctttctaccaacacgttataatggccacttcatgccaacatggcaatgggttacttaaaccatatatcaatcaacacagaagcgacttaaccaaaatgtttttaccatcatttatagaaaattatgaatttcatgccacccggattaattgcattgctttt

SEQ ID NO: 75225 - DNA, 827 bp, Glycine max
  unsure (1)..(827): unsure at all n locations
  Clone ID: PAT_MRT3847_38941C.1
ccaaatcattaaaagtgtacaagcgcccaaagtcaggcactagtacccgctacctccgatctcccgccgccgcatcccgttcccgatcttccacccgtttcagtctcgagccaccgtgccaacagcgctgtttcgccgcgcatttcagcaggccaccaccgcgccacccaaccacacccactgtgccccccatttctggagaagtacacttggagcaaatcttgagagaagaggaactcttgactcttgagccagctttacaccacagcacggagggtgatagggttttgtggaatattctaggaaaaactttcctagaaaatggacgatggcatgcaattgcaaatctcccttgacaagctaccaatcaagcgcctggattccattgaagaaaatggaattgaacgattcccaccagatgtggattacgatgagaagcggctctccctaattaggcgaattgacttcgcttgggctgttgagaaggatgaggagaagaagaagaagcagaagagctcaaaggagacctcaacgccatggcaatggcagggcatggtagaaaatttgcagttggctcatcaggagctctctgtcatcatagatctcattaacactgttgaagcaaatgatgcagtaacagtggctagcatgacaagaccaaaactattaccaaatgaagctttgtctgacctggctgtatctgcagccaccaagctgcaatgttaccgncatgntgngaaatatttcaagcaatctgccaaggcttttgaaacacaggttgctcggggagctaggttttatggtgcccttatcaggttgcagcaaaa

SEQ ID NO: 75226 - DNA, 454 bp, Glycine max
  Clone ID: PAT_MRT3847_38942C.1
cccacgcgtccggcgagaagacgacagaaggggggattaaagattaaaaaatgccgcccagtgcttcaaaaatgaagcagcagcagtggcagaagatgttcgacctttaactccgtggcaaactgtatataaacgcgtgaactgcaccttttttcgtcctattttcttaccataagtattcaattcaatgcttcatcctcatctattttctattgcattcgtacctcgctttgttttcgctattgctgttggtgctgttgctgtgtctcttgagtattgtctcaattgagttggtgttgaatccgagcttatttaggcacgtttattttagctggtgtgaaatcatttcaacattatctggaagaagactttcagatttttagtcaaatttaatacttaaagatggggttatatgagcatccaaatgttgtgcagtggggtattaaatctttca

SEQ ID NO: 75227 - DNA, 610 bp, Glycine max
  Clone ID: PAT_MRT3847_38943C.1
ctcacccgcacccgctacctccgatctcccgccgtcgccgccgcatcccgttcccgatcttccacctgtttcagtcgcgaaccgtcgcgccaacagcgctttttcgccgcgcattccagcaggtcaccaccgcgccacacaaccatacccactgcgccgcccatttccggagaagtatgaacagaagtctctctggtacacttggagcaaatcttgagagaagaggagctcttaactcttgagcccactttaacgccacagcacggacggtgatagggttttgtggaattttctgggaaaaaatttcctagaaaatggacgatggcatgcaattgcaaatctcccttgacaagctaccaatcaagcgcttggattctattgaagaaaatggaattgaacgattcccacttgacgtggattacgatgagaagcggctctccctaattaggcgaattgacttcgcttgggctgttgagaaggatgaggagaagaagaagaagaagcagaagagctcaaaggagacctcagctccatggcaatggcagggcatggtagaaattttgcagttggctcatcaggagctctctgtcatcatagatctcattaacac

SEQ ID NO: 75228 - DNA, 497 bp, Glycine max
  Clone ID: PAT_MRT3847_38944C.1
tgcgcccaaagtcacccactagtacccgctacctccgatctcccgccgccgcatcccgttcccgatcttccacccgtttcagtctcgagccaccgtgccaacagcgctgtttcgccgcgcatttcagcaggccaccaccgcgccacccaaccacacccactgtgccccccatttctggagaagtacacttggagcaaatcttgagagaagagattgtgtagtggataaaggagaaatatggaggaagggaaaactattatatgtgactatactgaagatgttttcttcagtaatttaaggaactcttgactcttgagccagcttcacaccacagcacggagggtgatagggttttgtggaatattctaggaaaaactttcctagaaaatggacgatggcatgcaattgcaaatctcccttgacaagctaccaatcaagcgcttggattccattgaagaaaatggaattgaacgattcccaccagatgtggattacga

SEQ ID NO: 75229 - DNA, 412 bp, Glycine max
  Clone ID: PAT_MRT3847_38945C.1
ccaacccccaatttttttacccattttttggttccccccgaaaaacctttttcacccggggtttactttgggggccccccctaaaccctccaaaaggcgggggccggggtttagaaatcccagggctttaacaaaccccattatttaggcttgggttcattctcaaaccttaaaaaataaaccttttaccaaaatttaaggaggttcctttaatggggggggggggccctacctaaaaaaggggcccgggaaaaaaggggggcccccaaaaaaatctcctaaatctaaaacccggaaaatttcttccggagggagcccccccccaaggcggcctcggaaaccaattttaaagggttaacccgggcccctcggggggcgggtaaaaaaaacaaactcctcagaaaaggcgggt

SEQ ID NO: 75230 - DNA, 412 bp, Glycine max
  Clone ID: PAT_MRT3847_38948C.1
cggcacgacccgctcactagggctcgggcgccctctcaactctctccaacaatttctttttttcttttgggctgctcaaattcaagcagggggatttgtatgctcggcctcacagaattactcagaatgctccctcttctcccccggattctgtaagtccagactgcaatgcttgcactcctctgctcaaatatcgcacctatttctcactcaccaacaattaacagggcatgacaatggaggcaaattccaagctgtgtcacccccaacaactgctgcgtaatgagccagaccgagcgcagagcgccagaaaagatatcaaggagcttctcaaagcaccaattgccctgctggtcttatccgatccggacggggtgatgctggtacttataataagaatattgccgagtgg

SEQ ID NO: 75231 - DNA, 269 bp, Glycine max
  Clone ID: PAT_MRT3847_38949C.1
tcgatggatattaagtgcttctgggctgctaccttaaagatgatcgacgatatactgggcagagatgcccttataacggttctatgagatatcctgaaactggctgacagatcttacgtccattgactcaggatccactgaaaggattttcccaacgtgacgatgacgctctgtcccagaatcttatctgagctaaaaaatttgttatatgacaaagcagttcttcagcatacattctagcgatcagatctggtgaacactttcattat

SEQ ID NO: 75232 - DNA, 565 bp, Glycine max
  unsure (1)..(565): unsure at all n locations
  Clone ID: PAT_MRT3847_3894C.1
acgagatttaatgagcttaaattatgagttggacgatatggtaaatttttaattagactctaagatggttctagtagaaataaaaatataaagaataaactagtggagtatctaataccttctgtcctatatgtacgacaactccctttaagggaaccaaccagagcaccctacaataataataataataacgagcaaataagaacaaggatcgaaaccaatgcataattgttatttgcatttagtttatcattttatttattttgcttaaccaagttaacttaacaattatacattgatatggcaagttctttccacataaggcaaactaagattctcttggagttatataattagatatttgattatatgaagatataactccaaataggaaatggtaccatacctgaccgtcaggtgtataagacactgcagtaatcatttcgtggatatcagtccaattcacgacttggcgttcanggatgttccatattctgaccttagcatcgagcgaaccactgatgaaataatcatcgtggatatgattgaattgtatgcaggttac

SEQ ID NO: 75233 - DNA, 635 bp, Glycine max
  Clone ID: PAT_MRT3847_38950C.1
ggacaaaaaaaacttaaccataataaaacagattcttttgttcacagtccacacaattcaacctaaatagaaaaaaagtctttttttcaataacaaagtttaaggaagtatcagctcttacacatatatcagcagactacaatcaaaagatgtgattgatcaccaaaatgtacatgttgtctctactgataaaagttaatgcaagagatccaagatcagtatgctatttaacaaaactagcaagcagtcaatttaatctggggaagtgtcagctaacagcaactgctggcatgagtttgagttattcttcttaccaatagtctccacatgaacacaaaccatctttaaaatgatgaaaccgatttgcatcccttacaattatttccctctcaacaagctttgatataagctttatggcagaatgacagttcacacatgctcgaagattctttgttattctaagggtagttccaggagcagtactaataagaccataagcaacagctatcctctcactatgaaaactaagattctcctccttctcttcataattcagatcatgccaacctgcttctggtcttgggacaaacccaaccttctttaaggttttttttaatctgtggacctgtccttgt

SEQ ID NO: 75234 - DNA, 241 bp, Glycine max
  Clone ID: PAT_MRT3847_38951C.1
tgtggtcaaaagtcccctgttgaatattgaatgttcacaagctttggtcaatagtcatggtgcggtatcctgccaagagaaatgtagcccagttgtatccgtgactctggtgagacaggttgataaacggaatgatgagagaaagagaattagcttgagcaccgagagtagtgaatttctgttttcagatgtgattcctggaaaatacagcctggaagtcaaacatagtgcccctggatca

SEQ ID NO: 75235 - DNA, 244 bp, Glycine max
  Clone ID: PAT_MRT3847_38952C.1
gttcataaatgctcgagttcgagtgtggaaaccaatggttgaggaaatacacacgcttgaaacaaaagcaacaggctccaaggacaattgtggtataaacgagggaacttcttctgccactggaggtgataccagccaccctagagctttgggcaatattggtctgaattcaatacctgaaacccaatttcagggtatagatatggggtcatccatagctgcaaatgctgaggaaagtgggtta

SEQ ID NO: 75236 - DNA, 389 bp, Glycine max
  Clone ID: PAT_MRT3847_38953C.1
gcatatgttatgccttgcaatttcaagatgtgatttgactcaacttctgggatttgagaaattcattccaccctttgcaaacactagtggttcaaacatacttaaaggtgttaactatgcatcaggtggagctggaatacgcattgaaaccggctcggacatgggtgctactatcagcttgggattacagttagcaaatcacagagtcatagtttctgaaattgctacgaaacttggaagtcctgacttagctcgacaataccttgaaaagtgcttgtattatttgaacacaggcaacaatgattacatgggcaactacttccgtccccagctctacccagcaagccgcatttatagccttgagcagtatgcacaagctctgattgaag

SEQ ID NO: 75237 - DNA, 460 bp, Glycine max
  Clone ID: PAT_MRT3847_38954C.1
ggttttttttttttttttttttttttttttttttttttttttttttttttttttttttttttttttttttttaaggggaacaaaattaccccaaatttgggccgacttatttgcccttttttacagctggtttttaaagtttaaggaaaaaaattaaacacccccaaaaccccaacggggggcaaaattttacaataatcggcttttcctaacccaaattttggtttttgacccaaagggggatttttttaacccattttcataaacaaaataacctccaaggggggggccccaggttccaaaaaaatttgaccctcccgagacaaaatcggggggggggggaggcaaacccccccccgggggccccgggaaaaaaccccacattttaaacatttttggggatttttagggacaaaaatccccccccttaccccttcagggggggggatcatttttattt

SEQ ID NO: 75238 - DNA, 400 bp, Glycine max
  Clone ID: PAT_MRT3847_38955C.1
tgctgtcgcgtgggcggacacatagacctctatgtatttattctcgtttgggttattgaaaagttccaggaagatccaaagaaagaaaggacactgaataattaatccccctctcgattcgtaactaaccattgatactcttcgttggacgagctttgacgagattgaggatcgcccacccaaaaccttgttatttatggggtcaccgagattcataggccccactgccctcttttctcccacaaccttcttaaggatatttttgtatctatgggagactatgtatatgggttaatgttttctgtaggttctcacaccatgatgccaatggctactttaaagctaatgattgacatggcccttaagcaagacgtgtttgttatgcacgaatggttgggct

SEQ ID NO: 75239 - DNA, 472 bp, Glycine max
  Clone ID: PAT_MRT3847_38956C.1
cccacgcgtccgtggagttcctgctgatatggccaagaagaaaacaagtgtaatttcaaataactggtttcctgtttgggatgaagagtttgatttcccttctgactgttatcatccccgaactggctttgctccgcatagaagttcgagagaatgataagagtcagaaggatgactttggtggacagacatgtttgcctgtctcagagctaaaatctggattccgatcagtccctctccatgatgaaaagggtgacaaattaaaatctgtgaagcttctgatgtggtttcagtttagatgaattataggatcagccatataataatcttagataatggatatgaggtcattgtaatgataattatatttatctttagctgcttgcaatggtatttctggctttactatgttatattttctgcaccatcaacatcaatataaaacagtattaagaactgcgaaaaaaataat

SEQ ID NO: 75240 - DNA, 364 bp, Glycine max
  Clone ID: PAT_MRT3847_38957C.1
ggaaaaaaaaatatcagccccccaaattggtaacaaacaggggtaacattaaggggacaatagggttcaacccaaaccaaacttatttttaaagggtattacagacccattacacataaaatttttttttaaaagggtggggaaaatccaacattgaacattacacaaaaattagctccagcttaaaaccccccccgaagacccaacaccaagggcggaggtgactccttttggagggtggaatcaggggggggccttccatcctctagctggtggccagcaaaaaaaaacctttggtggtccggggggaatccttccttggccgggaacttcgccttcacattggcaagggggggggagctct

SEQ ID NO: 75241 - DNA, 1833 bp, Glycine max
  Clone ID: PAT_MRT3847_38958C.1
catagtcacaacacgtatactacaattgcatagtgctgcgatcgccgtttcttctctgaaacaaacacaccgacaccaatcactctctttgatccattccgtttagacgattagcttttacgatggccagccataactacaaagtcttcagctgcttcaacaggaagttcaccgtcaccgagccgggcccaccgccggacgtccaaaaagcgttttctgaatttgccgacggagcctcctccctgtccggcgatcacctcctccgatttctggcgaagcaccagggcgaagtggactgcaccgcagtggattcggagcggatccttcagcaatcgcggaaagaggatcgggaaagtggactggatctccacgacgtccgggaaggttctagatgatccgatttcaatcttgtaaaattagatgattttccatcccaaatcttttgatcttgcagttttgtgagatatttattgtgtgactttataaattacttatggacatttttctaaattcttgcaggactcttacgactcctgtctcactcatccaatgtttgaagtccataaaagagtatgcttttgttaaatctcactacccactcattataactttagaagatcaccttactccagatcttcaagctaaagctgcagagatggcaactcaagtatttggagaattgctttattatcctcagacagattctctgatggaattcccctcaccggaatcattgaaaggtcgaattcttatatcaacaaaaccaccaaaagaatttcttgaatccaaagaatgtgatgacaaggacaacgaaaaggaatcagccgacgaggttttgtcattgccagaccaaacaagtgaacgggaaactgatgataagagtgcacctgagtacaaacgattgattacaatcaattcggctcgagcaaagggtgatattcaggatgaattaaaagctgctggtgctgttaggcgcttaagcttgagtgaacaagcacttgaaaaggcttctgaatcttatggagctgatattgttaggtttacgcagaacaatattctcagagtatatccaaagggaacacgtctcaattcctcaaattacaagccacacatagggtggacatacggagctcagatggttgcgttcaacatgcaggggtatggaaaatcacttcggtacatgcaaggaatgtttagagcaaatggagggtgcggttatgtgaaaaagcctgaatttctaattgaaaaaggcccatataatgaggtttttgatcctaaaagaacattgcccgtgaagaaaatattaaaggtaaaagtctatatggggaccggttggagcttagatttcagccaaacagacttcgatacttactcgccacccgacttttacgttaaggtttgtattgttggagttccagctgatatggccaagaagaaaacatgtgtaatttcaaataactggtttcctgtctgggatgaacagtttgatttccctttgactgttccagagctggctttgctccgcatagaagttcgagagaatgacaagagtcaaaaggatgactttggtggacagacgtgtttgcctgtctcagagctaaaatctggattccgatcagtccctctgtatgatgaaaagggtgacaaattaaagtctgtgaagcttctaatgcggtttcagtttagatgaattataggatcagccatataataatctttagttgcttgcaatcgggtatttctggctttactatgttatattttctgcaccatcaacatcaatatgaaacagtattaagaacttccaatattgtcacatggcctttttagatg

SEQ ID NO: 75242 - DNA, 253 bp, Glycine max
  Clone ID: PAT_MRT3847_38959C.1
cctacctttcggcaccggccaggacgtgctcgacgtgcatggcgatccgatgccgcacggtatcatatactacgtatggccggcaataagaggaaactgtggcggaatacaacgagccgcgctctgtaaagacacttggcctatcactgtcgcgcagtctcccaatccgaactctaacgggtcagaacatatgcatgacttggcatacccagcgtattacgtaaacgaaaccctaattttgcagataaagttc

SEQ ID NO: 75243 - DNA, 586 bp, Glycine max
  Clone ID: PAT_MRT3847_3895C.1
cccccaaccctctttattgggggggaaaaaaataagaggcccgggaatcctggaaaaatgtaacaatccattggtctgaaaaggaaaaaaaagggtaacttttttttacataaacggagcagttttttttttttttcaaacaaaaaaaaaacatgcttaaattcctccctcaacaaaattgccatgatgaaacccccttaacatttgacaaaatttttgccaacaataatttttcctggtgggaaaaatgaaatgaacccggaaggcccttttttgacaaccttaaaaaccatcttgcgaaactttaaaacggcccccccaaggcgacggaaataggccgcttgaattaatgcccttgataaaacaaatatccctttgaatcccatcagtttttttttttccatttaagggtccccaccccaaggcaggaatgaaacaatttttttccccatttgaaattttgtagcaggggtaccctttttttattcaacagcgccctctttaaccattttaggcctaacaataccccccccaggaaaataagggttattgggcattccttttttaatcgaaaccccccaggggg

SEQ ID NO: 75244 - DNA, 370 bp, Glycine max
  Clone ID: PAT_MRT3847_38960C.1
aacaaacaggcggggggggcccctattgtaaaaaaaaaagggcagggggggtattgggggacttactacaaattagggtttttttattacagtaattaaaatataaaaaaaattttaattaaattttttttggcccgtttttacgttacagggactggggaaccttttgaaacaattttgggggcaaaaaaaagccccccttggcccaaaactggggatataaggaaatcatccccttataacctcaacttttttgtttttttccataatgctggaaaattttttggaaaaaaaggggatctggctttttgggggggtcaaaatcccgatttttccccccaaaagaacccccctttactggaatacttcc

SEQ ID NO: 75245 - DNA, 569 bp, Glycine max
  Clone ID: PAT_MRT3847_38961C.1
gcccgggtcgacccacgcgtcttttctttccttgcaagcagattctagcaatttcttcttctccttatcttgagttaaaggttaaggatgattctttcgatgaagcaagttttctcactagcaatattcattgcattttgggaactttcttctgttgtagctgatgggggagatgtggttcgagttcgagtatcaaaaaaccaaggtttaagtttaagtttcacaattcattgcaaaaccaataacaaagacttgggaactcaagtggtgaatccgaattattatgaacgatttaaactccatcgtgacaatgcacctggctcaacattcttgttttgcaaaataacatggagagatgcatcaattctatatgtcctttaccaagatgcaagggattttcgccgtagatgtacaactgattgtaattgggaagtcaacaacaaaaaccttcttggcattaatcaatattctgaaaacccagatattattgtccaatggcctaaaaattgatactcatttagtgaacatccaattttacttgggtaatttaaataaaaaagtgttgtgtt

SEQ ID NO: 75246 - DNA, 457 bp, Glycine max
  Clone ID: PAT_MRT3847_38962C.1
ttttttttttttttttttttttttttttttttttttttttttttttttttttttttttttttttttttttaaaaaaaaaaaccccccattttcttttttttttttccgggttccaaaacccccaaaaggaaaaatggggggaaaaaatttcccgccccccttttttggtcccaaaagggaattttttttgtccctggcctttgcggggggccgccaattttttaaatggtgaaaatgccccctttttttcccctttaatgactttaaaagcccccccaaagttccccaaggggaaatttgcttgaaattcttgaaaagacaaaaagtccaggggtttttcctccctttttttggccccaaaaaatctttttgggttttttttttaccaaggggtgattagcttgcccaagcttttgcaatcccggggagggtttttgcccccctttttttaggggct

SEQ ID NO: 75247 - DNA, 452 bp, Glycine max
  Clone ID: PAT_MRT3847_38963C.1
ttgccacagagagtagtagagacattgtgtggaacacggcgctatgagtttttaaagaaagggaaagttacatcgctggccaggagaataaccataagattcagctcagagcttgtgcagaatctactttatcaaaacgagatgaaactatacatgtactactatatcaacagcggcctttttactgagactaaacttcactcagccttggccgacatggatatcttatgaaataacggtattaaaactgaaaggacttctgttctataggaacaagatcagcgcgctgtcctagagagaagaagagcctcctgggggctgatattgggcaaggcataaattaggaaacgagattcctatctgaagaacaatattagcctccccatgaaaggtgttgagagccccatgcccctatcacaagttcagtccttggcgatgacgcaacacaaaaa

SEQ ID NO: 75248 - DNA, 217 bp, Glycine max
  unsure (1)..(217): unsure at all n locations
  Clone ID: PAT_MRT3847_38964C.1
tggncatggtgtagttatccgcacgggagatgccttctggggggctttgcgggagaagggaaccagcgccctcaccagatacgtgagaacctaccgcggcggcgattttgttgagcggaaggttaacggtgccgctcggtggggaacgccccccaaattctaccaggggcgctttttttttttgtggaacgacgccaagcgagcggggggcggcgat

SEQ ID NO: 75249 - DNA, 500 bp, Glycine max
  Clone ID: PAT_MRT3847_38965C.1
cagttagcatgtaagtgaagcatgcagcattgggaagcctgtttatgttctgggagctaagcattgcagatggaagttcactgaattccactaatcattgagagagcagggagttgttcggccttttacaggttctgaggatatatcagaaagttggagttatccaccccttaccgatactgctgatgctgctaaaaaggttcatgaagcacttgctgcccgagggtggaaactgaaggtatagaatgcaatttgaagttgacaatatactttttacaaaattatttgtttgtctaaatgggtagccattttgtttgatgggaagatattgccaatacataatattttattcataccacaaataggaaatatagatggtatgcatgtaaccattttcaccatagcaattttgaatgtgtaatgtaaagtaaagcatatgtttttggcattttcaagaatgaggcaaataaagaatttttttttttgccctctattatctt

SEQ ID NO: 75250 - DNA, 200 bp, Glycine max
  Clone ID: PAT_MRT3847_38966C.1
agagaagataggtatcgtgtaggtcgaacaagatgctgtggagtgcacctcttccggtgcttcgagactgatgatctgctgcttgctcttcaggttgacctgagattcaatctaacggatcgtgatttacattttgagacatgtaaggtgtttgcctatggacaaagtgctaccagtatcggttaagtgccttgcaagaa

SEQ ID NO: 75251 - DNA, 871 bp, Glycine max
  Clone ID: PAT_MRT3847_38967C.1
tcattgatttcacaaagtttaaggaacacatgagagatcgacattttgagagaaatcaaactccttacatgttctcatgaggggctgaaacattttccttttcatcattctcagtgagttgcctctcattttctctgtcatcagaagccaatgaattttcttcagcctttctcttcttggctacagatacttttcccttattagaaactgagttctttgtctcttcattttcactcctttctgtagtcttgttctcttcattgttcaaactcgaaagcgaggtaatgtcacttctagaagcttctgtcaaaactggaactgaactctctcctcttgttgatttatgggatttttcatctccaaaagacagttcaccaccacttcctgaagttcctgattcatggcatccttctagagagccacacctagatttctcatctatctccatatgactagtgtcattttcatgaggcacagcaaccgggcatttctgcgtgcctttttttactttcttctccttcaaacttgtctttgtgttggtttctggttccttgcgattattagaatacaaggaatcaaacacacggcttttaacctctcttcccctcaattgctttttggaggtagccactgccaatgagttgctacctccttttccattcttcttcactccattaagttcaagcttattcattgctgaacacagtgttctcattgctgttttcaactctatagaactcttgatctttagtaccttcttaggtgagtgaaaaacaagagccttcgccaccactctgctcttaggcacaccaacagtcaaggctttcttgctctgaacacttctaaattgttctaccttggaaaccttctt

SEQ ID NO: 75252 - DNA, 352 bp, Glycine max
  Clone ID: PAT_MRT3847_38968C.1
atgatgcacgctgccctcggcccggagctcggattgaggctcgagggctcagaggcatggcgactctctcatgggaagaccatcagtgctgatcatatgtcaggcggaacagtttgtgccatgcatatctggctatgcactactaacattaattatggagcacgagatttgcacccacatgcggttcttaggatgtgctgccaagagacaagaaacacagtatacaagtgcttgttgaaaggcgctgaagaagggctgcttatcctatatgaaaaaaagacctgctgaactggccgcatcatgcttggagacaacaattctcagccactggaattaaaggccatcattatga

SEQ ID NO: 75253 - DNA, 200 bp, Glycine max
  Clone ID: PAT_MRT3847_38969C.1
ccgtccgcaagcttgctatcctctagaggggccgccctttccttttttttttttatccacccttatcaccctaagccttgaatacatccataacgcttgcggtgtgcaagaggcgtcttccttcaggggatttcttagaatgaccgcatggagctaagtacggtctatcccactaggatctccagccagagcatgctccc

SEQ ID NO: 75254 - DNA, 935 bp, Glycine max
  Clone ID: PAT_MRT3847_3896C.1
catgaaggtatatcaacgagaaagacaaaatgggcattatggtgtgactgcatttgtcattgggaacaccttgtcatcaatcccatacttgctaatggttacattcattcctggggctatatcttattaccttcccggtcttcagaatggatgcgaacattttctgtatttcatttgtgttttattttcaagtctcatgttagtggagagtcttatgatgatagttgctagtgtggttcccaactatcttatgggcatcattgctggttctggaattcaaggaatcatgcttttacttagtgggttctttaaattgccaaatgatattcctaagccagtttggaagtacccattacactatgttgcttttcatacgtatgccaaccaaggaatgttcaagaacgaatataaaggactaagatttaatacagatcatcaagttggatcaggaggctcacatggttacataagtggtgaagaggttttaagaaatacatggcaagttgacacgagttactcaaagtgggttgatctagcaatcttgattggaatgattgttgtatatcgagttttgtttttggttatcatcaagattaaagagaagatgaagccccttgttgtatcattatcgtgcatgtcagcctctcccaagagaacaatgcaggtcatggaaaaccccaacgccactcctttacattgatgttttgagaagttatatgattttacttttaaaatacagttagtgtagttggatatgtgtgcattagttggagagtggaatatttaagaagtggggaaactatcagcttcaaatttgtcaagggggaaaaatcaataggtcgttgtagtgttcttactttttgagcttctgatgaagttttaattgtaataaactatttaagtaaatcttgaatttggtttgtttagcttaaaaa

SEQ ID NO: 75255 - DNA, 270 bp, Glycine max
  Clone ID: PAT_MRT3847_38970C.1
acggctgcgagaagacgacagaagggctacctgtggtggtccccacatgtatgggtgaagaacctgaccggaagccacaactggggtggagtattgtagcattgtgactcttggcccataatatgcctgaagatatagtagaccttttaaattattattcaattactatttactacacttgagacccaacccactttaaaactttcttggtgaacccatttggaaggggaaaaattcatagttttataccaatgcatcataggttttttt

SEQ ID NO: 75256 - DNA, 260 bp, Glycine max
  Clone ID: PAT_MRT3847_38971C.1
ggagcgatgaaatggccacagcaatcgaattcattgagttgatcacaggggcgacgattccatctcttgggttacggacctggcaagctgaacctggtgttgtagctcaagctctcaccacagccattcacgttggatacaggcactatctgacatgtgctaatgcgtaaaagaatcaagcagagatagagatcatgcacataagatacattctgatgattgtgtggtcaaacgtgaggacttgaggatcacctccaaac

SEQ ID NO: 75257 - DNA, 267 bp, Glycine max
  Clone ID: PAT_MRT3847_38972C.1
gttctgaaacaattttttttatttctgtttgcgacatataaacgcagatagacatattaccttatggcagaactactactacctgtagtacttgaaatcttatagtaatagtaataatgaaaggattataaaatctataacactagtcccctatggtgaactaaaacccctaattttaacttaagaggaataaaaggggtgaaagaaaaatggcaaatgatactacaaattaaaaactcatttgccttgggataataataataatat

SEQ ID NO: 75258 - DNA, 269 bp, Glycine max
  Clone ID: PAT_MRT3847_38973C.1
tataattcttgtgacccttttagctggtagtattgaaagaggactagcatacgtgaatgcacgacattatttggctagcttctataggagtgagtgtctttcagggtttctatgtggaataggatcagctgcttaatagatagaaggtgagcagctatagatggctgaggatctagtatataggacgcctatactatagagcgatcagggatgatttgggatcatagtgatggcagtctaggaattgatttttatcaccggtacaagag

SEQ ID NO: 75259 - DNA, 106 bp, Glycine max
  Clone ID: PAT_MRT3847_38974C.1
gcttctttatccactcatttatcccgctattaaaatcatcaaggggtgggtgacctcagtgggcggcagcaacaaatcattataccatatgttgattaaattggca

SEQ ID NO: 75260 - DNA, 108 bp, Glycine max
  Clone ID: PAT_MRT3847_38975C.1
cccacgcgtccggaagctttaatatgctttgggctcactcatctatctattataaccaaacactctctttgatagacttaatccgattcttgttcttgatcgatctga

SEQ ID NO: 75261 - DNA, 203 bp, Glycine max
  Clone ID: PAT_MRT3847_38976C.1
ccaacatttaaaaaactataatctctcccgtcaatccgtgttatcatgggttaaaaaaagagggtttgcgcttcttgttcattataaaattggcggatgttaaattttatgggattgaacgcccctcttttgtcaattaaaacctccctttttccaaaaaaaaaaaaaaaaaaaaagggccgccctttttaaagaacccaact

SEQ ID NO: 75262 - DNA, 460 bp, Glycine max
  Clone ID: PAT_MRT3847_38977C.1
tcaacttcaacgacgccgtttggagtggcgtcctcagcttcaacgacgccgtttggtggaacgtcctcttcatcgacactattcggatttggcggaacagcttctgcaacaacgacgccgtttggaaatagtagtactgcctctgcctcaacttcagcctttggagcatcttcttctgccgcaccgttgtttggaggagcatcctcagccgcaacgacgccgtttggaggtagtagtactgcctctgcctcaacttctgcctttggagcatcgttgagtgcttctccttcttcagctgcaactacctctcctttgttctcgggtgcatttgctaccactggagcttcttcgtcctcggcctcaacgacgtcgttttcagggtttgcaaagccgtctactccagccgctacaacgacgccgtctagctcttcgggattctccctcgcttctcatccctctt

SEQ ID NO: 75263 - DNA, 1722 bp, Glycine max
  Clone ID: PAT_MRT3847_38978C.1
gcttgcagatcattttaaaggtgatccactagacataggtgctggtatttatcaaagtcgttcaaaggctggtgatgataattctaatgctttacatgagtataagaaggatcattttttcaacaacaatcagattcactcaatgatctggtctacatcttgtttccaggaatttacaaattcattctgtaatgactctactataaaccatattgtatctagtcatcaccaacgtgcagagccatggtcttataagcattttaaatcatctccagtacgtaatgtttctgaagaaacaactaaaacaaggtcccaaacagctgcattgtctataccacaaaaaaatgtgtcatcacctcccttccctttgtctcctctgggtaaaaaatcttctaaaaatgaaaatttgggagaatgcagaaatattgatgttatcttggatgatggcaattttacttttaatagtgtggaacagtcacttgatagaacttgtcaaggcattttatcagctcaggagataccaggtaaatcacagctcaatttgaacaatatgcagcaaaagtctgacctgtttactcctgacaacatgattgatatgaaagaatactggactcattctggtagctttcctcctcgggatgccaagttatgtggaactatgagtagactgccaattagaaggtccttggttggttcatttgaggaatctttgttatctggtcgcctactatctgggaaagttagtccgaaaattgaaggctttcttgcattgctgaatgtaactggtggcaatttctcacctcaatcacaaaaaataccatttgcagtaaccagcgtggatggagacaagtacttactttattattcatcaattaatctttcaggaaagctattatcaggcaagtctagagttgctaaatttcagagaacccttagcatggatgaatcacgatctgaaaagcctcgtatacgtatacctatgaaaggacgtattcaactggttctcagcaatccagagaggacacctatccatacctttttttgcaattatgatttgagtgacatgccaactggtaccaagacattcttgcggcaaaaggtcactttaactgcgtctagatcaaagtctatgatgggtaaggaaagccaaacagattctgacaccagagctgatgccaagtcttcgttgatctcagtcaccagtcacagagataaagatcttctcacctcaaaatgtggagagtttgatagttttacatgttcaaaagctggcattttgctttatgctcttcaccttcgctttatgtgccccttgcctaagagacgttcaaggtcccacgcgtccggcaaatctggccctgtctctgctgatatgagaaatattgtggacattgaacaagaaagaagcttctacttgtatgatgatatgagggtagtgtttcctcaacgtcattcagattctgatgagggcaagttacatgtggaatatcatttcccttcaaatccaaaatacttcgacatcagctgctgaaatgccgctgtctctcagtgatttttgtatatatagttgtaaatgttgtacgtatacaattcatttctttcaattctggggtgatttgcctccatgtaactaataatttgtaaatttggattgtagatgttcatatttgattcatagcacttgctttgaccctttaaaaaaaaaaatttaattataatttt

SEQ ID NO: 75264 - DNA, 351 bp, Glycine max
  Clone ID: PAT_MRT3847_38979C.1
gcgggagagcaagcatttaaaacaacctcaccccaattttaatttccatttttattttaaaacacccaccccccataaggggtattttatacttagaaaggagcccggcaacaaaaaacacttacaatgataatatcacgtatcaacctttcccaccaaatatattcaattacatatcctactactattattttgaagggttagatgcttctgcaacacacgttgccaatcttttgtcaacaaagactgctcattctcacaaaaaaaacattaatatcttataatatatatcattttccacactcatcataaacacaaccattctctatcaaattatatactagtcaatcc

SEQ ID NO: 75265 - DNA, 411 bp, Glycine max
  Clone ID: PAT_MRT3847_3897C.1
ggaatcgcagagtagagacgcaagatacgacgagtagactggagacgtcagatgaagatataagacgtgggacgataacaacaacagcggtagtggtactggtactgctggggctagcaaggacaaagaccaagatgaatacgattctgttcctgctccggctaggcctagctgagtgatcatgatacctagatctagcaatagcgctagtgctagccactccaatgcggatacggatcattaagcatctgcacccgttcctgtctgggcctgggcaaataggtctatgactaagctgctcagtaacagtgctaagatacaggatgacggtgatgcgtgctgctaactatggtggtgctactgatgcggacgtacaggagaacgatgatactggctccatgctctactaca

SEQ ID NO: 75266 - DNA, 351 bp, Glycine max
  Clone ID: PAT_MRT3847_38980C.1
gagagagaaggctccatttataaaacatcgtgtgcgtactcgctcttcacctaggtttcggtcccatcaacttcagggatggtgcaaacgtccacttatcgcaagtctcagagctatgctactagttccaactaactacgggttgttaagatccctgatggcgaattggtgtactataacatctagttgagagcacgtggacgtaactgccctgtcagtggtaagaagatccaatggattctatacttaagtcctgctgaattcaagaggtctagattgccgatgaatcgcatgacagtagatcgatcctatcgatgtctgttatcctggggagctgttacagagttgatt

SEQ ID NO: 75267 - DNA, 508 bp, Glycine max
  Clone ID: PAT_MRT3847_38981C.1
cggactcgtgtgcggacgcgtgcgttgcattctatatgtgaatttccctacctatccattaaggatgcagatcttcacctagaccctcaccggaaagaccattacctttgaggtgaaaagctctgacaccatcgacaacagtgaaggccaactatcacgacaaggaaggaatacccccgaaccactaacgcatcattgttaccggaaagtaactcgaggacagtcgtacccttgctgaatacaacattaagatggagagcacttttagcctggactctcgttgcgctgtggcatgcctatcttacataagacactcaccgcgtagacacatatccctagaggttgaaagcatccactcatggataacctcaaggccagaagccaggacacggaggggattccctccgaccaaaagacgctaatgatatccctgaaaagcacctagaggacgggcgaccactggactgctaccacatactaaaggaatcatccctataactcatacttc

SEQ ID NO: 75268 - DNA, 511 bp, Glycine max
  unsure (1)..(511): unsure at all n locations
  Clone ID: PAT_MRT3847_38982C.1
acggcgtcgggtaaaacaatctcgtatcaaccttaaacaagatgcgtcacgttgctgctttccttttgctggtgctgggcggaaacnanaccccgtcggcctcggacatcgagtcggtcgtgacctcgttcggtggtgaagtcgacagcgctaaggtcgaggctctcctgaaggagctcgagggggggcccggtacccaattcgccctatagtgagtcgtattacaattcactggccgtcgttttacaacgtcgtgactgggaaaaccctggcgttacccaacttaatcgccttgcagcacatccccctttcgccagctggcgtaataacgaaaangcccgcaccgatngcccttcccaacagttgcgcacctgaatggcgaatggcnaattgtaagcntttaatattttgttaaaattcccnttaaatttttgttaaatcaccccttttttaccaanaggccaaatccgcaaatccntttttatccaaaaaataaacnaaaaaggttgaa

SEQ ID NO: 75269 - DNA, 274 bp, Glycine max
  unsure (1)..(274): unsure at all n locations
  Clone ID: PAT_MRT3847_38983C.1
nntgcggctgcgagaacgacagatggggacacataataacacgcaattgtcatttcggtctgtcccttaaacaaagggattcatctttcttcttcccccgacttttactaacgcaaatgggtgaggataaggtgcattgcagctggatatgtggggggcgctactatggcagcaattgcacttaaccccccatccattgaagcatctgttgatgctatatctaaatgccgcattgcagcctggaacaacaaccatcttgctatctatgaacctg

SEQ ID NO: 75270 - DNA, 386 bp, Glycine max
  Clone ID: PAT_MRT3847_38984C.1
gactacaaatgctgagggtcgtgcattcggtacttccgtattaccaatatagcagaatgacgaaatagactggcggttacgaaaacatgaggtgaaagaaattaaaagttatcttctacgtaccccacgtcatgctgacctctcatcctccggcactatattttgatgttgaagtagcctggggcagaggggggcatccgttcgtaaccatgttgacctgcacttgacagactgaacccatcgcgtttaaaagccaaggcattaggaggtacagaaggccctcctacacccccaattttttcttgaagaatctagccatgaaatttggatgctaatttgacagcactgacgatgatgtatagaaacagctgatgcatgctgaccac

SEQ ID NO: 75271 - DNA, 197 bp, Glycine max
  Clone ID: PAT_MRT3847_38985C.1
tccgaatttaatttatttctgattattttatccagagggtacttttttaatggatatttgtaaatcttccacttaaccactgaaaattattttgttttaatcccacccttccatccatacctctgcctccccaaaaagctcctattaatttgcttatccccctcatgtagctagttgaatgtgaataaataacatgg

SEQ ID NO: 75272 - DNA, 436 bp, Glycine max
  Clone ID: PAT_MRT3847_38986C.1
gtcgtctttcggtgtgcgcgtagccttaccgtgagccggttgctggtgccccctggtgcgctgttgttgttgtcccctagccgggtgcgccctagatgcggcgtgatgcctggttctcaggaatggggttagcagtgccgccccatgccgtgtctcagatgtttgcggatctggtgctcccgaatcgcgccgatatgccttgttctgacgcatcgtcttgtccccctcgtgcttctttggtctcgtttgctcgctccaccttgctcccctggagaagtttgacagtggtcttcatctgccaggctcttattctcctatcactcttcccatctatgggacccctggtcaagttagtcaggttaatgcaaatgatcatgtgactgaacttaatgggagtatgaattcattttctggagtatatccaggaagtcaaatt

SEQ ID NO: 75273 - DNA, 160 bp, Glycine max
  Clone ID: PAT_MRT3847_38987C.1
ccattcatacaaaccgtgtacgcacatgcatttaggtcaactcgctcctctaggaggagagcacacagctgcacagctacctggggactgggtttcaataggacacagctctcaatggttgaggtattctgtctatgcaagcacgcaagtcagctggcag

SEQ ID NO: 75274 - DNA, 266 bp, Glycine max
  unsure (1)..(266): unsure at all n locations
  Clone ID: PAT_MRT3847_38988C.1
gcgcggtgancctcaccgngatcctggaaaagggtggacagtaacaccaccctaatcantctcctangggacacacaacatctcactcagntcgagtcccagctcatntcaatctcacanggnttcactctcttcgcacccnctgacaatgtcttccagagncncaaccccggtgccctaaacgatctgagagatgacaagagggtgaagctcattctcttccacgncacgcccaagttctacaccatctccgntctgttatctgt

SEQ ID NO: 75275 - DNA, 471 bp, Glycine max
  Clone ID: PAT_MRT3847_38989C.1
attactttcattattggtggagatcaattatcagtgcatgtttgcgtgtcttcgtgtggaagattatattatgcgatgattacgaaattaaggtaaaaaagcgtagctagctgcaacgataataagagtgctataagacaggaggaggtgaagactttcggttgtgtgtcattctttttcctcttggcgtggcatatggctgtcagatgcaaacgccaagagcattatgacactgcaaaaattattttgcaagattatggtctatggatttgttatggaattaaggtacataactaatctggcaaaatgtcattcatctttatgatagctgtatctgtatttttcacttgtgtacggtggaaaaaaaatgacaaatacgtttttattttcaatccgtgttcaatgaaatcagtcggcagcatagtagacaagaagaacagttacacgtgtactacctcaatttttttttat

SEQ ID NO: 75276 - DNA, 1312 bp, Glycine max
  unsure (1)..(1312): unsure at all n locations
  Clone ID: PAT_MRT3847_3898C.1
aattcggcaccagcgggaccaggtttccgtcgaatattctcgagaaaattccagcaattcctttatctttataagcaacttacacacacacacacacacatctcaaacctaaacccaaatccaaaccatttcagaatatagcaattgataattaattgatccgaattgttgcggaaatctcaaacctaaatccaaaccatctcagaatattgcaattgataattaacagatccaaatggtggttttagcgagaaagaaacgagtcactgatccgttcgacgacgaagccaaagcacgtctcgtcggcggcggcgaccaccggcaattgagctacgtcagcagcgggagcgaacattccggcaacggcgacggacactcgccgtgtctctccgagctcgtgcatgatttcctcgaggacaatggcgactcggagaacaacaactcagcggggaacgagttcgactcggagcgagtcgactccgtcacagactgcattgactcagtggaggagcttctcatgttaaacgcatccaacgtttcagactcttataagagcttgcttctcgagcatgcttcggaggcatcagagaagttcgagtttntgaaagaaggaaacgtttcgtcgcatcgccgaaacgcgatgtcgtttctgcgcgagaaggggcacaatgcggcgatttgcaaaacgcggtgggactcttccggtggagtaactgcaggtaactatgaattcatcgacgtggtgcaatctgggccggctacgtggcacaaaaggtacttcgtggaccttgatttcgtggcccagttcgagatcgcacggcccacaagcgagtacttagagtttcttaattatgtgccgcgaatattcgttgggacggaggaggagctaaaacgcaccgtgcgggtgttgtgcggagttgcgaggcgttgttttgggaagagagggttaagtctgcctccatggaggaagaaccggtacatgcagaacaagtggttcggtccgtatcggagaaccgcgaacccggttcacggaaacccggttccaacggtcgtgtctgcgttgagtggggccaaatgtaggttcgtggggttcgacgacgcgtttcggaggccagacatggcggtgtggttgtaactacgagataatcgatgatagtttcagcatttataataatttacgtatttctttgatgaattttgtaagattttttccgacgatcttagaattttttttttaattttagtttaggagctgaaagatcgattctgtaaaaaagaaataataatttaaattttgatgaaaaattgaatg

SEQ ID NO: 75277 - DNA, 430 bp, Glycine max
  Clone ID: PAT_MRT3847_38990C.1
ccacgcgtccgctgaaacccaatgaccactctaggctgggtcggtttaaacatggcaaccgggaccctaggggttctccctctttctcgacaacgctgatccgatccccatctgtatcctgactcgatggcgatacaattaaagggttgggggccaacggtggacccatcctccaagagatcaaatgccaactcactgtggggaacaaaaacctgggcgacaaaatgggggtagaactaccacagcttgttacccaactcatcatagaaaatggggaatctcttaatggggaaccaggggtgtttgataatggtgtgaccacatttgggacacatcataccaatgttgcacctggggatggctaccccacaaaactgcgatggttataaccttctacccttcctacaccaaatcaatgaggtggtgaagg

SEQ ID NO: 75278 - DNA, 272 bp, Glycine max
  unsure (1)..(272): unsure at all n locations
  Clone ID: PAT_MRT3847_38991C.1
tcagattttgctcactccacgcnacaaacacatacacctagttgcagatttttattcnnttncttccaagtttgtntatcctnatcctaattccatttggctttaagcntnaataacanccagttttctttttggtatnnattgctantangatgtagtaatttcaatngtttncataatgactccataatgggcgattaangaagttnctgagttgtgtgagcgggttgagctnaangtggtgngattcatgtgttgtgtgttgtgggatt

SEQ ID NO: 75279 - DNA, 1143 bp, Glycine max
  Clone ID: PAT_MRT3847_38992C.1
atcgcgtgctgggaaaagcagcaaaagtaagctcttgattgccaaattcaaatctgcttcttcactcaatggatggcaagttcgtcaaggaacttacttccaagatgtagttgccacaaaatatgatggaggaatggatgctaaatttgagttcaatgagaatggagatgctgttttctcagggtatgtcttcaacagaggaggctatgtggaactatcaaaaaagctttctctgccactaggttatactcttgataggtatgagggtttggttctttctgttggtggcaatggaaggtcttatgtattaattctagaagctggtccttcggcagatccaagtcagagtagattgtattttgcaagaattagtacaaaagtgggattttgtagggttagagtaccattttcatcattccgcccagtgaaaccagatgatccagtgttagatccttttcttgtacatactttgaaaatacgctttgagcctagaagacaggttcacttccttattgctttgaattctctttgttaaacttagcttgtattttaggaccttgcatttgtcttagtaatataaattccatttttcaatataacaatcaaattactgaatcccaagtttgagaaaatcagtgcaggcctgggggaagtcatgcattacctgaaggcataatcttcgacacttctgatttggaaatgcggaatttgtgggatctttctatgactaagacaatagagaataaggaaaatgcatcaaccaatttgtttgcaatggcagttgggataaagcaaaaggatcttgtgaacaaaatggtcaaaaaggttagaaaataatattgcggatccgcttacaaaagggttgacgcgtcaacaagtacttgagccgttgaggggaatgggactagagcccattatttagttataacaatggacaaccatctccgtgtgattggtgatcccatgaatggagttcaacgggtaacaacgaaattgtttgttgactaaagtacaccaaaataaaattttgtggagttgttccgtttctcattcctatgacgaggtgtattgtaaattgtggcaatattaaggttgaagtgtttatatatgtgtattttttataaaaaaaaatatctcttaatg

SEQ ID NO: 75280 - DNA, 748 bp, Glycine max
  unsure (1)..(748): unsure at all n locations
  Clone ID: PAT_MRT3847_38993C.1
gaaatttcatcgttttgtacaacttcttttgataagaaattcaaataatgattgataaggctatagttttaaatttgattgtccaattttttctttctaaaaatatttaggccaatgatttagcctcataactttatcttttttttaaaaaaaaaaaaatctagtgcaccaaagttacaaaactttatagtgaaactttaatttacaattaaggatgtacttgtattttttttaattaatgttttgtgaccaaccattttcaagtgacattttggagctcagtaattaaggatcaaatggaagctggcattgagacaatagcttaattcatggtgacataacaaaatctgacaaagtgtggtcaaagttgtcagaaaagccagtaattatgaaaaatatttttgtcaagttttggctaattgatactttttttttctcacaagtcaagtattatcatttcaaaattgatatctcttccatgcacaatttttattcttgcttgtcttctcccgtcttcattgctgtcctcagtaggtatttgcattgaacttaccaattattaataatattaattcatttattattaggagtttattatagtctgttaagttgtaaaggtaaataggatcaaatttaataacctaactatttggggtgtttctagtattttttttttctgcacaagttatcaacttttgaaaacttgaacttttggacttacactgatttctagntacttttgactgac

SEQ ID NO: 75281 - DNA, 262 bp, Glycine max
  Clone ID: PAT_MRT3847_38994C.1
ggatgtcaaaaaccctccttgaaagaacaaaaattgcttgcagggctcacttctaaatacaaatccactacatattaattgaaattaaaactacagtaagaaaccggtccctaatagatattgtttctttcctaaatttaaaataatagcattattttttatatcatataattatttaatattaataaattctttaattcttttttcttattcttttttacataatttctttaatttccttatattattttaattcttatat

SEQ ID NO: 75282 - DNA, 558 bp, Glycine max
  Clone ID: PAT_MRT3847_38995C.1
cgagatcaatatcattatcgcattaactacatacgtccacatcatgagcgtccaatcccgtacctattgacaagccccccaactccattgatgaaaagctagatcattgaggagaactactgactaaaaggacagtaggaaacagacacatgccgcgtaagctttttctttcatcccaggttccggtcccatcacaggcgaaccactcttgtcaaagcattctgtagtgagagtaatacagattagtgcatttaagcaccgtcgtcctcaccaatgcggatggcaccctcacggctgagaccgttagcccagaagccgttgagctcaacatcgctctcgcgcatgttggcgtgggcaacaaggagccaggcaccgaagacagccttggcaaggacatcgaggatagcgtaggaaatgatctcagcatcaacgctagccttgcgggcaccgtcggcaacaccccagacaatggggtaggcagtccagaggatggcagtgtaggcagcgatggagacgaaaaagggcggagcttgtcacccttggcgcgggcgttggcgc

SEQ ID NO: 75283 - DNA, 356 bp, Glycine max
  Clone ID: PAT_MRT3847_38996C.1
attccgtcgacacgctcgctgcaaaacgacgaggggtgaattgattggtggacaggattctagagccgagtcatcactcggtgctcgcctgcttgtcacaccgccgtgtctaccgttgaatggccgtgaagtgttcgattggcactgagcgtcctgccggacgtgtagagccactgaccttatattaagaagaaaatacatcaagtgcagaagagattgaagcatggaagagggaagggtttggaagatacagaacaagatcaatcgcagtaccttttaaacgcaaatggttgctaagaagcttcggctattgtctatgcgatctgaatcgtctcaatttctcagtctggagcttt

SEQ ID NO: 75284 - DNA, 459 bp, Glycine max
  Clone ID: PAT_MRT3847_38997C.1
ggctcgagttttcatcctacaccattttaactggtaaccaacacatcactgtcgctaatggttctcatacccccgttattggttgcgatcttgccacagggaggacgattggaattgctaaagagcaggggggattatactacttgcagcatgaggacaatcaagagtgtgccaaacagaaggctttcacttctaatcaccagacaagttcagaaccttggtcatcctcccaaatatggcttcagcacagacgtctgggtcatcctccgtttagggtccttaagtctttatttccctctctggttgcaaaaatggcaatcgagtcttttcattgtgatgtttgcgagtttgctaaacaccatcgaacaaatcttcttgctagtactaagaaaagttctaaaccttttgatctcgttcattcggatgtatggggacctgcacttatcaataatatttctg

SEQ ID NO: 75285 - DNA, 1255 bp, Glycine max
  Clone ID: PAT_MRT3847_38998C.1
acgaaaaactaagatgatctcatgtatttgatcttgacaaaattttactttttttatggccaccttctacccaatttttgcaaaatcttcttagtataataaagtgggtgacaattttgtaaatataaaatctatccttttaaaattatttttaattaagaaccgttttattagatagttaaaggaaatatttttctaagatgatttttatggaacgaaagttaataactgtcatcgagtgtgtcttttaatcgacttagaaagcgtctttttcaacactgagttatgattttggatgagaatcatatcctattggattaagatttaaaaattttattttgacatgaaaaaactcaaaatgcatttatttaacaaattaaaagaaaattatttatatgagttgaagatagtattaagacatttataatgttcatatattctattcaatcaattaggaattaaaagttgattttcaataatgtaaatataagaatgtaatattccatatttattttaatttttgaaaaattattctcaaatattgaggagtctcaaacatgttaaattttttattttaagtgatattcctataaaaacaaggaaagttatttcctaagataccaataacatggaattataatggaaccaaaaaaaataacatgatactttaaaagaaacatctcataaaaattataaaatcatataagtttgcgtatttgattttacatttgagaattcattttgggttcaaaattaattttaaataaatttttacatatttagtttcaagttggaaaagaattcacaataaattttgggtttataattaattatgagttgaagaaacaactttgaatagttttttcgttagatctaaaattttgtattaacttggttttataataaaaatatttaaatataaattattacaattcgatgtaaataaggtacatgaattgttaaaaaaaattctatttaccaatgagataccgagttgcttgtattttaaacaacaaaaaagtaaaaatagtagcacgtaaaaacaatggtacgtaaggtaatataatatagatcaggtaaggtggcaaagcctctagtacgtaagataatataatatagatcagcaaaggtggcagagccttctagttagatttatattatattttaacagttaaataaaatacacaattaagagtaagcgataagcggagaaaaaaatcaaattagatggataaaggatactcctcaagtggac

SEQ ID NO: 75286 - DNA, 180 bp, Glycine max
  Clone ID: PAT_MRT3847_38999C.1
attcttctcaataaacaattaattataaatacaatcaaatttcaattgtatctctaacatctaattcaccttctacatttctacctccatgcatcactactagggatccgcgtttcaacttcaccatcaatattgattcatcttccatcacgcatttcttcttaccttttcttcttatca

SEQ ID NO: 75287 - DNA, 218 bp, Glycine max
  unsure (1)..(218): unsure at all n locations
  Clone ID: PAT_MRT3847_3899C.1
caccacgctactaagcccgataccgcagcacctccgcttnttttttacttatctttttcntcctttttttttattggaaaagtatcaaacgggatacatttttttgaaaaggggcgtaataaatttacattggacaaatattctgtattcccaactttcactatctataactctctattacaagaactaatcaactgggagtaatcttctcttctaaa

SEQ ID NO: 75288 - DNA, 294 bp, Glycine max
  unsure (1)..(294): unsure at all n locations
  Clone ID: PAT_MRT3847_389C.1
aacatgctgngggctagnnagggacaaaggaancnaannggnttaggctttcattattactattgatgtgtgggggaggtaatgtgtttacttttttagaaaagggaaaacaanaangngggggaaaggggggggggannaanngcccccccccggagaagaaanggnngaaaagaanggaggaggggaaaangnangacaaaaaagaagagcganngcgngcaanngnacanangnaagaagaaaaaaaanaangnaaaccccgnncnngnganaannaaaggggggnngaag

SEQ ID NO: 75289 - DNA, 436 bp, Glycine max
  Clone ID: PAT_MRT3847_38C.1
ttcggttcgagttgagatagtgcccatgaatttgacaagccacactttagtggccctggagtgaaaagctctctagctagtcataactatcactcattacatgattggtatgcgacatatactagatgcaacttttgcacatttagaaagtttgcagattgtgattttctcaatagaaactttaagcagatgtctaatgttttgtgggtggcttcctgctgtcatggcgagtttatggtcacaacttggttacgcttcgtgtaataatctcgaaacgccaagaagcttatcttgccaaccttgtagatgtgttacgagaattgtatttgcacaattcaaaggaggcttgtcatatgagaagggatggtctcttttgaaaaaaatggctgcataaagcttttttgcactaccttgcctcagattgtatagtttcatt

SEQ ID NO: 75290 - DNA, 750 bp, Glycine max
  Clone ID: PAT_MRT3847_39000C.1
ccacgcgtccggacaaaaacacaagtgaaatcaaattaaaatctataagaccaatcaaatctattaagacccaaccagaaagaaagctagggttcacaatttggtttatgctgaacactttctcaccaccatcactgtgattctactgatacaaacgaaaaagcttgattctttccattcatggggcgtgggctccgaaggatgaagcagcggaaagaaacaaaatctttggattttgatggtgggtgtgaggccgatgaggccaaaaaaacgaccaatttcgccgaaaacaatgatgacgtggcagggggttcttcttcttcttctgatcgagaaggcgtgagaaagaagcttggcgaaaaaggtaaaaaggataaagaggatgtgaaagagaaggagatgttagagggcgatttgatggacaagaaagatgatgttcaagacgaaaatcgcggtagaaaaagaaagatgtttccgaaggatgacggtgagagtgaggccgatgagggcaaaacggtgatcaagtttgctgaaaagaatgatgatgtggcaggaagttcttcttctgctcaagagggtggaaggaaaagtaaagtggataaggaagacgtgaaaaagaagaagaataagatattagagggcaatttgttggacaagaaagacgaaaagggtggtgaaagtgggggtgagaggaagagaaagaagcttaagagtgatgaaggtgagattgaagtgcctgtttctactact

SEQ ID NO: 75291 - DNA, 583 bp, Glycine max
  unsure (1)..(583): unsure at all n locations
  Clone ID: PAT_MRT3847_39001C.1
tttatttgttgtaaattggaaaaatcaaatatatatatattatagattgatttggaccataaaaatgtaacgatccaagattacctaccaatttttccatagcatcacaataatatataccattaaaaaatgttcataattttgtcaccaccatcaagaaaacaataaattattctcaccaaacaactaattcaaacacactattataaatatttcaatagaaccggagaatcatcagctaacaaatgttcttctacataacttaatttatgttgtcatcctcacgtggataatgataagcgaggactgcataacaagtctgaacaacagtgagaagagttatcaacgctgcagcaaagttgtaaccgcgcctcaaaaacttttgaaggccgtaaatccattctgttattcggctcaaatcatgacacgcaattatgggaaacctcgtgacaaaatttgtagccgaaaatgtgttcaaggcatcaatgatgttgctgtaacccgaaccaacgtggccacggtcaaanccattagcgacggaaccaaagaaatccaccacctcgtgattactcataccccactc

SEQ ID NO: 75292 - DNA, 262 bp, Glycine max
  Clone ID: PAT_MRT3847_39002C.1
acgaagacgacagaggggtggaaaggataggtaattgttattccaagccagaccttcacaagagaggaaaagtgtggtgacttgatcctcttatactctgtgttaataatggtagctgcttttgagaaaagcaatcaaatctgaccggaagaatgatcacatgtacaccacattatgggtgtgcaagtgggctcaacgttattggttactactggaaaataacattccaatgtgagggtgggaggatatgacaccacaaggg

SEQ ID NO: 75293 - DNA, 315 bp, Glycine max
  Clone ID: PAT_MRT3847_39003C.1
gggtgtgtgtttttttttttttttttttttttttattttttttctttttactttttttttccttgttctcactcaaaattttttttttttgttccttccacattgatatggggcccgaaagagagggtgtatatgggtgtgtacttcactggctgaagaaaggggggggtgatttaccggcccctctggtggggaagaaccttttcaaaaaagcagggcgcgggaaaggtctataaagaagaaggttatcctgcggaagaaactctggggagggagcaaaaagtctcaccctatcactgggggtgggggaaaaca

SEQ ID NO: 75294 - DNA, 586 bp, Glycine max
  Clone ID: PAT_MRT3847_39004C.1
ccataacatcacaataatatataccattaaaaaatgttcataattttgtcaccaccatcaagaaaacaataaattattctcaccaaacaactaattcaaacacactattataaatatttcaatagaaccggagaatcatcagccaacaaatgttcgtctacataactcaatttattttagcatgaatctgggtggtgttaaacaggtttttgttgtcatcctcgtgtggataatgataagcgaggactgcataacaagtctgaacaacagtgagaagagttatcaacgctgcagcgaagttgtaaccgcgcctcaaaaacttttgaaggccgtaaatccattctgttattcggctcaaatcatgacacgcaattatgggaaacctcgtgacaaaatttgttgccgaaaatgtgttcaaggcatcaatgatgttgctgtaacccgaaccaacgtggccccggtcaattccattagcgacggaaccaaagaaatccaccacctcgtgattactcatacccaactcatctttgatgattcccttgttcttaagaatttgaacatcgctggcgcaacatatcaaatcatt

SEQ ID NO: 75295 - DNA, 351 bp, Glycine max
  Clone ID: PAT_MRT3847_39005C.1
gagaagagaacgccaaaaagacaacggcccatgcaagtgaggcaggtaaggaagggcaacagggggcacaagagcaggtggagaagggaccataaaaaccaggtgtcaatgtccctgaaaatgaagttgcacaagacatggaaattaaaaaatgaaaaaaccacttaaaagggaaacttttttagaagaaggatcgttggtgaatggggagcgggaagaggggagtgctcacgaagcagctaaccagcgcacgcccaccaaagcaaaaccaatgttgtgtccaaaggctgaatcttttcaccctttattaccaaatcccggaaaccccaaaactcgggtatagccggagac

SEQ ID NO: 75296 - DNA, 546 bp, Glycine max
  Clone ID: PAT_MRT3847_39006C.1
ggctcgagagagaatatatcattgctcgaagaatatggcaggctggaaacacatactattgtgtaacgaaggtatggttctaacatgatttgctataattttatggcatttcctcttgtttctgctcctctctcaatgactagtccccactcttctattgctagaaaagaaagtcttgttgacgtgatgacactaacagtgaatgtttaatttctcggttcagtagaatcaattgagtaatgaattatatggcataaaggaaagaaataagtggaaaatgccccatcccccttctcccaaaaaaaaattttttttttttaaacccagtttcacatgttgagttgataatgtgatttgaactagttattaatgtacttggatctcttttagtaatgccttccaatgttccttttggtctccatctagaggattaaaaatcatgctatctaccctcactagtgtcttcagtaacctcttttgtatatgtcgaaaccatcttaaccaattttctatcatcttttcctcgacaagtgctacatcaatatc

SEQ ID NO: 75297 - DNA, 238 bp, Glycine max
  Clone ID: PAT_MRT3847_39007C.1
ccctttcgttcgcggtttctttgtctggatcgtgggcaaacgtttgctgaaactattagctcttgagaccacatatcaattgtgaatacaatcattgcaaagatgatcatgtgggcattaacgtattttttatgattcattagccatatcaaatcatgaaatttcaaccaaataacattgtagggatttagtttatccatgaccaccaccattaatccatgtattctctgtgatgaat

SEQ ID NO: 75298 - DNA, 994 bp, Glycine max
  Clone ID: PAT_MRT3847_39008C.1
tctcgagccgaatcggctcgagtacggctgcggagaagacgacagaaggggggattttgttaagctatcggctgcgtccgcggtgatgctgtgtttggagacttggtattttcaggtgctcgtgctcattactggcttgcttgataaccctcaactctctcttgattctatctcagtttgcatggcaataacagggttgacgatgcatattggaattggatttaatgcagctgcaagcgtgagggtgggtaacgagttgggagctgagcatccaaagtctgcagcattctcagtgattgtagtgaatatgatatctttcataattgcggtgatagaagcagtggtggtccttgcactgcgtcgggttgtaagctatgcattcacagatggtgaaaccgtcgctaatgcggtctcagacctctgtccctacttggccgtcactctcattcttaatggaatccaaccggtgttatctggagtggctgttgggtgcggatggcaagccattgtggcctatgtaaacgtgggctgttattacgggattggaattccgttgggctgtgttttgggcttcacgttcggcctaggtgtgcagggaatatggtccggcatgatcgggggaacaatgttgcagacccttattttattatggattacacttcgcactgattggaataaagaggtaaatccagcaaagaaacgattaaataagtgggggtacaagaaggaacctaagattcagagttgaaatggttcttctgctgaccattggcctaacagatagttgtgggttcggatttcgagttctcactggaaaattaaaagaaaagaaaagttgatgaattattgttttgttttttcttatgtatgcttggaaattttgcaagtaataatatgcttcaaataatttaagagatcaaataagttgtgttcttaatggcttttgagcaaagttgataagatgacaaattgaacttaatatattttatattcc

SEQ ID NO: 75299 - DNA, 509 bp, Glycine max
  Clone ID: PAT_MRT3847_39009C.1
attcggctcgaggatgaaaacccctccacactcataagaacaagaacaagaaacgtttctctcaaaaggaagagagaacactatgtcaagattctacaagatttgaccaaacataacgatttgatccgtggggagataaagaatgtgaagtgtcacaatgaaaaactgaaggagtacaatttgaagttgaaagcgagaaaacaagagcgaagtcatggcccaagtcaaggtggtctggtacacaagcaaccacaacagcaattccaattttccggcatggcgcatcatccaccgttgatattgaatcagacggctgggccagcccaaataagaggcggcgagggcgttgttggtcctgctcacgcaacgacgtcgttaggtagtaatgatgtgggcccaattgggaatttctgatctgaacctgccacttgatgagtccatgaccatgacaatggagctttgcgatttgaatgtgagtttgggccaattaggatcttggtaagaccatg

SEQ ID NO: 75300 - DNA, 436 bp, Glycine max
  Clone ID: PAT_MRT3847_3900C.1
aacagtaattcatagctgcgtttatttatatatattgatatagtgacgacatagatcaccaggagagttacatatttatgagaacatgcagcttaaaacattagaacaaattaatggcactacttcttgttgcccttatccgcaccatgcagaccactgaaatacccctgagggttgttttcaaatgttccccttgaaatgtaagatccatcaccaccaggggctttcatataaccccctgaaccaccgccactgccaccacctttgctagaatttcctccaccgccactttttgcattaccgccaccgctaccgccatcactgctaccacctttaccacccatgtttcaaataatcacaacagacactcactcaagttactgaaatattacgtagatagcaaattaattttgcccacgcgtccgcggacgcgtgg

SEQ ID NO: 75301 - DNA, 566 bp, Glycine max
  Clone ID: PAT_MRT3847_39010C.1
cttgcgaaatttgtcacattgactaacatcctcttccttccctttctctaactattcctcttatccttcttctctcaaacattatatttgcaccaacctgcaaccccttcctctaactatgccacacaacaagccaccaccaacctccatgaattcaaattgatatgcacccaccacgcaactgcacaagcattgcctgccacccccacaacaccacaaccttcgcacccaaatccaaaagcgaaagcggctctgacaatgaaaacaccgacaagagaggtagggctcagagccagagctttggcgttagtgatgacagagatgagcatccattgacgaggaacataccatgggccagatttatatctatttttttttcaatttttattcttattgtgttctaattatgttgatttgggggttattaggttatgattgcgttaatttgggatgattaggattttgattgtgttgatttggggtggatattgttcttttcagccaccactatttacaattcaaactgcacaatttacaacttaacattatcaattatcattggatag

SEQ ID NO: 75302 - DNA, 212 bp, Glycine max
  Clone ID: PAT_MRT3847_39011C.1
cctgtatagcgggcgcgatccactcgttctatcacactctagaacgcgagaacacccttgacagtttaaactactaagaatgcagcttgtatattgttgctactgacaatcgaccatgtgtgccgtgttctccccctcgcttgatcacagagaggccactatacatgtgaaagaaccctaccatcgatacatcgtgaatgaaacgcaaacca

SEQ ID NO: 75303 - DNA, 227 bp, Glycine max
  Clone ID: PAT_MRT3847_39012C.1
ctggattatagttgatggttgtcataaattcatgttgggggttgtgaggcctcatctgttggtcggtttcttttgaaatttgacctccctctcgaagctgaggatcgatgttacatgccaaactaacaaggggctactataaatacagtgtcatacgcacctattattcaagtgagatccgtagaggaaacttaaaataccacccaaggatcaggaaggctacaatg

SEQ ID NO: 75304 - DNA, 512 bp, Glycine max
  unsure (1)..(512): unsure at all n locations
  Clone ID: PAT_MRT3847_39013C.1
tccagatacagcccngaggacatttttggctgtcatttctgatccttcgctaaaattacttagtggcttcttgggcaggctctgttttctccagcggtggaaaaactgctgcttgggatttgtggtttatggatacacacacacagacaactattaatatttttgttattaattaaagactttgaactctattatgcatgctagttgttgatagaataggaaagatcatatgcttttgacgttaatttattcaatccctaaacctaaggattaaggcatttaattttctattgttataaattcttgaggcttagagaagactttgcccaagtcattcacatcagaaaaactcttcaagtccagtaattgatacttatgtgcagaagacatggacacaattatgggatgagttttgtattcataatctgntattatcaattacttggtgtgggttctctgaaatttatgagctgcaaatcttggttttattttaagatgcgtactgagttctg

SEQ ID NO: 75305 - DNA, 285 bp, Glycine max
  Clone ID: PAT_MRT3847_39014C.1
ctttttgatcaccccctacctatactgagaaatctttctgctctaaaaagacaataaccctcagacttcagcaaaacttataatatagatcccaatgacatcattctttcaaactatctaacatgctgatctcactatacattagattcacatgacattccaccatttaatacaacagattactgtatgctaaccagtatactaaataatccgttctgttcatccatatccccatacgcaattctatgttatctgtctaaaggatttgcaagactactctcaact

SEQ ID NO: 75306 - DNA, 460 bp, Glycine max
  Clone ID: PAT_MRT3847_39015C.1
aaaaattattcatcgatgcctcacttaattacttggaaaaataacctccgctgcgaatattattgacctacagcctacatgtaagtgaattagaatactttcacagcgtcaatgctaaaccacgcacatcgacgtatgcacaaaggactgtccgctttcgttctttcaacatagtgcgaagactaacctttgagccttaaacccacatctgactaaccagagactgaccggggtttacatgtaaaagaaatctccccgcattgctggttaccaagtacggatctcctatgcatatgccttcgctgataggcctaactggctatactacagtgcacagaccaggctatcttggacggcagaatccggctacctttgcacccatgggatctgcctgcataggatggtaatcaccagagagcctatggagcaacgcctgcgatgggtggggtccattcttaaa

SEQ ID NO: 75307 - DNA, 264 bp, Glycine max
  Clone ID: PAT_MRT3847_39016C.1
gggttctagtgtgtgattgtttcgtgctgtaactcgttcttcttcttttggtggtccggggttggggttggtttttctcttaacttgaaatggcttggttccggggtaacttggggttccggaacttcttgcagtgccggaaccgcttgcgaagcttcaagatgtacccagactttagcttcacttagtcaaccaccaccgagacctttgtcatgggagtggcacctgtttaaggttaatttgagggtgcttaaatgggtgtgc

SEQ ID NO: 75308 - DNA, 265 bp, Glycine max
  Clone ID: PAT_MRT3847_39017C.1
atgcaaccatatttaccatactgactgtgttggtccttggttgggtgagcataactaatgtgctggttgccgggtcgagctgccaccttatggacaggctagttcccggggtacttataattggggaggaaggaatgacaacaccaccagcagcgatggcatccgtgatagctacagaggtacagagaacacacgtcttaaccatggatggaaaaatccattatctgttttgtggccatttcgttcatctaactcgaacaataat

SEQ ID NO: 75309 - DNA, 119 bp, Glycine max
  Clone ID: PAT_MRT3847_39018C.1
cccgcgtgcgaactttgagatctttggaatctacatctggaccctcgccagtgtttatccattcgattattccctagatctgacgaacaatgcctagaccggggtgaaaaaccttttta

SEQ ID NO: 75310 - DNA, 138 bp, Glycine max
  Clone ID: PAT_MRT3847_39019C.1
aatcttacgcgttttttgaccttttaattttttttctatacttaatggaacacgggcgcataatttattaaagcccctaaagaaaaaacaacttatggaagtcttttacatgatttgttggcacacatttaaaacaca

SEQ ID NO: 75311 - DNA, 398 bp, Glycine max
  Clone ID: PAT_MRT3847_3901C.1
gggctacaagacaaaacaaaattatgaactggggagtgtttcattcaacaacagacacaacataataactcgaattctcgtcgggaacatcatgtttctggagtttttactcaacattctaagcaaatatacaacacacatgaaaccgtttttcaaagaaatgggaaaaaccttattttttggggcttctttccaaaccttggacaaaataatacacatttcttgtacttcaatcttaagctttacctgataaaaggccaagggccctttatcttttatccacaaagaaatccggtgcctcactttcaaattatccccaattaaaagaccatgggcaatcttctttatcacaaggatatcaacttgccttatttcaggaccacctttccgaggaattt

SEQ ID NO: 75312 - DNA, 384 bp, Glycine max
  Clone ID: PAT_MRT3847_39020C.1
aagtgcagcccggtgagagggtgcccagcgaggaagcacgtggagcgcgcaccagacgatccggcgatgctgatagtgacgtacgagggggagcacaggcaccccgttcaggccccgatgcaggagaacccagccggggtggtggggttggtgttcgagtcaacgtagagagaaaaagagagagggtccaataaaaaaattggaagtggaggactttttctaaaaatatattataatttttggagagtgtagtgggaacaaaagcaatagctgctttgtaaatttgttttttattttttattgttatattttagttgtcatatgactcccagagaggtgaaaaatggaatctcaagttgtttatttctatttatctcctttgcc

SEQ ID NO: 75313 - DNA, 509 bp, Glycine max
  unsure (1)..(509): unsure at all n locations
  Clone ID: PAT_MRT3847_39021C.1
tttttcccagattaaaattcggaagggtttaaagacacaaaaaaaattaatcttgtgtttgagaatttcaaaattttctttaagggagaagttcttcaaatttaaaaaaccttgaaaaattttcttataattatgngtggtgccaatattgaaatttttcattaaactttttgaaaatttnaaaattaaaattttattaattattgttttggaattttgtacttaaaacataaattgggaaccgtcccttccccattgaagggaaggtttcatttaaattacttaatggaatcggcaagagagtgacacaatgatcatgacttagcaggcttaacacttgagggactaattgatcgtcctccttctaggaaggtcgcatgtacttaatgaatggaggaaatgtaaaaatgaactcttaagcactaatgattgtnagggttgtggatcattttgattaagaatcacttttggtccaanngactagagtggaacaatcgggcctcgaacct

SEQ ID NO: 75314 - DNA, 501 bp, Glycine max
  Clone ID: PAT_MRT3847_39022C.1
ggaaacaacccccaatcaaaaggaattccccgggaaacaattttaacaacacagcccggggggggggggttcaaaaaaaaaaaaaaaatcccaaaggcaaaaccaaaccaaaccaaaaaccttaaaaaaaaaaaaaaaaaaagggtaacccccggggattttgttacccccggggcttaaaaccaagggacccggccccacaaaaaaaccggttttaacgggattttaactttaaaaattgggcctaaaagggccaaaaacattaaaaaacaaaaaaaaggggggccaaaaaaaaggaaagcaaaccggggggacctttaaaaaaaagggaagggaaaccgtttttcccctaacaaaaaaaaaaggggcaacaacttttttaaaaaacaactttgggagcgggggaaaagggggcccccaaacacaaacaaccctagggggcatccaaaggggggtggggtaaaaacctaaaaagggcccaaggccttaaaggccccaaaa

SEQ ID NO: 75315 - DNA, 768 bp, Glycine max
  unsure (1)..(768): unsure at all n locations
  Clone ID: PAT_MRT3847_39023C.1
ttgcttctccatttttttttcatctgcatgcacacacttgggtaggtttggaaaccaagaatgggtggagggtagcatcaacaagaagttctgctcatggagatcaccaaagccgatgagttttaagctattgcaaagctgcatttgacaaagattgccctaagacactgagcatatatcttaagtgacaataaatgaacaatttgcagctagctttaaaagaatagatgaaatgaagncaaggaaagtcggctcgagggttgatattgtcagagaagtgacattgtttgtttttaagattaagatgccttcagctgttcgagtacagttgatgaatgatttagcggatatagagtacagattaagttttgggtgcaacgataagcttcagctcggatcggttattgcttctttttcacgtgctagatctgcactggttgcggctgctacatagcctacttctgaaaatttgctttcacatactactaggcctggcttgtcactactgagaatgggattgagaggatctcagtttgtgtaaagatagtaactgtgttaatcttttttaacttaagatgaattttaaactttcaagtacctttacaaaattctgaagtagggacatcttccgttttaaaatttactgctgctagtttagatgacaccattaggtttgaaagttaagatcaattagccattttgatatcaatacaatgaaaacccttggaatgcattaaattttgcatggaaaaggtgaggtgtttccac

SEQ ID NO: 75316 - DNA, 1521 bp, Glycine max
  Clone ID: PAT_MRT3847_39024C.1
acgccacgtaagctcggattcggctcgagtgctcttatttacccatcaagcctaaggcacttcacttgttctgcattgaccatagcttctctctttctttcctaattaatccttacttcacttgttatgcattgaccatagctctctctctttctttcctaattaatccttccatgcaaacaaacgctgctactctcattcactcttagaagtactcacagctgagtttcggttgtattgtatgtgtcctttcttcattctcctatattggatacacacacttctagtatataccaagtgattgatgatgttgtcagcaaaatctgaatcggatatcacaagcttagctccatcttcaccttcaaggtcaccaaagcgccctgtgtactatgtgcaaagtccttcaagggattctcatgatggggacaagtcatcttcaatgcaggcaactccaatatcaaacagtcctatggagtctccctcacatccttcgtttgggcgtcactcgaggaactcttctgcgagccgcttttcggggattttccggtcatcttctggaaggaaagggagtaggaagaggaatgataaggggtggcctgagtgtgatgtaattctggaagaagggtcttatcatgagtttcaggacaagggtttcacaaggcgcttccaggctttgattgctgtccttacctttgtggttgtcttcaccgtgttttgcttgatcatttggggtgctagcaggccttacaaggcagaaattgctgttaagagtttgacggtgcataatttctatgttggagagggttcagacttcacgggtgtcctcacaaaaatgctgacagttaatggcactttacgcatgagcatctacaaccctgctacattttttggcatccatgtgcactccacacccatcaatctagttttctcagaaatcactgttgctactggcgagctgaagaaacactatcagccaagaaaaagtcaccgcattgtatcagtgaacctagagggtactaaggttcccttatatggggctggatccaccataactgtatcccaaactggtgttgaagttccactcacattgaactttgaaatccgttcgcgtggaaatgtagtgggtaaactggtcaagacaaggcatcgtaaggaaatcacttgccccttggtcctcaactcttctcgatcaaagcctatcaaattcaaaaagaattcatgcacctatgattgatcagtgatcaatgtccattttcatagcttatctgttttgagagtgtagcttaaaattgtataatctgtgttttgtgccaagcttcagatcataaggtccatttggtttgcaatagaagcaaaatatgcactcgaaaaaatacttcttacatacaactagtccccctgaatccccactctgtactttactcttatgagccttgtgcaaataaatgcatgtatgtaaatttgtatatgcatatgcataaaatgaagaaacaattcgcgagttcattactgagggaaaaa

SEQ ID NO: 75317 - DNA, 161 bp, Glycine max
  Clone ID: PAT_MRT3847_39025C.1
ataattttcagaagtaaaatgaatttgttataatttggattaaattgattttgtagaatagtctgatgttttacagttgttttctttatacttttggagaatctgagcccagagaacagggctatttcgaaataaaaaatgccctgttaatttggaaggat

SEQ ID NO: 75318 - DNA, 624 bp, Glycine max
  Clone ID: PAT_MRT3847_39026C.1
attctcctttaaacactccattgcaggatttaacattaaaccagccgctgctgtatttgccatgagcttcagcccagttatctccatgtgagtcgtcaccgcggactccttttgaatcaaatttccaacaccaagtgtaaaaggtactgcaacactagaagatatttcctccattggtttactttgccttgtagcaatagtcttcttatcctccagtatccaataagttgctgtccctttaaccacttttttctccacccttttcccccaagcctcctcctttctaaaacaccaagaaggctcctgttttggactttttataagccaagagaagaggtcccaaaaccttgtatttcttcctccttatgatcgatcccggccactgaaatttcctttccctggtttgtgtttcctttcatgtgtcaactacaagaagccttcaccacccacccctcaaaatgaataatcatcatcatagcaaaccaaaggcaaataattttggtcatgtcaactcatacccactccgtgccttcaccatctatgctgaaaactatgcctagattccttctctaaagtgcactcagtttaattaataatttctacaaataatgaaaaaaaattatc

SEQ ID NO: 75319 - DNA, 349 bp, Glycine max
  unsure (1)..(349): unsure at all n locations
  Clone ID: PAT_MRT3847_39027C.1
aannanaattnnannaannnnngggggggaaaaacaaagggtttttttaaaatttaaaccccatttttggcaaaacaaaatttccgggaacctgctaatccaggggggaggaggggccccatatttaaaatgggcattaattggcttaccaaaccccttgttttggaacccatttccattttgcccttaaaccccccttttgttcaggggttagcctacaaaacccacaagttttgttgcaacattaaaaaccaccggggggacctacgggtttctaaaatttttattcctaaactaaggtaaactggattgagctttttgggtttccccttaaacaaataaaaggggg

SEQ ID NO: 75320 - DNA, 311 bp, Glycine max
  Clone ID: PAT_MRT3847_39028C.1
atggaaccgtaattggcttcatttggcttgacgaatcccaaaatttaaaatgcccatgaaaatgcctgtttgttaggacaaacttgctgacgtttaggacggtcaattgccaaggaacaggatcctttttatgttatgaaaataaaaatgaacctgctctttgacaattggtaagaaattcccccctggaggtttttccaaccaaacaagggttcccccgctccttattttttttgggacttttcctgccgtatgaatcacgagaacgccccctctaatggttctctcgtttctcttgcttcctatggcgg

SEQ ID NO: 75321 - DNA, 496 bp, Glycine max
  Clone ID: PAT_MRT3847_39029C.1
cctttgaatcaatttccaacaccaagtgtaaaggtactgcaaccctagaagatatttcctccattggtttactttgccttgtagcaatagtcgtcttatcctccagtatccaataagttgctgtccctttaaccacttttttctccacccttttcccccaagcctcctcctttctaaaacaccaagaaggctcctgttttggactttttataagccaagagaagaggtcccaaaaccttgtatttcttcctccttatgatcgatccctggaaaaacagacaaaagattattcaagaaactaaccagcaccaaataattgacaaggtaaatgccttgtctctctctagaaaacggagataaggaaaaaatggggtcattgaaaatgaaaaaaatagcaaagaaaataaaagaggtttcctagatctgaggcaagtcacaccggccactgaaatttcctttccctggtttgtgtttcctatcatgtgtcaactacaag

SEQ ID NO: 75322 - DNA, 449 bp, Glycine max
  Clone ID: PAT_MRT3847_3902C.1
aaaggggggaaatatgggaaaattctaaaatgagaaaagtgctttttaaccaaaggcaacagaaaaattattttttaagtacaatggttcatgggaaacaacagaggggggcgatatcatttttaataaaggggttttttaaagaggaaggaaacaaggacttggggtataacaaatacacaacgggaaggtttaggggattaaaacaacagaacctgaggggtttgggattgtggaagggggggggggtttgggggggagggggggggggggagaggaggggtttttgtgggggagggggaggggggggggtgaggggtgggaggggagggggggggtgggggggggggaaggggggggaggagaaggagaggggggggtggggagggaggaggggatggtggggggggggggggggggggggggggggagggggggtgggggggagg

SEQ ID NO: 75323 - DNA, 657 bp, Glycine max
  Clone ID: PAT_MRT3847_39030C.1
tgagcttgaaaacagttttttctggaactggtcatgcgttatttgagtggttgaatttgcagggttgagcgaactagttttcatctacaccaccctaagtgctttatttcaagtgaatctcttcctttttttttcttctgacttttaacctgcatcaaaatcattgttttaatcatcctattgtgtataattgcccctaggctgtttggtcatccatataattttttttcctccatacttgcttttctaggctggggatccattgtgattgttgacccaggatgggaaagattacatcctagcattatgcatttttttacatttcagttggtttcgtaggtaaaaaatcatcatgcattcatgcaatcatcaaccttttaattcctttgttttgaaatgcatatgtaaatcatatattggctattcctggggatacagaagaaacttgctatatactgtgatgataccaaaagaactttagtgtggtggattgttgtttcaattgttggaaggagtcatctggttttagcctatatttctgttatctttcttttgtctaagtaaaaagtttgtgaatgttggcgacttttgtggtaattttgtcatatttcctgtatcttattatgatttggtgacgtgaatctttttgttaataag

SEQ ID NO: 75324 - DNA, 501 bp, Glycine max
  Clone ID: PAT_MRT3847_39031C.1
tttactcgtgggcggacgcgtgggtttcgatgttaaacttgatcttacagtgtgtttgcattgaataatcacatagtagtcggagcaccccactaattgtggattcaagagttgttacttagttgcatttgatattttcttaggttttttccttcgataatgttaattattttagcctctctaatcccctccaaatcgatcacaatagaatatgattcaatttattgcgtaatatgtctaacagttgcttagcaagaaatatttttgttatgtgttcttctcatattgatccatatgagaaattctgacttagattgctatatttaagatggatttcgttcttttaaattgaattcttataaaaaaaaaagcaaggaatttcaacttttatataatgaaatcaattatgaaatacaattaaatttgatattttaagagaggtataattggattattcaaatattttctttataaagcaaacaattattttttgggtaagtt

SEQ ID NO: 75325 - DNA, 548 bp, Glycine max
  Clone ID: PAT_MRT3847_39032C.1
actcgagccgctcgagccgattcggctcgagttgtgatgttgatgtttttgatggcatggagagatgtcctgaaaagagttttgaagatggagatcaagaaatacggttgcaggatttgaaaaaaatttcaacaacagaagcagatgacaaccagtctgttaatctggttgaagtcaatggacattgttctaatcaagttgattttcttcgatttgaggtgagcccatacactggaaggatccacttgtatacttgcattttgggtactgataaaagaccacagccacttcatgaaaattttcgatcagaggaacttgagttgttaagttctgttgctgatgatgagaaacaggctcatgatgagaaacagaaaacagagtttgtaactgtgaaggacaaccccgcatataggcatgctcttatggcttttgcagaagagtggaagaacttgaggtcaattgaacgcaggaagttacttggaaaaccattacaacttcctttggctgttgaattatgctacttgagtgtaagcaataaccacaacaac

SEQ ID NO: 75326 - DNA, 1196 bp, Glycine max
  unsure (1)..(1196): unsure at all n locations
  Clone ID: PAT_MRT3847_39033C.1
agaacttggaaaactgccaatgaaagtggccaaacaacattatacaattttatcttagtaacaaaaagaaagattcacgtcaccaaataaaatatacaggaaacatgacaaaattcacaaacttttacttagacaagagaaagataacaccaataataagctaaactcagacgactccttccaacaattgaaacaacaatccaccacactaaagttcttttggtatcatcacagtatatggcaagtttcttctgtatccccaggaatagccaatatatgatttacatatgcatttcaaaacaaaggaatttaacggttgatgattttcatgaatgcatgatgatttttgacctacgaaaccaactgacatgtaaaaaaatgcataatgctaggatgtaatctttcccatcctgggtcaacaatcacaatcgatccccagcctagaaaagcaagtatggagaaaaaaaattatatggatgaccaacagcctaggagcaattatacacaataggatgatcaaaacaatgattttgatgcaggttaaaagtcagaagaagaaaaaaaggaagagattcactttaaataaagcactttgggtggtgttgatgaaaaccagttcgttcaaccctgcgccgtcaaccactcaccagttcaggaaaaaacaagctatcttgtcaatgggtggtgttgatganaaccagttcgttcaaccctgcaaattcaaccactccagtaacaagtgaccagttcaggaaaaaaccgttttcaagctcaaatgggtttatcttcttgtaacctcaattccaaactcaccatccaattccaactaagagtagtttagtttctcaatcaggaatcatttgcctccccttagtcattcaatcaattacatgtttcatgaagaactacacccgcatttgcaaattcatcgctaccttcttcctcttgacagacctggacttagtggtgctcatgcaaaagtcagtgatgcattggtgatgatgcaagagttagtgacaactagaagactttcagactgataccttccgttgtctgaccatggagacaaattgacacatgcaatcccaagacccaccttgacacacccaaatgcatgcagatagtttatgacaatggatatgctaactcagatgaacctagttctagatcgcgatctagaactagtccctcgagcc

SEQ ID NO: 75327 - DNA, 667 bp, Glycine max
  Clone ID: PAT_MRT3847_39034C.1
tttttttttttttttttttttttttttttttttttttttttttttttttttttggaaaaaaattgaatacttcattacataattaatttttttttaagcaaattacataattaatttattgctattacaatttgaacaactctaacctaatgaatcatttttttaacaaaaaaaaaaatgttaaacgaacatgaatgaagtattgcacaatatacataaaacaaagtcagtatttcccttttggtccctcagattagctggcatattttgatgatatcataacataatcatttttaccctttacaaatgttgctagtttcttttatcaatgaatgaccctagctcttaatgtcctccttaattccttgtaaccgtcaaattcaattttgtaacatatatgattattattattattattattttaaaaaatgttttctatctgccgaattcaatgataccctcaatgtgtctgaaaatttcagaactctggcaattcgattgactcccctgatttgatgaatatgtcataccagaaatccatgccatcatgatcatcgtttgaaccattataatcaacactttgttgttggaagctttccactgaattaaattggtattgagggggtgctaattcatttgaaattgtccaaaaatttgatgtcatcat

SEQ ID NO: 75328 - DNA, 363 bp, Glycine max
  Clone ID: PAT_MRT3847_39035C.1
actgatgaaacacaggggattgatcacaacaaactgaacatgggagggtcctaaaatcttaaacaaacacgctactaaacatgaatagataatatgatattcctacatgatcactatggctgccatcgcccccttctaggaagcagagccgaagctcactagaacaaacgatggaccaatgcgcacttacatatatcccgatgtccataccttacaggagctgatttttatctagctcttccgtcttctggtccaaatcagcaccagaacaaactccaacaaagacataattgaagtaacaatcgctggaggaatagccacttctggatcttccaagaacttattaccaagagccacgggaag

SEQ ID NO: 75329 - DNA, 4114 bp, Glycine max
  Clone ID: PAT_MRT3847_39036C.1
cagattattacagttctccttcaaagcatgaaggatgttcccaatgttgctgagaaggcctgtggtgctctgtattttcttgcccagggttatgaggatgttggaccaacatctccgctaactcccttgtttcaggaaattgttcaatcccttctaactgttacccacagagaggatgctacagaatctcgattgagaactgcggcatatgaaacattgaatgaagtagtaaggtgttcaacagatgaaacagctactttggtggtacaactagtttctgtcatcatgatggagctgcacaaatgtcttgaagcacaaaatctttcatcggatgagagagaaaagcggagtgaattgataggccttctttgtggatgcatgcaagtaattattcagaaactagggtctttggattctaccaaatatctgttgttgcagtattctgatcagataatgggacaattcttcagggtctttgcttgtagaaatgccactgcacatgaagaggcaatgctagccattggagcccttgcctactcgattggccaggagtttgccaagtacatgccagaattttacaagtttctcgagatggaccttcagaactttgaggagtaccaagtttgtgctgtcactgttggtgtgataggggacatatgcagggcattggagttaaaaatactgccttattgtgatgggattatgacacaactcctcaagaatttgtcaagtgataatttgcaccgttctgtgaagccccctttattctcatgcattggtgatattgcacttgcaataggagataacttcaataaatacttaatgtatgcaatgaacacactacaacttgctgcagagatgtatgcccacacgtcaggttttgatgatgaaatgacagagtatatcaattctttgagaaatgggatattagaggcatattctgcgatttttcaagggtttaagaattcatcaaaaacccagctcttgattccttatgcacctcacatcctccagtttttggatagcatatacatggaaaaagacatggacgatgtagttatgaaaacagcaattggagtccttggagatctagctgatacacttggaagcaatgctggttctttaatacagcagtctttgtcaagcagagactttttgaatgaatgtttgacctctgaagatcatttgattaaggaatctgctgagtgggccaggttggctattaaccgtgctatatctgtttgaggttcatctgagttagcatatccattgtcataaactatctgcatgcatttgggtgtgtcaagggtgggtctttggattgcatgtgtcaatttgtctccatggtcagacacggaagggtatcagtctgaaagtctttctagttgtcactaactcgtgcatcatcattccaatgcatcactgattttgcatgttctccatgttttactctcccctggcaactgatcaagaagcacagcagatggtttaggatcagactcatctgatccactttgatcctcgttagtaatatccatagcaaaacaaactgtgtcctccactagccttcattgatggacacagctcgcttattccagacttaccatcaacatcatcatcaaccttaatgatgattggtgaatctatttcagaaaagctactcttccacaacgcagcttcctccctacaaggatcacttttgccattagccacagattgagagcttgaactatgcagacactgaaaatccactgctaacattaattcatcttcctttcttgcctggttaaggccttcattcaagacccaattactctcacattcaataaccatttctgaaacaagagcagctccaacttgattctcctttaaacactccactgccggatttaacatcaaagcagcagctgctgtatttgccataagcttcagcccagttatctccatgtgagtggtcactgcagactccttttgaatcaaatttccaacaccaagtgtaaaaggtactgcaacactagaagatatttcctccattggtttactttgccttgtagcaatagtcttcttatcctctagtatccaataagttgctgtcccttttaaccactttttttccacccttttccctcaagcctcctcctttctatgatataattccaatcgacatcaaaacaccaagaaggctccttcgtaaaatgaaaatagtgcatgaaaagtgaagggagggaatgaaggaggaagagaaaccctcgagccgaccgtcattcactataattaaatacctagaataattaactaatcacaccattgtccccgcatcatctggatgtctcggtgtttacttatatatcatctcttgttgatgaaatgacagagtccattagtaccttgagaaatgggagattagaggaatattctgcgagtagtcaagagatctagaacacatcaaagacctagctcgtgtttacttatagtccccgtcttcatcatgtttttgatagcatataacgtagcacaaaacctttcagaggttgagagagaaacggggagtgaattgataggccgtcattgcgggggcacgcaaggaatcaatgctggttctttaatacagcagtctttgtcaagcagagactttttgaatgaatgtttgacctctgaagatcatttgattaaggaatctgctgagtgggccaggttggctatcaatcgtgctatatctgtttgaggttcatctgagttagcatatccattgtcataaactatctgcatgcatttgggtgtgtcgaggtgggtcttgggattgcatgtgtcaatttgtctccatggtcagacaacagaaggtatcagtctgaaggtcttctagttgtcactaactcttgcatcatcaccaatgcatcactgacttttgcatgagcaccactaagtccaggtctgtcaagaggaagaaggtagcaatgaatttgcaaatgggggtgtaggtcttcatgaaattgattgaatgaccaaggggatgcaactgattcctgattgagaaattaagctactctttagttggaattggatgatgagtttggagttgatgctacgagaagataaacccatttgagcttgaaaacagttttttctggaactggtcatgcgttatttgagtggttgaatttgcagggttgagcgaactagttttcatctacaccaccctaagtgctttatttcaagtgaatctcttccttttttttttcttctgacttttaacctgcatcaaaatcattgttttaatcatcctattgtgtataattgcccctaggctgtttggtcatccatataattttttttcctccatacttgcttttctaggcttgggatccattgtgattgttgacccaggatgggaaagattacatcctagcattatgcatttttttacatttcagttggtttcgtaggtaaaaaatcatcatgcattcatgcaatcatcaaccttttaattcctttgttttgaaatgcatatgtaaatcatatattggctattcctggggatgcagaagcaacgtgatagatactgtcatgataccttacgaactttagtgtactcgattgttgttacaattgtttcacggaataatatatttgcaccattaattcccgttctcttgaaacaataaacttcttatcctttagaatgttataggttgctgtcccttttaaccacttttttctccacccttttcccccaagcctcctcctttctaaaacaccaagaggctcctgttttggactttttataagccaagagaagaggtcccaaaaccttgtatttcttcctccttatgatcgatccccggaaaaaccagacaacagattattcaagaaactaagcaccaccaaataattgacaaggtaactcccacgtccctttctaaaacggagtcaagggggaaatggggtcattgaaaatgaaaaaaaaaaaaaaaaagcaaaggaaataagagaggtttcctagatctgaggcaagtcacaccggccactgaaatttcctttcaattccctgggttttttttacctctttgtgttcctttcatgtgtcaactacaagaagccttcaccacctcgagcc

SEQ ID NO: 75330 - DNA, 436 bp, Glycine max
  Clone ID: PAT_MRT3847_39037C.1
tcagcaaactatctatttttttattgaatcttagtcaataaaaaagggggcctaaatcctttttatttgggacacccataagagataatgttttttcacctcccaatgtcttattgcaccttgaaaatcaactgatgactggtttaactagtcgtccccgggtaaatgacccctctctttggttctcgctgtacgtattctaagaccacagacgatgggttacgctcctcctagcttgcgatgaccgaaacattgagttttccatttttttcggggatcttaactatgttaactgcaccagctaaaactgcccgggttgattttgccacgagtaaaccttttttcaatgtaagaagctaagcccttgcttagctgattcactccaaatccgaacatcttctgccgtaaatcaacatccagaactccagggctgaag

SEQ ID NO: 75331 - DNA, 755 bp, Glycine max
  Clone ID: PAT_MRT3847_39038C.1
ctagaactaggagaaggaaaaataaaatcccacaggtaagggtaataaacaaataacagaagttagaaaaaaaaaaaacagattggcagccacgtgtcccagggatgaacatgattgtggagcgagcgagtgatgctcaccacatcacgtgcttccaaaactgatctatttcccttctccttcttacttcttccttctctctgctgcaaatccaaaatctaccatagcggttccattttctgaatttctcgagcgaacttcgcccagttctagggttccccactgccatgtaccaggccgaattaacctccgaacaggttctgaggagggacatcccatgggagacctacatgtccaccaagctcatctcagggacgagccttcagctcttaaggcgctacgatcaccgaccagaaagtcacagagcacagttgctcgatgatgatggtccctcttatgttcgcgtgtttgttcgtgttttgcgtgacattttcaaggaagatactgtggagtatgttttggcactgatagatgaaatgcttgctgcaaacccgaagagagcaagactgtttcatgatagtgcccttgctgatgaagatacttatgagcctttcctaagattgctctggaaaggaaattggttcatacaagagaaaagggtaaaaatcttatgtatttactcaaatatgtttttgttgcgaattttgtatattaattattcactttctttgctttggagatgaggaaagctcatc

SEQ ID NO: 75332 - DNA, 1071 bp, Glycine max
  Clone ID: PAT_MRT3847_39039C.1
gcacgcggttcgggtccagcaggcccaacgacacagtgcttctactgatcaacaacttcggaggcatgtcaaatttcgagctcgaagctctgacagcatccactcgcaggcttttgaagaaagactggagcatcgcacctgaacgcctctacgtctcagcattcgagacctcgctgaatgcacctggctggtctctttcgttgctcaacgtctccggcatcgaacgaaccaccggcacatccgttgcagaccttctgaagctcctagactccgacaccaacgcatccgcctggcccagaaatggctaccgagaagtccaagagacgtcagaggaacttgatcgcactgatagcaagatctctccacaagccacatcccaaggctcaaccgtcgatcccgctcgcctcgaacgtgccctccgctccgcatgctcagcagccatcgctgccgaaccgcaaataaccaagtgggatatcgagatgggcgacggtgactgtggtgaagccgtcgtcggcatgtgcgaaggcattctgcggaaactggacaacggactctgccagtctggtaagatcttccacatcttggatgaaatcgacgaggctgtggaagaaatcggcggcacactcggtgctatcattgcaatctctgttgctgcgtacgcgacgaatctgagacaagccgctgcggcgcagggagacgggttcgatttggatgagaaggccgccggacaagctgctggaaaagctcttcggaatttgatgggctacacaagtgcaagacaaggtggacgaacggtcatggatacactcatgccgttctgcgagacgttcgagaaagacagcttcgagcaggcggtaaaagcagctgaagagggcgcgaagagcacaggcggtatgaaggcgaaatttggcagagcgacgtacgttggtgacaaggcggacgtgggcgatgcaccgccagatccaggtgcgatggcagcatattacttccttgaaggcttcctcaaagggtacgcttgatataaattgagggcatcgtagcttgtcattaataatactattgactgccaaa

SEQ ID NO: 75333 - DNA, 291 bp, Glycine max
  Clone ID: PAT_MRT3847_3903C.1
ctgtacatcatatatttaccatcctcagaattttcgcagaagtgaaaaccctaactctagcaatcaatataacaacacaagcatacaaaaatgactcacaatgcgaattttttcaagggtaaatcatacaacaaattaattcttcacaattgtcactacaaagtttctgttactcgcaaacgaaatagattcctgaagccattcaatgatacaaaggatatggatactgatcgcgatgatagtaaattcattaaccactacaattatatcaaagcacctactctaacaact

SEQ ID NO: 75334 - DNA, 1180 bp, Glycine max
  Clone ID: PAT_MRT3847_39040C.1
ccggctggagccactcgtacgtcagaactgatctatttcccttctccttcttacttctgtcgttctctctgcggcaaatcgaaaaactcaccaaatcgcggggccaaattgcaatttctcgagcgaactttgcgagttctagggttcccccactgccatggaccaggccgaattaacctccgaacaggttctgaggagggacatcccatgcacaaagatcccatattctggcgagaaaatataaacaactttgaagaaaatgatttccagatcctaagggtcctactaacaattttggacacgtccagtgatccaaggactctggctgttgcttgctatgacctttcacagtttatccagcatcattctgctggacggatcattgtgtcagacctcaaggcaaaagaacgagttatgaaactaatgaatcatgaaaatgttgaagttactaaaaatgcactgctctgcatccagcggcttttcttaggtgcaaagtatgcaagcttcttgcaggtttaatgctgtttctgtggggtggtcaagatgcacttaattccatcaacttcactgctagctcacaaattggatcggctctcgtatacaaccattattcattgttttaatgattaatttattgtgtatgactactaagatttcggtttcaacagtagaagaaattttatgtgaggaataagtatgcatgatattctgctgctgaataaatcaagttttgtaatgtactcgaagttgtgcttgtaggtatgttgaatttgttagaaaacaaaatttatcgttgatatggatatatgtattttcttgaatatgagctagtttcagaagaataatgacttgaggaataagtaagttattgtcctattgacctatttcttgccagaaaacaaattttggactttcttttttcaaaaaaaaaaaaaaaaaaaaaaaaaaaaaaaaaaaaaaaaaaaaaaaaaaaaaaaaaaaaaaaaaaaaaaagggggcggccgaacaactagagcgctccgacacccggaattaaatcccgccccggtccctggggggctcccatctttcctttttaagaggcgatatcccccttggcgacaccagggccaaagcttttcactgtgcaaaatggttgccctcccaaacttcccccccaaatgcaaactgaaatgataag

SEQ ID NO: 75335 - DNA, 2283 bp, Glycine max
  Clone ID: PAT_MRT3847_39041C.1
aaataaaatcccacaggtaagggtaataaacaaataacagaagttagaaaaaaaaaaaacagattggcagccacgtgtcccagggatgaacatgattgtggagcggagcgagtgatgctcatcacatcatgtgcttccaaaactgatctatcacaatctaccatagcggttctatcttcctctctgctgcaaatccaaaaaccaccaaatcgcggttccaaattgcaatttctcgagcgaactttgcgagttctagggttcccccactgccatggaccaggccgaattaacctccgaacaggttctgaggagggacatcccatgggagacctacatgtccaccaagctcatctcaggcaccagccttcagctcttaaggcgctacgatcaccggccagagagtcacagagcacagttgctcgatgatgatggtccctcttatgttcgcgtgtttgttcgtgttttgcgtgacattttcaaggaagataccgtggagtatgttttggcactgatagatgaaatgcttgctgcaaacccgaagagagcaagactgtttcatgacagtgcccttgctgatgaagatacttatgagcctttcctaagattgctctggaaaggaaattggttcatacaagagaaaagttgtaagatcctcgctttaattgttagtgtcaggccaaaaaatcagaatggcattgtgtcaaatggagaagcatcaaatggaaagaagccatttaccactattgatgatgttttgataggattggtaaaatggctttgtgatcagttgaagaaaccttctcatcctattcgtggagtcccgactgctatcaattgcctagcaacactacttaaggaacctgtggttaggtcttcctttgttcgggctgatggggtcaagttacttgtacccttgatttcgccagcatccactcaacagtctattcagcttctttatgaaacatgtctctgcatatggctcttatcctattatgagccagcaattgaatatttggctacttctagaacccttccgcgacttattgatgttgtcaagagttctacaaaagagaaggtggttagagtagttgtcttgactcttaagaacttgatgtcaaaagggacattgggtgctcagatggttgaccttcagctggcacaagttgtccagagtttaaaagcacaggcgtggagtgatgaggacttgttggaggccctaaattccctggaagaagggcttaaggataatatcaagagactaagttcttttgatatgtacaagcaagaagttctccttggccatctggattggtctcccatgcacaaagatcccatattctggcgagaaaatataaacaactttgaagaaaatgatttccagatcctaagggtcctaataacaattttggacacgtccaatgatccaaggactctggctgttgcttgctatgacctttcacagtttatccagtgccattctgctggacggatcattgtgtcagaccttaaggcaaaagaacgagtgatgaaactaatgaatcatgaaaatgctgaagttactaaaaatgcactgctctgcatccagcggcttttcttaggtgcaaagtatgcaagcttcttgcaggtttaattctgtttctgtggggtggcctagtgtatgcactagattccatcaacttctctgctatctcacaaattggatcggctctcgtgtacaagtcttattcattgttttaatgattaatttattgtgtatggctactcagatttcggttccaacagtagcagaaattttatgtgaggaataagtatgcatgatgttctgctgccgaataaatcaagttttgtaatatactcgaagtcgtgcttgtaggtatgttgtctttgttagaaaacaaaatttatcgttactatatgtaatttcttgaaaaatgagctacttgaatatgagctagtttcagaagaataataaattgggggatgagtaagttattgtcctattgaccttaagttatgtatttactcaaatatgtttttgttgcgatttttgtatattaattattcactttctttgctttggagatgaggaaagctcatctcttattatattaaaattcagcatttgtttcaaatagaatgtgtttgtaggggggtcacaccctgctctaaccattgattatcatatctttgtgcacgtaatatgtgcttgttggaagattgtgcatcatttgtatatatgtagtttatagtattatatctttcccttggacagaaaaaacaccc

SEQ ID NO: 75336 - DNA, 132 bp, Glycine max
  Clone ID: PAT_MRT3847_39042C.1
aggaacaggcaggaaagttgcaattcaactatgtatttaggctaagggaaacactaaattgtggcatgaacgaagggcctaaagaacgactattattattgttttccgtatagaaggccacctactaatgaa

SEQ ID NO: 75337 - DNA, 629 bp, Glycine max
  Clone ID: PAT_MRT3847_39043C.1
ggttggaatatcaagccctttagctatggtgtcaccttcaagtactagaccaaccacaacagcaacaacaacattggtgactcctccttctggctttgacaacagatcaattgagaggtctattgttcttgaacttgctttggctgcaatggatgagttggtgaagatggctcagactgatgagcctctttggatcagaagcttggaaggtggaagagaaattctcaaccatgacgagtacacaaggactatcactccttgcattggcttgagacccaatggctttgtcactgaggcctctagacaaactggcatggtcatcataaacagcttggcccttgttgaaacattaatggactcaaatcgttggtcagagatgttcccttgtatgattgctagaacctcaaccgctgaagttatatctaatggaataaatggaactagaaatggtgcccttcagctacacgcagaggggttatgggcagtggtagatgtgtccatagataccatccgagacacttctggtgcacccacttttgtgaactgtaggaggcttccttcttgttgcgtggtgcaagatatgccaaatggttactctaaggtgacatgggtggaacatgcagaatacg

SEQ ID NO: 75338 - DNA, 198 bp, Glycine max
  unsure (1)..(198): unsure at all n locations
  Clone ID: PAT_MRT3847_39044C.1
tttatatgcgcnaaagttttttaatctggcatatgaaaaagcaggaccttttcgaagaaagaatggtataaaacattataacagcggctagaatattataaaacacatggcgcgacatcgtccacaggttgatgaaaacacagcgcccttaaggaacaaatgcaaagactaagccaccatgggcaaaggcgcaaggca

SEQ ID NO: 75339 - DNA, 3131 bp, Glycine max
  Clone ID: PAT_MRT3847_39045C.1
ctcctggcttggaaattccggggttggatgaatcaatcgacacaacaaggattgacaatttttcacccatgaggccgagccattattagttgcttcaccttgtttttcttcaaaggcagtttctgttgtggtgtgcttgattgaagagagaggagagaaaaagaaaagaaaaaagggaagcaaaagtggctactttgatgagttttggggggtttcttgagaccaaacaaagtgatggaggtggtggtaggattgtagtttcagatattccttacaacagcaacaacggttcaaaccacagcaacgatataatgccctctggtgcaatctcgctgcctcgtttagccactcctactttggccaaatccatgttcaactctcctggcctttctcttgcacttcaaagtgatatagatggacaaggggatatgaacagattaatgcccgaaaattttgagcagaatggtttgagaaggagccgggaagaggagcatgaaagcagatctggcagtgacaacatggatggtggttctggtgatgattttgatgctgccgacaacccaccgaggaaaaaacgctatcaccgacacactcctcagcaaattcaagagcttgaatcgctcttcaaggagtgtcctcacccggatgagaagcaaaggcttgaactcagcagaaggcttaatttggaaacgaggcaagtaaagttttggttccaaaatcgaagaacacaaatgaagacacaattggaacggcacgagaactcgctgctaaggcaagagaatgacaagcttagagctgaaaacatgtctatgagggaagccatgagaaatcccatatgctcaaactgtggaggtcctgctatgatcggtgaaatttcactcgaagaacagcaccttagaattgagaatgctagattgaaggacgaactagaccgtgtttgtgcactcgctggcaagtttttaggtcgacccatttcatctctaacaggctcaattgggcctccaatgccaaactcaagtttggagcttggtgttgggagcaatggttttggaggtttaagcactgtgccttcaacaatgcctgattttggggttggaatatcaagccctttagctatggtgtcaccttcaagtactagaccaaccacaacagcattggtgactccttctggctttgacaacagatcaattgagaggtctattgttcttgaacttgctttggctgcaatggatgagttggtgaagatggcgcagactggtgagcctctttggatgagaagcttggaaggaggaagagaaattctcaacaatgaggagtacacaaggactatcactccttgcattggcttgagacccaatggctttgtcactgaggcctctagacaaactggaatggtcatcataaacagcttggcccttgttgaaacattaatggactcaaatcgttggtcagagatgttcccttgtatgattgctagaacctccaccacggaagtgatatctagtggaataaatggaactagaaatggtgcacttcaactaatgcatgctgagcttcaagttctttctcccttggttcctgttcgtgaggtcaattttctacgcttttgcaagcagcacgcagaggggttatgggcagtggtagatgtgtccatagataccatccgagaaacttctggagcacccacttttgtgaactgtaggaggcttccttctggttgcgtggtgcaagatatgccaaatggttactctaaggtgacatgggtggaacatgcagaatacgacgaaagccaaattcaccagctctttagacccttgttgagctcaggcatggggtttggtgcacaacgttgggttaccactcttcaacgccaatgcgagtgcctagccattctaatgtcctcagcagctccctctagagaacattcagcaataagctcaggtggaaggagaagcatgttgaagctggcacatcgcatgacgaacaatttctgttcgggtgtgtgtgcctccacagtgcacaagtggaacaagctgaacgcaggaaacgtgggggaggacgtgagggtgatgaccaggaagagtgtggacgacccgggcgagccgcccgggatcgtcctaagcgctgccacctcagtgtggcttcccgtctcgtcgcagaggctctttgacttcctccgcgacgagcggctccgaagcgagtgggatatcctctccaacggtggacccatgcaagagatggctcacattgcaaagggacaagaccatgctaactgtgtctccctccttagagccagtgctataaatgcgaaccagagcagcatgttgattttgcaggagacgtgcaccgacgcgtcggggtcgcttgtggtgtacgcgccggtggacattccggcaatgcacgtcgtgatgaacggcggcgactctgcttacgtggcgcttcttccgtcggggttcgccatcgtgcccgacgggtccgtcgaggagaacggtggcgcgtcgcagcagagggcggcgagtggcgggtgcctcctgacggtggcgtttcagattctggtgaacagcctccccacggcgaagctcacggtggagtcggtggagacggtgaacaacctcatctcctgcaccgtgcagaagatcaaatcagcgcttcactgcgaaagctgaaagtcacgtgactctggctttgtctattattattattattatttttgttttggagaatttaggttacattttgtagttaaaggtggcgcgtgtgaaggacgcgaggggtgggggtgttgagtcaagaacgaaccgcgcgtgggtgagagaactccttgcatggtgatatgaggatccgagaccttttccgggttgggttaggattttcaacacaaagcaagggtggtggttcgggtattgactcgggtcgacccctttgtttgctccatacagtagcagaagaaggaaaaaaaaaaatgaatagaaatgtgagaaacaaaaaggaacaaaattgtgtttctggttaggaatatttattgtaagttatcatcattttgatttgtattgacttggtgggagtatgctagaattggatctagtagtttgttgcatatgatcaaatcaataatttgtgttcattttttc

SEQ ID NO: 75340 - DNA, 682 bp, Glycine max
  Clone ID: PAT_MRT3847_39046C.1
gtcagggttcgccatcgtgcccgacgggtccggcgaggagcaaggtggcgcgtcgcagcagagggcggcgagtgggtgtcttctcacggtggcgtttcagatccttgtgaacagccttccgacggcgaagctcacggtggagtcggtggagacggtgaacaacctcatctcctgcaccgtgcagaagataaaatcagctcttcattgcgagagctgaaaccttttggggctgtctattattattattattattattattattttctttttgagaatttaggtgacattttgtacttaaaagtggggataggtggcgcgtgtgaaggacgcgaggggtgggggtgttgagtcaagaacgaaccgcgcgtgggtgagagaagtccttgcatggtgatgaggatccgagactttttcgggtcgggtttggatctttaacacaaagcaagggtggtggttcgggtattgactcgggtcgaccccttttgtctgctctatactagtagcagcagcagaagaaaaaaaattaatagaaatgtgaaaaaagaaaaaggaacaaaattgtgtttctggttagagtataagttatcattttgatttgtattgacttgggagtttgctagaattggatctggtagtttgttgcatatgatcaaatcaataatttgtgttcattttttgagaa

SEQ ID NO: 75341 - DNA, 746 bp, Glycine max
  unsure (1)..(746): unsure at all n locations
  Clone ID: PAT_MRT3847_39047C.1
ccacgcgtccggcgcgtccgcttggaaattccggggttggatgaatcaatcgacacaataatcaaggattaacagtttttcacccatgaggctgagtcattattagttgcatcaccttgtttttcttcaaaggggtattttttgagtagtagcagtttttgttgtggtgtgcttgattgaagagaggagagaaaaagaaagaaaagaaaaaataaagaagcaaaagtggctacttggatgagttttgggggatttcttgagaccaaacaaagtggtggaggtggaggtaggatcgtagcagatattccttacagcaacaacagcaacaatataatgccctctagtgctatctcgcagcctcgtttagccactcctactttggtcaaatccatgttcaactcccctggtctttctcttgcacttcaaagtgatatagatggaaaaagggatgtgaacagattaatgcccgagaatttcgagcagaatggtttgagaaggaaccgggaagaggagcatgaaagcagatctggcagtgacaacatggatggtggttctggtgatgattttgatgctgccgacaacccaccgaggaaaaaacgctatcaccgacacactcctcagcaaattcaagagcttgaatcgctcttcaaggagtgtcctcacccgggatgagaaacanaggcttgaactcagcagaaggcttaatttggaaacgaggccagtaaaggttttggttccaaaatcga

SEQ ID NO: 75342 - DNA, 1346 bp, Glycine max
  Clone ID: PAT_MRT3847_39048C.1
cggggagggtgtgagtgagggagagtgccacacacccacagcgcccgcgcgagagtgacccactgacccagtggggggccctccggctcccagggagccaatgatagtgccacccttatcaatttccctctccatgcctctagatctctctcccaaaataaaaaataaaaaaaattgcccattcaatttcaatttgccactattaatttctatccaaagtgaattcaattccctcttaatttcgtcatatgggtctcgaaatcttagaagaatttcggccaattacgcccataagaaccgttgttccaacggttagaacaaccttaaaacacgatctaggaacaacaacaacaacaacaaaggaggtgctaaacgaggatgttctaattgaagaagagtgccacacacccacatcaccctctcaaaaattaagcaccaacccattggtgtgccctccagctccaaagaaaccacgagtagtgccccgaagacacaatttagacccgccatcacaacaagggttcttcaaagttccccatgatctggcttcggtcttcgtcctacgcacacccaaccttccaagaagaacagcacagcaagctcttttctaggcatcttcccatattctttagtatctggttcaagccgtgtagaattattatggacgataaaattctctctctgatccaagtgcatacgtaccccggactcaaactcgatggtatatatgaatttaattatatgtgttaattaatataaagtcttttaattataattatcacgaggtatatattaattgtttctttttcttttctctatagttgttcctagaattctcaatttgttatgttgttatgaattgtaggaaattagttgatctacttagttgtgatttgtaaattggtgcgtgacgatgatccatcattttctgcatctaactgtatttagtggtgatgaattgaagcacgttattgtttgtgatagatcgatctctagctggctatgacgagttcaattttaggttttttcttatagagggtggttgatggatctggagttatatagaattaggtatccaagagcaagttactaaatttgaaaaatattttgctatttttagaatggtcgatggtcctgggttttgcaatggttccattgttatagttttggtgcatttaggaaactctttcaatgtgaagtaaactgcaaaaggctttgctttggcgttatgctatatatcctttattgatatatttaaagatcgtttattttaattccttgttatatgaaattctcacttaatttagtttttcactcttttaaaagtaactctttttttactatta

SEQ ID NO: 75343 - DNA, 532 bp, Glycine max
  Clone ID: PAT_MRT3847_39049C.1
aaaaacaaaactcaaccagggggttttttccacaaattatatattgggaaagttatttcccaatattccctaatccaatccaacccgccctaaaaaagttttaatatatgcaaacgttattttcccttaaaaccctttggccatcaaagttttcgaaggaacaaaggtaaaaacaacatattgcaaatcacatacaaattcccaatactggtatgaaactaaaaagggttgaaccaaacggaggggatgcaaaactcctgcctccaaaacggatttgcccttcactgattccccccaaggaaaacataatcatctccttgattaaagttccccacatcaatttgagcatggaaattataaaaacaaaaaaatccacttcataaaaagaaatcgggggctggtttcttaacaggggttccttttgattcctggggagcagtttaaaacacccggaactgcttattaaaatttccatccaactccaaaattgcagctacattgccacatttgtagcaataattgggagctgacc

SEQ ID NO: 75344 - DNA, 334 bp, Glycine max
  Clone ID: PAT_MRT3847_3904C.1
aggacgcgtctaagaacctattctcactgcttatcgactatattgaatcccatgctgggtgtacttatacaggctggcatgatcagatgtgctatgatccaacgaaaccaaactacaggctgcaatttacacattaacactatactataacgtgcaaactatcattgtataacaattcagtacataacatacatatggatgcactacaccgtgcattcacaacgtatgcattttcatgagacggtgcagcactctaagaccctcatctatgctgaaaatccccaaaacagatttctaaacgcctactctctgaaaattacatagtaagaacact

SEQ ID NO: 75345 - DNA, 336 bp, Glycine max
  unsure (1)..(336): unsure at all n locations
  Clone ID: PAT_MRT3847_39050C.1
gtgagaacacccatgtattgtgattctatcacgcagtgcaccatgcaacttgctatggaccttaccactggaagaattgtagaggccaccactgcaaattggatcacacttatacaaacacatccacatcatgactaaaacctagctgatggtgggcatagaaccaagctgaatgacagggaagactggcatgacaacgcgacagtcaagcactgtctnataccataaatggtacgggtgcaacatgcatacagagtcttgactgcacagatggacacatctaagcagtcacctacaagccctccagtggggacattgatcatacttataagagct

SEQ ID NO: 75346 - DNA, 338 bp, Glycine max
  Clone ID: PAT_MRT3847_39051C.1
gtcttctttttttttttttttttcgataaacaaattctcttcttcatgggtgagagccaaccaaataacaaaaggggggttgcatgggtatatacaagttacataaggccttttttcttggggggaccccaaattaaaaaattcctaaagctatctcatacaaaggacaaatttcggggggtaaatccttttaagattaccgcttggtttggaaaaaacagatcttcttttatagacaaggatcaaaacctgaaagccttggaagaaataataatttatgccttggcggaagccgctgtaggaatatatattaaggtgtattccaaaacatttccctt

SEQ ID NO: 75347 - DNA, 428 bp, Glycine max
  Clone ID: PAT_MRT3847_39052C.1
cccatgtggaattgtacttccaaacaacttcagcagaaaagatccatgctacattgtaaacaattggtttcaagcagatttaaataagttggcagcacgtatctttcatttcatgggttgtttacacattttttgtgagcactaaagaggatgaaatactcaaggaaattggaaacttgcattaatttctgtattacattgttgtgaaagtgcattcaaagtctgcgcaatggcacggtccaattaactagctgctaccaacttcttatccacccttagtccaaacattgtgtaaatttaagggtttttgatgtcaaggatacaacttaaagtaatttttttcattaaataaaaaacatattatgttaaaaatataaaagctagtatttctctttttaattacgatttttttgttctatattcctata

SEQ ID NO: 75348 - DNA, 232 bp, Glycine max
  Clone ID: PAT_MRT3847_39053C.1
accacgcgtacgcccacgcggacgaacgcttctaggcttctcgtgagggcttcagatgagccggccccggcgggacctgccacggacacacccccagctgaagctgtagccaaaccaaaaccaccgccaactggtcccaagagaggtgctaaggagaagattctcaggaaggaatgctactggcacaaatgcactggttcagggggtgcaggtgatcatgaccccaacactc

SEQ ID NO: 75349 - DNA, 475 bp, Glycine max
  Clone ID: PAT_MRT3847_39054C.1
tcgtccttttttttttttttttttttttttttttttttgttttgttttccatcctgaaaaactacaactacggggacaaacagttccctgaattaattatgacccgccgcaggaaagccccaacacactgtcgggtcaggcattatgatccatcataccccaaaatcccaacacccttacttagttgagcggtttttattttggcctttcccacgaaaggggcctaaaggcagataaaagaattttcctttgaccctcacgaccataaggttattgcacagggcatttttttggctaaaacggtgactgattttactagttatttttaaaactctgctctttttcaaaatgggctcaaaatacaaaatccttgttgctgtagacccaccccttcttgggagcgagccgcccccacccccgcggggtgatcccttgggctggctgtttaaactccttttttgacactttgaacatt

SEQ ID NO: 75350 - DNA, 388 bp, Glycine max
  Clone ID: PAT_MRT3847_39055C.1
gtcacttttatacaaaatcaattagttaatgatgaggtgctttctaccttgctttcgtacttctaaacggaggaaccagcgtgcgttccgcctatgaagcccaaaaccatgtgggagaaggagctgttgaagaactcattgattccatagcagagtcacagtgagcaatccattcattcctttagtattttgataatatatatttattatcctgtcatttacgctttcagaacaaaaaatgaagagcaattgaataagagtgttgaaaccaaggatgatcggaaagaggaagcacctcaaatagatgagacaaattaatgattgcatcaagaagagtctttggagtcactttctctctcttcatttcttttaggaaaaaagcttttca

SEQ ID NO: 75351 - DNA, 183 bp, Glycine max
  Clone ID: PAT_MRT3847_39056C.1
cgacgaataaacccgttttcttcctacctcccgtttttcgcacgacatggttgctcacgcgaaggacgaggcgtacctcatcgcgacgattccgtagcgcatccgtctttttgagaccaatctggcggtgcagcacacttagcgcctttcgctttttgcggatcctatcaagggttctcttct

SEQ ID NO: 75352 - DNA, 214 bp, Glycine max
  Clone ID: PAT_MRT3847_39057C.1
cactaggggatgtggacgattttaaaggtgcaagaacaccgcccttaattacactttttaaaaaggaaactgcaaagggagggcgcaattttcacgagtggtccgggcaccaaaaatttcaaaacaaaaaaatttgggggggaaaaatgggtttttattgccctttggcggggggggggatgcccaaccataaaattatcaatatggggggaag

SEQ ID NO: 75353 - DNA, 732 bp, Glycine max
  Clone ID: PAT_MRT3847_39058C.1
aaaaaagcttatttataaataaataaataaaaatagacaaaatgactaatatttcacatactgagtttgtgctttagactttttttcagcaataaagattactttctgccgtaacaaaagaacagttatacgataaaataaaataaaaattaactcctatacctaatgccctatatgtgtgtgtgtgtgtgggattttcctttacaaaatatacaaattgctgccaaaataagcatcggttataatgcccaataattttacaaacacattcaataatgagttacaaaagtacgaaaaatatggtattcacctcgctttagtggattgacatccaaaaattcaactttaaggggaaaatgcaagtcagctgccccaaacgaactgaaaaatgttcctactggcaactgcattgatcacactgttactctgtcttcgaagcatctcctcctgggcacaaccatcaccatcgagtagtgagtaagcacgggcaagagagaaaagtgtggggaacaaatccaacacagccatggcaacctcctccgtaacttgggggacctgcataagctgcatggcaaatacatcactaactgttgttttttcaaggtcttgacaccttttaataaattcatcaaagggaggacatgccccagagcctttaacattgtcttcaaaaatttctgacttgtaatattgagaaattgcttgggtaagataaccatacttccttagagc

SEQ ID NO: 75354 - DNA, 497 bp, Glycine max
  Clone ID: PAT_MRT3847_39059C.1
taatggtccaaagatcttgacaaattcagaaagaaatacaaatgtggaacattttacaacacacaagctatcgtaggctttgaatcttatcataggactcgcgtatataaacagaaagcaaccgtcctatgaagaaggataattgacattgggtggcctgttcttgagagtgaactaagccttgcctcaacccaagctgggaattgcatgaacaccccaaatttctaccattacttagggaaattcgagaatgaataattgctcaatgatctcttatgggccgcagtcgtggcatggctgtagactaaccaattgatagcagatgcttccggagttgaccatcaacctctcatggcccccgattataccatccctgccattatgaaccactcgcaatgctgatggcgtcgctaacatgggataacctgtgagctaccaaaagagttggactaccttcgagaaggcaatcaagagcctcttggactaccctctatgat

SEQ ID NO: 75355 - DNA, 481 bp, Glycine max
  unsure (1)..(481): unsure at all n locations
  Clone ID: PAT_MRT3847_3905C.1
ctggtnacgcctggcaggtaccggtnccggnnaattcccgggtgcgacccacgcgttcgctaggcggcggacacactttattggggttcttgcatcctgaatgaaattataatttttattcattctacggcttgtatttttatgttctaccgttaaaggaattttaatgccacacatcaaactacccactatgttccctgattctttgttactgcctgcgtcaataactcatgatattggggagaaacattgccagatctgacgataaacctgagattcctcatccaccttactccgtgtggcatcgttgggaacaggtgcggagagatcggcatttccggacgaggggccgcagaagaaggataggaatcgcggtgcactgaggattctcactaccccccaggaacagatggctccggaccgcggtacgcgccgcgtgggcataccactgagaccccgagcatcagagccgaaacgagga

SEQ ID NO: 75356 - DNA, 452 bp, Glycine max
  Clone ID: PAT_MRT3847_39060C.1
ttgggaatgactcttgatgagagactgaacacacctactacaattgttaaagtccatttcttgtcataccaaatatgaagatagtctttgccaccctactggtatgtactcttgcttctaacgctccactttcttggatgcagacatcgcctatgaagactcttcttattgcatcaactagatgctcagacagatgctcatctctagggagaaaagataagtgtctcaagaactgtgcaataatctgggctgactgcaaatgaattccttctggagactatgagaacgaggaccagtgtccttgctacagggacgaactttacaagaacggcttggccaaatggccatgaaggcctggactctaagacccagtcacgtagaccccctagaaaataagaatagaggttacggttacgaatacgtcgcgaatttccgaccatcctgggcggtgg

SEQ ID NO: 75357 - DNA, 817 bp, Glycine max
  Clone ID: PAT_MRT3847_39061C.1
aattcggctcgagcgacagaagggggtcaacactgaattcaaaatcactttcgaccatattctcttcttcttctctctctccatcatggtgcaaacaaggaagttcagaggtgtcaggcagcgccattggggttcatgggtatcggaaattcgccacccttttctcaagaggagggtgtggctaggcacgttcgaaacagcagaagaagcggcacgagcttacgaccaagccgcgatattgatgagcgggcgtaacgcgaaaaccaatttcccaatactccaaaccccggagggtgacccaaagacgacgctaacacccatcgatcacgagacctcatcatcgtcgacgaccacctcgaaggaactggaagagattcttcacgccaagctccgaaagtgcgggaagcttccgtccccttccatgacctgcctgaggctcgaccccgagaattctcacatcggagtgtggcagaagcgcgccggccagcgttccgattccaactgggtcatgatggttcctcccctcggaaaaaaaggtggtgctaatgaaggaggtactggaggagatgcttcttgttctaactcctttccgttctccgagtgcgatccgaccccgcaagtggcaaggcaggagcttctgaggacggagatggacgaggaagaaagaattgcgctgcaaatgatagaagaactcctcagcaggaactgccccactagcccttcattcaataacttatattaattaagggaaatgtttcctgaagaaggataattctattcagtttctttaagggtctttagagataaattatgctgg

SEQ ID NO: 75358 - DNA, 829 bp, Glycine max
  Clone ID: PAT_MRT3847_39062C.1
tacggctgcgagaagacgacagaagggggggaagctgcagtgtggataggcttgaggtgttcgaagttggaccgtgcaaagatggttaccaggtgggtctcttaatcggccaaagattctccgaaaccataaggagtagagtggcctcagacctcattctacaaaaccagcttcgaccctttgcccactcccctcattcacagtcacttctcaaaccacttttttataacaatcaaaccaaattcccaagatattgcttatcaacttaaggaaggagattctggcgtttattcaaaaagaaggagcaaaaagtgccaactccgatacctcggatgattgctccgatgttcttgttgtcagtgaatctatggctattgcggcgcacaatgaagacatctcacattttgatcccttgttgtacatatactcttgccgatggacactttttctttctcctatgctcaggtccattacttcacaccctctgtactgcccttattgatctggataaacaaacactatcaattattgaatggaatccaaaaaaaggagatgtttcacatgtttgctctatctcccctcaaaagtcaccatgattctaaagcagcctaaagtcattagaattgcaaaagaacctgttactgcagttcctttgttatgctcttcatatatagaggcccaagatatgcccatcaatacaccgcatagctgcaaccttatcacatagagaccttacccatttggtatcaaaagctttgacaataagtagttttgaatggttaattaaatgaatcgttaccttccatggatctcaaattatattggatca

SEQ ID NO: 75359 - DNA, 417 bp, Glycine max
  Clone ID: PAT_MRT3847_39063C.1
gaccaccaaaaggtggtccacatttaatacactcactctcatgtcaaagatctctatctaatatgagacgtaatcatatatattatcattaataccattaattcttacatttattacaccaataactctttcaccttaaccttctcatttctaacatacctatcatcttaaatattcaaacttcatcacttaccatatgttacaactcataatctaaaatgctcttaaagaaacctactactattaattattcaagaaaacaatgttattaaactaaccttaactatatataatcataaattaatccaatttagaccctacttaacactactatcgtgttatcacattataatccaatctccagactatcactactattcaagcattacaaccacacttaatcaattttactaacac

SEQ ID NO: 75360 - DNA, 1441 bp, Glycine max
  Clone ID: PAT_MRT3847_39064C.1
tacggctgctagaggacgacggaagggggggacgctgcagcgtggataggcttgaggtgttcgaaggtggaccatgcaaagatggttaccaaatgggtctcttaatcggccaaagattctccgaaaccataaggagtagagtggcctcagacctcattctacaaaaccagcttcgaccctttgcccactcccctcattcacagtcacttatcaaaccacttttttataacaatcaaaccaaattcccaaggtattgggatgaacttttggggacagcagcaggaagcggtgtgccatttcttgatatattgcttatcaacttaaggaaggagattctggcgtttattcaaaaagaaggagcaaaaagtgccaactccgatacctcggatgattgctccgatgttcttgttgtcagtgaatctatggctattgcggcgcacaacgaagatgcaaatgttgcccttgttggccacacctacataatcaaaggaatcttgccggatggactcttctttgtaggttatacatatgccggggagcttccaagctgtgcatttgggttcaatagccatggactggcattcactctggattctgtaccccccgctgaagatgagattgtggctggtggcattgggcgcaacttcatttcgcgagaccttcttgaagctacaagcatggatgatgcaatgaataggatcaaatcgtcagaaatttctgtggggcattcttataacttgtttgaaacaagcacgcgcaggattgttaatgttgaaaccgcatctaggaagcggatttcagtttatgaagtggggaatacacctttcttccatgcaaacatgtacctccacctaccgattaatcaggtacaagatgagagttcaatcagcagacataaaagggcagctgtcttgacaaaagaatcaaaaggggatttcctgtcacttctaggagatatggatgacaaaaaacaccctatctacatgactggtccattacttcacaccctttgtactgcccttatcgatctggacaaacagacactatcaattattgaagggaatccaaaaaaaggagatgtttcacatgtttctctatcgcccctcaaaagtcaccatgattctaaagcagcctaaagtcattataattgcaaaagaacctgttactgcagttccttttttatgctggtttatagaggcccaagatatgcccatcaatacaccgcatagctgcaacctgatcacaaagggaccttatccatttggtatcaaaagctttcataacaagtagttttgaatgtttaattaaatgaattgttacctttccatggatctcacattttataggactatccagttgagctcctaatgcctttaatttggtaactgtgctattgatttcagtcaccgtaaatgatagaagtgaggagtattccttctgc

SEQ ID NO: 75361 - DNA, 317 bp, Glycine max
  Clone ID: PAT_MRT3847_39065C.1
ctttctgcttagtggccggtttgttatgcccggtgcccacctgttggcaatgggttcttcatcagattctacttcttcaaggtcaatgaggttacctggagcaggttctggtgcccttggtgcaggagtctcctctgccgcttgatcatccttctcagttgatccctcttcactgggtgaagggagtgcttcagcatatggagcggaagatgttgtaacattcttttcttgacatcaggcacaggaaccaattgggctggacgatggtggcacatcttcatcagcttcaggaacagatgcgtctcccaagatgcttc

SEQ ID NO: 75362 - DNA, 304 bp, Glycine max
  Clone ID: PAT_MRT3847_39066C.1
gacaaacacactctgtacgctgaccaggatgctggatcgcgtgcagatcgtagttgaggctttgaggacaacgggtcataccatcagtgctacatagaagactgtagctgggccatcgacccaggactggaaaggtggatcagctgcttaattgcccgtcctccctcgctgtaatggagctgacaatgctgtctggacaggccttcctgctctcaatgcaaacatgactgctatggcattccttgtcctcatcgctgatgtgtccagtggagacacgaccgtgaggctggcgaacgagtcctca

SEQ ID NO: 75363 - DNA, 1257 bp, Glycine max
  Clone ID: PAT_MRT3847_39067C.1
cgcaccgcagctgtcagccgtggcaggtttctcgcgagccgcgaagctggggcacccccttgtgccgtccttcccaaatccctcctcatcaacatgacccaacaccaacaatgccctcctcatcaacaatgcctctctcgccggaccctcccttcctctgcgccgatgaggccgccatcgccggactcctcgacgccgagccacaccacatgcccgaaaaggactaccttcgccgctgccgcgaccgctccgtcgacgtcaccgcccgcttggacgccgtcaactggatcttaaaggtccacgcatactacgagttttccccagtaacggcgtttctctccgtcaactatttcgaccgtttcctctctcgatgctctcttccgcaacaaagtggtgggtgggcgtttcagctgttatcagtggcatgtttgtctctagcagcgaaaatggaggagtcccatgtgcctttcttactggacctgcaattgtttgagcccaagttcgtcttcgagcccaaaacgattcagagaatggaactctgggttatgtctaatctcaaatggagactccgctctgtcacccccttcgattatcttcattatttcatctccaagcttccttcttcctcttcttcccaatccttgaatcactttttctccacttcctccaacctcattctcagcaccactcgtgtgattaacttcttgggatttgcgccatccaccgtcgcagccgccgccgtgctctgctccgccaacggccaattgccgctgagttttcatgacattcgggacgatgaaatggtgagatgctgtcaccaactaatggaggagtacgtggtggacacgtgtcccgcatccattaaagtcagaataaccgaggcggcggcgccgtccagccccgtcggcgtgctcgacgccgccacctgtgggagctgcgacacaccttccgagaggaattttgctggctcagccgaggaacaagccgagccgccaaataaacggcttcgatcctctgcctcggatgcaccccggcggtagatgcaagaccgaaacttcactccacttcacttcattctcggcatcatatataattcatatattcatatatttataataattacagtcacaatataatatataaatgtctccttttcttgggtatctcttgtcagggagaaagaggttactttactttgtggtttttgaatgcattataatttatatcttgattatatgaaagaccaaggtcaagatt

SEQ ID NO: 75364 - DNA, 490 bp, Glycine max
  unsure (1)..(490): unsure at all n locations
  Clone ID: PAT_MRT3847_39068C.1
ccggaccggaattcccgggtcggcccacgcgtacaaacaaggatgggaaaaatgtaatcttcaatggctcctattctttttgctgcctttgttgctcgcctttttctaactctggcgcgcactaccaatgctaattatatctacgcttctcctcctccacctaagaaggtatattacccgcctccagtataccattctcctccaccacccaagaaatcatactatccacctccagtgtatcactctccaccaccacccaagaaggtttactatccaccaccagtttactctccaccaccaccaaagaaagtgtattacccacctcctgtctacaagtctcctccgccacccaagaaagtttattacccacctnccgtctacaaatatccttcgccacctaagaaggtgtattacccacctcccgtctacaagtctcccccgcctcccaagaaagtgtactacccacctgccgtctacaagtatcccccac

SEQ ID NO: 75365 - DNA, 929 bp, Glycine max
  Clone ID: PAT_MRT3847_39069C.1
cggactcttgggtttccttcttgttgctggagattacccttgatctcgaaaccagggagaagcactatcaggtattcaagttgaggcttaaaaaaaaaaggcgtgtgcatgtaaatgattaagcacatagttccatttgagagttaaagcttccatttcattgcaaggcttgatttgcttgacaggaatagggtaactactatgaaaacaccgccacctctgtcttcgcgttcaccactgcaccatgaatatgtctgacaccgaagaccatgcagcacagtattccaatggtgacgaatcccctccaaagcccacacagaggttcagggacagatctaaggtcaaactacaacccaaaccatgttatgtttttcatttgattttcgacgccacacatgattctttcttgatttttacgatgtgggtcttgtttggttttacttttggctcaacgcaagatgctgtccaaacaagctgtgcagaccaagcaaatgctttccaaacaggccgttaagattgccaaacaagctgaggaacacgaaaggttcatcaacaaggtgacccatctcgcgggagtcctcggttttggtggattttgcttccttttaggggcacgaccccaagatattccctatgtatattgtttgttttacgtcatctttgttcctcttcgttggatatactataggtccaagaaatggcattactatctactggtaagctgacatatcacaaattctgttcctgaagtgcactgtacttgtatggtgtattgtggtttaacaatagaaaagttagcaaaaagaatggttaagtgaattaccaactaccaacatagttatgctgtgtgattaatttgattggattaatttttaagacattaatctgattggttagatcttttagacctggaagctctaatagtaatg

SEQ ID NO: 75366 - DNA, 271 bp, Glycine max
  Clone ID: PAT_MRT3847_3906C.1
atgtttagtattacgcggaaaaggtaactaataaagaggaggcgagtccaacttgatgcaagacggtctagagtgatcgtgggaatgcaaaatgaacacgacgtggatcactgaaaaaaaaaaggggaaggtgaaaaagagaatccctgctaaagcacgcgaccgatgaaaagcaaatgtcaaatacacaacaatccaaattaattactgtggccctcctctgtcgacggacggaagtataatggatctcttgggaggaaagtaaataggg

SEQ ID NO: 75367 - DNA, 557 bp, Glycine max
  unsure (1)..(557): unsure at all n locations
  Clone ID: PAT_MRT3847_39070C.1
aattacccttgaggtggagagttctgacaccattgacaatgtcaaggctaagattcaagacaaagagggtatcccaccagaccaacagaggctgatctttgctggaaagcagcttgaggatggccgtacccttgccgattacaacattcagaaagagtccaccctccatcctggtggctccgtgcttcgtgggtggcanntgcaaatcctttgtcaatgaacccttcactggaaaggaccatgcacccttgaggtggnagaggttctgacannccattgacaatgtcaagtgctatagatgtcaagacaaaggagggtattcccaacccgacccaacagaaggctgaattctttgctggaaagcaagcttggaggatgtgccgtaccctttggccgattaccaacattcaagaaagagtgccacccttccacctggtgcttccgtcttcgtggtggcatgcaaatctttgtcaagaccctcactggaaagaccatcacccttgaggtggagagctctgacactattgacaatgtcaagctaagatcaagacaagaag

SEQ ID NO: 75368 - DNA, 466 bp, Glycine max
  Clone ID: PAT_MRT3847_39071C.1
gcccgcctcgtaatctgggtcgagggctctgctcccaatttgaaaggttaaacctccaaaatatgttagtgagaatagcatctcagagttggacatcaacgataaatgctccttcaaccgacttatctaccttctcatgataattcaaaagtgtcaaatcccactgatatatgtcaaactattcaacccctcaccattatctacacttacccttctccacccatatctgatccaatttcaacttctccaccatttcgggtcccacttctcccatacattcacaggcagcaaaacgccttctccgtcactcaacatatcttcacctaaggcccttctgtgattctgattagggaggcgattctgctgacatgaaatcaattgctgcatacacattcatctagaaattaataagacctcagcactactgtttctatacaaaacacgtatatttctttggcgagttgga

SEQ ID NO: 75369 - DNA, 306 bp, Glycine max
  Clone ID: PAT_MRT3847_39072C.1
aaaaacaaacaactgtttttttttttcccactcaatacaaaatacaattttaagtttcatcaaaatgttttcaaaaaccatttttaatgctgcagctaattctgatttgaggagaataaggttaggatattattcttggctatcgccccaaggggtgcaaaatatactccgcataaagatcccttgggtgctgggtggattcaacagccgggggtgcagggagaaaaacattaactgctccccccttggtctcattctttttggaatcttcaaagaagcggcgggtctccatgaggggatgagggg

SEQ ID NO: 75370 - DNA, 416 bp, Glycine max
  Clone ID: PAT_MRT3847_39073C.1
ccgtgacatgcgcttgtttgtcgctgtcggtgtcatcaagtccgtcgtcaagtccgataaggccggcgtaagttttcgagttcgctgttcaaaattgtgtcctgctaaccagttcgtctgcgcaaaaggctggaaaaattaccaaggctgctcagaaggtaaagttgctatcaattgtcccagaggtgagacaacatgttgacaaatattaggcctcaaagaaataagtggttccgcctatggttcctcttgtttctttccctcttcgactcgaaaaattcgtggaggatttggtggtgatggagcatttcttacttttctaacggtttacgaatcatgggaagggaggactgctagatttacttctatcctctcaacaaaaaatagaagtgatgatgttctgacagttaacgacc

SEQ ID NO: 75371 - DNA, 371 bp, Glycine max
  Clone ID: PAT_MRT3847_39074C.1
agatgtgccatcttctgcaggttctctgctcatggactccaaaaaatctttacacttacgaatttccttaggagatgattctgtgggagctggaggtaaagtgaatttttctgtcactagctattttgcaaatcagctcgaatcacttatgaaaaaatgctgccccaatgaggtcgattttgtgcgatccatgatccgttgcctgagatggagtgcacagggagggaaaagtcatgtatatctcgccaaatcataggacgagaggtctattattaaacatgtgaccaagacagaattggagtcctctgaagaattagcacctaagtatctcaaatacctgatggatgccctgaactcaggagggcctactt

SEQ ID NO: 75372 - DNA, 416 bp, Glycine max
  Clone ID: PAT_MRT3847_39075C.1
gggaacaacaagtaaccaataaattaatatgtaattattggagtattacatatgattacaaccatgacagcatgagtatacaaaatcatagcgacaaagcaagttgttagaaaacatgatagaactataggaatgacgactaatattaacagacaaataaatattattgtagacaaaaataaattatgtggttaattattccttccgcttttgggcatagagttgtatccctcgtctatttatgggttgtataggtctggcattcttctctgcatgatcgtggacagcctctctaagtaacttgacttgagccctcgacacaacacttatctttttattaatataacaaatgacacctcacctgcaatgcaggaagggacagtgagacagcccatgtatctattgtattccaccca

SEQ ID NO: 75373 - DNA, 105 bp, Glycine max
  Clone ID: PAT_MRT3847_39076C.1
ctcaagatctcattcagaatttcaggcgaggagacagatggacggtaacgagcaggatgtgtcgttgggatcgaacaagttccccgatagacagccaattgggac

SEQ ID NO: 75374 - DNA, 1009 bp, Glycine max
  Clone ID: PAT_MRT3847_39077C.1
gttccctgttatttgcaggtgtctaaggagggaacttcaccatttacatatattattgtggacaaccaaacgaagacccgcacttgtatacataccgcaggatatcctccaatgataccagacgaactgtcaaaatcaagtttattatctgcattggatggagcaaaatttgcttattttgatgggaggttgcctgatactgctctagttgttgcccaagagtgcaggcagttagaaagaatatacccatcttaatagatgcagaaaggccaagggaagggttagacgatctcctaaaattagctgattatgttgtatgctcagcaaagtttccagcatcatggacaaaggcatcaactgttccacaagcacttgtttctatgcttttaaggttgcccaacataaaatttgtgattgtaactttggggaaagatggttgtataatggctggagagaagtgttgatggtccttccacggaagaagtggatgtagacagcttattggaatcattggagataaaaagggataagagtgtatccattccaacctgcatatcatcatcagtggcaaaattgaaggcagaggggataggaacagttagtgggaagttgtatgttggaacagctgagagtattccaccatcagagcttgttgataccactggtgctggggatgcatttattggagctgttatctatgctatttgtgccaagtttacaccagagacaatgctatcctttgctgctaatgtggcaggtgccaagtgcagggatctaggagcacgaagtggtcttccttaccgtgcagatccacgcatagcatcctttgtattggagaaattgagtagttcagcttaacatagtaatattagacggctgaatcctgttcttctttagtatatttgactgagttgttgttcagtggagttaatgatttttgaactttaaattcttttggcttttatacatttgatttatcacagttgaagtgagggagggaatggatatt

SEQ ID NO: 75375 - DNA, 258 bp, Glycine max
  unsure (1)..(258): unsure at all n locations
  Clone ID: PAT_MRT3847_39078C.1
ggaaaacattgaaactaaattatgaaaagggggaacattcaggcgggcataataatatgcgaccaaaatacagacaaaaaaacagagggttatannnaaaataaaattccaaaatccagaaactagaaaaaacgaaatggaaccctaagcctcagccttctgggaaacatagggcaaaccacacttgccgcaataatggcgaacgaagggggtggccatgaaagtcccggcgccgcactcggcggtgggggatttctt

SEQ ID NO: 75376 - DNA, 263 bp, Glycine max
  Clone ID: PAT_MRT3847_39079C.1
ggttgtttttttcctcccccgcattctttacacatggggttttactgccaccaacagaattgtgcaactgacgaagctccctatcccatccaacatccaggatccccaattggacccgatccagaatccgacccgtccagatgaatctttctgacacactatgcaaacatgcctgcccttaggttacgtgcagactccaccctctctatttcaatcgacgcctggcaactgcgaggcaacttggcaaacgaggggtccccacc

SEQ ID NO: 75377 - DNA, 240 bp, Glycine max
  Clone ID: PAT_MRT3847_3907C.1
aatggaatcaaatgatgtttgtacctctatatgctggagtttatgcccactcggacgtgattcgagtgtacagataaagcagtatttaagattaagtctacaactcaaggagggctgcagccaaaatcgatgtccttgagaacattcacaagaatgatcacactaatcacatgctacacaaaattacaactcgaagcttaagactcttgtgcatgggcactcagccggtttgagaaacca

SEQ ID NO: 75378 - DNA, 311 bp, Glycine max
  Clone ID: PAT_MRT3847_39080C.1
ggctcgagccggacactaaaaagggcgtctgtcagatcgtaagggtgacacacataattggaagacgctgaacgtgggtccgctaggatgactgtactgccaatctggaggcacgaacatctctgcttgctagtccagactactgatggcacgtgctgcaatcagactatacacgcttgactgaacagtctgggctgaatgtaaggaagacggaactgtgctacgtgaatggtgctgggaactgcaaggcacagctgtgccacctgccgatttgtgcttacaagtgctgggcacttttagggaggcttcat

SEQ ID NO: 75379 - DNA, 598 bp, Glycine max
  Clone ID: PAT_MRT3847_39081C.1
ccacgcgtccacaccaaatgagttgtaagtgcggccagccattgcctgaaatgatgatggctttgtcgtccgatcatcaatgtcttgtgtcgccctcctcccttccttttcttcataaaaaaatcataatccgaatctgtcgaaagtcaaaaccctagaatcgttccccaagctctgcggaaactacataactaaatcacttcaaattgaggaattactattaattactgcgagctctacgcttagtaggttatttatgttgagcgaaggattcccaatttcaaattctagtgctaaccatgtggtatgtcatgaacaagatgattgacctccaagctgggttttcgaaggattcaaatcttgctgaattaaggtgcacccacaacaactgataatctgaacatcagtttaatcttctatttctattagatggatcgatgtgatacttctggatttgtcagtgggggatgcattttacccttgtaatctaacctgaattttgtagatatccaattctttttatgtgggaagtcaggcctatgttctgatgaaattaaacattatggatagaattagactggtagtggctcgtggatgg

SEQ ID NO: 75380 - DNA, 598 bp, Glycine max
  Clone ID: PAT_MRT3847_39082C.1
tctgtctccgtctttctttctgtttttttcccttcgcttctttcttctaaacataaattagaagattccaaatctatgatgaaaccattagcatgatcgagtttccatgcaattttattaaacataaactcagaataccttcgtttaggcacttatttaacccaaaacaatatatattttagatatcaccatttcttcttgtggtaatttctctcttgtcacctattaagaagctgatttttttttgggtcttttgcctcttgaagtttctcactgtggcattaataaaccaaggaaaaacgttatacccggaatcatgtcctgtgtggcagcacgtactgggcgacaacgacagcgttatgaagacaatatgcgactcgtttctggatgtattccctatagatggaaaaagggaaaagtagatcaaatgggagatgcagaggagataatagaagtgcttatgatttcttcaccaaaacgtgatgaccttgtgtttccaaagggtggatgggaggatgatgagactgttacagaagctgcttgccgtgaagcgctagaggaagcaggagtcaaagggattgtaagggaaattcccttg

SEQ ID NO: 75381 - DNA, 606 bp, Glycine max
  Clone ID: PAT_MRT3847_39083C.1
ccacgcgtccgattttggaataggcgtgttttgatgagatcgggttctgggtgtggtgttggttacttgcatgtgagattttttggggggttagagttttgtggcattttgggtttttgaggagaataaggtttgggtttttgtgatggtgtgttggggggttgaggtatcatttggattctgaggtttgttctggtgacttagttttttgatggagagagagttgtggggttctgttttcatctattgggtgttattagctcgcccattatggttggtttctgctaacatggaaggtgacgccttacatagcctgaggacaaatttacaggatcctaacaatgttttgcaaagttgggaccctacactggtcaatccatgcacatggtttcatgtaacatgccacaatgattatagtgtcataagagttgatctgggaaatgctgttttgtctggtccacttgttccacagcttggtcagctcaaaaactaccgtatttggatggtatactttcatcctttgattcttcatattttagtttttcttttttgtatctttatgaaccttgtttgtgggtgaccatgccttggtttctttttcggtaa

SEQ ID NO: 75382 - DNA, 377 bp, Glycine max
  Clone ID: PAT_MRT3847_39084C.1
gcatctaaagtcactgaagcggatcaccattggatttctgatcgtgaatttggccatgggatctctaatggggcctcagtgaataccgcatgcaatcaatttggtattgggagtagatagcggatgcatggtccgagtaatatctggaagcagcacttacgatgagacacaatgtcagaacatgatgtttattgttaatgaaagtgatgcatatctgctgcctatgtctcatccagaggcatcatatgtcagtcaaatcacgaccacttgtttttctcggcttaagcatctcatctcagaactatcatcctccaattttggcaggataggcgtcaatgcttcagactctatgacaaaagatactggccaactccttc

SEQ ID NO: 75383 - DNA, 2989 bp, Glycine max
  Clone ID: PAT_MRT3847_39085C.1
gttttgcatctttgaggcgttttcgaccctctccgaccatgggagcctgcttttccgccaccaaagtaagcggctcgaacggcaatggcgtcaacgtcaacaaaaagcgcagggggaccacgaagaagccgaaatcagagacggcgaaggcgaatccccaacggcacaaggcggcaagttcgcgccacgtgccgtgcgggaagcgcaccgatttcggttacaagaaggatttcaatcagcgttactcgctcggaaaattgctcggacacggccaatttggttacacttacgttggaattgacaaagccaatggcgatcgcgtcgccgttaagaggcttgagaagagtaagatggttctgcctattgccgttgatgatgttaagcgagaggtcaagatattgaaagcacttactggccatgagaatgtggttcagttctataatgcttttgaagatgattcttatgtgtacatagttatggagttgtgcgagggtggagaactgctagatcggatattggccaagaaggacagtcgttatactgaaagagacgcagcggtggttgtaaggcagatgctcaaggttgcagctgagtgtcatttacatggtttggtacaccgggacatgaaaccagagaattttctttttaaatcaaccaaagaagattcacctttaaaggccactgattttggtttgtcagatttcataaaacctggaaaaaagtttcatgatattgttggcagtgcttactatgttgcacctgaagtgttaaaacgtaagtctggtcctcaatcagatgtgtggagtattggtgttattacatacatattgttgtgcggaagacgcccattttgggataagactgaggatggtatcttcaaggaggtcttacgtaagaagcccgattttcgtcggaaaccatggccaactattagtaatgctgcaaaagattttgtgaaaaaattactagtaaaggatcctcgggcgagattaactgctgctcaagctttatcacatccatgggttagagaaggaggagaagcattggagattcctattgatatatctgtcctgagcaacatgcggcagtttgtgaaatatagtcgattcaaacaatttgcactgagggcattggctagcacacttaatgaagaagagttggctgatataaaagatcaatttgatgctatagatgtagacaaaaatggttcgattagcctggaagagatgagacaggctcttgccaaagatcttccttggaaattgaaagaatcacgtgtactagagatattgcaagcgatagacaacaacactgatggtctagtggatttccgggagtttgtagcggctacattacacgtgcatcaattggaggaagactctgacaagtggcagcaactgtcacaggctgcttttgagaaatttgacctagataaagatggctatattactccggaagaacttagaatgcatacatgcttgagaggctccgttgatcctttgctagaggaagctgatattgacaaagatggaaaaataagcctaccagagtttcggagacttcttagaactgcaagcatgggttctcaaaatgtttcaagcccatctgttcatcggcggcagaggttctagattagaggtgcttcagaggctgagataagtttggagaaacgagtggtggagttcctctaagtaacttattgtgtgattgtgctgagtctcttaagactatcttctatcatgcagattgacaatctatgatactcaaaactccagttttggactgtggtaatcccctgcgcggggattatgtccacaatgtcacgaggactacatcaagaagtgtttggtagagtttatgtagacgattcatggactggcttcaggtatattgcagtttcagcagtatcatttatgtgtcggagttttcttggttgtggcatgcaagtaatgtgtaactacaaattaaatcttctagccaaaaatgaaaaaaaaaaaataaataaacatgaaatgaaatacgtggatcaaattctgttctcactatttttccatctcattcttatttccctgcagaaaaagcaattgcaccctgctgtttttagtagatactaatgaattgtttgcataaacttggtttactagtttgagtctgaaatgtatttatatttatttatatatagttctctttgaagagtgggggacatggcaactatgtgattgtggattgatgacttaagggagcggttgatggctttgatgatttgcattggaggtcactcgtgggtatgtgctcttgctgagaatgatatgataggtttttatttgtaatagcaattgaagcgagaagtggctaggacgaatgatgcatttttcatgcatcaaggctttcttattatggaaaattcatttctgaaaagtataggagtatgcattaaggaacatgagttttctcacgaaattgaataacaggagcgtcacataaaaaacattattagacttttagtataattaataaatcccaaaaaccatcatgacgagtctctgcatatacttgtgtttatttttaactagtccaaataatgtgattgtgcactagcactacaagagtttatatgatgcctttattgtctaagccaattcttttatgttgtcaggagaggaactgtagcattgataattttgctttagaaatgacaaaacctattgtccattaaggaacatgagttttctcacgaaattgaataacaggagcgtcccataaaaaccattattagacttttagtataattaataaatcccaaaaaccatcatgacgagtctctgcatatacttgtgtttatttttaactagtccaaataatgtgattgtgcactagcactacaagagtttatatgatgcctttattgtctaagccaattcttttatgttgtcaggagaggaactgtagcattgataattttgctttagaaatgacaaaacctattgtc

SEQ ID NO: 75384 - DNA, 261 bp, Glycine max
  unsure (1)..(261): unsure at all n locations
  Clone ID: PAT_MRT3847_39086C.1
ggggagttcaaaagggaaatgcaaagacattcagtggcagttcgtcagttttttcattacaaggcacagtttgtgccttttaaaaatgatgcgctagataaggctaanagagacactgctcatgangctatctcagccatattttcagaagacaataataataataataagccatcgcctgctgaatatctaaaccgccggatacaagggtttgggaatacaaactatgaaccgtcctcagaagataagaaatcttttatc

SEQ ID NO: 75385 - DNA, 1465 bp, Glycine max
  unsure (1)..(1465): unsure at all n locations
  Clone ID: PAT_MRT3847_39087C.1
ctcgagccgtgaggatggtatcttcaaggaggtcttacgtaagaagcctgattttcatcggaaaccatggccaactattagtaatgccgcaaaagattttttgaaaagattactagtaaaggatcctcgggcgagattaactgcggctcaaggtttatcacatccatgggttagagaaggaggtgaagcattggagattcctattgatatatctgtcctcagcaacatgcggcagtttgtgaaatatagtcgaatgaaacaatttgcactgagggtaagagaaattaattctagccttttcagtttagaaggcatggaacctgtttgatgtccagctttttttataattgattactgttggaatatatggaaatatcttgccgtatccctattttatcctttagaattaatttccctatttcttctttatcttatcatgatttccccctaattggctaggattatgatttactaattaaggttattgctagaatacaagttttatgaacatatcanacatatataatttcaacaattaccctttcagacattggctagcacacttaatgaagaagagttggctgatataaaagatcaatttgatgctatagatgtagacaaaaatggttcgattagcctggaagagatgagacaggctcttgccaaagatcttccttggaaattgaaagaatcacgtgtactagagatattgcaagcgatagacaacaacactgatggtctagtggatttccgggagtttgtagcggctacattacacgtgcatcaattggaggaagactctgacaagtggcagcaactgtcacaggctgcttttgagaaatttgacctagataaagatggctatattactccggaagaacttagaatgcatacatgcttgagaggctccgttgatcctttgctagaggaagctgatattgacaaagatggaaaaataagcctaccagagtttcggagacttcttagaactgcaagcatgggttctcaaaatgtttcaagcccatctgttcatcggcggcagaggttctagattagaggtgcttcagaggctgagataagtttggagaaacgagtggtggagttcctctaagtaacttattgtgtgattgtgctgagtctcttaagactatcttctatcatgcagattgacaatctatgatactcaaaactccagttttggactgtggtaatcccctgcgcggggattatgtccacaatgtcacgaggactacatcaagaagtgtttggtagagtttatgtagacgattcatggactggcttcagttctcttctctgaagaattagtgggggggcaacaatgtgattgtggattgatgacttaagggagtggttgatgtctctgatgacttgcattggaggtcacttgtgggtatgtgctcttgctgtgtttctattattatgaatgatatgacaggtttttatt

SEQ ID NO: 75386 - DNA, 583 bp, Glycine max
  Clone ID: PAT_MRT3847_39088C.1
taagtttggagatacgagtggtggagttcctctataagtatcttattgtgtgattgtgctgagtctcttaagactatcttctattatgcagattttagccactcatccatgctgacaatctatgaaactcaaaactccagtttttgactgtggtaatcccctgcacggggattatgtcctcaatgtcacgaggactacatcaagaggtgtttggtagagtttatgtagaccctgcatggactggtttcagttctctttgaagagtgggggacatggcaactatgtgattgtggattgatgacttaagggagcggttgatggctttgatgatttgcattggaggtcactcgtgggtatgtgctcttgctgagaatgatatgataggtttttatttgtaatagcaattgaagcgagaagtggctaggacgaatgatgcatttttcatgcatcaaggctttcttattatggaaaattcatttctgaaaagtataggagtatgcattaaggaacatgagttttctcacgaaattgaataacaggagcgtcacataaaaaacattattagacttttagtataattaat

SEQ ID NO: 75387 - DNA, 176 bp, Glycine max
  Clone ID: PAT_MRT3847_39089C.1
cacgcgtccgcattttctgcgggtacacgcactttctctatctacgtattcaaatttgaagtctagcggggacaatcgtcggcctttaggattaattaccatgtcaggggcacgggaactttttctagccgatagggattagggtgaagtcaggacgaatatgagggatttggaga

SEQ ID NO: 75388 - DNA, 248 bp, Glycine max
  Clone ID: PAT_MRT3847_3908C.1
tatatttcaaattttgaagataagtttgtctgtgtcaattgcttaacttgtgaatatcaggcagaggcaattgctggaaatttttgggttttggggtttaagaaagtcatattctgatgaaatctcaaatctgaaattaatatattttgaagctatggttgtatattttaatgttattgatgtatattttaatgtttgatagctgtttctgaattgggatttttatttctgagatcattaaaggttat

SEQ ID NO: 75389 - DNA, 575 bp, Glycine max
  Clone ID: PAT_MRT3847_39090C.1
ttttgatccacgtatttcatttcatgttcatttatgttcgtttttttttttttcatttttggctagaagatttaatttgtagttacacattacttgcatggcacaaccaagaaaaccccgacacataaatgatactgctgaaactgcaatatacctgaaaccagtccatgcagggtctacataaactctaccaaacacctcttgatgtagtcctcgtgacattgaggacataatccccgtgcaggggattaccacagtcaaaaactggagttttgagtttcatagattgtcagcatggatgagtggctaaaatctgcataatagaagatagtcttaagagactcagcacaatcacacaataagatacttatagaggaactccaccactcgtatctccaaacttatctcagcctctgaagcacctctaatctagaatctccgccgccgatgaacagatgggcttgaaacatttttagaactcatgcttgcagttcttaggagtctacgaaactctggtaggcttatttttccatctttgtcaatatcagcttcctttagcaaaggatcaacgggag

SEQ ID NO: 75390 - DNA, 199 bp, Glycine max
  Clone ID: PAT_MRT3847_39091C.1
gacaataggttttgtcatttctaaagcaaaattatcaatgctacagttcctctcctgacaacataaaagaattggcttagacaataaaggcatcatataaactcttgtagtgctagtgcacaatcacattatttggactagttaaaaataaacacaagtatatgcagagactcgtcatgatggtttttgggatttatta

SEQ ID NO: 75391 - DNA, 380 bp, Glycine max
  Clone ID: PAT_MRT3847_39092C.1
gtttggcagaaagctgtttttgtgtaccagaactaatttcctcttcatttgctggaatcaggaaggacagtcgttatactgaaagagacgcagcggtggttgtaaggcagatgctcaaggttgcagctgagtgtcatttacatggtttggtacaccgggacatgaaaccagagaattttctttttaaatcaaccaaagaagattcacctttaaaggccactgattttggtttgtcagatttcataaaacctggaaaaaagtttcatgatattgttggcagtgcttactatgttgcacctgaagtgttaaaacgtaagtctggtcctcaatcagatgtgtggagtattggtgttattacatacatattgttgtgcggaaga

SEQ ID NO: 75392 - DNA, 182 bp, Glycine max
  Clone ID: PAT_MRT3847_39093C.1
gagaaaatcattaccatggtttggttctaggaaaaaggcagtgaataattatgcaatgaagcagaagagtagacgtgctatggcttattgggtagggagagatgggtcattgaggaggacgtgccgattaaatgcagcccaactctatctgaatgcatgtcgcaatagacagggcgctatcg

SEQ ID NO: 75393 - DNA, 164 bp, Glycine max
  Clone ID: PAT_MRT3847_39094C.1
gatttatattgttgcgtgtgcgtatatttttgtttttttttgtaatactcagctttttacgtgtgtgtgcaatcagtttctatatagtgtggggtaaacactgaggcaaaaacttgcacaaggaagggcccgtgagaaaaacatgaagcacaaaagcgcgcaca

SEQ ID NO: 75394 - DNA, 191 bp, Glycine max
  unsure (1)..(191): unsure at all n locations
  Clone ID: PAT_MRT3847_39095C.1
ggccaggaaagaggatgaagactactagaatctacttcagattcttgttcttgtggtctgtnttctgttgtgttgatgttcagatgtgtaaccagtancgatgtggttttaatttggatgcattgctttacntgnttcgctggtcctggtatngtacnaaaatgnanggnnatattggactanggtggttt

SEQ ID NO: 75395 - DNA, 113 bp, Glycine max
  unsure (1)..(113): unsure at all n locations
  Clone ID: PAT_MRT3847_39096C.1
gtcaatggattgcccctgaagcctgaagagatggcagaattacttggatgtcccttacctccacgtaagctgaagccggnntagatattggtatgacaaagaatctngtctct

SEQ ID NO: 75396 - DNA, 264 bp, Glycine max
  Clone ID: PAT_MRT3847_39097C.1
gacgacggatcgcggatacagagaatggtgaagcatgtcgacctggggagtctgacttgtgcacatatggtgcccatgattacttccttgtcgcatatttcttaagatctgatcaagtcatcatggcgccttcttgtacagttgagatgactacctcgttcttgattcatagatagccagcgatcttatcatgaggatctcgtcctggctgctatctgtctgtacaaagtctagcctatccgatctgttcatatttgaaactca

SEQ ID NO: 75397 - DNA, 534 bp, Glycine max
  Clone ID: PAT_MRT3847_39098C.1
tttcccactctttcgaccacgcgtccgctctgtttctgtctctgagattgcggctgacgattccgaacgagcgaccttgttcgattatcgcaaagttgaagtcatcatgggtaaggaaaagactcacatcaacattgtggtcactggacatgtcgactctgggaagacaactaccactggtcatttgatctacaagcttggaggtattgacaagcgcgtgattgagaggttcgagaaggaggctggtgagatgaacaagaggtcattcaagtatgcctgggtgcttgacaagctcaaggctgagcgcgaaagaggaattaccattgatattgctttgtggaagtttgaaaccaccaagtactactgcacagtcatcgatgcccccggacatcgtgactctatcaagaacatgactactggtaccttccaggctgattgtgctgaccttatcattgactccaccactgggggttatggaacaggtctttctaaggagggacaaactctggagcaacctcttgttgctttctccct

SEQ ID NO: 75398 - DNA, 1895 bp, Glycine max
  Clone ID: PAT_MRT3847_39099C.1
ggtccggaattcccgcgtcgaccacgcgtccgccctcgctctatttctcagtctctgtgtttgcggctgaggattccgaacgagtgaccttcttcgtttctcgcaaagtttaagtaatcatgggtaaggaaaaggttcacatcaacattgtcgtcattggacatgtcgactctgggaagtcaactaccactggtcacttgatctacaagcttggaggtattgacaagcgtgtgattgagaggttcgagaaggaggctgccgagatgaacaagaggtcattcaagtatgcctgggtgctcgacaagctcaaagctgagcgtgaaagaggaattaccattgatattgctttgtggaagtttgaaaccaccaagtactactgcacggtcattgatgctcctggacatcgtgactttatcaagaacatgattactggtacctcccaggccgactgtgctgtccttattattgactccaccactggtggttttgaagctggtatttctaaggatggacagacccgtgagcatgctcttcttgctttcaccctaggtgtgaagcagatgatctgttgctgtaacaagatggatgccactacccccaagtactctaaggctaggtatgatgaaatcgtgaaggaagtctcttcttacttgaagaaggttggttacaacccagacaagattccctttgttcccatctctggttttgagggtgacaacatgattgagaggtccaccaaccttgactggtacaagggaccaactctccttgaggctcttgaccaaatcaatgagcccaagaggccctccgacaagcctctaaggcttccattgcaggatgtctacaagattggtggtattggtactgtgccagtgggacgtgtagagactggggttgtgaagcctggtatggtggtgacttttggtcccactgggctgacaactgaggttaagtctgttgagatgcaccatgaggctctcacagaggctcttccaggtgacaatgttggatttaatgtgaagaatgttgcagtcaaggatctcaagcgtggttttgttgcatccaactccaaggacgaccctgccaaggaagctgccaacttcacatcccaagtcattatcatgaaccatcctggccagattggtaatggatacgcaccagtccttgactgccacacttctcacattgctgtgaagttttctgaaatcttgaccaagattgacaggcgatctggtaaggagcttgagaaggagcccaaatttttgaagaatggtgatgctggtatggttaagatggttccaaccaagcccatggtggttgaaactttctctgagtatcctccccttggtcgttttgctgtgagggacatgcgtcagaccgtagctgttggagtcatcaagagtgttgagaagaaagaccccaccggagccaaggtcacaaaggctgccgccaagaagaagtgattgcattttggcaattttgctagcacatgtgatcatcaacgtggtttcaaaaaaacttgttcctttacagtagtttatctttgcagagtcttaggtgtttgttttaccagttatattttgaagtgtccgccgatttcatgtagccgtagccttcaaaactgggttcttgatcggcggtaacattttcgttgctgtttgtttttgatgagtactgttttttgttttgatggtaaaagtctgagattttcaaattcacaagcagccatagggttttagtccatttcctttgctgctgaggagggatgtcttaaatttgcatttaatttataaggaagttttgttaactgttttttatggtttattattccctttgaatttgaagccaaaaaaaaaaaaaaaaaaaaaactcgagactagttctctctctctctc

SEQ ID NO: 75399 - DNA, 441 bp, Glycine max
  Clone ID: PAT_MRT3847_3909C.1
gtctaaataagttcaaagattctttaacttcatctcttgtagctcaggctattgattctaggaagcatgaggcacaaactagaagattgctcacgttcttcttatggtcttgtaagaatttgagtcatcgtttggaagacaaggattataatcatgctcttcgagtttttgctgaaaagaaagactacacggcaatggatattttgatgggagatctcaagaaggagggtcgagccatggatgctgagacttttagtcttgtagcagagaatttggttaaactaggaaaagaagatgaggcattgggtattttcaagaacttagacaagtataagtgttctatagatgaatttacagttactgctatcgttaatgccctttgctccaaagggcatggtaagagggctgaaggggtagtttggcatcacaacgacaagatta

SEQ ID NO: 75400 - DNA, 316 bp, Glycine max
  Clone ID: PAT_MRT3847_390C.1
atattgttcctataggtgactgttttgcagattttttcgccgagaagtgaacaccagccaaacaacactccatgagccacaccggtacaagaagggaacatacagatggaggttttaacatgtggcagcgactctttagctcacacggacagcaagaagcaccatctgataagctaaatttagcttacatccaagatatcaccgttttcccataaaaacaaatgtgtttattcctacaatttggcaagattggcaggaaactgtaaaataatgtgggaagatacaatgtgctgttcgctgaatgaaattatgatca

SEQ ID NO: 75401 - DNA, 1950 bp, Glycine max
  Clone ID: PAT_MRT3847_39100C.1
ggtccggaattcccgcgtcgacccacgcgtccgcgctctgtttctgtctctgtgtttgcggctgaggattccgaacgagcgaccttcttcgtttctcgcaaagtttaagtcctcatgggtaaggaaaagactcacatcaacattgtcgtcattggacatgtcgactctgggaagtcaactaccactggtcatttgatctacaagcttggaggtattgacaagcgtgtgattgagaggttcgagaaggaggctgctgagatgaacaagaggtcattcaagtatgcctgggtgcttgacaagctcaaggctgagcgcgaaagaggaattaccattgatattgctttgtggaagtttgaaaccaccaagtactactgcacagtcatcgatgcccccggacatcgtgactttatcaagaacatgattactggtacctcccaggctgattgtgctgtccttatcattgactccaccactggtggttttgaagctggtatttctaaggatggacagactcgtgagcatgctcttcttgctttcacccttggtgtgaagcagatgatctgctgctgtaacaagatggatgccactaccccgaagtactctaaggctaggtatgatgaaattgtgaaggaagtctcttcctacttgaagaaggttggttacaacccagacaagattccatttgtgcccatctctggtttcgagggtgacaacatgattgagaggtccaccaaccttgactggtacaagggaccaactctccttgaggctcttgaccaaatcaatgagcccaagaggccctcagacaagccactcaggcttccattgcaggatgtctacaaaattggtggtattggtaccgtgccagtgggacgtgttgagactggtgtcgtgaagcccggtatggtggtgacttttggtcccactgggctgacaactgaggttaagtctgttgagatgcaccatgaggctctcacagaggctcttccaggtgacaatgttggctttaatgtgaagaatgttgcagtcaaggatctcaagcgtggttttgttgcatccaactccaaggatgaccctgccaaggaagctgccaacttcacatctcaagtcattatcatgaaccaccctggccagattggaaatggatacgcaccggtgcttgattgccacacttctcacattgctgtcaagttttctgaaatcttgaccaagattgacaggcgatctggtaaggagcttgagaaggagcccaaatttttgaagaatggtgatgcaggtatggttaagatgattccaaccaagcccatggtggttgaaactttctctgagtatcctccccttggtcgttttgctgtgagggacatgcgtcaaactgtggctgtcggagtcatcaagagtgttgagaagaaagaccccaccggagccaaggtcaccaaggccgctgccaagaagaagtgattgcatttgggcaattttgctagcacatgtgatcatcatcgtggttactcctttatagtagttttatccttgcagagtcttaggtgttttgtttaagttatatttttaagtttctgccgatttcatgtagccgtaactttcaaaactaggttcttgatcggcggtggtcaattttcattgctgtttgtttttgatgagtactgttttttgttttgatggtaagaagagtctgagatatttcgaatttcacaagcagctatagggttttagtccatttcctttgctgctgagggatgttttaagttgcatttaatttataacgaagttttataaactgtttatggtttaaaggctattattctttaattttgttgttgaagtaatgtgagtgggaggtgcgcttgagctgtgtggacgtagttgagctcttaattatgcgatcgtagattcgtagttgcactaatgaacaattgttgccatgttttatctttc

SEQ ID NO: 75402 - DNA, 1038 bp, Glycine max
  Clone ID: PAT_MRT3847_39101C.1
ccacgcgtccgcaggttgagagtttgatgccgatcatggatatgaaggtcagtaatctctttgaagaggaaactcctcagatttacactctctgtgggcgtggtcctcgatcctctttgaggatcctgagaactggtttagcagttagtgagatggctgtgtccaagcttcctggtatacctagcgctgtttggacagtgaagaagaatgttattgatgagtttgatgcatacattgttgtgtcattcacaaacgctacacttgtgctgtccattggtgagactgttgaagaagtcagtgacagtgggtttcttgacactactccctcccttgctgtttctttgataggagatgattctctcatgcaggttcacccaaatggtattaggcatattagggaggatggccgtattaatgaatggagaactcctggagaggactatttcaaaagttggatcaaatagacttcaagtggttattgcactgagtggaggggagcttatatattttgaagtggatgtaactggtcagttgatggaggtggagaagcatgaaatgtctggggatgttgcttgtttggacattgctccagtgcctgaaggcagacaaagatctcggtttcttgcagttgggtcatatgacaagaccatccgcatcttatcgcttgatcccgatgattgtatgcaggctctaagtgtacaaagtgtttcttcagctccagaatctcttctttttctcgaagttcaagcatctgttgggggtgaggatggtgccgatcatcctgctagccttttcttgaatgctggcttacagaatggtgtcatgtttagaactgtggtggatatggttacaggtcagctttctgattctcgttcccgattcttaggattgagagctccaaagctgtttcctattattgtgagaggcaagcgtgctatgctttgcttgtcaagtcgaccttggcttggttatattcaccaaggacatttccttttaacgcccctgtcatatgaaacccttgaatatgctgcctcattt

SEQ ID NO: 75403 - DNA, 714 bp, Glycine max
  Clone ID: PAT_MRT3847_39102C.1
gcctgttataattttgcacagtatgcttatagataataacatcataaaattttgcacagtatgtttgggaaattaccacaaacaaatctctctccactacgcatttctgaaaaacataagtaacaactttgcttgaggaaatgcattgtacatatttcaatctataagcatcttttggccctagtcagtctataattgatctccccaaccgaaaaatatggggttaaaatccttttaagttctctattgttatgactgtgataccaaaatctgcgaatctagcagcagctgatgctttctggatttgaagtcaaaccaattctgtataatgaaattatccatgatcttaaatattgaatgtccaactctgaacttaaagctgaagtcacatcaccaccgcagacgttagcaggtgtcagttcaggaaaatttacctccgtctcagtcacagattgtccttcaaattatttggatccccattttgaacaagtgctatagagggggttgtcttctgaggcattttcctcgagaagctttttccataaagggagccaaagacaatgacagctccaatccactgttcccagctaagaggatgggcaaaccacacacatgacagcataatgctcaccaactgtcttgtgggcattatgggtgcaaatgtcagagcaccgaaggtgcgaattgtgtatgaaataaaaaattgactaattg

SEQ ID NO: 75404 - DNA, 535 bp, Glycine max
  Clone ID: PAT_MRT3847_39103C.1
caacgaaaaaaagcatggctcatcaatttgctcccttgcatgccttcctaaccccccttgctcctcttcttccaagctccacataaaacttctctctcgacttgacttgcctcaatattttgtttttgttcccacatatatcattttccgaaagcaatcttgtttcccacaaaattcaaaccttagtttgtaatgttaccaggaactagcttattctgttggactcaaatctagttgattacataaatcttaatctacaacattgtgagagactagcttattctgtctcaacttcagttaagttgattttctcaatctttcatgtcttgcttgtttacactcctaaacatttcaaccatagttccaaactacggtacacaactaaagcagtgacggcatcgtaaccccaatttaaaacctcttacaatgagagtttccacccagaataattccgagacggagagtagttctacctcattcttaccaccatcaccatcaccatcaccgtcgtcaccaccgtcatcccgaattcaag

SEQ ID NO: 75405 - DNA, 1423 bp, Glycine max
  Clone ID: PAT_MRT3847_39104C.1
ccacgcgtccgatctgtgtagcctaaatgcctaaaccatgctgctcaatgcacaagcattactataagacaaacctcgccaaccccggaccggacgccaaccggtccaaccaaacatcacaccggttcgaaccggccttttccttccttatatcaatcactctcctacatcccccaacggactggtcggtacgttcttctcccgctcgaggctccaatctatcaactcttcaaaagggagaagaaaaggaaagaaaactctcaaaaaactattatagcaatggcagaacaaaaccaaaaccaaacaactgaagctggaaggcaccaagaggttggtcacaagagccttctccagagtgatgctctttaccagtatattctggagacaagtgtctacccaagagaacctgaatccatgaaagaactgagagagttgacagcaaaacacccatggaacatcatgacaacctctgcagacgaagggcagttcttgaacatgctccttaagctcatcaatgccaagaacaccatggaaattggtgtctacactgggtattcacttcttgccaccgctctcgctcttcctgaagatggaaagatcttggccatggacattaacagggagaattatgaattgggtttgcctgtaattaaaaaagctggtgttgaccacaaaattgaattcagagaaggtcctgctctaccagttcttgatgaaatgattaaagatgagaagaaccatggaagctatgacttcatctttgttgatgcggacaaggacaactacctcaactaccacaagaggttgatagagcttgtaaaagttgggggcgtgatcgggtacgacaacaccctatggaacggatctgtggtggcaccccctgatgctcctctcaggaagtatgttagatactacagggacttcgtgctggagctcaacaaagccctcgctgtggaccccaggatcgagatttgcatgctcccggttggtgatggaatcactatatgccgtcggatcaagtgatttctgatcatcataatcgtggaccaccgttgcttcttctgcaccccctatagtgatgattggtcatcattgagtggcacctgctaatgcatttaaaagcaatcaatatttttctttcaaaaaaaaatatgtgtctgtacttttctctattactcgtgtggaaaactgtggacaattaaacgttctatatgcaagtgacttttttcttatgtgatttacttccacaactcttggttaattagaaagaggatatatgtgtgctttatcaggagggtggatgaaaaggagagaatttctcactattaaattttttattttttaattgagggttaaaaaattttcttcttttttcaaaaaaaaaaaaaaaaaaaaaaaaagggcggccgctcagaggatcaag

SEQ ID NO: 75406 - DNA, 568 bp, Glycine max
  Clone ID: PAT_MRT3847_39105C.1
ggctcgagatttttttttttcttaaagatatgttacttttttttttcttaaaattttggacatttttcttgcaactcttagatcagatagttgtattttgcaagggctaaacgtagttataaatgtgtatgacagaagatgtcccttttaaaatagcttacttataacaaggttgatatggcatctgcatctattgtgtaaggaggcaagtttattgataactggatttatggctataaaatagttatacaaggctccagagtgatttggaaatagtcagttgcttagtttttttaaacagctttaaattttggggtttaagagaaaagagttagcaattacaatctgatggcagtggaatcaacggctaagtgctattctctggttgtctggtattgtacttttgcctgtgcttaaatgctttgattgaaatgtgaacccccccccaccccccaaacacaatggttttaaggtttcaatctaacagtggaaattgaggtaaaaatattattctgagtgtggtgcaagccacctatgtactatttttcctttacttatgcaaaagcta

SEQ ID NO: 75407 - DNA, 184 bp, Glycine max
  Clone ID: PAT_MRT3847_39106C.1
gttacttggaatttgtgtttttttttttctctgttaaaaatttggtttttccctgctcgatcttactgctttcctcaaaaagactaggtcttcttccaaccggacaaaagcaggcgcccaaccaacaaaatgacggaggccaaccaccaacacccagggggcacgaccgaacccccaaaatcga

SEQ ID NO: 75408 - DNA, 441 bp, Glycine max
  Clone ID: PAT_MRT3847_39107C.1
ttcgtccgtttttccttaggacctgaaaaacacagccatggggaaccaatcctctttaaacaagatagaaactcttcctatcgacacaccattcaagcttccagcatagataccagttcgaccacaaggtggtggatttgctactggaaccatcgacataggacggctagaagtgtttcaaatttcaacagtcatcaaagtttgtaaaacctaagaaggaggaccaggtgatgcaagggcggcttactttgagccagcaggaatacctgatggatgttttacactaggccactccagccaacgcaatagcatgcctcttcttggatcaattctggtggctggagatgagacaggattgggtgacaatagggtggctctgaggaaaccaattgcagacacacttgtgcgtttcagcacgaccctattgatcaagcaagacaa

SEQ ID NO: 75409 - DNA, 666 bp, Glycine max
  Clone ID: PAT_MRT3847_39108C.1
ctctctcacttatatttagcacgtccgacgttgcgtactcagtccactcaattttagatttttaagtgtctggtgccttaacttgttcttcattgtgccctttctctgagattgcatataggtttttagtgctgaagcatcaaaatggggagatattcaataccctttatgggtgttctgctactgttctgtctggtttcatcttcagaggcagaatatttgaagtataaagaccctaaggcgccactgaatgtcagaatcagtgacttgttgaagcgaatgtctctcgaagaaaagataggccagatgacacagattgaaaggagtgttgctactcctgatgtgatgaacaagtacttcattgggagtgtgctcagtgggggagggagtgttccggcaacaaaggcatctgctgcgacctggcagcaaatggtgaatcagatgcaaaaggcagcattgtctactcgccttgggattccaatgatttatgggatagatgcagttcatggacacaacaatgtctacaatgctaccgtttttcctcacaatgttgggctaggagttaccagggatcctgtgctcataaagaagattggagaagcaactgcccttgaagttagagctactggaattccgtatgtctttgctccatgcattgcggtctgc

SEQ ID NO: 75410 - DNA, 891 bp, Glycine max
  Clone ID: PAT_MRT3847_39109C.1
gaagaaagatacaagcaagaggtacagatgaaaaacattcttcctgctgttgcagatatgtttttcctggatggagaagagaatgaaaagggagctagcattttgtgctttgctcagtttcagactgttgatgtatttgctattgtggctttatctggaattctaagcagattgctgagtagtggaactataattgtggctaccagtaatcgagcaccaaaggacttaaatgaggctggtatgcaaaaggaaatattccagaaacttgtctccaaattggaagaacattgtgagaaagtattgatagggagtgaaattgactaccgtcgttttatagcacaaaaatcagaaaaccaggcgcacttgttctggcctattgaaaaggaagcaatgaatgaatttgagaaaaagtggcatgatgttacaggcagatttggaggaagaataatctcaaacaccatctcagtgatgtttggaaggacacttgaggttcctcaaagctttgatggagttgcacgcttcacatttgagtatctctgcggtcgtccggtgcgtgctgccgtttagtttgctgttgctcttaactttctctccggcctcttttctgacttaaccgtattgtgtgggcgcctcctagtcttggctctgagggcaagttgatattgtgtgtttcattaaactcttcacggctcaaatgggtatgaacaactttcaagagttagttcatacttcatagatatgatggtacatttgatgattaaactctttgcattctgtggtttattctttttttggcgaccttgtagcaactattattgccttgaggtagagggaatgaaagtcttggagtacagatctagaataatgtaagacttattatgctaataatgt

SEQ ID NO: 75411 - DNA, 210 bp, Glycine max
  Clone ID: PAT_MRT3847_3910C.1
gcgtccaacccgatgtcagcacacgactcaatgggactcacataggtcaacgtcaggttcatacttcatcacatcccggggaagttctgaaacctaaatcatacatagctataattcatgaggggatgcgctatgtatcccacgtcattcatgactgggaaactttacattcacttcactgtagcatttccatattcacataactctgat

SEQ ID NO: 75412 - DNA, 195 bp, Glycine max
  Clone ID: PAT_MRT3847_39110C.1
tattgatgtccacttggcgtcctcaatgcttctccacaacacgactcgcactcaccatttcttaacttttaccaacgacctatttccgacatacgcaacgcagtggcaaagactgacttcgacgtgagtgttgagagcaagaacaaagtcctcacgcagctgcgatatgtcacgattgctgctactcacaccttt

SEQ ID NO: 75413 - DNA, 2247 bp, Glycine max
  Clone ID: PAT_MRT3847_39111C.1
ttcactttcaactttcaagtcaaaaggacaatagtctcaaatatcaaacacattcttactgatcttagggacaggtatcttctatgaaagccaatttttctggtgcagctgttgaaaaattggggtgcttaatattctacaaggatattttccatctggtaattatgcatgtctggccccgtgaccatagctgattattcaaatggaggagcactttcttgtgcagagagaacaaaatctgttgatgcgattcctgaattagaccatctgtcaatattgacaaatggtgaaattgacggctttagtgttggacaactcttactttttaatggggagtcatattctggatccctttatggcaatgtttctgaaggccatggaacgtacgtgtggtgtgatggttgcgtatacgagggtgaatggaggagagggatgagaaatggttatggaaaactaagatggccttcaggagcagtgtatgaaggtgatttctctggtggatatatccatggtacgggcacatacattcgttctgataaattgaaatataaaggtagatggaggttgaatcttaaacatggtttggggtttcaagtttatcctaatggagatacctttgaagggtcttggatgcaaggaacacaagaggggcctggcaagtatacctggaccaatggaaatgtgtatgtagggaatatgaaaggtgggataatgtcaggaaaaggaactcttacttggataaatggggactcatacgaaggaaactggttaaatggcatgatgcatgggtttggagtttatacttggagtgatggaggatgctatgttgggacttggacattgggtctaaaagatggcaaaggaaccttctatccgagaggtagctgtcttccatctgcacaagaaatatatctcaatgcattgagaaaaagagggctgttgccagatttgagaaaacagaaacagatacatattcatcatgctgcttcagttgatatgggagatgtcaaggttggtgaaagtcagagatcaaatcgtgtttcatctgataagctcgccaaaggaaacttgttaaatctggaacaatctcgtagcaaaaatatttctctcgaaaggcgctggagtcttgaggtatctattgagaaagtgattgggcatgattcaagattaggatcaacagattctgtagcagaaaatggagataaagtcccaattttggaacgcgagtatatgcaaggtgtgttaataagtgaattagttttaaataatagtttttcatcaatgtctagaagggcaaaacagctccaaaaaaaacttgccaaagaaattaaaagacctggtgaagcaatcattaaaggtcaccggagctatgatctgatgcttagtttgcagctcggaataaggtatactgtggggaagattaccccaatacagagacgagaagttcgagcatcagattttggtcctagagcaagcttttggatgaattttcctaaagaagggtctcaattgacacctcctcatcaatcagagggttttaaatggaaagattactgccctatggtgttcagaaatttgagagatgttctagttcctcgaggaggagatgatgacagtgttgttgttggctcacacatgaggggtagccggttgcgagcttcatctgctggtgatgaggaggtggatctacttctacctggtacagcaagactccaaatacagcttggtgtgaacatgccatcaagggcagaacagatttcaggaaaacaaaaacaagaaaagcaaatgtttcatgaagtgtacgatgtggtgctgtaccttggtatcattgacatattgcaggactacaacatgactaagaggattgaacatgcttataaatctcttcagtttgattcattgtctatctcagctgtggaccctacgttctattcgcatcgcttcctggaatttattcagaaggtgtttccaccaaatgcaacgacaggttaatcaagataattttggggttatatttaaccagtaagtttatttagaaagtgtgaatattgcacttttcatgcttgctccagaatttttatagtaggtggccacgtgggcaccttgttgatggtggtaataggaatcaagtgaataatgaggtaaatagatttatctcatgtaaagtgagtaaatatataataaaaaaaaagtgttatatttataatagaattaagttaaagtttttaataatcttaaccaattttc

SEQ ID NO: 75414 - DNA, 358 bp, Glycine max
  Clone ID: PAT_MRT3847_39112C.1
aaaaaaaaaaatttgcggacatctttcgccttggttttgggaaccggggaaaactctgaccctacccaaggctagggcccttggaaagacaccccgaaaaaaaccccccttttaccggtttttaccccagcctcccaggaaaaccaaaaagaaccccccggggaaaggggcccctttaaattttttttccggggccaaatccctttttttttcccccccaggccccataaaaaatttttttttttttggaacaaagcgcttaataaaaatctccccttttccaaaagagtcggggttaacaattaggggggcccccttcacagaagctgcggaaaatttttttaaaaaatccttttgg

SEQ ID NO: 75415 - DNA, 600 bp, Glycine max
  Clone ID: PAT_MRT3847_39113C.1
agtacgggtagaacatccgtcctgttttccgtatacggctgcgtgaagaagacagaaagggacacataacacaacgcaacattcctttaaaatatggattggttctcctggctttccaaaacaggccttgagccaaccctagtgtatgagtatggccttacttttgctcacaacgagcttgaagaagaagacataacatacttcaaccatgagtttctcatgagcatgggaatctccatagccaaacacaggctagagattctcaagcttgcaaggaaagtgaagggaaagagggcggcaccaccacgccctgtggcaaggctcatggtggcgatcaagaggacaaagaggtgcttagccaattacattcgctcgttcatcagcacttgtgaagaagagtcatcagcacttgtggtggtgccatcatcatcatcaaggtcttattatgggacaagatggaagagtaatcatgtgatgaagaggaacaaaaagatggtggtggctaagcaagagaggctcttgctcacaaatggaagccctaatactgttgtgcatggtcttgatgctttcactagtcctaatattgtctatcatttccaa

SEQ ID NO: 75416 - DNA, 359 bp, Glycine max
  Clone ID: PAT_MRT3847_39114C.1
ggagggtcgtttcgcttgccattacttgggggaaaaccaaaaccgggtttctccttagggggcaagacttaaaaaaaacccccgtttacccggattgccttttcccccggggtaaaaaatttgagggggtaaattaaaaccctggctttgcctaaaatttcggctctcccaaagtttttaaaccccgggccccccccttttgggaggtaatttctttcactctttaaatttggacgttgtttttttcccttttccctgttgggaaactcagaaattgaaaaaaaccccagtttttgtttgcgtaacccccctccaaaggccctttgccctgcctgatttgttgccccaatttttccttg

SEQ ID NO: 75417 - DNA, 847 bp, Glycine max
  Clone ID: PAT_MRT3847_39115C.1
tatcaaagaaagaagtggatttgggtctccaagaataatgaatccgcatgcgccagagtttattcccagaagtgcttctcaaatagaagccaaggatgccaattcaaatgtttccaatgagcataaccctttgtctgacgaaggcatgccagaaaaaaacaagctagatgaaaattttgttgaaatcaaggggagctccacaaaaaacagtatttctgaatctgagaagtccgagatagcaaggcagatattgctcagttttctagtgaaatctgtcaaggaaaatattgattatgtggatgagtctaaggatgatgaaggaaaaattgagaacttggaaagttgttctgatgaaattaccaaagaccgtgctgtcataaacattatgtatggaaatgaagaaaagaataagacagtgcctcattccagtgatagcgttgagccagagaaattaggagttactgaaaataagaatggagatggtgaagggtttatagttgtctccctaattatttcaccaaaaaccaaatggaatggatggaccaaaaattctattttttgaagtggtaaactataaacaatatgatgtccaaagcttaggccagacaaacactcagatgtagagacaatatccgttatttatttcataactctattcaacgaactgaagcacaaatggactgttggttgtacaattctgtgactccatttgtgatcttctgcctgtttttcctcctcttcgagacaactataaacccttcaccatctccattctttttttcagtaacacctaatttctcttgctcatcactatcactggaatgaggcactgtcttattcttttctt

SEQ ID NO: 75418 - DNA, 268 bp, Glycine max
  Clone ID: PAT_MRT3847_39116C.1
tcaggctatacttcctgggggtccacagattcttctttacctgcttcctgagaagaagaattcttatctttatgggccatggaagaacaataatcttgctgactttgaaatcgcgactcaatgtatatctccgactactgacaatgaccaatatatgactaatgtgatgctgacaatcactgctaagcttggtaatctgatctcactactagatgttgaacattcaccttctactcctattgtttctaaaggaccgacattattactt

SEQ ID NO: 75419 - DNA, 272 bp, Glycine max
  Clone ID: PAT_MRT3847_39117C.1
gtccttgacaaaggtcagcttgctgcggtagcggaggcgacagtagtgtccacgagcatgatggaaggaggaagatgcatgcatgatgataaattgaggaggattcgtgctatgcattctacgctggcattctttaatagttactttactacattaagtgatatattaatacacagctagatatgatagtatcaaaggcatagatcgttgatattctgaatggataattgcattgatattctttaccacttaataaaattatagacgacccc

SEQ ID NO: 75420 - DNA, 435 bp, Glycine max
  Clone ID: PAT_MRT3847_39118C.1
agcggacgcttttttttttttttttttttttttttttttctcacacccccacatcattatttaactaccgttgtttttaaaaaaatattgccccccacaacctcaactcaactccagtaattctcataccgaaaccttcaaacgtaccatccttcactatagggacacaccttatatcttcccgtaaaaaaaaccaaaaaattctcccaaattctaaatataaacgatcacaacaccacacaacttacctacctgaaccttaaacaatcaaacctaatttcccctataatttcacttacaacaccaaccctccccaacctaactacaccctttccaaacctaaaccaaagctccttcttaatacaaatagccaccgcccctttaccttcttccgttacacaccttatcagaattattataccctaccacctccac

SEQ ID NO: 75421 - DNA, 1071 bp, Glycine max
  Clone ID: PAT_MRT3847_39119C.1
attttggaggagaaaggagtggagggtaagtttgatcttggaggttggagagaagagattaatgtgcagaaacacaagtttccattgggttacaagacattccaggacgcgatttctccgcagcatgctatcgaggttcttgatgagttgactaatggagatgctattgttagtactggggttgggcagcatcaaatgtgggctgcgcagttttacaagtacaagagaccgaggcagtggttgacctcagggggtcttggagccatgggttttggattgcctgcggctattggtgctgctgttgctaaccctggggctgttgtggttgacattgatggggatggtagtttcatcatgaatgttcaggagttggccactataagagtggagaatctcccagttaagatattgttgttgaacaatcagcatttgggtatggtggttcagtgggaggataggttctacaagtccaatagagctcacacctatcttggagatccgtctagcgagagcgagatattcccaaacatgctcaagtttgctgatgcttgtgggataccggcagcgcgagtgacgaagaaggaagagcttagagcggcaattcagagaatgttggacacccctggcccctaccttcttgatgtcattgtgccccatcaggagcatgtgttgccgatgattcccagtaatggatccttcaaggatgtgataactgagggtgatggtagaacgaggtactgattgcctagaccaaatgttccttgatgcttgttttgtacaatatatataagataatgctgtcctagttgcaggatttggcctgtggtgagcatcatagtctgtagtagttttggtagcaagacattttattttccttttatttaacttactacatgcagtagcatctatctatctctgtagtctgatatctcctgttgtctgtattgtgccgttggattttttgctgtagtgagactgaaaatgatgtgctagtaataatatttctgttagaaatctaagtagagaatctgttgaagaagtcaaaagctaatggaatcaggttacatattc

SEQ ID NO: 75422 - DNA, 501 bp, Glycine max
  Clone ID: PAT_MRT3847_3911C.1
cttatattgagtttatttgttcaatcactttttctttgtgatgggcaccaccaaaatgccaaccatgaatccagatagtttcaaattcatagaagccataataatattaatggtgtgtttgatgatgatgatgatgttgcaggttgtttgtgctgaagaggaaataatgtgcattgagagggagagggaagcactcctcttattcaaggctgcacttgtggatgactatggcatgctctcatcttggaccactgctgattgctgccggtgggaagggattcgctgcagcaacctcactgaccatattctaatgctcgaccttcacagtatttattcatacctcgttatacctcagaggagagatccacatgtcgttaatggagttgcaacaattaaactatttaaacctgatctgtcagattctggttctgaaggataattccaactcaggtaggctctctttctcatttgaaatactaaatctttctgggaatattatct

SEQ ID NO: 75423 - DNA, 1728 bp, Glycine max
  Clone ID: PAT_MRT3847_39120C.1
atcaccaagcacaactacctcatcctcgacgtcgacgacattccccgcatcgtcgccgaagccttcttcgtcgccacctccggccgccccggcccggtcctcatcgacatccccaaagacgtccaacagcaactcgccgtgcctaattgggacgagcccatcaacctccccgggtacctcgccaggcttcccaggccccccaccgaggcccaattagagcacattgtcagactcataaccgaggcccaaaagcccgtcctctacgtcggaggtggcagtttgaattccagtgatgaattgagacgctttgtggaactgactggtattcccgttgctagcactttaatgggccttggaacttatcctattggggatgaatattcccttcaaatgttgggtatgcatggtactgtttatgctaactatgctgttgacaatagtgatttgttgcttgcctttggggtaaggtttgatgaccgtgttactgggaagcttgaggcttttgctagtagggctaagattgttcacattgatattgattctgctgagattggaaagaataagcaggcgcatgtgtcggtttgcgcggatttgaagctggccttgcaggggattaatatgattttggagaaaaaaagagtggggggtggtaagcttgatcttggaggctggagggaagagattaatgtgcagaaacacaagtttccattgggttacaaaacattccaggacgccatttccccgcagcatgctattgaggttcttgatgagttgacaaatggggatgctattgttagtactggggttgggcagcatcaaatgtgggctgcacagttttacaagtacaagagaccgaggcagtggttgacctcggggggtcttggagccatgggttttggattgcctgcggctattggcgctgctgttgctaaccccggcgctgttgtggttgacattgatggagatggtagtttcatcatgaatgttcaagaattggcaactataagagtggagaatcttcctgttaagatattgttgttgaataatcagcatttgggcatggtggttcagtgggaggatcggttctacaagtccaatagagctcacacctatcttggagacccgtctagcgagaatgagatattcccaaacatgctcaagtttgctgacgcttgtgggataccggcagcgcgtgtgacgaagaaggaagagcttagagcagaaattcagaaaatgttggacacccctggcccctaccttcttgatgtcattgtgccacatcaggagcatgtgttgccgatgattcccagtaatggatccttcaaggatgtgataacggagggagacggtagaacgaggtactgattgcctagatcaaatgttccgtgatgcttggtttgtacaatatatatataagataatgctttcatagttgcaggatttggcctgtggtgagcatcatagtttgcagtagttttggtagcaagactttgtattttccttttatttagcttactatatgcagtagcagctatctctgtaatcttatatccatctcctgttgtttgtattgtgccgttgggttttttgatgtagtgagattgaaaatgatgtgctagtaatattattgctgttagaaatctaagcagagaatctgttgtagaaatcaaaagcaaatgaagcactttgaaaatgagatgaggatatcatgttttacatattcaaaaa

SEQ ID NO: 75424 - DNA, 171 bp, Glycine max
  Clone ID: PAT_MRT3847_39121C.1
cgtagctactgcaactagcctgtataagagagagaatctataagttatagaaactcacatgcaaccccttttaccgtttgcttaagggctgcttatttttcggttgcaaacagagggagagagagaaaagagggagcgtgtttcgttccaaaccgcactgaagaaatgact

SEQ ID NO: 75425 - DNA, 176 bp, Glycine max
  Clone ID: PAT_MRT3847_39122C.1
gctcgctttttttttttttttttgggttttgaacaaaaaaaattatttgttattgctaagcgaaagctgatctttggggtcccggaagggatcatgagtccgccccaccaaaataattaactaacatcttgtcggtagtggggcgttaggatgcgcgtcacgatctactaaaaaga

SEQ ID NO: 75426 - DNA, 223 bp, Glycine max
  unsure (1)..(223): unsure at all n locations
  Clone ID: PAT_MRT3847_39123C.1
tcttcttctggncnncctnggngaccttggctccggnaggacccttcttctcaacgntcttgatgactcccacancnccagntcnacccatgtccctaacnncnaacctcccaannggaggatacccnnaaaaagccccaacccccctgggnccggttggaatcatcttnccaaaccccccctcaccgnccttcaaaaacttggccttcttctcaatcttttt

SEQ ID NO: 75427 - DNA, 587 bp, Glycine max
  Clone ID: PAT_MRT3847_39124C.1
gtggggatattgcactttcctcttcaactgggccacgtttggtttatttgattgtattccacccgtccagcaaacttatacattagctgtcacatagacctatgatatgcggaacctgacatgacttacacttaatgaatggttaacaacacccacacggcctctctgtctggtgggactttaccagctctctttctctaacaagagcgcgcttgcaaggctgtccttgttacaacaggaagcgcatcctgtgcaatggtcgatactaaggaaataagtgagttttgccgcgaggtcaaaatgcgagacaacttagcatttggaaaggactcctatatggatttatgcgattatatttattacgctacaaatccttgcgaggagctagtctgtcgctgagtggaactcatttctgagagcagtgaatctatcgtcctcattgcagatacaagaggttgcatgcactagagacatctatgcatagtcctttacaccatgaggataccgcgacataaggtgtcgttgctccttctgaagctgctcctatcatagctgcgttgagcaagatagatttaaatttaacttac

SEQ ID NO: 75428 - DNA, 940 bp, Glycine max
  Clone ID: PAT_MRT3847_39125C.1
ccacgcgtccgaagaaacgacacaactaccaagttgactcattaataatatccaatcatggtgacacgccttttgttgttgcctcaagaagctgaaacttgccttttccaattacatctgtcacccttttggatattccatctatctatcttcttaggcattatttttagcaaattgccagtttaagcaaaagaaatatcttttcccgttttcatcgttgtaattggttttgcatctgttgggggctgatggtggaggtttgatgcgatcaatcctctcccagaaaaccacatattgcccttccgggttttcatccttccgaggttaaggttgtgggattttcatgcttatgtgggttgtgtaatttggaaggtgattaatggcaaatggttattcctcaaatgattgtttgaaaggaatagtagaaaattggtgtctgtcaggttcacagtatcagcttggcaaattgaaatagaatagagatttttcccaagagttgaagagttctggacaaaacttccggaacctgttttccatctctctcgaaaatcatgtggggctttgactgttacaaccaattccttgcgatgcttgagaaaatttgatttagttgttgttggttgttttggtgaatgcaatgatccatttgacagagaacacgatctgtccaacaaacctttttattatttcagaattttcggattgttcaagatttgatgacttcatgtcgggggtgtttgtccaaaagggaatttgaggccttttgatgaggctgtgaagggacccctgcttcgaaattcctgaatagtttagtcaattgtgttttttgtcgtgattgctaagggacatgaagtttctgagcattgtgggaaattcttttggatgttctgcatccggtgagcgcctagtttctgcagcaagagatggggatattcaagag

SEQ ID NO: 75429 - DNA, 745 bp, Glycine max
  Clone ID: PAT_MRT3847_39126C.1
catgaatttagtgtcatgaaacttgaagaattttaagcgtagtatgtagtatgtgtgctaggttgtttgtaggtaagtgtttggcttaatatttagttttagacatttagtgaaagcttattaattttggtgtgaatttttcatgaatttattgttacaaaactcagaagaattttaagtataaaattttgttctatcgtgctaggtagtttgtagggaagtttttggcttaaagtttagtttcagtgaaagcttattaatttctgtgcattcacaatgcaaagcagtgaggtcaaactaatatctgtgactgtgcaagttttgatttttcagtacttaactcttttctttcttacaggccagcctttgtattatttaagtagcaacatttgtttgtgattcacagaaatgaaatcccaacaaagaaaaaaattcagtatcattataccttatcctcttttaaacacagaaaaatgtaaacaaaacagcaatattaatactatagaggactctgattcatctacatgtctaccaaggaaactccatgatagaagccatatgctctgtgccaaataaagttacaaaagtactgctctcttagaaaatatatatttggtccccaaagacgaaagagcagcataagtttcccactgctgcaaagctttaaacttgctatttgtttttgcatttttatcctccagccttacaaaagtactgctctcttaaaaacttatatattggtccc

SEQ ID NO: 75430 - DNA, 260 bp, Glycine max
  Clone ID: PAT_MRT3847_39127C.1
acggcgagtttgcacttgtctaaaagagcgactgcatgagctatatcaagattgcttcagcgagtggcttctctgacatcaaccttatcatcataaaagcaacagccccagatgacttgcctctgcatgaaaaatacatacaacacctcttgaaactcttctccatctctccatctacgtgccactcctttgccatcagcttcactcgccgatttgggaccacgcgttgctggcgtgttgcactcaagtgtctcattctt

SEQ ID NO: 75431 - DNA, 461 bp, Glycine max
  Clone ID: PAT_MRT3847_39128C.1
tatttttttttttgtactttttttttttttttatttttttttgggtgtaggaagaccgatgcattagccaaacccagttattaaggcttgtgttaatgccaaaactcataaaatgaaacttttaacagaggttaatggggttcctataatgaggggggggggcgctatctcaaaagtcggcgctgtgaaaaaaggggggccttaagaagatctacttgagctagaatcctggtaaattctttctgtgggagacacaccacaaagcggtgactgggaccaagtttagagggtttaacccgggcgttaagggggcggggctacaaaacaaactccttaggaaatgccggttacttaaaatctgaggagtctgctttggagctttgccgaacactttttggggttttggcactgggccttgcatgaatgaacgatgattcctcctctaaaagaacacttgggct

SEQ ID NO: 75432 - DNA, 1475 bp, Glycine max
  Clone ID: PAT_MRT3847_39129C.1
ggtcaccacatcaattcatgcaaagatatctttgattgctccttaataatgtcatccttgacaccaaaaatgtctccttctctgtctcatctttttctcataaccctcattcttcatggctcttgctagctctgtggttgagcttcaagcctcttcagtaaagaagaaaactgcagtttccagaagttggattctgctggaccactatggcaaaggcactgttcttgatgcggataagtatgctatcatgcgcctggttcaaattcacgcaagagatcttcggattctcgaccctctcttatcgtatccttccaccattttgggcagagagaaagtcattgttctcaatttagagcacattaaagctatcatcactgcagatgaggtgttactaatagacataaaggatgatgacgttgtgacaattgttgaggaacttcgatgacgatttcccaaagaatgtgctgctgagcaaggccaaggaaaagaagaggcttgggctcaagatggtgaaggtggagaagaaaatgaatttccatttgagatacgagctttggaagttttatttgaggcaatttgtagtttccttgatgcacgaacgagagagctagagacttctgcttatccagctttggacgaactgacctctaagatcagtagtcgtaatttggatagagtgcggaaattgaaatgtgcaatgaccaggttgacaattcgagttcaaaagattagggatgaactagaaaacctacttgatgacgacgacgacatggctgatctttacttatcaagaaaattggctgcttcatcctctccaactagtagctctgatgctccatactggctttatgggtctccaaatacaggttcaaaacgacacaaatcaagcagagcaagtggaacaacagttcaaagggagaatgatgttgaggagctcgaaatgttacttgaggcctatttcatgcaaattgacggcacattaaataaattggccacattgcgagaatatatcgatgacacagaagattacatcaacatacagcttgacaatcaccgaaatcaactgattcagctagagctcttcattagtgccgggactgtctgtatgtccttatattcattggtggctgcaatatttggtatgaacataccatatacatggaaagcaccaggccatgaacatgtgtttaaatgggtggtgatctttggcggaatggtttgtgcatccttgtttttatccatagtatcgtatgcccgacgcaaaggccttgttgggtcttgaaaaatgaaaagaataaagcatgcatgtcgggagacatcaggttaagtcaaaagtaggcaatttcgacacattgcctcaaaacaatactatagtaatttgcttttatcttttttctatatggagggtcaaatatagtaccagaactttataacattcacttattctattcaatcataaactagactttctttat

SEQ ID NO: 75433 - DNA, 672 bp, Glycine max
  Clone ID: PAT_MRT3847_3912C.1
aatagaaagttttcattaaaaattcatctagatgcattaataatgtttttattaggaaaagacttttcacttttaagttttaattccttaactagcatattcaccctaattatgatttaatttacagttatgttcaagtgaaaacggcacaaccttgaacctcgactactttggcggtggggcagtgagccaatgtacatccgtcaaggtcattcccccaccaattgagactaatgtcctccaatccaaggcatagatacaaaagcacccccatgaaggcaagccctgcatcaagtgcccctgagagcacataattgtgacgcttccaccattcgggcttgtatctgaacacaacgaagccagagagaaaccccgcaatgatccagctcgtgtaattcaccgccgtcgccggaggcatcattccggtggcccctatcaacactggcatgtttatgagcctaatccactcttgttgtgggaacgaccttgccgccaaccaaaccagtaatggagcaatggctcctcctaggaagaaccaattcactttctcgtacgttcccaggtctccgaatattcttctcggcccaatcaaaccccaataaccgatgcgtcgtagaacactgtgtcacttggacacgtccatacagaggacgtgtctttgcatatgtctgg

SEQ ID NO: 75434 - DNA, 696 bp, Glycine max
  unsure (1)..(696): unsure at all n locations
  Clone ID: PAT_MRT3847_39130C.1
nnnnnnnnnnnnnggnnnnnnnggacccacgcgtccgtctttttctataaccctctttctccatggctcttgctggctctgtggttgagcttcaagcctcttcagtaaagaagaaaactgcagtttccagaagttggattctgctggaccactatggcaaaggcactgttcttgatgcggataagtatgctatcatgcgcctggttcaaattcacgccagagatcttcggattctcgaccctctcttatcgtatccttccaccattttgggcagagagaaagtcattgttctcaatttagagcacattaaagctatcatcactgcagatgaggtgttgctaagagacccaacggatgatgacgttgttccaattgttgaggaacttcgacgacggttacccaaagtaagtgctgctgagcaaggccaaggagaagaagaggcgtgtgctcaagatggtgaaggtggagaagaaaatgtttttgcttctgttgcaataatggaaaattggcttttatggctggtagaatttccatttgagatacgagctttggaagttttatttgaggcaatttgtagtttccttgatgcacgaacgagagagctagagacttctgcttatccagctttggacgaactgacctctaagatcagtagtcgtaatttggatagagtgcggaaattgaaatgtgcaatga

SEQ ID NO: 75435 - DNA, 512 bp, Glycine max
  Clone ID: PAT_MRT3847_39131C.1
attccaactattgagtatgccaattatctacttaaaaaacagtatctgcacttgcaagtataaggcaaaagttcaattcagtttcaactgaatctgttattattataatacagtaatacataagtttacattgtccactcttctagtggttttggaactacaagataaaaattattgaactcaacaaattattgggggttatcaatgtacatctccataatttgtcatcagtagaacaggttagaacaagtgtgtggagaatgatgatggtggtaaaggggcatattcatagattcatcagtaggggttttatttgtttataaatctctttagacaaacaaccggtaaattcttgtttctagtgtccttgaggttgaatttttaacagggaaatggtgaaacgaaccttgtgaatatgtaacattgtagactttcagtgtaattctgttctgcttctgatgtatcatggttatagtatagtaatgaaattttagaaatatctgttaataatc

SEQ ID NO: 75436 - DNA, 672 bp, Glycine max
  Clone ID: PAT_MRT3847_39132C.1
attataaagaaagtctagctcatgattgaatagaataagtgaatgttataaagttctggtactatatttgactctccatatagaaaaaagataaaagcaaattactatagtattgttttgaggcaatgtgtcgaaattgcctacttttgacttaacctgatgtctcccgacatgcatgctttattcttttcatttttcaagacccaacaaggcctttgcgtcgggcatacgatactatggataaaaacaaggatgcacaaaccattccgccaaagatcaccacccatttaaacacatgttcatggcctggtgctttccatgtatatggtatgttcataccaaatatagcagccaccaatgaatataaggacatacagacagtcccggcactaatgaagagctctagctgaatcagttgatttcggtgattgtcaagctgcatgcatgtgcgacatgttacaaacagttgttatgctataagtggtgtgttcaaattctgtatgttgatgtaatcttctgtgtcatcgatatattctcgcaatgtggccaatttatttaatgtgccgtcaatttgcatgaaataggcctcaagtaacatttcgagctcctcaacatcattctccctttgaactgttgttccactaactctgcttgatttgggtctttttgaac

SEQ ID NO: 75437 - DNA, 141 bp, Glycine max
  Clone ID: PAT_MRT3847_39133C.1
attcaaagactaatttccattcagtaaaatgcaaaaaatacacagaaaaagatgaaatttagacttgagtaacttcttatttttgggggtacaaaacttttacctgagggaactagctacattttaaaagaatcttgagcc

SEQ ID NO: 75438 - DNA, 414 bp, Glycine max
  Clone ID: PAT_MRT3847_39134C.1
aaaacacacatcttcatgaactaatacaatcgtactgaatgtacaattcatatcagggagagatgatagcaccgggcatcgtgccttggccaacatggttgctccattcaccggcctaaaatcggtgggtggctttacaagatcgaagaccaccaacgccagcacgctacttgatagcaacggtatgaagagaacataagcatgcttgagtggccaccaattgacaacaagaagactgagactaccttgtacgttgccaaacctaattgatgcccaatagcaacaggatgtccaataccgtcgtttatgaaaggataggacccctcgcttggaatcttagaacaagcacgcattctggatgcgtgagcacaccacgccatgtgcatactattatgcacgctactggaccatgtt

SEQ ID NO: 75439 - DNA, 631 bp, Glycine max
  Clone ID: PAT_MRT3847_39135C.1
cggtccggaacccacgcgtccgcaacttatcacacaactcggtttcatattgcatagtgagagagttacgtacgaggattcttacgcacaacacatcacacagtgagagaggtatacgtacgaggatgtctgacattgctatgttggtggcggaggagtatgagaggagggtcaagagtttaagaaaggccggtggtggtggaaccggagcgggggaatttgacatggtttcttgtgtttcggtgatggtgtctaggctcaaggaaaagaagcagcttcttcaatgggtttgggagcccaagacccaagttgccatggctgcttccaacagcttcttctctgcttaaacaactcattcatcaactcctctggactctgacgtgcttggtgattgattgttgcaaccaattgttatctagtttttccatattctaattttcatgaaatattgtacatagctatgttttgaatttaaatcaaaggcaaagcattattctgtttccttagatgttaaatttagaaaacaacatcattgcaaagtatttatctgttttgatgatatttattggaaaacttgagtgtagtcttttcttatttatcaaaaaaaaaaaaaaaaaaaaagagggggggc

SEQ ID NO: 75440 - DNA, 229 bp, Glycine max
  Clone ID: PAT_MRT3847_39136C.1
gggggagtttaaaggaagaagaaagaacagaacgccgaaaaaaagaagtcctatagaacaaaggttgaaaaagaggtaaccttttgtggaatggttaaggaagaagggtttaaaatcctattatgtttctgaagcaaaaaatgcattagaaaatcgtggagaaatcacaatgttatttctggggtaaaaatgggtgtttgaagcctatatcatagtagtcctgctataa

SEQ ID NO: 75441 - DNA, 413 bp, Glycine max
  unsure (1)..(413): unsure at all n locations
  Clone ID: PAT_MRT3847_39137C.1
attacgtcagattgtggagcagtctctatcattcacgatgagcaaggttatgcaaaaactgcagaggacgctatagccgatgtctttagggcagggatggatgtggagtgtggtgattacataaccaagcatggaaaatcagcagtgtcccagaaaaaactgcccatatctcaaatcgatcgtgcccttcaaaacctcttctccattagaataagactaggcctattagatggaaaccccaccaagcttccatttggcacaattggtcccgatcaagtgtgctccaaacaaagcctncaactagccctcgaggcaacaggggatggcataatccttctaaagaacacaaactcacttcctccaacttccaaaaacaaaccccactattgccttaataggccccaatgccaatg

SEQ ID NO: 75442 - DNA, 124 bp, Glycine max
  Clone ID: PAT_MRT3847_39138C.1
tgtccttatatgggcgttaattacaccagttgcactgacaaaaacttatctggatcaactacaactatcgggggtgctgactaattaatggggacttcacgcaccggatcgtcgaaggtcacac

SEQ ID NO: 75443 - DNA, 248 bp, Glycine max
  Clone ID: PAT_MRT3847_39139C.1
tagcgtctccgcatcctcgatcatcggatcataccccgaccgatcatttgatctatctatattctaaatgatatctaccctccaaacaatcctgcccgactctgactgtgctataaatgggcacctttcgtaggtggtactcacattccacctcttgaaagattttcccactatcatctctaataacatttagaagaatcttgatgaatctttttaacccatcgtgatcatctacttgaactctatct

SEQ ID NO: 75444 - DNA, 471 bp, Glycine max
  unsure (1)..(471): unsure at all n locations
  Clone ID: PAT_MRT3847_3913C.1
gccaccgtcgttgatgaaacttcgtgttcttctgctgaaaaggagaacatgtttctgatgaagagggttgtattcaagtaagtttgtcattgaaaactgaggaggtcagcctgatactttgaaattgctgtgtagaactaaaaaccatgggacagcttattattacttatagttttggtcttggtttctttgcccctatatgggaacatgataggcactacgatcttaaaggtgctgggatatnggcatgttttgaccctttctgaatcctgtctgtaagaatcgaagacattagccccttatgtccgttacgcacggagctcatatacaatggatgccggtatgtttatggttaacacaaagagttcctggtctgaatggagatcaccagatttgcttctgaaatctgacacttgtgatgaaatctactgtgggtgatcccttcagcagttgaccgggatcatgtttgat

SEQ ID NO: 75445 - DNA, 1193 bp, Glycine max
  unsure (1)..(1193): unsure at all n locations
  Clone ID: PAT_MRT3847_39140C.1
ccgatcttcgtttcttcaccgctcccacatcccccgtactgaaaatatcgaaacttacagattggggaagaatcactggtgtagcattatgagcatgcaaagagagaagatggcgaagaaatccattggaagcttaatgcgaaagaagctttctgatatcaccaacaacaccaatcctcctctctctcaacaacaacttgacactactcttccctccgataacaatttcattcaacaactcctcaaggaaagaacagcgttgattcaactccttgcggaaagaaataaaataattgaagcgagtggggtggagctgcggaggctgagagcagatgtgacgaagctgcaaatccaaaactggaaccttgctcagtccaatagccacatgttagcggagcttaacatggggagggaaaggattaaaacgctgcaacatgaaattttgtggagggctgctttgattaaaggaaagaacgtggacgtgcaggaaaaagtggagattgactgcgaaaagaatcctacattatcacagttacccgaagcgtccgaaaaagcaggagtgccatcccctaaagccagcaatgatgaacaacacaaatgtatgaatagaagacgcataaggagtaaatctactggttcttctactgcttccaagaatacaaacaaagacaaggttaaagacaataggagacgtttgaggagacattctactacgttcaaaacccatgaacatgaacctctagagaatttgttcgagttagaggatgctacatatcttgtaactcaatctccaacttcaaaaactgaaagaggaaaaagctctgcttcaaggaatgaagctacaaggtgttctttcgaaagacccttgcgaagagcagttcagaaggttcattcttacaaggagattcccgtaaatgtcaagatgcgaagactagactaagctaaattaactgctaaaattatatttaatgttctgtctttaatcatttaacatatgtatcctatgatggtgttgattagtatgttgtgttgtatccaacatgttcctagctcgttggctttcatcgagttctttcactttaatcactattttttattagttgataataacagtcacttaggacgaatcttaggtgataataacattcttatgtcaaaaaaaaaaaaaaaaaaaaagcggccgctntagagga

SEQ ID NO: 75446 - DNA, 295 bp, Glycine max
  unsure (1)..(295): unsure at all n locations
  Clone ID: PAT_MRT3847_39141C.1
gcagggggcaacggaccgaacggagcgggaaaaccccagaacaaggncncaaagacaaaaaaaaaaacacacaccaaggacacaagagcaaaaccgccaaacaacaacgcccnggcgggcgggggcggcagagacggggccaacccaaacaccaccccccccagggggggcacgcgagcaccgaggcaacgcgcacacccacaggaagccacacggcgggcgcgccccccgagcccaacgccggccgacgagcgaccaaccgcaccagaaggaccggcgcccccaagcccgagga

SEQ ID NO: 75447 - DNA, 244 bp, Glycine max
  Clone ID: PAT_MRT3847_39142C.1
aatgactaacgcatccttggatctctttctacctcttttcttcgcgactggttgcactttgaacctaaggcagagatgccacagagtctcctctgccttagagaaactctcacgatggcggttcaggactttgatctcatctcagagaggagaaggaacgagaagaggcaagaggcgaggtagaggatcctgaatagcgtggtctcttccgatgtgctcgattccatgataggtgcagtactct

SEQ ID NO: 75448 - DNA, 458 bp, Glycine max
  Clone ID: PAT_MRT3847_39143C.1
gctgtcgccgtggtttcagcaatatctccccaagtgtgctatgcactgtgcttgtaccatgcccacatcctgtttttgatgaacgtccacaacccaatgctccccagctaaatggtcacccattttctcctttatttaacttaaatcaggaattatccgaagcttctgcatagcttgttaactaatgatacctgaccactctaatctctaaatagggctgcaatttgtttgtgcggcaggatcatgatgtataatcttatagagggcatattgtatactagttgataagttaaacaataatggtgccattatttttgtctaattaaacatgttctgcggcctgaccagtgtaatttcaagctgaaactgtactgagattggtgtgcttgatgattgcgacttatcatacaagtatgataccttttgattctctgatgatactgatgatcttatttcct

SEQ ID NO: 75449 - DNA, 661 bp, Glycine max
  Clone ID: PAT_MRT3847_39144C.1
gcaccagtttacataagtctgcataatagtaaaccactgtctaatccaacatattgaagcttttagaatctataaggtcagctagtggattgttgaattattttggctatcaagtatctcttgttgtgtctaacataaagataacacttacttatttgtttttgtttaattttgttgtttctagaaattattgacttaccattaaattaagtactgctaggcatgccataaggtaggttttgatgtcaatattacagacccaacctaacctagcagaattgtttagtttttctgcttggaaattatatgcctattatattgagactggtgcagcggtaaagttgtgccttggtgacttgttggtcatgggttcgaatccggaaacagcctctttgcatatgcaagggtaaggctgcgtacaatatccctcccccataccttcgcataacgaagagcctctgggcaatggggtacgaagttttttttattgcccttctgtcgtcttctcgcagccgtatccttctgtcgtcttctcgcagccgtacccttctgtcgtcttctcgcagccgtacccttctgtcgtcttctcgcagccgtacccttctgtcgtcttctcgcagccgtacccttctgtcgtcttctccagccgtcggacgcgtgg

SEQ ID NO: 75450 - DNA, 345 bp, Glycine max
  Clone ID: PAT_MRT3847_39145C.1
cccacgcgtccgaaaaaaaaaaaaaagagatataaaaaaataaaaaaaaagaaaaaaaaagagaaataataaaaaagaaactagaaaaaaaaaaactaaaaaaacaataaataataaacaagtgttccatcgttttaatggtcccaagtttccttatacttccttattactttttaattttttttttgtgtcacctttttaaaattcattgcctttccttttaaaacatcattcctgtaaatacctttgattctccaaacttattcacctttcaaaccatccccttttttcaaatttccttattacctaaattgccctgcccaatagactttcccaacattttcc

SEQ ID NO: 75451 - DNA, 384 bp, Glycine max
  Clone ID: PAT_MRT3847_39146C.1
ttattatcaagacaccttttattaaaatatggaacataatcataaacaaccaattaccaaaatacattataaccacacatcacaaaactcacttacgcatacatgctatactaatccaacaagcatacaccctttaaacaagtatagtaattccacaactcattgggccaacaagacccttttatttgaaataaaaggcattacaaaagcaaacaaacattaaaaaccgggaatgtgggaaaaatatttcttcctcggtttcttattcttcacttcttaatccaatcaattaaaaggttaacatttctttccaaattttagaattctttttttattcccctttaaagccctttttataccccacttcactttttttcttttttt

SEQ ID NO: 75452 - DNA, 165 bp, Glycine max
  Clone ID: PAT_MRT3847_39147C.1
gctcatgagaaccctagggccttcccttggatctttggcacaatctacctggagtcttctatccaatgcccttgcgggcgatcacaagagcctcaaatacttgttcgatcagaaggaactcaatatgaggcaatgaagatggatggagttcctcaaagattatga

SEQ ID NO: 75453 - DNA, 475 bp, Glycine max
  Clone ID: PAT_MRT3847_39148C.1
tcgtccacgcgtccgattttatttatgcatgtctctggaattcctgcaatgaggacttaatatggacatgcatgaggttttcccagtcaaatttgtgctctgataattgatttcgcccagaattttcatttttgcaagtgcattagttgttacttgtaccgattcctcttctttgcctgcaggtctaagaagtgcaggtcaaatgcatgcttcattcaccactgacgggaaacatatcatctcagttagcgaggattcacatgtatgtatctggaattacaccggccaagataggagtacctccaaagcaaagaaaatttggtcttcagagagttttctctcccacaatgcagccattgctgtaccttggtgtggcattgagtcaatgccaggaacactcttatccccatcgctaggagaggatgtgaatcagaagtgttctctgccttctcctgattggttcttcttgagtcgt

SEQ ID NO: 75454 - DNA, 400 bp, Glycine max
  Clone ID: PAT_MRT3847_39149C.1
ccacgcctacccacgcttccatacgactacaaaaagaccacagcataatgatactagcttcactatcataacactgggttttttaatacatacgtaatcaatctcatacgaaaccaaaggcactactaaacttcttcttcataacaatcactgcaacgctctatttacatacgtcactctgaaccagaacaattcttaaaacacatatcttaagactacctaaatctctcaaattcgatccaatctttctatataaaattactaagccatgataacatttcacctacaactcatcactacctgatgccattcaagaatatgcctaagctttttctcaataactttcaacaatttattactctcaactctttccaaactacacaacatgtgtttattcaaa

SEQ ID NO: 75455 - DNA, 1316 bp, Glycine max
  Clone ID: PAT_MRT3847_3914C.1
gctctctgcatccaaacccgtcaacctttgctcattatgccataaataaatcaattataacagattagtttgtaggtttacgaggtggagatttttagtgatcaactatttggtttgctcagctaaagaatcattcaaggatccagctgagcaagtacgaggaagatgggatctttcataggtcatatattgccagggaccttgtttcttctagttgggacatggcatatatggggctctgtgatgagatatgtgtcaaaccctaagacattcagagtccaggtgtggaatcctgtaccggggtttaatgggaggctcaagcacttggagctctatgtcatttcaattggtgctttcatagatttgtgtgtggagctcttacttgcaacccgcctcaggttttttgttgggggagccttgaacaccacttacttcaacaactttgagcactcgggaatgcttctgatgtttcttatctttggtgttgttgctctcctctcagaaaagacaagacgtcttcccttgcctgaaaatgctctttgtttgattgctgctgcagcattctgtgcagagtatcttctattctactttcactcaacaacacacaaaggccttgaaggctattaccatgtcctccttgctttcctcattgggctttgcattatatcttcagtttctggtgcccttttgccaaccagcttcccagtagatttatgtaatggtattgctatagcgctgcaaggaatctggttctatcaaaccgcttttgttctttacggccccatgctaccatctggttgtaagctcagggatagtaatatcacatgtcacccaaaagagagtgaggttcggggtgaattgtttgctaacgctcaactctttgttgcagtccttgctgttcttgtaggaactgtagcatcctatggctttgcagcttcaagatatgggaactgtgaagagcttgctagcaatgctagttgaattgaactaggaactgtgcatgcatcaattctggtggtggggagttagcatagatgcacgaagacttaagtctgattctcattgttgtgattgtatgcacatggaatgaagtaccaatatggtttggcatggttgacagataactttatttcttaaacatgtaattaggggtttgatctctaggttcatatgtatgaaaaaatatttgttgcaagatatcagtctcttaaatggatttaaacatctccaagaattagtcttttgcttcttgactagggaatattctggccaaaagaaatgaggaatgaagtagactatgcaataaattggcagcc

SEQ ID NO: 75456 - DNA, 350 bp, Glycine max
  Clone ID: PAT_MRT3847_39150C.1
ggcaaactgcaccggcgaagactgacaccatgaggggtccttcacacggagggacatcaaatgatatggtaatcaattatccggcgcttactgatctgattcaaatgtctaatgaaaggaaggacatcatacgctatgaaatgtatgaccaaaaggttgagatttacaatgaacaagtgagagacctacttgcagaggacatgacagacatcggagtagaaattcggagctgcaatgaagactggctgcgccttactgacgccatattgcatacagagaagtctgcaactgacgctatgaccctcatcaaactaggagaggataatcccgccgccagaatcactgcaaag

SEQ ID NO: 75457 - DNA, 462 bp, Glycine max
  Clone ID: PAT_MRT3847_39151C.1
cgtagctggatcttaagcggtgcctttttttatcatattcattttccctctagagtcaggctggaactgtcggggtgggctgtgaaaaccaccttgtagatagccccagcatttccccttccgtgaaaaggcccggccaagaaatcccaggggtgggccagggtccagttaacaacagcaggccaaatggtaaaagaagggttaatggttgttccgaaaaaggcccaacccaccaaatggttagcgccaccattgaaaccaagggcaatggaagcattatttccaaaatggccttttttggggtcaccggaaggggcgtaaactgtgtccaccaaaccgaaggtattaacgatctccaccaccaaagcgttgccaactccaactccagcggaaagcccgattgctgaaccagggaaggcattgacaaaggcaagaaggaggaaggccacaatggacccaagg

SEQ ID NO: 75458 - DNA, 374 bp, Glycine max
  Clone ID: PAT_MRT3847_39152C.1
tttttgccataagcacccttactattgagttgctcaccggggcaagctaatgcattaactaacctgatgaaatgatcctatacaagtggcaacttttatttcacccattcccaatttcaaacctattttcgctatttgacggcacaaacttggcactctgtaattaacaaggaggtccaaggcagcgccgcaaggtaccaacatgagattacatagtgagcatttcctctgtctacctatggtacgacatctattagaggatctggatatcaacagtcagaagcagaaaacagcttcgattttggacgacatacgggtggattagaaggatggggactcgcaacaacggggtcatttattttttaggagatttc

SEQ ID NO: 75459 - DNA, 524 bp, Glycine max
  Clone ID: PAT_MRT3847_39153C.1
gtctttctctctcgacataaatgatatatatatatatatatattcactttgtattgtgttcactcctccaagttattcttttctaggtaacaatttatatacagggaaaaagcgtaagacattctcctgctctttattctttgcttctcaaacacaaagtggatgaaatcatgctttcattttttcgtttatgttttaacttagttcaattttaacaactttctgaacctacttatttcattttgtaagcatgcccgatacattgattgaaaataataatcaatcataatcttttcacttcgacatctctttttttctttcttcatatccatcatttcataatctttttttctctctctcttagttatcatgtgtaattactatagtatatactaaagtctaaagagatgtcaaatgattattatttaatcaataggttgttggttagactgaaattaaacttcaatcctttaagaacctagtgaatgaaaaataaacgactgaatgagatattttattaaaag

SEQ ID NO: 75460 - DNA, 807 bp, Glycine max
  unsure (1)..(807): unsure at all n locations
  Clone ID: PAT_MRT3847_39154C.1
cttgcatgccctgcagttatgtccccatcaccgaagtcagtagcagcaagaagttgcagtaagcatcttttttataaggagatgggcaggttgaaagcacagcatcagcagctgttgaagcagtagaactaatccatgatgccccaatctgcgcctctcttcctacattttcctgtaagtagattggttcttccttaattcgtgcagaaaaggaacccaaatgtgcagaagcctctgagaggcgcatttgcgaaaatgcctgaagaaaagataaaaagaatttacacattggcatgttacaaggggatgaagtgtaatttaccctgaaaaaagaaatactgaatgaaagaaagtcaagatacatgtgtaaaacacaatcagacactggcacttaaaaccaagaccactttttatagaacttagctaaagatgcagcagcacataaaaaagaatcaatactgtattcaacaatagacacctgaggaacatggtatacactaaatgaacagataaattttgaattagttggcttacttgaagagcgcggatgaatggaagcaaggggcatgatggaaggaacatctcgaatgcccttagcaagggcaagaacaattgttgttcacaaagcactgcaaccatctttgagagagaagcaggcccttcatcggaattactaggaacattaatgcatccaaaatgttctatttttctatcattctccatagttntaccttgggaatcaaatattttttcacttatagaagagctagagatgtcagatattgcagaagcagaggagtctagtga

SEQ ID NO: 75461 - DNA, 311 bp, Glycine max
  Clone ID: PAT_MRT3847_39155C.1
gactctcagttcctcacacgctgtatatctgtgtgagggagttcactctgtctatatttgcatcattcatcgctgatggctctgctccaaactgttaaggctattgttcattctcccaatggtttctcttatctttcattgagaaaaaaagtcctcacaaccttcgccgaaaagaacataccttccaacccccacctcatctgtctgagaaaccaacccggatggtgccagtgtgtcaatcctaaagcaaatgggccactgattcttatttatttcagatgatactctaataataatacccataaccctat

SEQ ID NO: 75462 - DNA, 510 bp, Glycine max
  Clone ID: PAT_MRT3847_39156C.1
ggctcgagaagaaatatttgttgtcaaaggtaaaactatggagaatgatagaaaaatataacattttggatgcattaatgttccaagtgattcccatgaagggcctgcttctctctcaaagatggttgcagtgctttgtgaacaacaattgttcttgcccttgctaagggcatttgagatgttccttccatcatgccccttgctaccattcatccgtgctcttcaagcattttcgcaaatgcgcctctcagaagcttctgcacatttgggctccttttctgcacgaattaaggaagaacctttctacttacaggcaaatgtaggaagagaggcgcagattggggcatcatggattagttctactgcttcaacagctgctgatgctgtgctttcaacctgtgcatctccttatgaaaaaagatgcttactgcaacttcttgctgctactgactttggtgatggtggacatactgctgcacactatcgaaggttttattggaaaattatctg

SEQ ID NO: 75463 - DNA, 404 bp, Glycine max
  Clone ID: PAT_MRT3847_39157C.1
aaaacgaaaatagaaatctaaaatttaaattaaaaacatacaaaaaaatttttaaatagtaataggaaaatcaatcgccatgatgcccgggaagaggggaggatgggccgaatgagggtccccatcttcgggctggttaaaaaaaatttttttaaccaggaaatccccccttttaaactggggcagcctaaaaaatgggagcatcatgttggggggaaggggtcatagaaggccatgaaaattggggatatgttttcgaaacaccacctaaagaatgttcgttggcaaaagtatcactttgaggaccttcggaacgaaaaagaaacattgggggcggatactgagaaaaggctggggggctataaaacattccatgaccacgctttaccatacgggggaacaaa

SEQ ID NO: 75464 - DNA, 386 bp, Glycine max
  Clone ID: PAT_MRT3847_39158C.1
attgtttccaatgagccatttgccctggctatacatgaaagggtcgattggtgggacagatacgttgtaatatgccctgagaatgggacagatacccttgttagagctcagagatccttggggacgaacgagatgacaccgacaagtgcgctgaccgccacctattgcaggcttggaatgcgctacaaggctttcgaagggcaacccccgcttcttgagggcgccgtaccgacaacaaacatcgtcacgcccggatgcaattcagctacaggctccactactgcaggtgcgggacgcacagtgagagcctttacaagcacattgcgttgtgctgcgcctgctttagggccgtcgcacgggggctaatgagcaggggacgtgtggag

SEQ ID NO: 75465 - DNA, 548 bp, Glycine max
  Clone ID: PAT_MRT3847_39159C.1
gtgatagacaggccaggccatctaacatggttagttagctagccctctatatatgaatatagtatatgatttggttcaccactccttctgtcccttttaactcctccatcaagcttctcaaatcttctgcatcaaactccagttcagtccttggagttggagaaggcatcaggaaacatggcaagcgaagcaccaagttgggctgatcaatggggtgctggtggtattggtgccatggaagctgatgacacaatatcacaaaaggaaaccggcaagaacaagagttcaggttcaaagggtgctttcggcaaagtcaaagcaactgcctcaaattgtgtcaaatggttaaaaagtttgtgcaagagaaagagtacaaccaagtaaaccagaggatgtactgtgtgtgtgtgcacttgtaattcagcaccatggcagataccagttttgtaaccttatttttttcttttaatgatttggtgtttcagtcacttaagctcgaacagattctagaggaagatgctatttaaagttagtattagtgggtcact

SEQ ID NO: 75466 - DNA, 424 bp, Glycine max
  Clone ID: PAT_MRT3847_3915C.1
accccggccccattaaggtggtttggggcagaagccaaattcaacggtttaaaaccttgaccaaagaaatttggaaaccaaaaccttggaccaaacctcccaggccctcaggttttttattccaaaggggggttttttaaggcggaattggttggttgggcggaattcctttccctagcttcttaatggatggatggctaaacaccctacccctggggcggggatatccagggtttggccccctggccattagggaccacttggcccttccgagtagcaaattcagtgccaggggcttcctgcacgtgaatggtctggaagctacccttaggctcttccctgttctggatcactcacacacccccccggtttcttccacctgttaccataactactttcccaacatcaaattggataaaatcga

SEQ ID NO: 75467 - DNA, 703 bp, Glycine max
  unsure (1)..(703): unsure at all n locations
  Clone ID: PAT_MRT3847_39160C.1
gcacgaanaacaaaccgttggggaactccaaatttctccntgaaggaataggaaaatattgggangaaggttattggcaagggaaaaaaaattcccangaacttancccaaantntaagaatcttgggtttggggccaanaaaaanaaaccttccaacatttggcaagtnaanccaaaantgctggggaattcccctgcccaaggaattcntccggttcaaananaaattcttttnaccncccaaactatnaaccttttgggatattatgggatgggttttgggtttactggaaaatccttcctccnncccctcccatttgtgggtttcncccctttgttcncccnccnccncnctccnntttttttccnggcnaanaaattccnttacctaaccccccnttcttttccctttaanggaattaattatttcccaccntttccttttccttnttncccttnancnccccantttaangtttttatnntccccnnnnnnnaaacccaaattnaacccccccnaattcccttttttaactttttttnnaaattttaattttttgttttcccgggggaatnaaaagggaaaatnnttttnaaattcccccttttccccannaccnttngccccccanttttttgttttgttttnnnnnnaaaaaaaaaaaaaaaactcccaaagggggggggccccnggttnccccc

SEQ ID NO: 75468 - DNA, 694 bp, Glycine max
  Clone ID: PAT_MRT3847_39161C.1
aagaattttaatttataagaattttctgccgctccaaaattccttccagcttcgttccaccttgtatgttcgttgctgtttgctcgatcccctccaacgtgtccctccacccaggcagggtttctatttcacttttccttccaccgatactaccaaagaacaaggagatcgcaatcgcaattcttaattctcagacgcactttcgccaaatcgaagtacattattgattccttccgtgatgagagagcccagagatggagccaataacaagccctctaaagccgccgccgccgccgccgcatcaccgcctcagtccttccctctcattctcgacgtcgacgatttcaagggagacttctcgttcgacgcgttgttcgggaacctcgtcaacgagcttcttccgacgttcaaattggaggaatctgaatcggacggcggagatgctctcccgaacggccatctccgcgtgccatccaccgatgggtccaagtactcgcaggggattgtgagtccgttgtttcctgaggtcgagaagctcctgtcgttgttcaaggattcttgtaaggagctgcttgagcttcgtaaacagattgatgggagactctacaatctcaagaaagatgtttcggttcaagactctaagcatcggaagacacttgctgagctagagaaaggtgtggatggattgtttgac

SEQ ID NO: 75469 - DNA, 1070 bp, Glycine max
  Clone ID: PAT_MRT3847_39162C.1
gcgaaaatcggagccctaaattgagagtgctacagctccgacccggatcgaaacaaaacacctgaacgacgcacacgatgtaatagcgaaacgaaaaaaccgagcaagatccaggaacgaggaagccagaatcgaaacctgcatcatcattaccatggtgatgatgacgaggaagcgccggcgcatgacggcggtgacggcggcctgccggagggtctgatgatcgagatccttgtttggattagggtcagcaatccgctgcaattgaggtgcgtgtgcaagcggtggaaatccctagtggtggatccccaattcgtgaagaagcatttgcacacatcgctctcggacatcacggatctcgcgtccaatgccatggaggacatgaacgcgtttcaattgtagctcaattatgcccctgccttgacatgaacgagttggctcagttggataacattttggtggtggttcgatcgctgaaagggagcttggaaatgattaaggttgacgtgcaagcgatcaaggagagagagtgaagtgtctccagatttagctcaagacaacaacagcttcttcctccttctcctcctcttcacactccatgtgattgattctccttttttttttcaactgtttatttataaataatttcacatggctgcttcctttttttttttaaaaaaaaaaaagatgatttgaaatcacaatgatgtaagttggagaggagtaaattatttgggggctttgatattattgttggtgttcagagatgagagatgggtcatgtggaagtaacctgatcacattgtcttcttcttgctggaacaacaaagctattctttctgcccacatgtgaatgaattgtaaattattttgtttctgctcacatttctgaagcgattatggggtctatcttacaaatgtatttttctataatgtttacacattatttaatgatttgaatggttgatgtgatcgatatcatgtgtaagaatttctcattgttgcttcctgcatggcagaatttaactcttccatgctccatgtgaaatatcaaaaattttccttagctt

SEQ ID NO: 75470 - DNA, 607 bp, Glycine max
  unsure (1)..(607): unsure at all n locations
  Clone ID: PAT_MRT3847_39163C.1
cttnggtttttgtttttttttttttttttttttttttgggggttttttttttttttttttgtttttttttttttttttttttttttttttacggggggggcaaccaggggttttgtttaattaaaaaacaattggggggcaaagggggaaatgacattccggggggggggggaatcccggacaaaatttttaaatcggggataatcatacaggggtagggtttgggcattgggtacacgggggggggggccacctgggaaattatttccttgggggggggtaaagggggctccccatcccggggcgggagggggggttattgggtgggcggggggccttttggttggagcccatgggcttacaggttttttacttgaacctgggggaagggggggccctttgggggtcacggccccccacggggcccaattgggggtggcctgggaggggcgcaaaaaaagggtttgccttggggttttaatggggggggggggctttgttgggggggggaaacagcgggcttgggggcttgggggggattaacaaggggttggggcgggggngggggggggccttgagggggggggggagaaatgggggggggggg

SEQ ID NO: 75471 - DNA, 646 bp, Glycine max
  Clone ID: PAT_MRT3847_39164C.1
cccacatccgcgtcgtccgttcatcagccgtgcgttcggcgaacgaactcgtctccgctccgtacattctcgcgcttccgcgttccacgtgccgctcgcgcgaaaactcaaatcccgtaagcagagtccattgccggcgcttaaaaattgggtggacgaaggcaacgatgtttcacactctgagctcagacgcatcgccagaaccctcgtcaaatcgaagtgctaccaccacgccctcgtggtagttaaatggatagaaaaccagaagaatttccatatgatcccagctgattatgctatgaaattggaattaatcattgagaattatgatctaatggaagctgaagaatattttatgaatctacctgactcagctgcaaagaaggctgcctgtctcacacttctacgtggctatataagagttagggacactaataaagccgagactttcatggtgaagctctatgaactggggctagtgctgagcccacacccttttaatgagatgatgaaactatatctagcaacatgtgagtacaggaaagtaccccttgttatccagcaaatgaagcgaaataaagtaccctgcaatgttctgtcctacaacctttggatgaatgcttgtactgaggaagaaggatatggg

SEQ ID NO: 75472 - DNA, 161 bp, Glycine max
  Clone ID: PAT_MRT3847_39165C.1
taattacatttatacccgttttaggcgaagagaaagtataggttgagagggagacgagtataatcctatatcaggttggctactcttacactttggaaccttttaaaatatagtcacagtcagagtattgttgatgcctcagtcgatacccaaactttggt

SEQ ID NO: 75473 - DNA, 745 bp, Glycine max
  Clone ID: PAT_MRT3847_39166C.1
tcttgcaactcagtacaggctccacaccagagagttaacgagcgccaacagaattatgatcagtttctttttcatggggaaaccgaaatgctattagacatggaagatgaggatctaagggctgcaattgcagctagtctgatggattcatccccagttgtgacaaatgctgaagccagtactcctcaaaatgataatcaaagtagtaaacaagtggcaaccactgaagctacccctctaaatgatcaacactccaaacaagtggaacccattgaagccactccgcctctcaatgctcaaagcaacaaacatttgcctgctactgaagctggttctcctctgaatgatcaaaacagcaaagaagtggcatctactataggtgataacgctcaagatgataaccagaaaaaataaaaaactgcctaagagtgtgctcttgtttgttcctaatttgtttttgcaattgaggacaaaaatcttttccagtttaggtggtcgaaacatacatcagtggcttaaagtcatggtgctgtgcagtatacacattctcatttcaattgcatgatgtataaactgtaaggaaaacccttaagcatttccatcgattatatgatagttaccaagttttgacagtgttttggaaagccctttcggcatttccatgtgcttgtgattgataccaagttttgaccatgctgcatgctggtactactacaataaatttgcttatggtggtgattacgag

SEQ ID NO: 75474 - DNA, 343 bp, Glycine max
  Clone ID: PAT_MRT3847_39167C.1
cttcctcagtagtgtcttttacgcttctcttctctgcagcaactatgcctaaccctaagggcttctttgacatgaccattggggggcaatctggtggccggattgggatggaacttttccccgacgttaattcccggaccggccagaactttcgcgcgctttgcacccgccagaaaggcgttaggcggaacggcaagccccttcacttcaaggggttgttcttgcaccgggtgatcccgagttttatgtgtcaaggtggggacttcaccggcggaaaccgaacccgcggcgagtcgatttattgcgcccaggttgccgaccagaactctgtgaagaaacacac

SEQ ID NO: 75475 - DNA, 504 bp, Glycine max
  Clone ID: PAT_MRT3847_39168C.1
cccagtcccttttccccgtttttattttaaaatggttattttcccctttttccttttggtttccccttaaaaaaggtcccttctcttaaaattcttggcggaaattgcaccttatttggatggttttcttaaaaataatgaaatagtttctttggtccaaaacggcccttgtcaaaaaacggaaccgttgggtccttttttttgcccttttctttttatagtcaaaagtgggccttccttgttcaccattgaacctggtagaaatatggggccggaaaattatctctttttttttcctaaaaacccttttttaaattttttcgcctaaggccaccggggaaagtaccgccacgggggcctcaatggaggcctgccttttaccatttaaggcgggcaaaatggcggttggggacccagaacctgtgggccacctatcctttatttgccccttccctgggggaagcccctacttttctcttaaaaaggggttgaacctcccatttt

SEQ ID NO: 75476 - DNA, 2029 bp, Glycine max
  Clone ID: PAT_MRT3847_39169C.1
aatcgccccccagcggtctcaccgcctctctcaagctccagttgccgatgaagcacttctcgttcccgatgacttgatgttcaacgacactcgcactgctcaagaaccgctctcctccatgactaccatccctgtggcccatggccccaaaggtaggccatgcgggacggacgtcccaacgtcgcatcgcgtccaaacccccccgacagagagcctgttcccgaaacacaagcaatcgccgatcgtccaacgcgtccggcagatcttgacagttgcagataatttgacaagcaggtcttctgtatttgaagcatccttaagagctactcttgctagattgagcacaactctatctttttctgcatttggttcaagtttagaccaacaccaggctataaacagtagtgtagatggggaaccgtcttatggtggaagggctgccttggatatggcaacactgcggttggttgatgtgcctgagaaggccaggaaactctttaaccttttgatatatgaggattgggatccctaggttgcacatccagttgcatctcaaagagttgcagcatttacagatacagtttatgaacttgtatatgatgtcctcatatctaaagtacggcaacgcctcagtgacgtgtcccgtttgccaatttggtcatcagttgaggaacaaggatcctttcctctccctaccttcagtgcatatccacagtcctatgtcaccagtgttggtgaatatcttcttactttaccccaacaattagagccacttgctgagggaatctctaacaatgaagtcaatgatgaagcacagttctttgcaactgaatggatgttcaaggttgcagagggtgcaactgcactttacatagagcagttgcgtgggattcagtacatttcagatcgtggagcacagcagctatcagttgatattgagtatcttagtaatgtgctttctgctctgtcaatgccaatccctccagttctggctacattccaaagttgtctttctactccaagaaaccagctaaaagatcttttgaagacagattcaggaaaccaacttgatatgccaacagcaaacctcgtctgtaagatgcgacgagtgaacttggattcgtgaatgttcctaactaacttcaagcaaccgagccccttccaccctctctccctttttccagacatgtttttgcgttgcagaggagattcttttacatcggcaatgcctacttgcagttttttgtcatgtgggtgaatatacctattacctacttgcatattgaatttgtaactagttacaaaagggatacaatctcctgcatattatatcttctgttttatcggagaaaagaaagagtagacggtcagcaattgttgctttttttcttttccttgtaacgcgtttgtattgtttgaagccaatctacaaaagatgtagctctcgcgtgggacgcagagggtgcaactgcactttacatagagcagttgcgtgggattcagtacatttcagatcgtggagcagagcagctatcagttgatattgagtatcttagtaatgtgctctctgctctttcaatgccaatccctccagttctggctacattccaaagttgtctttctactccaagaaaccagctaaaagatcttttaaagacagattcaggaaaccaacttgatttgccaacagcaaaccttgtctgtaagatgcgacgagtgaatttggattcatgaatgttccttactaacttcaagcaatggagccccttccaccccctccctctttccagacatgtttttgcgttgcagaggagattcttttacatccgcaatgcctacttgcagttttttgtcttgtgggtgaatatacctgcttgcatattgaatttgtaactagttacaaaagggatacaatctgctgcatttggtttatcggagaaaagaaagagtagtctgtcagtatctaaaaaaaaaaagggcgggcgcgtcacgactgaacagaacccacgcacgcgtgcgcgtgcagtca

SEQ ID NO: 75477 - DNA, 375 bp, Glycine max
  unsure (1)..(375): unsure at all n locations
  Clone ID: PAT_MRT3847_3916C.1
gaattcggcacgaggttcatagatctctatttaacacatattcttgctatatattttactctttactatactttatatgtgcacatatccacagatctctctcttacacactatatttagggcatccgtgtggagtgatggcgatctatgagtatcatttatttatttttacattgagtcgagaactgttcagcctttttttgttttgttgaaatttcttaccttgccttatttgccttttcagcttatagctagattggtttcgctttgggcctcaaaaagctagaggagaaacttctttcctcaaatcttatttttggccagatcaaacgaattaaatttctttgtgtgattgtgcagaannnnaggnnnnng

SEQ ID NO: 75478 - DNA, 424 bp, Glycine max
  Clone ID: PAT_MRT3847_39170C.1
gaaggtgcaagagtttgttgtgagctataagctggtttatcgtgaggagaatatgaacttgtctgttttctatgatgctgcactagttttggtagcatggccatgccatggcgcaggctaccaaaggttccctctccgaatgaaaactgtctatggtgagcgttcttctgaggtaaaatgcgcaagttttaagcttgctgtgcatgcacacaccatccgagcttttaatcccattcctgaaaatgcccttgacccaccaaaggactacattaattgctaaccatttaaatcagacttttaaacacttaagccacatgctatcttatatgctaatgaacgctgagtccatcacaacgacatatttatattcggcatatataacaccgtactctctaatatcccatactatgaaaaacatggatat

SEQ ID NO: 75479 - DNA, 159 bp, Glycine max
  Clone ID: PAT_MRT3847_39171C.1
ggtgctaatcttaccttatccctctaatcagtctagctgttgcaaatttcaacaatttttcaatggcttccgcaaatgttgatttccttggctttgttggtgggcttccttgggccaccggaaacaatccccccaaaaaacccttttaaaccaagggga

SEQ ID NO: 75480 - DNA, 163 bp, Glycine max
  Clone ID: PAT_MRT3847_39172C.1
aatgggggaaccaaaggaaaccaaaaatttaggtttggggatgtcggccttgaaaagctctaaaagatattctcgcgtgcacaggtagcgctctgccatatcccacccggattccccaccctctatttctctcagcacgggtacatatcctctctctcccctt

SEQ ID NO: 75481 - DNA, 492 bp, Glycine max
  Clone ID: PAT_MRT3847_39173C.1
aaaaaaaaagacattttggttttaagacacccaaggcccccgcccccccccccatggcgggttttttttttttattgaaaccaacaaaaccaatccccccttaaaaaaccggggtttttagtgggccggggggggggaggccccaacacccggggttaaactcccaagtcccgggcttttcccatctttatgggggaacaggagggggggggccccaaacggggggcacctcggatttttttttcccctaaaaaagggccggggggggcattcccttaaaaaaaaaactccccccgtcccatttggggggaaaaccctttagttttggaaaaacccccggcatttcatatgacaaaaattgggggccagaaagggcctggggtccccccgaaaatttgccttgaaaaaaaagggccctcagcgggggattttgccccccaagcaccccacttaagcccccccataggggggtggctttcgggccctttttgg

SEQ ID NO: 75482 - DNA, 552 bp, Glycine max
  Clone ID: PAT_MRT3847_39174C.1
tctcgagccgaatcggctcgagacgctgcgagaagacgacagaaggggataaccttctttgcacttgtgttgtctattgactttgttcgttccttggaatttttcttcttggaattctaaggtccttgtgacaacaaagttagaagaccttgtaaatgccttttctttatatcttcttcacatgcaccgataggttggagaggcttaactgtctgtttctgcagaggtaatagcttgggaaatttggtgcagatagcctgctctttattggaaggagtggatttgtgcttcagcacttgagttgatggtgttgcgatgagctgttttactgattccaattagaagaaaagctagtagtcactgcccaatatattctctaaacactagtgtttctggattgagtggagtgatggacttcaacagatacctttattccaccattttccttgtgatggaggcttcatgcaatctatacttaaggcggaattatgatttgtttccaaagcaattttcatctgaaaggggaaaaaatacacaaaatgagacttgtct

SEQ ID NO: 75483 - DNA, 246 bp, Glycine max
  Clone ID: PAT_MRT3847_39175C.1
aagcacacataagcactagattattttctttggtctctcattttcaccatagctcaatgggttctggtgctttatagcttcttcgtgatcttgggtcatccggctagttcaggctaaacacaggccgcacgtggtgcatcaacacgatcatgtacaacatgcatatcatcattattagcacaatcagaaactgactagcgtccattccgaccacacagctaccatcatcaacatcacaattaggca

SEQ ID NO: 75484 - DNA, 166 bp, Glycine max
  Clone ID: PAT_MRT3847_39176C.1
aggggaagggaataaagtaaaatggtatgtgggttgctgaggcaacaaaaccattcactaaattccaattccacagacccactactttatttccccctgcttccgatggcaaaccaagcttcactctccttttcttctttcgggacccctggttaaccccctttta

SEQ ID NO: 75485 - DNA, 150 bp, Glycine max
  unsure (1)..(150): unsure at all n locations
  Clone ID: PAT_MRT3847_39177C.1
ctttcactttccacncanatnncnnatacncaaccactctcacacacgcccaanaagccaacccngttgtcgcannagaagaattttctcgtaccaggttactcgntcagaacgtnccctgganaagcatncccgannatattcgcnctt

SEQ ID NO: 75486 - DNA, 151 bp, Glycine max
  Clone ID: PAT_MRT3847_39178C.1
cccacgcgtccgtctgaagataagagaccttcatggactatcacattaactgggtgcgaacgggtaaatgccgagcaagtgaatcggttgccctccgcgttctaattgaactcaggcgaaccgtactgaggggaggaccgtgcccaagttc

SEQ ID NO: 75487 - DNA, 609 bp, Glycine max
  Clone ID: PAT_MRT3847_39179C.1
caactctctctctctgcgtccatggagttttggggtgttgaggtgaaaaatggagaatctctcaaggttgatccaggagatgacaagattatccacctttcaaatgcatgcatgggggatgtcactaaggatataggaggtggaccagtagccctgaatttgagctatcccataactggaaatatggaagtgtcttctttactggatttaaagctcaacctcagtcggagtctgatgatgatgaagattctgatgatattgatgaagatattccagttagtgcagtcaatggtaaacccgaggttggcgtcaaacctgatgcaaatgaagctaaacagaagaagatagcagatccaagaaagagggatgcaaatggtgaagatgacgattcatccgaatctgattctgatgatgattcaagtgaagataagcccacagcgaatggcgacatagaaagtagtgaacgtgatgatgatagcgatgatgatgaggaggaggagggggatgatgaatctgatgaggagacagccaagaagattgaagcaagcaataagaggggtattgagtcttctaagaaaacacctgttcctgttaagaagacaaagtttg

SEQ ID NO: 75488 - DNA, 1036 bp, Glycine max
  Clone ID: PAT_MRT3847_3917C.1
ctttccgaacacaatcaagcttatcaggagcagtttccaataacgtgccaccacctgtcacccaaacggcacggcactagtcggtttttcactttaacactcctccaaaaatcaaatctaaaccaaaaaccgttggttaattatcacttaaactcaaataatcaaacaaacaaacaagctagatttgaaattgaaagagcaacaacaaatttagaactaagaagaagaagaagaagattgcattggagaacaatccacgcgtccggtagctgtctacgtcattgcattgcagcaatgtttaggttttcttgtttccatgctaatgtccaaggcaacaaggcaaagaaaacagttcaaccctcttctgaagcaatggtgaagggtttgcaagatgttacggaaaatcatggctgtaaagattcatctaatcttccatgtgcatattcatccccttcgaaagaacaagcacacaagcaaataaatgtcatggagaatcatagcaattgggattctgttgggcgcagttgtaggtcagaggatctgaatagcaagttttcctttgaaaacgacaacaatgttcaccaaactaggcatattaagaagagccagtctcttcaaagtgggcttgatcaaggcatcagggaagctgatgaagatcttgggttgtcgtgtgatggtgccaaaagccagaatgagtcaacaatttctattagcagaaggtatcatgatgcaaaccccattgatcagtatggaaataatccaaacgttgagtttcaagtcagttcaggtcttgcgaatgatggctcacttttttcaataggagacccaatgccttcagataaagatgcccatgaaatttctgatactccgttatctgttgaatttgctggtgacattcctgaccagacttttgttcctggtagcctatttctaaggaagtcacgttctttacccaatatcagagcttctatacttttcttctgaaagagatgcttttaaacatgcattgtccagatcttccgatgatcttcacgct

SEQ ID NO: 75489 - DNA, 1373 bp, Glycine max
  Clone ID: PAT_MRT3847_39180C.1
caactctctctctccgacgtccatggagttttgctcggactcagaactgttcggtttttctggaaatttttcttctctcagccatctctctctctctctttgcgtccatggagttttggggtgttgaggtgaaaagtggagaatctctcaaggttgatccgggagatgacaagattatccacctttcaaatgcatgcctgggggatgtcactaaggataaagaaggtctaccagtagccctgtatgtcaagtttggtaaccaaaagcttgtacttggaacgctttcttctgaagcttttcctcagatatcttatgatttggtatttgagaaggaatttgagctatcccataactggaaacatggaagtgtcttctttaccggatttaaagctcaatctcagtcagagtctgataatgatgaagattctgatgattttgatgaagatattccagttagtgctgccaatggtaaacctgagattgaggtgaagaatggcatcaaacctgatgcaaatgaagctaaacagaagaagatagcaaatggtgaagatgaagattcatccgaatctgaatctgatgatgattcaagtgaagatcagctcacagcgaatggtgacatagaaagtagtgaaggtgatgatgatagcgatgatgaggaggagggggacgatgaatctgatgaggagacacccaagaagattgaagcaagcaataagaggggtattgactcttctaagaaaacacctgttcctgtgaagaagacaaaatttgttactcctcagaagactgatagcaagaatgttgtccatgttgcaactcctcacccttctaagcagactggtaaagcaactgctaataacaagcagcagactccgaagtcaggtggagattacagctgcaagccttgcaacaggtcatttaagacagaagatgccttaagttctcataacaaggccaagcacagcactaagtgaaggcttgctttttgcccgagcagtgacagtgagtgttgatgtttctggtgttggatgattgtgtgaaaaaacagtttagttgatgtaggaaagctgggcttagtgattttcaactttgattggatcaacttgagtttgtggtaactgcgctttgaccttgatcccatgtcggccttctttcaaccgaatctctttgtgatgaaatgcgtaaatactccctgcaactcatgaaataagtattcctgactaagtcaactgggatttaacgttgctaaaccatcaactaattgggagctttttttatcacttttgtttgtatatttccaatcttcaaccaatttttgtttaatgacttttattaacaattggaaaaaattaaagcttaaaatacccccaaaa

SEQ ID NO: 75490 - DNA, 536 bp, Glycine max
  Clone ID: PAT_MRT3847_39181C.1
ggcaattaaatttgaccaacactaagggggggccccaaaaacaaaaaagccgtctttttaaggtggggcaacattttgcaagaacaattcacgggctaaataaaaggaacaaaaaatcatgtctccttaaaaaggggattttttggagccccagcagccggtttttttggctcaatctcaaacacaaggggctcaatttttagcttcaggggggcccgccaaaccctagcaagaacaaggctcgcaaaaaacaaaaaaaaaaattatgtctccttaggaggggcttttttagcagcccttgggggtgccttcctcgttttggtctcggccacggggggctaaatttcgggttccctccggtggcccaaaccctgttccttagtcttcacccgaacttttgattgttttcccctcccttttaaaaactttaaaagatggcccgaaaagccaactcggcagttctcctggccaaaaaagcgccttatagggttttttgtccggaaacccccgaatgtgattacgagttccccccgggg

SEQ ID NO: 75491 - DNA, 554 bp, Glycine max
  Clone ID: PAT_MRT3847_39182C.1
ggcgcagtgtgttagatgctcgacataactgaaaacagtgtgatgaaaatgaaggctcttgtggtcttcgtggctacacattctggtagtttgacagtgccatgcgaacgatatgtcccctctacgaaagatcactggttatggaggccgttctcagtaggtgaaacgcgcaggttgaaggattgctggggaagcacacaacatctttggctttgacaccatttctggagagtgcggagcagcaacaaaagaatatctccatagccgaacttacacatcagactctcaaacaattagccaaggagcttacttttatgccagagacctggaaccccattccaaggacacatttttgttcagtgtatatagcaacgggctatattatattccgttctacaaaaaacatggatattgggaggagaaacacaactctgccttagataactaatgggctaacaagggcaatgtgccggcactgaccgagactcttaagatttacaacaagctggcggttcttggcttcaaaaatatatttttgtcaggaagaacactgg

SEQ ID NO: 75492 - DNA, 409 bp, Glycine max
  unsure (1)..(409): unsure at all n locations
  Clone ID: PAT_MRT3847_39183C.1
accatccggttgttgaaagatctatagcacctaaaagccactggccattgtattaatgttcgtcacatcactaggggagactagcnnnnncccagttagtatagtcgggtgggcaccaaaccaaagcgctgatactacgatctgcctaattgtcaaggcatacgaggacgctaatgactacggctttcataaagctatcaacaaatgcgtcaatactaatgactcgcgatcgagcgcatttgtcctcgcacaaacaagagttttagcgtgcttctcacgatctatgagaccctgatgaccgactgatataacatcaggaacatgaatatgctctcaaggaaagaactgatggaggcagggggcatgatccatcagatatttttgactgggccatgtgctggggagatcc

SEQ ID NO: 75493 - DNA, 958 bp, Glycine max
  Clone ID: PAT_MRT3847_39184C.1
aattcggctcgagcttgtcgtcaacaacaaaatcaacatagttattgattaatggtcctgtgtttgttgttttgtgtgtccaagtctatcaaaatcattctttggttttgttttctattgtagattgtaggtactgcttcaatacatctttcaatcaccgagatcttgaattcttcagtttcaagacaataattgaagttcaaggccattagttccaacaagaaggaaaatggggttcactagtacaagtgaaaaagaagagatgttcatggcggatgcagaaagagcaaaggagctcaaagcttttgatgacacaaaacttggtgtcaaaggacttgttgatgcaggaattaccaagatccctcgcatattctatcatccctctgataatttcaagagggtctcagaatttggccatgaagattacactattccagttatagacctggcaagaattcatgaagatcatagtgtacgcaaaagggttgttgagagagtcaaagaagcatcagagacatggggtttctttcagattgtgaatcatggcatccctgtgagtactctggaggagatgtcagatggggtgctaaggttttttgagcaagatagtgaggtcaagaaggagttttatactcgtgatcaaagaccctttatgtataatagcaattttaatttatataccaaagctccaactagttggaaggactctttcttctgtgatcttgcccctattgcccctaaaccagagaactttccatctgtttgcaggtgcatgtttcaatcaggtcatcaattcagcttaaattatttgtctttcatgattcggacctgtgtaatatctgctctaggcttaagggttcacatcaattcttaatccgagtaatagttgatttggcaaaaaaaaaaaaagaaagggcgaccgctacacagcatccgagcgtgtgcatgcgagcataaa

SEQ ID NO: 75494 - DNA, 398 bp, Glycine max
  Clone ID: PAT_MRT3847_39185C.1
gctccgaacctttgggctgatttatgtgcttgtttatgtgcttgcatggtcgtgagaagatccatcgagggcaccctctcacgacaaaatcgggagaacacagcacgcaccaacgctccaaaagcccatccgataactacccccaaaaaacacccaccaaacccctataccaacgaaaccgccaaacaccttaccagcctccaaccacaagacaccaccgaccaacccacgtccaccaagaaacctcactaacccacccaccagtaccaaacccacttgcaaccacaccacccccttaaaaccactaccaatataccccccaaatcactaccacgaggcaccaccccgcaacaaggctattaccaaaccacttagcaaacgactgaaatgtggcaaac

SEQ ID NO: 75495 - DNA, 219 bp, Glycine max
  Clone ID: PAT_MRT3847_39186C.1
ctcgcttcttccttctctcttgaagaaaatgcagatcttcgtcaagactttgaccgcgaaaaacctgtgccttgctgtctagatgagcgagtttagttcgtcagtgttcagatgaaaccctggagcagtgtgtatcttagatgagcagagggagatgaagtggtttcgtagagtagttgcagattgtcatcaatctgttgcatcttacttaactcgcgt

SEQ ID NO: 75496 - DNA, 145 bp, Glycine max
  Clone ID: PAT_MRT3847_39187C.1
caaaaatactacataatggggcataaacaacgcaaattaccatatgttgacaaaaagagcttatatccgcttactttcaaatcttatagcgccacttccaaataaaacattatcaactttcaccttttataactataataaaact

SEQ ID NO: 75497 - DNA, 254 bp, Glycine max
  Clone ID: PAT_MRT3847_39188C.1
cttatctcacccttctttgactgttctcccacaccacatgcatgacactcctcctgctccttattctcctcttacacgcggcggaagctaagggccagtggcaggtcctctacaaaatcatctgtactgtcgccatgtacatactgcttctccacaacgaccgcgtcatcatcttctaccgctccgacttcggactctccaacctaacgctccacgcagaaatatgccgtaacgaggcatacgagttgctcgtc

SEQ ID NO: 75498 - DNA, 214 bp, Glycine max
  Clone ID: PAT_MRT3847_39189C.1
aaccccaatttttcctaggccgccctttggggttttcaacctaccaagggaaaacttttgatctgcccctaggttcgctagaggcttatgcacggttttttttattgccccaaggtaggggggggggggatccattgttgtcttttgtcatgaccttgtaacaagaaaaaatgaaagaaactgtgcaggttctcaaaaatgaattttcaagctt

SEQ ID NO: 75499 - DNA, 3999 bp, Glycine max
  Clone ID: PAT_MRT3847_3918C.1
ggttcccaaccatccacctttccctttccgaacccaatcaagcttagcaagagcaaaaaagagtaacgtgaaatggcaggtgcgggtgcaggaggagggtatggggacgcgaaactgaggatagactacgtgttcaaggtgaacctgataggggactcggcggaggacaagaactctattcttcctacttttgaacatgatgaccttgaaattgaaagcaccaaattactaagagaaggggattgcattggagcaatggcgtggaagaagctagacggaacgtctggggaagtcgcagatagcacgcttcgaaagcggcccgggtcgacccacgcgtccgatcaaatctgatttgttttaccagtctagggttagcgatagctgttgattcgtactactgaacgccgtttattcagaagctatattattattaatattattacttattaatttattacgataatatatatagaaaaaatgaatggaaggtgcttctttggtgccatggtggcttagcctagcaacgcagggaaaacggaagaagaagaagcactttctctatacaacagtgctccttctttcattccttcgaataggactgcatctcttatgcatatctgtctctggattctgctgattggaaaggaatttctttcactctggccgctataacaaactcaaactattctcgcacctctaggagggtgtggggtgacaaagagggggtgatttggctttgtgttttgcgaagatcaaagtcatcagatatatggagattgtgccgtgtttctgtgggcttgtcgcttgattatggctaagggtggctttttgctttgttgccagaagctctttctagtttggcactgaatctcagcaaatttagtgtctttgattaggcttctggaaaattgatgctcgttgtagattataattgatatttgtttttctgccttaaagaaagtttagtgtttagatgtagctgtcaacatcattgcagcaatgtttcggttttcttgtttccatgctaatgcccaaggcaacaaggcaaagaaaacggttcaaccttctactgaagcaatggagaagggtttgcaagatggtacccaaaatcatggctgtaaagagtcatctaatcctccgagaacatattcatccccttcgaaagaacaagcacacaagcaaataaatatcacggagaatcatattagcaattgggattcagttgagtgcagttgtaggtcagaggatctgaatagcaagttttcctttgaaaatgaaagcaacgttcaccaaactaggcgtattaggaagagccagtctcttcaaagtgggcttgaccaaggcataagggaaggtgatgaagatcttgggttgtcttgtgatggtgccaaaagccagaatgagtcaacaatttctattagaaggtatcataatccaaatgttgagtttcaagtctgttcaggtcttctaaatgatgtctcacttttttcaataggagacccaatgccttcagataaagatgcccatgaaatttctgatactccgttatctgttgaatttgctggtgacattcctgaccagacttttgttcctggtagcctatttctaaggaagtcacgttctttacccaatatcagagcttctatactttcttctgaaagagatgcttttaaacatgcattgtcaagatcttccgatgatcttcacgctttacgcatgtggcagaaagaggaattcatcaatgagtttgatgatcaaataagggcagatcaagaaagagagaatgacatgggaaaacctgaagatggtcgtatggacaatttctttgatgatggttttgattcttatctgctttctggttcagcagaaaactgggtaatgccaattacagatgattcaagtgatgtcaaaacccttcaaggagattcctcagttcactgtgtgggtgaatttcctaagaaggattttaagattaagcgcattgaggattgggtagttggtttgcagcattgtggaccacctctagaggaaacaaatgaagatttgtctgaagttattgaacctttagttgatgttaacacagtaaatggcgtgacagctgccagtgtgaatcataaggtcactccaggaatggaagcagctaaaagatatatatcttctctgagtgctaatgccactgctgctcagctgggaaatcatgggttggttgtgatcccctttttgagtgcatttgtgagtttaaaagtgctcaatttggctggaaatgctatcgtgaggataactgctggtgctcttcctcgcggacttcacgcattgaatttgtcgagaaacaagatctccactatagaaggattacgtgaacttactcggcttcgtgtcctagacctcagttacaaccgtatattaagaattggacatggtcttgcatcctgctcatctttgaaggagctgtacctggctggaaacaagatcagtgaagtagagggtctgcaccgcctcttgaaactaagtattctggatctccgttttaacaaaatttcaacagccaaatgtctaggccaacttgcagccaactataatactttgcaagctatcaacttggatgggaacccggcccagaaaaatgttggagatgaacagtgcagcattgtgctccaccgcctgcggccccatctggtcttctacaatcggcagcctatgatagtgaactctttgaaggatggagcagaacgttcggttcggttaggaatgaattcccatcagtttgatcgcagccttagagcggatcgcaagaccacaaggaagggcaggccactgccgctcagctaggaaatcatgggttggttgtgatcccctttttgagtgcatttgtgagcaccaaaactgtccaagggcaagcagactctcctgccaccaactagaatccaaatcttcctcgtggacttcatgccttgaatttgtctagaaacaagatctccactatagaaggattacgtgaacttactcggcttcgtgtcctagacctcagttacaaccgtatattaagaattggacatggccttgcatcctgctcatctttgaaggagctgtacctggctggaaacaagatcagtgaagtagagggtctgcaccgccttttgaaactaagtatcctggatctctcttttaacaaaatttcaactgccaaatgtctaggccaacttgcagccaactacaatactttgcaagctatcaacttggatgggaatccagcccagaaaaatgttggagatgaacatatgaagaaatatctacaaggccttcttccccatcttgtctactataatcggcagcctatgaaagtgagctctttgaaggatggagcagaacgttcagttcggttaggaatgaattcccatcagtttgatcgcggccttagagcggatcgcaagaccacaaggaagggcagccaaggtgttgcagccacacggaggccatcaatcacgtctactcatgctcgcagaagtgtggattcaccaaaactgtccaagggtaagcagcctctcctgccaccaactagaaccaaagtatcaacccaaagtcgctatcattttgatgctcccgacaaagcattgaacttggtttcagagctctccatgcgcaagagtcgcagtgagggaaattttggagttctgtaagaggctgttccataccaaattgatttgttcaccgcctttctttcagtatatgcatctatttactttgttatttcgtatttgtcatgtttttctgttagcacagtttatcccctctcttttgattaagtttggtgcactagatattgatacattgatttgtgggctgtaatgcctaataagctgctttatgctacagtatttctattccattataggttgttgttcagtactttcagaacatcattttcaatttgtctgaagagcaagtatggtgcaattacaataactttattatgtgggattgtcgtgctgacccctaatg

SEQ ID NO: 75500 - DNA, 630 bp, Glycine max
  unsure (1)..(630): unsure at all n locations
  Clone ID: PAT_MRT3847_39190C.1
atataagagctatgacgtacgcactgcaccgcccgtacgtaagnncttggaatncctnctagnagnncggccgcncnncttttttattttattatttatttattttattatttatttattttattttttatttattttgtttgttgttgtttatttatatctttgttatatatttcttatatctctgtttactcttgttattgttttattccggcaccccgggggtacgggcccgcgaaaaaccgaaccgggacctgaaggcgaaccaggcccccggaggggggggcggaaaacagcccggcgcaacaaaggaaaaaaccgttccccggaaaaaaagggaaacggggcaaaaaagaaaaaaaaaaaaaaaccggaaggggaaaaaaaaaaaccggggggcccaaaggaaaaaaccaacccccaaaaactggaaagggcaaaccgcccccgcccaaggggggaaacctagcgccccgggtgccagagggaaaacgccaccccccagggagagaaaaaagcccatcgcccccagaagggagtccttaacaaccaggaagaaggggaacagggtattgccccccagcgggcggcccttgtgaaagtggaaaaagccccccagcctaaaacccc

SEQ ID NO: 75501 - DNA, 263 bp, Glycine max
  Clone ID: PAT_MRT3847_39191C.1
ggcgcgagttgagattttgcgcccaacccattcgcggtggaccctttgcggcacgcgaaaagccacaagggttagtgatcgacataaggaaatgtttcggcccagatggatatgttctcaatgtaaagaggaagaataactctaccagagtcagtatccaggctattgtgtcaaggcaatatatatatgaaggggatactatatgatataaaagaaaggcctctatttttaagaaaacaactaagataaaaattaagatactg

SEQ ID NO: 75502 - DNA, 240 bp, Glycine max
  Clone ID: PAT_MRT3847_39192C.1
ggctcgaggtacaagaagtaggttttgagcgatttcagcactagccgacaatgatcgacgacgtgggctatgctggcctccgatccttgctatgccggtcgggaggctactgtgatgacaggatgtgggacgagcagagaccagagaggtgctaagacgagtgctacagagatcaaacctcttaggaccgagtgatagcaggtgatgaggacgacatcgtcgaatgcaaattcagtggtg

SEQ ID NO: 75503 - DNA, 222 bp, Glycine max
  Clone ID: PAT_MRT3847_39193C.1
gcgggatccatgtcggtatcggctgatgagccactgcgtacgccggggctagacaggaaacatggctagggctggggctcaatctgctaaagcgcctggggtagtgggcgagcggacgcatgggccggacaagggatgaggaatatccgatggaggcgcgcaggaaatcgagactgtacggccccaggggttcagaaagggccgttcggagggcctgggact

SEQ ID NO: 75504 - DNA, 270 bp, Glycine max
  Clone ID: PAT_MRT3847_39194C.1
accgcttccaaaagaccaccgaaggggttcactaaacaaattaatataaaactcatacacaaactaacaaaacaacacccatagatactataatttatgagagacggacccatcaaaaacctttatatatttaaaataaactactcctcgtctctggctctttaccccctgcattctaccttccaacatataccctgcacctgaccacactaccctttttccattaaatataaggatctgcatctacacttcattaactcgacccttata

SEQ ID NO: 75505 - DNA, 166 bp, Glycine max
  unsure (1)..(166): unsure at all n locations
  Clone ID: PAT_MRT3847_39195C.1
natncgaatcgtaagctcggaattcgggctcgagntgancatnnaatttatcttgtncagttgacaaancnacaaacnnaannncgaagagtttagcaactcttatgcaacaagncatggctgcngagaagagtgnagcngagcttcaggcntnngaggatgagtn

SEQ ID NO: 75506 - DNA, 410 bp, Glycine max
  Clone ID: PAT_MRT3847_39196C.1
aatccgttggatgttgctagtggctgtcttgggggtaagagttaggatggtgtgccaaacttgtaaactctacatggtactggtttttaagttcaagttatttgcttggtgtgtttgagggagtgttgacaaaattgattttaaatgaaattggttttgcaaaattgattttggttcaaattgattttgaagtgacgtgatttatgtttaatagtaaaatttagtgaaaattattttgatccaatgcaaaatctatctaaagtaacttttactcgaaatcaatttttctcaacgtagaatcgaagatgtaaacatttatctaaaattcggttagttggtttttgaacgtgattctggataagtcaatgttaaaccaaacatgcactttgtctgtccctattatttatagt

SEQ ID NO: 75507 - DNA, 418 bp, Glycine max
  Clone ID: PAT_MRT3847_39197C.1
atgcgtacgtcacgcgtccgctcacgcgttctgccaagcgttcgctgtgaggcaaacataatgttgatgtaggaaatcctagatgatcaattttgagaccttctaacggataaaacgaaagttcgtgcttgatgtatagaagccttaagtgtccttaaagctgttctcaaattaaagagttcaagcagggtgattgaccactttgcacatctctacattatttttaaaccaaagcaatgcatcgtgtttgggtctttattcaaccgacatgagatttgctatcatgtcttggggttgatccatggaatctgtacccccatcactggatctgtgaaggattatatgagcatcccctatacgaattggcttccatagtattcagacgaacgtgattccatttgtgtatgacagcatgttt

SEQ ID NO: 75508 - DNA, 537 bp, Glycine max
  Clone ID: PAT_MRT3847_39198C.1
cccacgcgtccggagagactgagacagtgatatggcgtatctgagattctcacacgcagcaccacagccacacctcacactagggtttccttcaccacctcaatttctctctattgctgctccaaaattctctccctcgtcttctaccatcaggtgcaaaggttttagtagattgatagtgaatcagaggctggtgactgtttttgcaacaaatcccaactctgtaggtgaaaaatcacccacagaaggatcagatgtaaatgaaactagcaatgctgctcaaggacctcctctccttactattctggctggattctttgtcctttttgttgtttgttggagcatttggtccattataacgtggctgataagtttaatagttaatgtacctgctccaaaataaattttattgtaatgtttgtttgtattttaagccactgcactagtccttgtgctcttggtcatagttttctttttatgcatttggacttgatagtatattggagtggtaaaaattctgaagtgagccaaaagcag

SEQ ID NO: 75509 - DNA, 329 bp, Glycine max
  unsure (1)..(329): unsure at all n locations
  Clone ID: PAT_MRT3847_39199C.1
gcacgcgtncgaaagcgctcgagccggctcgagggttgaacaactgcacaggttattcacgtactgtggctccccacctggcgaatgttggaatattgtctaaactccctcccgcaactttattgaagccagagcaaccatatgatagttgccttcgacaggccttcaatgattcgccaacgaccagtgttcattagctacaaactcttatttctgctgaaccatacaaacttggaactgcagcatcagctctatcataagagtgttgcaaaacaaacctatatgcatgtgacccatctagcatggctgtttacccacctagcaaggaa

SEQ ID NO: 75510 - DNA, 629 bp, Glycine max
  Clone ID: PAT_MRT3847_3919C.1
cccacgcgttcgggttttgggattaatttgacaatattacaaagaccagcaccatgcaagctgccattgttaggatccatgctaggtcactactggcctgcttggatggttgtgttcttttacatccgtttgagcatctcacaatatttgaggaatgtgttgctcttcacaaattgctgagggaaaatgaaagagattatagtatcgtcatctcatgtggatgctctgtctgtatgctactcctgataggatgagattgtttgagcctgtgccattgctttcctcaaatgatgttatctaagcaaaatttatagggtggatgttaatcaccttgccaaatggtagcaccggttagtcgttagtggttactcaaagagttagattaacctttgcaaaattgcaaattgaatatttagagtactgaagtaagagaatgtatcaaaatttcaaagatttattatagtgaagttcactctcagcctatactgggcactaaataccctaaaacttagggtgacttggtgcatggggctcctaccttgtgggtctggactctggagaggttggatgaacacactcttattgacggagagactgtttccgtgattcagcctgtgctaatatcttga

SEQ ID NO: 75511 - DNA, 961 bp, Glycine max
  Clone ID: PAT_MRT3847_391C.1
ccacgcgtccggtttatattaatatacactgcacaaggcactcgctagcaagtcaatttgaaattcacgaggcaactacgagtatagtgcagtttttcttttcttttcttttcttattcctgcacaacaagccaaaatgctttatccactaaaatgttaaagcgaccttagagacttttttttactgtctttaaatttctactaagaaaagtataaagaggactaaaattataaaagtatcgatgtgcaactcacaaagttcatcatgacaattgtataaaaaaaaatgttcatcatgacaaatgcacttcacacagcacaagcaagtcaacttgaattccatgaggcaattacaagtgaagtgctgatgggtttttttctacacaagagtccaaatgtcgtgtccactaaaatattaaagctacaactgattttgaataatatgagtagtacgaaaaatcaatctctcaatcaacacgaaaaccgaattcaccttttttaatttgtcactagctagttgaattgtattttaacctcatctgttattttggtctcttccttctttatataaatcatatagattcgtataatttcgtctcttacgaaatagtaaaactctttgattttctacacaagtggtcaaatgccgtgtacccactaaagtattacagctaccttggaaaagaatattttcacccgaaagagttcaaccatatatggttaaagaaacatataagcgtgtaaacattcgccaatattttatatggatgtttatgttttttttttttttttgagaggatggatgttcatgttagcttaaatggtaaaagaaaaaaaaacctaatattgactgtaatgctaatcatttttaaaaaaattacatggtatcctttttcagaacttacttgagttgactctaaagatgactactttatatatatatgtaaacaaaatctatcac

SEQ ID NO: 75512 - DNA, 299 bp, Glycine max
  Clone ID: PAT_MRT3847_39200C.1
ggcagtcgccggtgccggcgccggcgccggcactagatgccggagcatctggatccgggtcgagctcggtctccatgattggtgcttacgctgagattacttgctcagcgtctttaagctgctgaagaataatctgaatgatggatcgatttagtgtgaagattatcgattcctactgcacactcagaagaatcgcagctgctctataatacgttacgagtgatgattatcctgtacgtgtcaaacatagagacagagggactgtacaccattcttatattgaaccatgtaacgctggt

SEQ ID NO: 75513 - DNA, 1614 bp, Glycine max
  unsure (1)..(1614): unsure at all n locations
  Clone ID: PAT_MRT3847_39201C.1
tgcaaagagacacactgagcttactttacttttacccccattcatatgcagcttcatgggattgaactgcaatcaccacttagcaccgttcaaacaccatctcatttctgtaactttttctgcagcagattctcattccatcttccctatgggatgaactcgctgtctcaatgaggctcttcttccactcttcactctgctcttaaactggttaatcaaaagatggagcgcgcgaggctaaacatgagaggccattgctctggttcgactccctcagaagaatctgctctggatcttgaaagaaactgttgtagtcattctaatctgccctcacttagtccaccaacgcttcaaccctttgcttcagctggacagcattgtgagagcagtgccgcttacttctcatggccaagccgcttgaatgatgctgccgaagagagagcaaactattttttaaatctacaaaagggggtgctacctgaaacccttggtcgtctgccaaaggggcatcaggcaaccacattacttgaactcatgacaatcagggcatttcacagcaagatacttcgttgttacagccttggaacagctattggttttcgaatacggcgaggtgtattaacagatattcctgccattctagtgttcgtttccaggaaagttcacaagcagtggctcagtccaatccagtgtctacctactgctcttgaggggcctggtggagtatggtgcgatgtggatgtggtggaattctcgtattttggtgcaccagagccagtttcaaaagagcagctgtacacagagatcgtagatgacttgcgtgggggcgatccatgcattggttcaggatctcaggtggcaagccaagagacatatggaactttgggtgccatcgtgaaaagccaaactggcagtcggcaagttggttttctcacaaatcgtcatgttgcagtcgacctagattatccgaaccaaaagatgtttcatcctcttccaccgactttggggcctggggtttatcttggtgcagtagaaagagcaacttcatttataacggatgagctttggtatggtatatttgctggaataaacccagagacttttgtgagagctgatggtgcattcattccttttgctgatgactttgacatgtccactgttactacttcagtgaggggtgttggagatattggtgacgtgaaaataattgatctacaggctccaattagtagccttattggaaaacaagtggtgaaggttggaagaagctctggcttgaccacgggagtagttttggcttatgccctagagtacaatgatgagaaaggtatatgctttctgaccgatcttcttgttgttggtgagaaccaacaaacttttgaccttgaaggagacagtggaagtctcatcatgttaaaaggtgacaatggtgagaaaccgcgaccaattgggataatatggggaggaactgctaacagaagcccccttaagttaaaagttgggcaacctcctganaattggactagtggggtggatctagggcgtcttctcaatctacttgaacttgatctgataacgactgatgaaagacttcaagtggcagtgcaagaacaa

SEQ ID NO: 75514 - DNA, 143 bp, Glycine max
  unsure (1)..(143): unsure at all n locations
  Clone ID: PAT_MRT3847_39202C.1
gcaattcnnaantnncttgtnntcttgactcttntccctgttgnggatgancttgcanaggaactgngnataggtcttgtaactgcattttgatgtttatttatgtgtacactaaggccattttnaattaaaattgagtagtg

SEQ ID NO: 75515 - DNA, 2373 bp, Glycine max
  Clone ID: PAT_MRT3847_39203C.1
cctcgagtcccaaaaaaaatcaaaacgctttgggtgatacataaacagaaggcagtaactgtaccaaattgtaataaccggagaaaaatcaagcaccgagtcctcttctatccgtgtgtggtcgcgactacgcttcttcgtaactcgaagcgcgtgaaaaaaatagcttcttctggatctggatcacgaaagccatggcgttttggagatctctcgtagcgttctctgcggttcttctgcttctcatccatggctctcactgcttctacctccccggcgtcgctccacaggatttccagaagggagattcattgcaagtgaaagtaaataaattaacatcaacgaagacccagcttccttattcatattattcacttccctattgtgccccatcaaaaatacaggatagtgcagaaaatcttggggaagtacttcgtggtgaccgtattgaaaattctctctatgtgtttaaaatgcgtgagccacaaatgtgcaatattctgtgtaatcttaaacttgatgctaaaactgctaaggagttcaaagagaagatcagtgatgagtatcgggtgaacatgatcctagataaccttcctctagtttttcccttgaaacggactgatcaggattcaactgcctatcagcttggttttcttgttggactcaaagggcagtatagtgggagcaaggaggagaaatattttatttacaaccatttggcatttactgtcaagtaccataaagacatgctaactgaatctgctagaattgtgggctttgaggttacgccattcagtgttaaacatgaatacgaaggtaaatttgatgtaagaacgactcgtttgacaacctgtgaccctcatgctaagcacacagttgtcaactccaacagtccccaagaggttgaagagggcaaggaaattatcttcacatatgatgttgaattccaggagagtgacgtgaagtgggcttcaagatgggatgcttatttgctaatgaatgatgatcaaatccactggttctctattgttaactcattaatgattgttctcttcctttctggcatggtggcaatgattatgctgaggacactgtaccgtgacattgcaaagtacaatgagcttgagacccaagaagaagcccaagaggagactggttggaagcttgtccatggtgatgtatttaggccccccaacaactcagatttgctgtgtgtttatgttggaactggtgttcagttttttggcatgatacttgtaaccatgatatttgctgtccttgggttcctttctccttcaaaccgaggtgggctgatgacagccatgctcttgctttgggttttcatgggaatctttgctgggtactcatcaactcgcttgtacaaaatgttcaaagggtcggagtggaaaagagttgccctcaggactgcaaccatgttccctgcagttgtctctgccattttctttgttttaaatgctctcatatggggccaaaaatcatcaggagctgtgccatttggcacaatgtttgctctgatctttttatggtttgggatctcggttccacttgtttttgtgggtagctatgttggattcaagaagcctgcaattgagaatcctgtgaaaacgaacaagatcccaagacagatcccggagcaggcatggtacatgaacccagtgttctcagttctgattggtggaatactcccatttggagctgttttcattgagcttttcttcatcctcacctcaatctggttgaatcagttttactacatcttcggattcctctttttggtcttcatcatcctcattgtcacttgtgctgaaataaccgttgtgctctgctacttccagctgtgcagtgaggattacttgtggtggtggcggtcgtaccttacctctggttcctctgcactgtacctctttctttatgcaactttctacttcttcaccaagcttgaaatcacaaagttggtatctgcgatattttactttgggtacatgcttatagcgtcttatgcattttttgtggtaaccggtaccattggattttatgcatgcttttggttcactaggctcatctactcctcggtcaaaattgattagatatagcagtcagcgatttgggccaatctactatatacttcttaaaggttgaagaaagtttgtgtaaggattttgatattaaggtactagcatgttcaaatgtaacctattctatacaattttgaaccgtgacgacagtttattcttttgtttcagtatcattttattttaattgtctttgttgaagtaggattctcgtttgaatacggagattttaggttggttctactcctgtggcagatgttatattattagagcagttatc

SEQ ID NO: 75516 - DNA, 259 bp, Glycine max
  Clone ID: PAT_MRT3847_39204C.1
gacgagccggccaaataagctgaatctagattagcagattagatgcggtttgagctactcggactagagcagtgcatactggacaagggacactgttgtagataacccggaccagtcgctgactccgcagactaaaccgtatcgaccaatggaggggcgtgagacgaaagctgtgaagataacagtaggatgaaagaaatctatattggctagtataccagcagaactgaaggaaagggcctctttggtacatgcgtct

SEQ ID NO: 75517 - DNA, 388 bp, Glycine max
  Clone ID: PAT_MRT3847_39205C.1
accactcaaatttcccttcctatagaatattctaaaacaaaagttccctttacttcaacatacattttccttcctataaatatcactaccacattttttgaagttcttctactcaagattcatcttcccctactcttattaaattaatgaaaaaaacatactatcatacaaaccaacttatatcttcccacctctattaaaaaaaataaaaatccttatacgttacaaactcaatttttttatttcctttaccacttctcattcctataataataacttctattaaacctttaacctcacaccttttcacccctttctataatctaattaaactatatcttttcattcacattaaatcttctaacaattcatcactcctaataattta

SEQ ID NO: 75518 - DNA, 232 bp, Glycine max
  Clone ID: PAT_MRT3847_39206C.1
agtctgttttaacaatcttgtgatcagtggtatgggcaggctgctctagtaggcgtcacttcagtatgttgttgtctgcatgggcagatatgtggagaatctgtgtgaatgaactatataagagtgaaaatatagaatctgaagtgcgtattgtgaataatatgtaccaagaagcgatagaatggaagatgaagagggtgaagatcgatgattaaccagtgtcgtgatggtg

SEQ ID NO: 75519 - DNA, 1006 bp, Glycine max
  Clone ID: PAT_MRT3847_39207C.1
ctcacgcttccgcccacgcgtccggcgcttatgcatcaacccctggatcctcaggacgaacatggtcatgtccttgatagaacaaatatgaaagctattatgatgactatgattgtcgcagcaattgacacatctgctacagcgatagaatgggctatgtcagaactcctaaagcatccaagggtgatgaagaaacttcaagatgagttggaaagtgtagtggggatgaatagaaaggtggaggagagtgatatggaaaaattgccttatttggacttagtggtgaaggaaacactaagattgtacccggttgcacctttgctagtacctcgtgagtgtagagaagaaattactattgatggttattgcataaaggaaaggtcaaggatcatagtaaatgcatgggcaatagggagagatcctaaggtttggtcagataatgctgaggtgttttatcctgagagatttgccaatagcaatgtggacatgaggggatatgactttagacttttaccatttggttctggtcgtagaggctgccctgggattcatttgggtctaactactgttaagattgttctagctcaattagtgcactgcttcaattgggaacttccattaggcatgtccccagatgacttggacatgactgagaaatttggcctcacaattccaagaagtaatcacttgctagctgtgccaacttaccggctagctggtgaagttggaaaggaataaattaaaatatattaggtttgctaagatttacttatcattaaattaggaaatgatacttgtattttgtttcttaaaataagaattggtccctgccttatagcttctttgtagcaattggatcaaacccagtgcactgattgcaatggtgtcactggtacacaacaaaactgtaatattaaaaggttgaccagtacttctacttatttttcaactcatttctatgcgtatctttctctttgtcacgttatatcaactcttacattaatct

SEQ ID NO: 75520 - DNA, 245 bp, Glycine max
  Clone ID: PAT_MRT3847_39208C.1
gtcggacacagcaaggatgccagaaacaagttaaagtcattgcttgttggtgaattggaaggatataaatcatcaggagccaaggatgaagtttcttcatcaacaactagttcttcagcatcatcaggatcatcagttatgccaattattgttggtattgttggtgttgttattgctgttggtttttacttttctaaaattgcacaataaattataaattaaattattattaaaaaaaaaaaaaa

SEQ ID NO: 75521 - DNA, 184 bp, Glycine max
  unsure (1)..(184): unsure at all n locations
  Clone ID: PAT_MRT3847_39209C.1
cnnaaatnattnttctggagaatagatggtctctgaacaagccttattggaggatatcgatgagcatggaantacgactagaatgaagcattgagatgcttaactggatgcccatngatgttggtcgatgagaacttacatncgcatggntacaanagcgcatcngcggntgattagnngccta

SEQ ID NO: 75522 - DNA, 304 bp, Glycine max
  Clone ID: PAT_MRT3847_3920C.1
ggacaatgttacaacttggaccatttcaatactgcccagatgtaatgatggcagatcttgtgaggccaagagcctgggatgaataaggggctacctgtctgattgagagtacagttactggtgcaaaatcagaatcctattcaccaaaaattgctcataccacaggcatgctcaccacttgtttcgacacatatacatgaccacaatccatattgatgactgataatactcactgctgtgtatgcaattgaaccttttgagcagacgatactcattataaaggtactaaacatactacttactg

SEQ ID NO: 75523 - DNA, 280 bp, Glycine max
  Clone ID: PAT_MRT3847_39210C.1
atggtgaagataactttattagtgatcattaatattgcaaggctgagtttattggaactaactaggaaagttttctatctaggaataatatcgcctttaccgatgggttggactaaacttatgcaactttgtcctttacaaagctaggagagagtgattgtttgaaggcaagcttgaatcacatgtctaatggtgagggggcggcttctgaaaacaaggcggggttatggtgccatattcattctggtccgtgtaataatctggaaatgcacgaagctta

SEQ ID NO: 75524 - DNA, 521 bp, Glycine max
  Clone ID: PAT_MRT3847_39211C.1
acggtgtgtgacctccagtgggtcgggctggcctaggggcctaaacccatattgaggcttacaaccttctaaattccctcctcacacccttctaagtttcataaccttgttagggttctttcaatattctcggattgtagtcaaatcacaaacaacccaccaattataagttgccgtttcccttctcacttgctcgcggaattggaggaacccttcgttcgtgtcttgcggcattgaaccctgaacacatgactcagaagcaaagagacagagtcccagattccatggaaacccagtacgaggagagtgagaaagacgagtcttcttctgtttatagttcctcagaagatgaagaggaggaagagatagagaaggggctggctgatgtaacatttgaggagttgcagaaagctcgctcgaatgggacacatgcatttttccagaaacccaaagaagacaaaaaattaaaaagggccaacaagaataggccaatggaggctagtagcaagaagccagtttct

SEQ ID NO: 75525 - DNA, 388 bp, Glycine max
  Clone ID: PAT_MRT3847_39212C.1
cccgaagaaaaggtcaagagcttctaggcgtgcacccaccactgttctcactacgggcaccgggaatttccgaggcgtgggggaggaattcactggcatcccagcacctcctttcacttcctcctcctcgtctttcccaagaacaaggttagatctctttgccacttctaatgcttcttcttcatccattattagagaacaaacaccttatcttcttcgcccctttgcacacaaagtccaagctcaagtaccttcttcaatcccaccaccctcttcctttcaacccatgttgaacaactaccaccaccaccaccaccagcataacccaattctcagcttccaatccattctccaaccgcatcaactcattggttctaaaactcaacaa

SEQ ID NO: 75526 - DNA, 368 bp, Glycine max
  Clone ID: PAT_MRT3847_39213C.1
ttcaaccaaggggcgggggccattttcctccgtcttgcctaccattaaacctatatccaataaaacccatgtccggtttttaccagacgaacctaagcagacactctaaaaaaccaaaaccccccgaaagagacgtgaccccctccactggaacacggtaactgaaaacgcccacatcgataaaaagccgccatccaccaaatatctgatcacacactcactctttggatttcttccgtgcttgagctgcctgagactctgttgccagtgcacccatatgggccgctgatggcccccctcacataccttgggccaaactctcctcactacgagcgtccttgctctacctgctagccatgatgtgggca

SEQ ID NO: 75527 - DNA, 364 bp, Glycine max
  unsure (1)..(364): unsure at all n locations
  Clone ID: PAT_MRT3847_39214C.1
attnnttttttttttttttttttttttttttttttttttttttttttttttttttttttttttttgggggggggaaatttacgcccccttccccaattttttttttaagggcatgtttgcaaagggacttttgataagttaagggccaatatttgaaaggaaaaagctcctttttgaatttggggggccccttgaaagccaaattggaaattttgggggggggggaacctttttgggggaaagccttaaccccagcctctttgatttccttgatttgggaacaaaattttttcccttggtcaccttccatgggggacttgaatagggggggttttttctggttttcccccaaaccccttttttg

SEQ ID NO: 75528 - DNA, 236 bp, Glycine max
  Clone ID: PAT_MRT3847_39215C.1
gttgttcttttttttttttgtgggagattttaacgaaatcttctccctggtgagaacaacaaatgtttttataacgacattttttaaaagagagttctttaaaaaccacaccctatttcgcgtgggcaaaacaacaaaatataaaaaactcctcctaagtcatcctctgagcagtttccttggaaaaaagcttctcctttgctctggttttcgctggggattgggatcccatgatc

SEQ ID NO: 75529 - DNA, 338 bp, Glycine max
  unsure (1)..(338): unsure at all n locations
  Clone ID: PAT_MRT3847_39216C.1
catccccttgctcatagcctgagacactgcctggtgaacacacggcgcgcggcaccatctctcttcgccagacaccaaaactatataacacgcgaagcccgtccttgccctccttggggcgtaccgtgacgatggccgntccaccaccaccaccacctnggcgcaccgncacgccctncgtacccaccgagcccgagaaaccaacgtggaaatcaaagatgaaagctaagggagcggtctgggggaagacagcgatggacaagggcatcattttgtcagacaacatcggcggcaaggtcaacaacatcgcagagaagcggttcgggaccgaacacttt

SEQ ID NO: 75530 - DNA, 627 bp, Glycine max
  Clone ID: PAT_MRT3847_39217C.1
ggctcaccagttttttctgcagagatactatccaagttagtgttctctttaatagcttagggtcatcatcagcttctactgtgcctgttgcagaatactttccagtccaggaagaaactagactccttgttgtggatatcaagctagatgtactctgctattcttccagggagcttccactgaaatatgcagtttcaaatttaatcatacctggcttagttgaccaattaaatgtagtgcagaagttgatgttgcctaaccttttggcacaacaccctcggctaaaatcttatcactttagtcctcctgggattctacatccaataacagttttctatgaactgagttttggggagacagaaatgaagcaagttgaagttaggagatccttgcactcaaggttgggattaccgtatgatcgtccccttctaagaatttctaatgccttggatttttcaaaattgaagaacaatgatatggtctctctacagaaaggttcaactttgctcagagatgtacacattgggattccaagtagcggggttactgggggaactgtttcccttgttcaaggttcatatgaatacttccattatcttcacaatggttataatgattcgggatggg

SEQ ID NO: 75531 - DNA, 415 bp, Glycine max
  Clone ID: PAT_MRT3847_39218C.1
ggcgagaaagacgaacgaaagggtaaccggtttacaattaaataaacctaataatcaaaggtgaattttcaaatgctagctagacagcaataatcactacaacaattgtatgaaattgcaacactaatattgttacttctgacttcatatgtgcgcattagatgacagaggcaagaatttgtcattaaagaattcacagttaacgattctgtgagaaccttacttccctcacctctcaacgcaatcaattcgaattgaagataatagctagtaaactaagcttaaactatattgctgacatcgacattttttttcttttccttggagacaattatgtgttgaaatgagttagaccaaattacattaaaactccaaccttaatttttttcttgatccaattataatcattttttaa

SEQ ID NO: 75532 - DNA, 534 bp, Glycine max
  Clone ID: PAT_MRT3847_39219C.1
aattcggctcgagatttgctttgagtcagtaaaataaatccatcagtcactgacttgatttctatgccaagaaaatagtcaagtttccccaactgtttaagggaataatgagaatgaagcttggtggtgagttgctgaaccagaacattggaggtacgagtaataatattgtcatctacataaacaagaatgtagatgatatgtcctttgtctttataaacaaacaaagaagggtcacactggctaagagagatgagagagaagggaagagagagaaacagggagtgggtgagagagagatcccgtctaaactacgcaaggaatgggtacgattaacatgatgtgatgacagtggtggcatgatgaggggagggaaggagtagaaactggagggacacatcagatgtttattctttctacttcacacgttttccgaaagaaatttacttgtaaagtatggtattcttttgtagaatattaagttcataatcttgtgttaggtgtgcagtaccgttgaatgtgactggagcatga

SEQ ID NO: 75533 - DNA, 351 bp, Glycine max
  Clone ID: PAT_MRT3847_3921C.1
ggggatggaatacataaatgtgctctattggaacatgtcggttttcatccgaacccaatttgaaacttacatctcctggttaacatattaagctaatagaagctttatataataatctatacatgtggaacaagaaaaaactatcgaaatactgcgcttataggaactatctaaatttccattcttgcaacctctgattttccccctgatctttctctaccttcagtctatttatagacatagatgggttctttgctttacgtgcgagcatgttatcatatggctgagaatcttttttgtcaatttccggtagaagatgcgttaattttttctgaaacacctgaacatctc

SEQ ID NO: 75534 - DNA, 479 bp, Glycine max
  Clone ID: PAT_MRT3847_39220C.1
tcactgatagcagcgatggtatgcgtcttcttctcctttgaatatgtgtttgtgttaattaagcttatatttatttgtatttgcatttgatacacaggggatcgatcttaaggctgggggtaagagcaaaaagaccaaaagaacagcaccaaagtccaatgacatctacctcaaattacttgtcaaggttcctcaaattaatctttttgctaccaaaagaataacaccgtagtcttactcttactgtatgtggagttagtatctttcttatgacgttgtaatggacttaaggctcccagtgatgctgtctttttgaccatgctaatgctgataacatatgattattactttcattatactgagggaactaggtcttttagtttttgtggcctgtggaattttaagcactttaagtttgcttaagcttttactagtttcagacttcagaattaattgtttctttgctatctataaatttg

SEQ ID NO: 75535 - DNA, 539 bp, Glycine max
  Clone ID: PAT_MRT3847_39221C.1
aaaaaaagaacccgccccgggggattcaatttaaagaataaaggccggggggggggggtatggggaaaccaaattcttaatggggccctaaaaggacaaaacgaagggaaacatgggacaaccccgggggggacttaaaaaaaaaaaacaagggccggaactactttccaaaaaggcccccccaaaaactaaattccccaggggggggaccccccaaaaaaaatctaaagggggaaaaaaaaacccgggggaaaggctgggaaaaggctttaccatgggagctaaaaagaaacttggccttaaccaaaaaccccccaggggaaaattccccggattcaacagcaaggggaagggcagaaaaaatctttacaaaaacaaccagaaatccaggccgatcagggggctccaaaaacaggaaggttttattggggcaaaaaaaaaaaagggtaagggggggggctatgtccaccccaacccgctctttgggagggaaaaacccaaaagcgggtcccaaggctaaccgggaacttgattccggg

SEQ ID NO: 75536 - DNA, 184 bp, Glycine max
  Clone ID: PAT_MRT3847_39222C.1
ctcaagccgaatccgctctagcttctcgagtgatgcttactattacagatccgaagccatcttccacttgcgtaaagcttctcagcgctcagggtgtaatctttttcatccacctaatatctattcctcctctttcaatccatcaacaaactggtatacttccccttcagactcaccacatctt

SEQ ID NO: 75537 - DNA, 290 bp, Glycine max
  Clone ID: PAT_MRT3847_39223C.1
atattgtttctttttttttttcttttttttttaaggacattactttctggtgcttgttggttatccaattttacctatagtaagcctggatagacccgggaatatcgaaccggatagttgtggcctgcgagatatcgctatacgcagacaatttaaaactgggtacaatcagggaccaagcagtgtcctgcctgaaatggctaacgagtgaaaaaactaccataaatacaatcccgaacaataaacggtaaagactggggagcactaatgagggcggcaacataaatgaa

SEQ ID NO: 75538 - DNA, 320 bp, Glycine max
  Clone ID: PAT_MRT3847_39224C.1
cgggcccgaaaaaaaaaatcctttggaccaaccaaacccgggggctttttaacaaaggcacttttattgcaggcctttaaaagggttttgtaggaacaaaagcaaccctaatccccccggcgttgggggggattacatgttaaattcttgtttgcccaactcaaaggccaaaacgcttgggggtttgagaacccgctaagggctttaaagggctcgggaaatgatttctgggggaggcccgaaaccctgaagggttttggaaccatcccccccacgccaaaaaaaaaaggccaggcccttttggggccaaacaatgggtt

SEQ ID NO: 75539 - DNA, 684 bp, Glycine max
  Clone ID: PAT_MRT3847_39225C.1
aggatactatcaatttgccattccctaccttcaatgcctctgagctcattaagtcgtttgtcaacgtggttttctgcacaagagatggttgccctctctggggctcatacactaggagtggcaaggtgtgcttctttcaagaaccgattgaaacaagtggatccaactttggatgcacaatttgccaagacactagcgagaacatgcagttccggcgacaacgcaccgcagccattcgatgccacgagcaacgattttgacaacgtttacttcaacgctttgttgaggagaaatggggttcttacatcagaccaaacactctacaatagccccagaaccaggaactttgtgaatgcttatgcattcaaccaagccatgttcttctttgatttccaacaagctatggtcaagatgggcctgcttgatgtcaaagacaattccaacggtgaagtaagagaaaattgccgcaaaataaactgaatcaattgagggtttgtgatggttttagctttaaggcaaactccaaacactagttaaaagtacattgcatgcatagtatatgtataaatgtgtatgcttaactagtacctagctctattttgtatccgttgggtgtattaacatttctagttgtaatccttaatcatcaatatatttcctatatatgtggtgtggaagtaaaaa

SEQ ID NO: 75540 - DNA, 484 bp, Glycine max
  unsure (1)..(484): unsure at all n locations
  Clone ID: PAT_MRT3847_39226C.1
aattcggctcgagcggctgcgagaagacgacagaagggtctgcccaatccagtcaacctaatatgtaaaaatcattaaaatatggtagaaaaggtgataaagttaaaaaactactcaagcataatgcagaaactgtaatagttcaggatatgcatcaccgtcaaaatagaactctggtcttagtcctttggttggatcaaacccaagttttgtctgtggcactgcacttgtgagtattatgagggcatctatatctgaaattaagacttgttgatactccatctttatgtacacaaatcctgattttactgccatggttacaaagcaaacgaggtatgtaacaagttgttaaaggaaaaaaataagaacacataagccaacaacattcttcaaattataacgagtttccattgagaaaactagaaagaaactgacanttatgtatgggaatcaaaatataggtgcctaaacatctntaaactta

SEQ ID NO: 75541 - DNA, 324 bp, Glycine max
  Clone ID: PAT_MRT3847_39227C.1
tttttaacatgaaataggtccaaagctaacccattgaactggggcgaaagcaaatacttggtcaactttcacccacaaaataaaatgtcgccccaacattagggggggtcctatctgcaattgaaaataacaggacctcacatctagaagcccgcattaaaaatggatcccttttatgcgaagcacttcatcaaaaaggacttacaagtttgatcctcttttaactaaacggtacaaactaccactgcgcttggcagatctgcctgctctatagtctgagtttcacgttcttgagtaaatggaaatttttattttgttgagaac

SEQ ID NO: 75542 - DNA, 343 bp, Glycine max
  Clone ID: PAT_MRT3847_39228C.1
tcggttttaaatgaaaggggcccattggtaggggccaaggttggatatatacatacaaattgttggtcctcatgatgctggaagcaaaggaagactgggatatgcttaatagataccatatgttgagacagttgtgcatgtctaaagagctgaagtttactttgactccttccctgtggaggatgatagtcaagagggagttgctcacattgttgaacagaaacctggagtctatgctccactgtctacaaaaaataaatttggtggaaacttccaaggaatgacaactgtatctaccttgtgacaaaatttctagtgtattgactacaactgtctagagttt

SEQ ID NO: 75543 - DNA, 557 bp, Glycine max
  Clone ID: PAT_MRT3847_39229C.1
cttactcttccgctttgtctgaacaaccagctttactattcaactgttcttcttctttcatctctcgcctatcgaattcgaacccgacacaagatcaaatttttagggctcctcaatcctctctctctctctctctaatctatccctcttcttcttcgcttgtatgaaccggaattagggttttgcctctattatcattgtataatttagaattaggtccttttttgtttcaattttgtaaatttataatttttttgttcgcttaattttgatttttcagttttgatgtaaagaatacaataacagcgatgcaattgctatcctgtaatctagtttctacatcttcgtcgcgcaattgtatgtaaattagggttaggattagggtttttggattgtttttggtgtttgattttgtgggcatggagaattcgcgtagaccgttcgatagatcgcgagaaccgggtccgaagaagccccggttgatggaagagctggatcgggcttcgaattcgggtgcccgacagtttcatcagcgacaagtggcttctgggatcacc

SEQ ID NO: 75544 - DNA, 529 bp, Glycine max
  Clone ID: PAT_MRT3847_3922C.1
actcaacaaaaagagctagagagaagataccccttaaatcctaatttctacctcaaagaaagtactcttcaaacattttgtattcactgaagaaggatctttgcacttgcacctgcagccatctaccatggttaagtcagaacacaagatcaaaaccgaaccatcatcaaaggcaatgcggttatcttcaccctcatcatcaacatcagattgcaagaagaagaagtacaagggagtgagaatgaggagctggggatcatgggtttctgagattagagcaccaaatcagaaaacaagaatatggttaggctcttattcaaccccagaagctgcagctagagcctatgatgctgcacttctatgccttaaaggctcctcagcaaatctcaatttccctttaagctcttcacaacaatacattcctggagatgctgtcatgtcccccaaatcaatccaaagagttgctgcggccgccgcatatagtttcatcgacaatgccaccactcccccttccccaccttcggcttcg

SEQ ID NO: 75545 - DNA, 863 bp, Glycine max
  unsure (1)..(863): unsure at all n locations
  Clone ID: PAT_MRT3847_39230C.1
tcggctaacttgcggttgccacgattaccttgtagcttcttcctcctcctttctcatcccgttcttattcactctgaaaccctaatcatgccgccattagcgtctctgcaacttcggaggctcttactccgttctcgttccttaccattcacatctccctctccgattcatcactctcctctgtttccccgacattcctcttcccatttctattctcgaactctcttcaccccttcgttcttcataacaagacatttctcatcggaaacccaaacggatgagattgctagctccctctcctcagagcttctcaaagagccagactcggacgctctctccgtctcgcagcgcctcaacctgagcttctcccacatcactccaacccccaatttaattctccaaaccctaaacctctcccctcaagctggccgcactgtattagggttccaccaatggctctcttccaaccctcaattctcccacaccgacgacactctttcatacttcgtcgactacttcggccgccgcaaggacttcaaggccacgcacgacgtcctcgccgccgcttcccccgccgtcggccccaaaaccctagcctccgcgatcgaccgcctcgtccgcgcgggccggtccagccaggcggttcagttcttcgagcgaatggagagagactacgggctgaagcgtgatcgtgattccttaaaggtggtcgtagagaagctgtgttcggagggtttcgctagttacgcggaaaaaatggtgaaggatttggcgagggagtttttccccgacgaagccacgtgtgatatgttgatcagagggtggtgcattgatgggaagctcgatgaagctcanaggctcgc

SEQ ID NO: 75546 - DNA, 628 bp, Glycine max
  unsure (1)..(628): unsure at all n locations
  Clone ID: PAT_MRT3847_39231C.1
accgttgattcgcacaattggtcatcgcgcttggttgaaaagccagtggcgcgaactaccgtgcgttggattatgactgaacgcctctaaggaaacttcaaaagtagagttgtgatcatgtatagaagcagtgcaatatgagttctgcacagaaagcttggattgtggcaactagtgttggagttgtggaggccttgaaggaccagggcatctgcaggtggaactatgctttaagatcagctcagaaacaagtcaaaagccacgttggatctttgtcacaggcaaagaagcttccctcttctgctatggtttctacttcttgcggattaaaggggcagaagcagtcagaggagtccttaaggactgtcatgtacttaagctgttgggatcccaattagaccactaagtagacataaattttttttatttaatttgaatccacaaagatgaatgaggcctgggatttctattcctctgttggctttgttttgcacaaagatgaatgtgatgtataggaattcttttgagttgaaaactctntaatttacaagtgcatcaaattgtcacaaatagtaaagtaaacgaaagttcgagtgtaagttcacatggactttgtttatacttagat

SEQ ID NO: 75547 - DNA, 1115 bp, Glycine max
  Clone ID: PAT_MRT3847_39232C.1
cccacgcgtccgcaattttcttcgcctctactttaggatcgaaaaaagctgatttttttttttctttagtccctttgtctctatgtccacctttttgtattttcgctatcgttttgcccaatttttttgtatacaaatttgataagttgtttattgtactgggttaattagtttttgcagtctacaaattttgtttggggctctgggattggagagcttttgggtgtagggttttatgttgctgtatagaaaacagaatatggatttgtattcttattgtattgataagagggtaggggtctaggggataagggttttttttatcatttatttttaagtttgttgattttgatattgtctttggtttgtggaactgaaattggaaattggaacactcgactgaaaccctcgctttgcgagcaattcaaaaccctattggaattctccattcacacgttgaagcttttgacgtcatggctacaccattggtggcagggattgcagtggcggctgcggcttatgctggtagatatggtatccaggcttggcaagcattcaaagctagaccaccgagtatgcgtaaattttatgaaggtggtttccaggctaccatgactagaagggaagcagctcttatactgggtgttagagaacgcactccaacagataagattaaagaagcacataggagggtgatggttgcaaaccatccagatgcaggtggcagccattaccttgcatccaaaattaatgaagcaaaagatatgttacttggaaagaccaaaggtggtgggtcagcattttgaagcccgtagaagccttgctttccatcattttgacaatttagaccttggtcctcattgatgtcaattattaattttttgggtcatcgcctaattaattcttgtaatccaatagtgtgagaaaattggacatggttatgctcttatcaggatgataaaggtccattgtaacttggcctgtgctatagaagttaagattgctatcaataaaattgatttgtactggcacattttactaccagttcttgccttgcatgtgctatagaagttaagattgctatcaataaaattgatttttactagagcaaaaaa

SEQ ID NO: 75548 - DNA, 408 bp, Glycine max
  Clone ID: PAT_MRT3847_39233C.1
ccgttaccttctatgaggttcagggtgagatggcaccaacagaagccacgttgctctttgatgatgctgaaacttctaaaggttccatggaggacattaataagtatcaaccaaggagggaccatctcacacccacaccagggggaacccttatgcttacagcactatcagcacccttagtgaggaaggcgaaccggacaaagcgagcccactcccaaaaaagtcagccgaggaaaggatcgactacaatgtacagcacaggtgggctctccaggaatacattgtaaccccctgcgctgagctatgaagagtcctccacgcgggcgcctcattcatgaggctcacacgacccattttcaagattgtgaaacatggcattgtgggcgaacacaaggaacaatgatgcta

SEQ ID NO: 75549 - DNA, 1377 bp, Glycine max
  unsure (1)..(1377): unsure at all n locations
  Clone ID: PAT_MRT3847_39234C.1
cggctcgagctcgagccgtatcggctcgagttctcactctctctctactcgatctntatgcccacgcgtccgcacgcgcaagcaaataaaacccaaacagacgcttcggtacggctgcgagttacgtctaaggacttattgcacaagcaaaagaaagcacggggaacaagcaaaattaagcacaaaagcccaaccctctctctcgctgttggtctctcctatttggcattcgcagatcgattacgaagtaatttcactgaatcttattgaagatgtttctcacaaggactgagtatgaccgaggagtcaacaccttttctcctgaaggccgtttatttcaggttgaatatgcaatcgaagccatcaagctgggatcaactgcaattgggttgaagacgaaagagggtgttgtccttgcagttgaaaagcgcatcacttcgccgcttctggagccaagtagtgttgagaaaattatggaaattgatgagcacataggttgtgcaatgagtggattgattgctgatgctcgaacacttgttgagcatgcacgggttgaaactcagaatcataggttctcatatggtgaaccaatgactgttgagtccacaacccaagctctttgtgatctagccttgcgttttggtgaaggtgatgaagaatccatgtctcgaccatttggagtatctcttctcattgctggtcatgatgagaatggacctagcttatattacactgatccatctggcacattttggcaatgcaatggaaaagctattggttcagggtcagaaggtgccgacagttctctgcaagaacaatacaacaaggacctaactcttcaagaagctgagactattgctttatccattttgaagcaagttatggaagagaaggtcactcccaacaacgtcgacattgccaaggtggctccaacatatcatctttataccccctctgaggtggaagctgtgataagtcgtctatgattttcttttcgtgactttctctattcaacatttgtgtttcctatcattcctgcctgacgtctaattattgagtattatgcggaaacttttttggtggatgatgtttacatgtgctacacttgtggccaagttgtacactgtacgagattctggtgtcatttgctgcattcagtctagttgaaattgaggactaaaaaggcttcaatggttgggaaaatttagaactattacccgattgggggaggcaatgaagggaaaaaagatttacacaacgatctctatgcattatgtatattttattggaagaatgaagatttatttttaccgttttctaaaaaaaaaaaaaaaaaaaaaaaaaaaaaaaaaaaaaaaaaaaaaaaaannnnnnaag

SEQ ID NO: 75550 - DNA, 392 bp, Glycine max
  Clone ID: PAT_MRT3847_39235C.1
gcaatagctgaaatcactggactaaaacctgctattgatctgtactataggcgactctacaacctcaccaattttcactcaaacaatacatgcctcgcctttcgcactttccgagggggggaaaatccacatagatagaccaggaggtccttacttatgtgctggagaacatgacttacgcatcaatgtctcattgcatattgacattaatgcatagtactcgttaagagcagctgttgatacctactgtccaatattatctttctgtgcctaggatgttttgaagatgttatgtttgaagaaacttgagacttgtttttttcatctattttattatcagacataatgtgtggaacgaagaatacttttatataaattgttttgcactaaaa

SEQ ID NO: 75551 - DNA, 438 bp, Glycine max
  Clone ID: PAT_MRT3847_39236C.1
ttcgtccatgccatgcttcctctccaatatcatcaaccatgctcaacacctcctctctccttcggtggattagcaaaaagttgcgaccaaggaattcaattagcaatggagatagcagcagcgacacctttcacaacggtgccagtactgacaccgttgttgtggatgacaatccatttagcagcggggtggagtgttacgcctgcacgcaggtaggcgtgccggtgtttcactccaccagctgcgacagtgcctaccatcagctgcagtgggaggcttctgctggatcgtctctggttccaatccagagccggcccaaaaaggtcctcggcttccggaccgtgtctggtttgacacgggggccgttcgggcggtttctggatccgcggagcaagcgagtgcagaggtggaaccgcgcgctgatgctggcgcgtgggg

SEQ ID NO: 75552 - DNA, 252 bp, Glycine max
  unsure (1)..(252): unsure at all n locations
  Clone ID: PAT_MRT3847_39237C.1
aacgtaggatttaatgngaagaatgttgcagtcaaggatctcaagcgtggttttgtngcctcanactctaaggatgatcctgccaaggaggctgccaanttcacatcccaagtcatataatgaaccatcctgggcaaattgggaatagnatgcgcctggcctgatgccanactctcacaatgccgtcangttggcgnggtgtnccaagatggcagggnctgtaagagatgagagggccaatctgaaatgggg

SEQ ID NO: 75553 - DNA, 418 bp, Glycine max
  Clone ID: PAT_MRT3847_39238C.1
cgcaagagaaggatggggagccctccaggtaggcaaccagagatgaaaaagcgtcttgattcaagttatcacaatgatcttgccgaataaaggaactcgctgaataaaggaactgggaagggggagagttggctatgtaggcagggaaagcacaaggaatggggagcaaaattattgttgaggtgaatattctgatgtcctttatttgcttattgtgatttagctaatcggttgctaaagaattgatgattctggatgctcttgtttgccttatacatttcttgtttaaggaacgggatgcctcagttttggtagtgccattaaaggcttattattatttttttttccgggctgggagggggttgtatgagaaccttgtgctatttatttaatttaatacatatgaatatatttctgc

SEQ ID NO: 75554 - DNA, 1744 bp, Glycine max
  Clone ID: PAT_MRT3847_39239C.1
ttccggtccggattcccgggtcgacccacgcgtccgctcccccatttggcattcgcagatcgaatacgagtaatttcactgaatcttattgaagatgtttctcacaagaactgagtatgaccgaggagtcaacaccttttctcctgaaggccgtttatttcaggttgaatatgcaatcgaagccatcaagctgggatcaactgcgattggattgaagacgaaagagggtgttgtccttgcagttgaaaagcgcatcacttcaccactgctggagccaagtagtgttgagaaaattatggaaattgatgagcacataggatgtgcaatgagtggattgattgctgatgctcgaacacttgttgagcatgcacgggttgaaactcagaatcataggttctcctatggtgaaccaatgactgttgagtccacaacccaagctctttgtgatctagccttgcgttttggtgaaggtgatgaagaatccatgtctcgaccatttggagtatctcttctcattgctggccatgatgagaatggacctagcttatattacactgatccatctggcacattttggcaatgcaatggaaaagctattggttcagggtcagaaggtgccgacagttctctgcaagaacaatacaataaggacctaactcttcaagaagctgagactattgctttatccattttgaagcaagttatggaagagaaggtcactcccaacaacgtggacattgccaaagtggctccaacatatcatctttataccccatctgaggtggaagctgtgataagtcgtctatgattttctttttgtgactttctgtattcaacatttgtgtttcctatcattcctacccgtacgtctaattattgagtattacgcggaaacttttttggtggatgatgtttgcatgtgctacacttgtggccaagttgtacactgtacgagattctggtgtcatatttgctgcattcagtctattgaaattgagtactaaaagggtttcaatgattttgaggagacgatgaggaaaaaaaaaaaaattacaattctgaaagatgtaatggatgaggataatacattgagagggagctggaagatggaattgaattagcagcgaggatgtgaaagacaaggagaaagaaagtggtgaagatcaccatgggggggagaaccatgaggaaactagagacgggcggtacatgaacatgaaggtgcagtttcagaaagacatggacgaagacaatgctgaagaaggggagatgatagacgatgcttcatcctcgttgaacaatcgcaagagaaggatggggagccctccaggtaggcaaccagagatgaaaaagcatcttgattccagttatcacaatgatcttgccgaataaaggaacttgccgaataaaggaacttgctgaataaaggaactgggaagggggagagttggttatgtaggcagggaaaacacaaggaatggggagcaaaatcattgttgaggtgaatattctgctgtcctttatttgtttattttgatttggctaatcggttgctaaagaattgatgattctggatgctcttgtttgccttatacatttcttctttaaggaacgggatgcctcagttttggtagtgccattaaaggcttattattattattattattatttccgggctgggagggggttgtatgagaaccttatgctatatatttaatttaatacatgtgaacataattctgca

SEQ ID NO: 75555 - DNA, 1601 bp, Glycine max
  Clone ID: PAT_MRT3847_3923C.1
ggggcagagagaaagatggatccatgcctaacttcttgcggtttgaggctccttgtgttctacaaaacaacagggaaattgttgataagaatggtgaaataaactacttcagtggcctgttcctttgtagaccaaccgggcaagggaaatccatgctgatagttaggtttggaggaacaaaaagatctccactagcaaaagtgtttcctaagtggtacttccatcagaatgcaagcaaggtgtttgagcaagacatgggattcttgtcatcacaaaatgaaattcttctgagagaaaaggttccaacaaaggaactatacctgaatctgaaatcatcagacacatgggttgctgaatacaggaagtggatggacaaagcggggcatggaatgccatatcattttggtcacagcactatctctttgcctaaagagcctgctgtggttgaacacgcacctgctggactagtcgcaggacaatcagcttcctcaccaaccaaggggggcattggaacaatgcatgcccctaattttgccaacagatattttaggcatgtgattcattgcaaaggatgtagaaccgtcgtcaaagctttcgaagcttggaaaaatgctctttcagctgtggcaattgcattaactgcgttggcaattctgctttctgggagacaatggaaggtccttctcttggcatctgcagctctctgctctgttggagtctatgcttgctcaaccgccattgcaatgaatacaacaaattttattaggacacataggagattgtgagtgactggttgtaaaaatagttgttcaaatgaatactaaacagtttgtctaatgactaattagttgttacagattgtgtttggaaaaaaacaccaaaagcaaaagtgtttcctaagtggtacctacaccagaatgcaagcaaggtgtttgagcaagacatgggattcttgtcatcacaaaatgaaattcttctgaaagaaaaggtttcaacaaaggaactatacctgaatctgaaatcatcagacacatgggttgctgaatacaggaagtggatggacaaagcggggcatggaatgccatatcattttggtcacagcactatctctttgcctaaagagcctgctgtggttgaacatgctcctgcgggactcgtcgcgggacaatcagcttcttcacctaccaaggggggcattggtacaatgcatgccccaaatttcgccaacagatattttaggcatgtgattcattgcaaaggatgtagaaccgttgtcaaagctttcgaagcttggaaaaatgccctttcagctgtggcagttgcattagttgctctggcaattctggtatctgggagacaatggaaagcccttctcttggcatctgcagctctgtgctccgttggagtctatgcttgctcaatcgccattgcgatgaatacaacaaattttattaggacacataggagattgtgagtgactagttgtaaaaatagttgttcaaatgaatactaaacagtttgtcttacgactaaatgagttattacagagtggttgtgtctggcataacacttataaagtttttgagtaattttgattttgc

SEQ ID NO: 75556 - DNA, 1123 bp, Glycine max
  unsure (1)..(1123): unsure at all n locations
  Clone ID: PAT_MRT3847_39241C.1
ggacgcgtgggctgactcacccaaacaaataaaacaaacggacgcttctcattctctctctactcgttttgaagatgtttctcacaaggactgagtatgaccgaggagtcaacaccttttctcccgaaggccgtttgtttcaggttgagtatgcaatcgaagccatcaagctgggatcaactgcgattgggttgaagaccaaagaaggtgttgtcctcgcagttgaaaagcgcatcacttcgccgctcctggagcctagtagtgttgagaaaattatggaaattgatgagcacataggttgtgcaatgagtgggttgattgcagatgctcgaacacttgttgagcatgcacgggtggaaactcagaatcataggttctcctatggtgagccgatgactgttgagtccaccacccaagctctttgtgatctagccttgcgttttggtgaaggtgatgaagaatccatgtctcgcccatttggagtttctctactcattgctggccatgatgagaatggacctagcttaatttaggtgggaaagagaaagaaacagaaagatagagaaagaaagagggaaaaagagaaggaaagaaagaagaaacagaattgagaggatagaaggaaagagaagagaaacagagagatactacactgatccatcgggcacattttggcaatgcaatgcaaaagctattggttcagggtccgaaggcgcagacagttctctacaagaacaattcaacaaggacctaacccttcaagaagccgagacaattgctttatccattttgaagcaagttatggaagagaaggtcactcccaacaacgttgacattgccaaggtggctccaacatatcatctttataccccctctggggtgaaagcgtgataagtcgtctatgattttcttttcgtgactttctctattcaacatttgtgtttcctatcattcctgcctgacgtctaattattgagtattatgcggaaacttttttggtgggtgatgtttacatgtgctacacttgtggccaagttgtacactgtacaagattctggtgtcatttgctgcaaaaaaaaaaaaaaaaaaaaaaaaaananagcggccgctccacgaggatcca

SEQ ID NO: 75557 - DNA, 185 bp, Glycine max
  Clone ID: PAT_MRT3847_39242C.1
atttccattcccacttccgtatgcgatgtacgacgtacgacattccctctgtctctctcccttgtctggcacaatgaattctatcctacctatcatgagttctaccttactccccctttacgctctcttcttaccttcccttcgctactttctcgaccgagtcatattctagaaagtggcgagac

SEQ ID NO: 75558 - DNA, 432 bp, Glycine max
  Clone ID: PAT_MRT3847_39243C.1
tacctacattatggagcctaaatacaaggcccaaaaataatgaaatcctgatctaatatgtacaaagataaatgggttcatacttagcccatgggtccaaaatctatcctgaggctcatgagaaccctagggtcttctcttgccactatggcctaatcttcttggagtcttctatccaatgcccttaggggggtaggattgcatcattccctcccccttgaaagggatttgaccttaaatccagaggttcttgaaactcagggattctttcctcaacacctgtaaaaagaataaaaacatatgtattagtggtgttaggtatgttagagtaaggtaaggactgaaagcccttttccttgccatttcccatgagagaacatggttcttcaccaactcaatgagtggtgctacaagtatagaaaaatatgggat

SEQ ID NO: 75559 - DNA, 662 bp, Glycine max
  unsure (1)..(662): unsure at all n locations
  Clone ID: PAT_MRT3847_39244C.1
agtgaagaaatatactaatatagtttataaaattacttctttaatagtatactatttattttaattttaataaaaatatattttttttaaatcaacttaaccaatactcttgaatttaagtacatatatgcaatgcgattttttaagaaggataaataaatcatgtattcctccattaggtgtcactttgtcatacaccgannntaccaccggacactgatttgatttgtgaagcatcatatcttttacggattccccttatctttgaacacgaatttaaaagaattatctgctgtccctcccaaatttcatattccaaaataaagtgactttatatctgcataatcttcaaccactatatttttttaaccgatgaattcatgccaactaatgacttatggtacatttccacgtaatgacgannntgtcactagtcttggatctagccccaccgaaacagtttacatggtctggtcttacatcagtgcaatcaagtctaacgaagtaatgactannnaatcactcacaagtcttataaaatcactaaccttatcctcccactaccattgttgaaactatttttaacttgtctatatcaatttaagggttttaataaggtntattttgctaaacatacttgtgacgtatgttttaatttaact

SEQ ID NO: 75560 - DNA, 466 bp, Glycine max
  Clone ID: PAT_MRT3847_39245C.1
cccacgcgtccgcaagtttactgttatttgatactcatttttattgatttgttttccaatggaaaataaagtcatgtttttattgtggtatcaactatcaaggcaagttactagtgtgtactctgtactctttaatactttcgattgtgccatgtttttagaagtcatatagttgttacttgctacttgtcaattacctgtttggatataattttttccataacatatagggcttcattattctaattcgtacaacctattaaatgttatgtgccacattttcttattttaagttcttaaattttaacctattatgtgtgcatatacaatcttgtgctttgcagtcaatttccattcgagattttgatcatcatgccacccgcattgttgggaagtatgaggtttgtatcacctaagatttttaatattctattttcttggcttatctcttggttttgattcatgt

SEQ ID NO: 75561 - DNA, 192 bp, Glycine max
  Clone ID: PAT_MRT3847_39246C.1
ggtactcgtccataaccagtcgcgggctccatactcactggtcgccctctcccttttttttttttttttttttaactctcaaaccatttgcgctgtctaactaaaaaactttttatttctttaatcataataaaagcccccttgggagggcctacgttcaacaaaagagcaccttctttaacttattcccct

SEQ ID NO: 75562 - DNA, 436 bp, Glycine max
  Clone ID: PAT_MRT3847_39247C.1
acaacaatgaatttatgtacaaaaaaaaaaaagatggtttttaacacgagacaactggcccaggtgacacagggttaaaatcgtctgatggaaccgcttccattatctccactttgaaagtcacagtctttgtagcgatcatagagtaggagttgtcccaaacaagctcgtattttccttcaggaaccatgatatgactctcgtgccatttgtttccctgatatttgaaatatccacaaacgtcacgctttcccttcgtagtaatcttggccacagaaaagccaacatctgaagaaactgttgggaactgccaatacaaaatggtgtcctctttggtctctatttcaacaacatgctgttgcccagctcgaatacaaacagcctcctcttcttctggttttctgctcggatctccatagataaaggttcccccgtc

SEQ ID NO: 75563 - DNA, 208 bp, Glycine max
  Clone ID: PAT_MRT3847_39248C.1
aaacggcacattgagcacaattggcggtgatgagaccatttgcacaatgagacttcgacaaaacattggtcagaattcatcacctgacatgtactaccctgaagctggcagcatcacaatcgacggggttcgtgatttaccaggccatctgctgctcaaactcattgcccagtatggatcatctccgtagaatgctgtgttcgtgccc

SEQ ID NO: 75564 - DNA, 146 bp, Glycine max
  Clone ID: PAT_MRT3847_39249C.1
aggaccccagaaaaagttgcccgaaaaagccttttgtctttttcaaaccagtccgaaatatttactggaaacacaatgacttaaaaacctttccggatacaaaatccctaggttttcattttcaaaagagcctttcacaaaccctt

SEQ ID NO: 75565 - DNA, 709 bp, Glycine max
  Clone ID: PAT_MRT3847_3924C.1
ccaatctataaacgagggtaggcaaatggctcaccaatagcataaataattttttttttcctcaccaattaagaaaaaaacccccttaatagggggggataaaaaaaagttcaaggccccttgggaaaaacccatttaacgggccatggccccccctataaaaaaaaaattccagggcggaagagaaggaaaccaaagcctaaaaattctcaggaaaagggggggatccatccccaaaaaaactttgataataaacccccccacaaaaaaaaggaggggggggggaaattggggggggggcaaagcaccgggggagtcagtttttacccccttttttattactttgggaaggccctggctgggggatgaatcgccatttttttaagccttaaactaaaagcttcaaggggaaaccaggagaggcaaaacctggggggggggggggccccctgggggctaaaccagcatttgaactttgagcgtgccctacataaacataaccagctccttggggggctcaccgggttgaaaccgcccggccaaaaaaaccccaacctttttttttttcccagggaaaaaccagggggccccaaagtgggttttctctcaaaaatttgggggggcaggtcttctaattagggggggcccccctaaaggctttgtccacgggggggagggggcccccgtgttcttcgggggggcccttggc

SEQ ID NO: 75566 - DNA, 580 bp, Glycine max
  Clone ID: PAT_MRT3847_39250C.1
cggtaaggagtgggaaatacccaagtaccagcaagtgcttcagcccattgttcctctagaagggcaagagatgcaagtgaaggcaaaaaggccaaagcctcactgtgtcaactgtggttctgaagagcatcagatgaaggaatgcccaatgcctcggaatgctgctcggatcactgagaagaggaaagagtacatggatgcctgtggcgaggccagcggccaaagcttccagcagcgctatcatgccgaagaagtagaagagagatttggaagattcaagccatgagttattagtgaggaacttcaagatgcactgggtgtgacagacaagagtgttgcccctttgatctaccgaatgcgccaggtaagctacccaccgggctgggtgaagggggctgaactggagaatggtgggctggggctgtgtgggtggagacggtgacgctggtggggaaacgggggctgggggaaatgcggggtgggggtggggcctgcggtggggtgggggtggggggggctgtggggggggggggtggggtgggctgggggggggggttggggcgtggaggggggggtgggg

SEQ ID NO: 75567 - DNA, 418 bp, Glycine max
  Clone ID: PAT_MRT3847_39251C.1
ggggggattcggctcgagaagttctctgaaattaagcttgcgattagttagatacttagggtgtgtttagtgtggaaaactgtttttggttttcaaataaaacttaatgaggttgcttagactgttggcggagggtagggtggtacaagacacagagcagagtgtagaattgaggaagatgttgaacaagatgagataatattattttcaaaacttaatagattttggatgagaaattaattgttgatcagtagtataaaattgatttacaaaacaatttttttaaaaaagaaaagtgagaatggaattaagcattccctttttattatctaggttttttttttttctcttgatatgcatttcctctacattttatgttatactgtgttatgcttttgcgcggcttaacaataaaatg

SEQ ID NO: 75568 - DNA, 1576 bp, Glycine max
  Clone ID: PAT_MRT3847_39252C.1
gctcgagacctagggaggacacattcaatgacacaaaagcatactcaagtactggcttgagacagtgtgcaatgtgtgagaaagaagtgtatggagaacagtctatttgctgtggccggtgtagagcagttgtttactgcagttcaatctgccagaagcaacactggaacgacacacataaaagcatgtgtggactttacaaggccatgatggagagggaagaagagctggctataatgattttcatgttcccatgttctgctgaccagccttgtaagtggcttgaatcattaggtatccaccagaagggtatgtggaggagaaagtgcagttgctattctcactgctcttttggtctccttcctgtgaaaggtgggctgcaggaactatggggtggaattgatgaatttgaataccctcatgactctccatttaataaccatttcatctcaagcccgtttcttctctctggttggcccgagtactacaaccttcgttcgcttccattgtcaagtcctgttgccgacattctctcgcatccattgactgtgtatcacatactaactacccttaatataagttcaaagaaccttatactgaaagggaaagaggtgattgtccactaccttggacctgaaggcgagttggattggatgccagcatttgcagaagtaggacacttgcttaatgggttaggcaatgtacaaatagtgatggtgggaccagaagttccaacaaatttatcgggtacaacctcaggaattggtagcagagttagagtgaatcttgtgaggggtgtttatcaggtggaagcctcctacctaccttctccacatgttgtcattgctctgaattctagattagaaagctattctagttggggtggagctcttgatgtaatcaaatcaattggggtgcctgccttcttcactgatcaatccgaagtttcatgtgtaaatgctaaacaagtccttcggaatgctggactgcacatcacacatccggtgactccaaatcctttccggtcacctgtgaaaaatctcacagcttctagcaatcttccttcatacagcaatggttttgtctttggggtgaatacttgaatgcagtccaagaaaatccaaaaacaagtgtctgtctactgtcatgcattctcaagattgcagccaacttcaaattttctcgattgtcgtgcaatttgctgaacatcacagtcacagcaaactacaaagatcattgtatgtctcattgaataatgtatattgatttcagtttagccagagatcttgttatagtctctgagttatggaccctgtggtttttatataattttttatgtagagcctccagtgggctgagttctttggttgttttccccttatcacattgaagtttatctgtttatgtcacttatctctcctaaaatcttgttcagaatcctcagaaccttgtctgtataagttgaaatcaaatgtcagttgttgtggtaaatcaataccattctgctcaacccgtagtggcccaattgttttggagagaaataaaccaatgttgcagttgctattcacactgccct

SEQ ID NO: 75569 - DNA, 483 bp, Glycine max
  Clone ID: PAT_MRT3847_39253C.1
gggagggtgagaacggttctggggttaattcagcctgtcagggtcctcatggcttgttacattcagaatcttctactgtagataatgtaagttatgggatattggagttttgcatctcatggttccccaggtttttaatgctaataactattttttaactgtggtttttgaccttatatttccaaaatcttgttttaatttttctcttgatatggtaaaaactggctggttgatctattctgaaagaacaaaagcaggtggcatcatttgatattccttatagagtaattgaatgtttcttgaggctttggtcatataaaggtagtctaagagttataaggtggtgattaagggccggaagattgttgttttcactgctgtgaattttagttcccgcatacactattttcaggctcaggtctgttctatggctgcaagacaaatgctaagtttagtgtttttaaagggaaaacataccacttt

SEQ ID NO: 75570 - DNA, 608 bp, Glycine max
  Clone ID: PAT_MRT3847_39254C.1
caccacccgcccctgtataatgaagggccattgccacctatcgttggactcccgtacgcgtcgcccccaccaccacccttttattgattcttttgaccaacaatactcatcactcacgcttgtattattaattgcggccctttcttcactaatactctccaatggaaggaacgttatgcgactctctttcgtcgcttattatgaattactagaacaagagaacgtacgacaaggttttgttctttattttatcgtcaagaaggttgaagaaaagcgagggtaagaggagaaagatagtctctctccatacatattgatttcaaatgttatcaataaataaaaatggatgacagaaaaagagtaggttgcagagaagagaaaattgtatgtatagggatgaatccgagagcttatgttattatggctgcaaaggcagtggcagtagcagttccactttctgccgcagcggctgctggttatttttattgttattgtctctcctcttatatcatactactattttatttttttatatgtataaattttgtttcttttgcctttcaattcagtagtatatttaattagcatttcgcttgatttgattttct

SEQ ID NO: 75571 - DNA, 166 bp, Glycine max
  Clone ID: PAT_MRT3847_39255C.1
ttccaccggtggttctaccaacgtcggtaggggcaagcccaaatcctccaaatccgttttaagatcgcaaaaagctggtctccaattcccggtaggaagattctgtcgtttccttaaggtcgggaataacccctgatcggttgggacggggttccctgggttcctt

SEQ ID NO: 75572 - DNA, 368 bp, Glycine max
  Clone ID: PAT_MRT3847_39256C.1
gggacaaaatcagcggtttctaatttctacgtttaattgcgcaacaaaggattcatcattgctgtttgaggggggaataagtaaatagggaaaacctttttttagaacaggccaaggaatgggaagaagattaatccatttcttcaccgtgcgttacaagaagcagttaacaagaaacgggggaacaaattagagttacattggatgcaattaatttctagctccgttctttttatgatgcccaaaacaaatggggttttgctgggggcatcattttttatttttttttccaaaacttttaacctttaaaattatgggctgctgcaagttcaacagaggggataaaagctgatttgcctgcttccctt

SEQ ID NO: 75573 - DNA, 345 bp, Glycine max
  Clone ID: PAT_MRT3847_39257C.1
ttatattttttttttttttttttttcattttttttttatattttttctgcatttaaatgtggtttttttttttttaaagcccaaaaaatgccaataaagtttggccatgggtattaaacttacagggggggggaacttgactccaaaccattggtcctaacaggggacttttacccggggagcagaatatcacaagttgggggcgccacaagaaggtccactttttttggccaaatagcatccaaattgattgaaagccgtttttaccccattaagccaattccaccctttttccagcgaagcccattaattttgttgaaaacttaagcctcaacctagtttttt

SEQ ID NO: 75574 - DNA, 428 bp, Glycine max
  Clone ID: PAT_MRT3847_39258C.1
gttcaaaaaaggaaaataacgacgcactcgattatcaatagtggttaaggccccgccatataaaggtatttcattttttttatgaacctacaaaagaataaaacttcctaaaaaaaaaaccttttgaacaatgttcattcccttgtgaaaaaaacagcccaccttttggaaacaagctcgacaaaacagaagggggaaaatgattgttgccctctaaaaaactacctcagggggcttcactcctgccttcaaggaaaacctaccccccaagtaagacttgacctttggaacactctaaatggcctttaacaaaacaatgcccacggttttttggacatcttttttttttggggaaaccacatttttctcctccttgatggccaaaaaaaattcccctccacccttagttttatttttctaaacttcct

SEQ ID NO: 75575 - DNA, 847 bp, Glycine max
  Clone ID: PAT_MRT3847_39259C.1
ggatagtgctagtctacaagaagttttttagaatgcaatgtacctggcacgtgtgtggttttttggctgtgggggggctcttatagccctcaccaatcataggatcgcgctccttcaacatgttgaaggtccaaaatccagtgaggagcttccgaaacggcttctcctctgtcgccgccgccgccggcgcgacaaagccacgattccacctccattctcttcaccttcctctcgttcttcgccattgtcgctctggttttgcttccttcagcgtcaccatccttccaaaatagcttatccattctgcaccaagtccctgaaggccatgtgggggtatattggagaggaggtgcccttctgaaaacaattacagagccaggcttccatctaaagatgccttttataactcagttttgggaagattgaggttgtgaatcaactccataaggaatttgtctttgagacattgctcaactatggtgtacattatgataagacatggatatatgacaagattcatcatgagattaatcagttctgcagttctcattctctgcaacaagtctatattgatgtctttgatcagattgatgaaaagatgaaagatgctcttcaagttgactgcactcgctatgctccaggaattgagatcttaagtgtccgtgtcacaaagccaactattccagaaagcataagacgcaatttcgaacaaatggaagaggagcgtactaaggtcttaatagctattgagaaacagaaagtatccgagaaggaggcagagactatgaagaagatggccattagtgaggccgagaagatgccaatgttagcaagatccttatggagc

SEQ ID NO: 75576 - DNA, 500 bp, Glycine max
  unsure (1)..(500): unsure at all n locations
  Clone ID: PAT_MRT3847_3925C.1
tttctctctctacaaagagtgcgtgtgagattgtttgagagtgttatagggatcnggaacttttgatacctttggcttatgctttacagttccataggcccatctttttccatatctttttttttctctttctacaatcgtaatccttttctctacctacacttcccttaatcttatttctcatttttttctcatcttattttctttatactttttttctttgctcttttttttcttgatttctttttttcttttttttttttcccatttttttttttaattctttttctttcctcactttttctacaactttcttttttctcacttttttttttcaatatttttttctatctttttttttttcctcactctattttttttcatttttttctttctcaatattttttttctatatctttttattcaactcttttttttttctcttctatttttttctctaatatttttttttttaaattttcttttttacattttttttt

SEQ ID NO: 75577 - DNA, 171 bp, Glycine max
  Clone ID: PAT_MRT3847_39260C.1
gcaccagttacgggctcctactaaataattaaaataactgtaattagaattgtcagtcattccaacgatgaattttttttatcgatatcagttaaaattttaggttaagaatgaggaagagaatgttatgtaaacaccacataataaggtttggtcctattcatccattct

SEQ ID NO: 75578 - DNA, 388 bp, Glycine max
  Clone ID: PAT_MRT3847_39261C.1
ggatagtgctagacgacaagaagaaatagagaatgcaatgtacctggcacgtgaaaagagcctggcagatgcagacttctaccgtgtaataaaggaagctgaagcaaacaggttgaagctcacccctgaatttcttcagcttaaatttattcaggccattgctcaactatggtgtacattatgataagacatggatatatgacaagattcatcatgagattaatcagttctgcagttctcattctctgcaacaagtctatattgatgtctttgatcagattgatgaaaagatgaaagatgctcttcaagttgactgcactcgctatgctccaggaattgagatcttaagtgtccgtgtcacaaagccaactattccagaaagcataag

SEQ ID NO: 75579 - DNA, 451 bp, Glycine max
  Clone ID: PAT_MRT3847_39262C.1
atctgaaatggagtttttgatattaactaaccaaactgaaaagtagttacacctctagtatttatactagagctaggacagctgtgtacagctgtcagaacaaccgtcaaataatccaaggttagttgagttgactaaaataactaattctacttatcctttttgttgtgttcctcctagctccactcaccaaaaatcgtcatccaccaaggtttgcaccaatatgcaccttgtctctccaatctccgccttttctatgcagttgtgacataataggaaatgttttgatgttttttgggataactttgtcacttttgactagtgctcaagcaactatactgtctctagcagcttctaggtctttgtcaaggctttctagccaaattgaaatgaaagctaataagggctaatttggagttttctggatgatatggctatatattattgatgt

SEQ ID NO: 75580 - DNA, 464 bp, Glycine max
  Clone ID: PAT_MRT3847_39263C.1
agcggcttctcctcggtcgccgccgcgaccaaggccacgattccaccgccattctcttcaccctcctctcgttcttcgccattgtcgctctggttttgcttccttcagcatcaccattcttccaaaatagcttatccatcctgcaccaagtccctgaaggacatgttggggtatattggagaggaggtgcccttctgaaaacaattacagagccaggtttccatctaaagatgccttttctaactcagtatgaacctgttcaagttacacttcagacggatatggtgacagatataccctgtggtactaaaggtggtgttatgatcagttttgggaagattgagtgatgtatattcttcttttaggttgtgaatcgactccgtaaggaatttgtctttgagacattgctcaactatggtgtacactatgataagacatggatttatgacaagattcatcatgag

SEQ ID NO: 75581 - DNA, 538 bp, Glycine max
  Clone ID: PAT_MRT3847_39264C.1
gcacgacgctcgcaattcggctcgagaaaaaaaaaaacccaaccaaccatcagcttcttgattgttcattttctccgtgtttgttaaattaaattcatcggattcctcttttgttggacataaaagaattcgttagaaagaaagttttcacacactcacatagattgtcacacattgcattttagaaacaacacaaggaaccattttgttgcatagttaatcaagttaattactagataatagagagaaaagggccgggaaaaagaagcagcacatagcattggggtgagtgaagcaccagcaagcggcgttacaaaaaccctcagacgatgttggctgggtgttctagttcgacattgttgtcaccgaggcacagattgaggagcgaagcatcagcacagcttcaagcctgccacttccagctaccttcttccatgagcacgcacagattggacctgccatgcaccaccaccaccttcactcgcaacaacaaagacaccacctattcacgctctgttctttcagtggatcagaaacc

SEQ ID NO: 75582 - DNA, 312 bp, Glycine max
  Clone ID: PAT_MRT3847_39265C.1
cattcaaaaaaaaaggcaggactggtgacagttcctggagataatttttatcaacgaagaaaataaagggcccaacctatacaaatgggccgaacctatttataagcaagccccctgagtccttgctataaaacaagcggctcagtaccacttccatctatttcccagaacccaaagacacgggacttcacttcggccttaggggaaagaaacttaggcttatcatcatgagtgtggtttctgaccggagaaaccccaggattaaggtcttgctctgcttcccaatattaaaaacaactgttcaagaatgga

SEQ ID NO: 75583 - DNA, 918 bp, Glycine max
  Clone ID: PAT_MRT3847_39266C.1
ttaaagttcatctagcagacaatcgaaagtccataatgaatggaaaacacgatacttttctaaatggagaatcagatgaagttttccatatatctggtgattatcatttcaaaaccttaagtggatgtgaagctgccgatgaacggaatagttgggataattttaagcatctaatcgctgacgaagaatatggccttgattcttctagagaaacaatggctgcttgtgaatcttctgagcaagtcaccttgagggtgtgcgtggaggacactggaattggaattcctttctcagctcaggatgggatattcatgccatttgtgcaggctgacagctcaacctcacgaaattatgggggtactggtattggcttgagtatcagtaaatgtctggttgagctaatgggtggtcagataaacttcataagtcgaccccaggttgggagcaccttttcttttactgcattttgtgaagcatttaagaaaagttcagttaccaacaggaagaaaaatttggaagatctgccttcaagttttagagggatgaaagtcattgtggttgatgggaagcctgttagagctgctgtgactagataccatttgaagagactagggatactagttaaagttgcaaataggatcagtaaggctgttgctttatgtggtaagagtggttctttgaaatcgggaatgttccagcctgatattatcatggttgagaaggacacatggataactggagaggatggcattttcaatacatggaaacataatggtcgtacgattaagatgcctaaaatgatccttctggcaaccaatattagtaatgccgaatttgataaagctaagttcacgggtttcactgatactgtgatcatgaagcctctgagagctagtatggtggctgcttgtcttcagc

SEQ ID NO: 75584 - DNA, 277 bp, Glycine max
  Clone ID: PAT_MRT3847_39267C.1
aattcggctcgagttaaagtcaaactgaggcataattcaacttgttcctctcaccccaggttcctcttcatcctctctccactctttttcagagacaaatttcccttattttctcccataataaaaattaaccaaccccactttcacttaccacacaatcccgctatctcaaatcaaccttctttcagacatagcaaacaaacaaaacaccgttcatcatgtacaactcgccaacaccatgtatttaaccattctccttcactattcttgacaaaaa

SEQ ID NO: 75585 - DNA, 630 bp, Glycine max
  unsure (1)..(630): unsure at all n locations
  Clone ID: PAT_MRT3847_39268C.1
cttctgccgnattcattgctcacaattttagactccgatttcattttttttcttccataatttacggttgggtatggtaggacttgggtctttaatttagaatcttcatactattctcctaagtaaattccaaacaatctcttctttttatatactttttgttgaatcccaaacaatctctaggactatacacaacgaacaacatgcatatttaaacaaacaaacaatctgatagtaaaacacataatatttaaaataattgtcgtccttgattgttttatacaaatttaaaaaacaataattttataaaattagtcttatattatggttaattcactttatagattttattataaaaaaaataaatattacgtttaaaacctagcataataattgtgtgtaccgtttattttattatgaataattgaaatgtaccttttttactagtaaccaatcccttaaaactccaaatccaataatgtttaaatttaaaaagtaattaaatcaagaattcacaaatagaaaattcactaatcagcataaaaaaaaattaaagctttagagcacttgttaacatttttctaaatctcaaaatcataattaatgtaaacagaagacttcattgatata

SEQ ID NO: 75586 - DNA, 282 bp, Glycine max
  Clone ID: PAT_MRT3847_39269C.1
ctcaggcttgttaagataaggcaggataaagagaggaatcccacaatgatccgccatgacatactgcccgtattatcaaaggtctgtgggtctgaagattcgctaatcttccatatataaccacacaagaggaaagacttcctctgcaccaacaccacttttggaacataactatcttggcctgcctattcttctaggagagagagagtgaccctactacatgcacgctggctcttggtagttttgagcaaactgatatttcaaccatactgaccctacaaa

SEQ ID NO: 75587 - DNA, 557 bp, Glycine max
  Clone ID: PAT_MRT3847_3926C.1
gcctcgtgcccgcttttgcgttatgaaactaacgtacaagtttgtacaacaacaacaacaatttctcttcacaccatcttcctccctctcaaaatcacaaacacacccacaaatttttatttcccagtcttgatttggttcactacttcacttaagtcattagtccatagtccatagagtcattattattgttattgttattttattatttgttacttgttccttgatagtcactattattgttgcataaaatagagcaacatgaagaacagaacatcagggtttctgaaggagatcatagcaaatctgagctcaatggccaagtcaaaaaccatggccttgaagtccaaaacaaacgccataagggcacgtttgatcatattctcacttatgaagaacaagaaattcttgatgagttccctctctgagaagttccattctgtgtgggggcaaagttcatctcaacaaaaggaagatcattgcttattggaagatggcagcaatgatcaccaaagctaggccatagttgtgtacaaacagcatgcacactcctatga

SEQ ID NO: 75588 - DNA, 700 bp, Glycine max
  Clone ID: PAT_MRT3847_39270C.1
ttctgaactttaaaatgaacaatcatacatgttatgcctgctttgctattccagctacgttgctgctcgttttgatggttctttttaaggaactgttgcccaaacacaagctcagacacttctcaggtggaaacaaagtctccctcaccaatccattttggactcatggatcatcaactccactgcgacaactctaagtccatgttcatggcgaggtattacctgtgattctaaaggcacagtgacaattataaacttggcttacactggacttgcaggtacccttctaaacttgaacctgtctgttttccctaaccttctccgtcttgatctcaaagaaaacaatctcactggccacataccacaaaacattggggtgctctcaaagctccaattccttgatctttccaccaactttctcaatggcactctgcctctttccattgccaatctgactcaagtttttgagcttgatctttcaagaaataatataacagggacattagatcctcggttatttcctgatggatctgataggccccaaagtggcctcattggtatcagaaatctcctcttccaggacaccctgctaggtggtagaattccaaatgaaatagggaacataagaaacttgactctgctagctctagatggaaacaacttctttgggcctattccttcatctctaggcaactgcaca

SEQ ID NO: 75589 - DNA, 258 bp, Glycine max
  Clone ID: PAT_MRT3847_39271C.1
ataaagaagcagggattggatttggagctgcatataacatcaaagcttcaattttgcaatctatatttggaagtcctttcctgggtggttccgttgaaaggatccccaatacctaattatatgcccccttggcgggtcagaacccaataatgatagtgatataccaattcttctgcatacttttccgtcaaacaccaaattccacaagggatattataatatcaaccatttccatgaccatgctgttgagcccaacct

SEQ ID NO: 75590 - DNA, 279 bp, Glycine max
  Clone ID: PAT_MRT3847_39272C.1
cgacataacaaaagtacactgtcgctctaactgcgcgttaatctaatattcggaggtactacttcagttctcctactctcttctgcttcgcctaactattttcatattctaacacatgatgaacctcgggttaccgaacaacctacagctcttttacgcaagactggttattcgcatatggcttaacatccctagtatccagcctcattacaccccaaacccttatcacgattatgacgcacaccttgaaagtgattcagataccgtttaatgatcaaa

SEQ ID NO: 75591 - DNA, 358 bp, Glycine max
  Clone ID: PAT_MRT3847_39273C.1
accaaacttttcaatctcgtacacttatatattacttttattggggcatagttatattttactgattcaacaatacagataatgtctttttggttttaccatttccatttaagatggtgcttttcctcaatcaccttgtcacccaaccaaaatataacacccactttttgtaccaatattagttcctcatttaatttgtgtttccttactgttcaaaaatgttgtaacatactctcatttttgtccttcctaacaatacattatctcttgtctgtattctctaaattcttttatacccatttacaaacaatattataatgcaaatccaattctaactttcatttcttttgtttatata

SEQ ID NO: 75592 - DNA, 202 bp, Glycine max
  unsure (1)..(202): unsure at all n locations
  Clone ID: PAT_MRT3847_39274C.1
gtctgttcttttttttgttatttatgnttgggggtggcatagagacgcgggggttatttttgattttgcaaaagggacaatcacagccgtacattacacgtgggctgggcctttttcaacttaaaagccggggataacattggcccttgaccacagcacatgcactcttttaagaatattaatcttgcatctatacatacga

SEQ ID NO: 75593 - DNA, 623 bp, Glycine max
  unsure (1)..(623): unsure at all n locations
  Clone ID: PAT_MRT3847_39275C.1
gggttgtccttttcaactgttctcacaggtgagccaaaacatgcttantcgagcaaatgagtgttttctgcttccactactaagtgtacactactaccagagagaaatccacgagtatctgattgaactagagaagactgaatttgagatacaatctttgacatgggttccttgagtgcttcagcttgtgcatcctttttagcttttgcatcttttcctttccatcttggtgccatttggatataagctatgtagtcaatagcgccgctacaccgcaagactctcttcctttggaagcaatccttttcaagacacgatggacactaaatatgagcacctctcccgtcacgcgtgtttttttgtggcgatttgcgaagcgacacttaaaactatcgctagaaagcgtccgcgccgtccctcttgcctccgaaattttccactctcccttcttctatctctggtctaacgtcctagtgaattaggacttcagacggtgtcaagtagtaatttgaaacggcgaaatgtgttgttgtggacgtttgttgaaaacagagagacagcaaaatgaatggaatggatttggacttgggaagaaagctcggaagccgatttgagtttacgta

SEQ ID NO: 75594 - DNA, 173 bp, Glycine max
  Clone ID: PAT_MRT3847_39276C.1
ctcagagtcgttcatcgctaccccagagcgctaaaaatatggctaaatgcgatggcacatgcatgagtgagtgacaggttgagggtggcttgagactcgcgccacccggccgcactcacatcgtgtacaggtgcaatctctgaagactatatcgaatctgaccaggcatagct

SEQ ID NO: 75595 - DNA, 281 bp, Glycine max
  Clone ID: PAT_MRT3847_39277C.1
accaaagagaatagcattagtgtacaggcatcaagatcattgtcatccaattactaataagctgaaattactaattcattcgtataaggcaagatggtgtaccgcatgagaccatacggtccacctaatttcactgtttctgatggataagctacactggcaagagttaacataacaccaatggttagaccaacattgttacaatgggttgatacttttcaatgtggcatctatactattcgtgaccatctgagcgtttgcttgttcaacttccttttttt

SEQ ID NO: 75596 - DNA, 117 bp, Glycine max
  Clone ID: PAT_MRT3847_39278C.1
ttatttcacgcgtccttggtcgcgtgcgagaaggccagaggtctttcgctcaggatgttttagcaattatgtctatttttaacaccagcatgcgaatgtgaaacactgatgctcaaa

SEQ ID NO: 75597 - DNA, 419 bp, Glycine max
  unsure (1)..(419): unsure at all n locations
  Clone ID: PAT_MRT3847_39279C.1
accggtccggattcccgggtcgacccacgctccgcnggcgcctgggcggacgcctnggccaaaatggggagaacaggggagaggaaccataaagcctgaaagaaaactgacaagacgtacagaagaaggggtgtanaagatattttccagagcgggaatttactttcgtgttttaaaaaaattttgggggggggggcgcataaatgggtgagagggggggtgatttgagtagtcactgtgnttatttctgcgagcgtggttttaatgtgtcaaaagttttcctttctagcatctatgccatcaggggggggggggctttgtgtatcttaggcgaaggtgcgtttgtgtgtttggcaaaatcaattgagtacggtaagggtgtgtaaattataataaaaaaaaaaaaaaagggggggcgg

SEQ ID NO: 75598 - DNA, 525 bp, Glycine max
  Clone ID: PAT_MRT3847_3927C.1
ttggtttagaaggaaacaatggcagcgttcgtgaagggagcaccttttcgagtcgtagttgaccttcttcattgattactatttctccctcagatttcgcttcaatcttccatccccgttccgttcaattctactttcaaggttggatgacttggattctagactatcatcatcttctgaagctgcagttaaaacatgtggatttagtattgataaattaagccatggtggccatggaagcagtactacttctcggtcttttaaaagaagaattagaaagggatccgaaggactgaagtcaattggccgatcacttggattaggggtatctagggcagtgttccctgaagatcttaaagtttcagaaaagaagatatttgaccctcaagacaagtttttgctcacctggaataagctctttgttatatcatgcattttagctgtgtctggtgatcccattgttttttatctccctgtcatcaatgattcatttcactgtcttggtatcgaccgaaagttggcaat

SEQ ID NO: 75599 - DNA, 622 bp, Glycine max
  Clone ID: PAT_MRT3847_39280C.1
tcgcccacgcgtccgtacggctgcgagaagacgacagaagggggtaacatagagaagattctccgggaagaaaaggccaaagtgaggaaattcatggacaagactctttgtaataactaaaatttttgaagtttgatagtagttatatgattttacataacccatgtaacacgacgagtgaaattggatatgagtgtatgagcaaagccaaagtgatcgtgtggcagagcagcgagagagaaagctcttcttgttctgatgtcggatcatcttccgcgagaagtggtaaccgacatcctctcccggttaccggcgaaatccctactccgattccggtcaacctcaaagtcatggaagtcactaatcgacagccagcacttcaactcggtccatctcagcagatccctgagcttaacctccaacaccaccctcatcctccgcctcgactctgatctataccagacaaatttcccaaccctagaccctcccctttttcttaaccaccctcttatgtgttacagcaacaacatcactcttcttcggttcctgcaacggacttcctctgtatatccaacgtcgccgacgacatcgccttttgggaaccccttccttcgccagcacc

SEQ ID NO: 75600 - DNA, 187 bp, Glycine max
  Clone ID: PAT_MRT3847_39281C.1
ccaatactataaataagcagtttataaataataaaaatcacaccaatctcatattgataggcattacaaatagagtgataaatagattaaaccatcccatcaagaatcatatccgataacgaactaaaggcacttcgtcatttctgaatacactatttcaaatttcaaaggatgttgaatcactaat

SEQ ID NO: 75601 - DNA, 1108 bp, Glycine max
  unsure (1)..(1108): unsure at all n locations
  Clone ID: PAT_MRT3847_39282C.1
ctaattcggggttggtgaatttgagcgtgaatctaccgaatgggaccagtttgtacagaagggcgttgtttgttactgcttctgcgccttcaaagtatgcggaggaggttatgtgggagacaatcactagcatttgtgggaatctcgtgcaacagtgtgttgggatagttgcggacaggttcaaggccaaggccttgaaaaatctcgagaatcagaatcattggatggttaatctcacttgtcagtatcagggcttcaacactttgatcaaggacttcgccaaggagctccctttgttcaggaccgtcgttcagaattgtctcaagctcgccaatttgttcaattacacctctcaggtgaggaacagtttccacaagtaccagctgcaggagtatggccacacctggctgctccgggtgccggctcacgagttcgagtttgggcccgtgtgtgctatgatggaggacacactgagctccgtccgcgccttgcagctggtgctcatggatgagcctttcaagatggtcgccattgaggaccagggcgcgagggaggtcggggacatgattcgcgatgtggggttttggaatgacttggaggctgtccatggtttggttaaattggttaaagacatggctcaggagattgaggcagagaggcctctggttgggcaatgccttcccctttgggatgagttgagggcaaaagttaaggattggtgttcaaaattccacattgcagaaggggttgtggagaagcttgttgagaggaggttcaagaagaattaccaccctgcttgggctgctgcttacattcttgatccgctttacttggtgagggatactagtgggaagtaccttccgccatttaagtacttgacaccggaacaggagaaaggacgtcgataggctcataactagactcgttgcaagacatgaagcgcatatcgctctgatggagctcatgaagtggaggacggaagggctcgatccggtttacgcccaagctgttcagatgaaggagagggatccggtcanngggaagatgaggattgtcaatcnacagancngtaggcttgngngggaaactaattggcctgaattcagtc

SEQ ID NO: 75602 - DNA, 287 bp, Glycine max
  unsure (1)..(287): unsure at all n locations
  Clone ID: PAT_MRT3847_39283C.1
gagctcacttgtctgcggccgcccttnntttnnnnngggggggttttttaaagnnnttttcggataaaaaaaacaacccctcaactttccctgggaaaaattcacctaatccattcttttccacaaattttcatcattaaaaaaattccaaccaaagtttgttgcccttaacttatcatacacccgacactcatatattacacataacttaatattattacttaaagattcaaaattaaatcccccacttacatctaacacaattaaacttgccttaaaaccctaaa

SEQ ID NO: 75603 - DNA, 1134 bp, Glycine max
  Clone ID: PAT_MRT3847_39284C.1
gttttttgctctgtactggtacgaagagaactccaagaagaggcaggcactttacgtaatgaatcctaataagttcagagcgtgtgagtttctcataaatttccatttagggagcattcaaaactagcaaagatactttgctgataatctgttcccactcagtgagtaagccatgaaatatcgcagaagaatgatatatgattcagaacgccatgtagagagaacaaaaattttgcaagcattcaaaactagcaaagatataaatactatatttctttccaaggtgggcgacaactcaattgatattcctgaagcatgcgtaataattcagatctcttcacatgctggttcaaggcgacaagaagcccagcgtctgggtcgtattcttagggcgatcggggtgcctgcggttaggatggcagggggcaaggaggagtataatgcagggtttaatccgaggtatcaatgtcttgagaatcgatgtactactccttggaaaggtgttgagtgctggtgacgatcaagttggattataacgtaattactaacttgcctcctactgatgaagggcctaatttgagctatcaatggtcttgaggatcaattggcacttcttggaaaggtgttgagtgctggtgatgatcaagttggattagagcaactagatgaagatgcagatgaaattgccattcagagaacccgtcgctctcaaggatccatgagtgcaatgtcaggtgcaaaagggatggtttatatggagtacagtactgtgcgtaaaggccaacaaggacagatcaagagcaagccgaaagatccagcgaagagacatttcttgtttaaaagaagatatggggcaacctaaatgtgccgtctttgtaatggtaccatacgaaaagttatcaagtatgcaggattgatggcttacttgacataacgctggttgcctttttcttaaaaaaaaaaaccttgtaaacacagaaatcattcgatgcttcgaaaagcaggcataatggtttttctactgttcactttatggagatgtggacaaacaggttcttttttccttcatgtgaacaaacaagcaaccaaggttatattatatagccttcaaaaaggcaaatttgttttcaacct

SEQ ID NO: 75604 - DNA, 592 bp, Glycine max
  unsure (1)..(592): unsure at all n locations
  Clone ID: PAT_MRT3847_39285C.1
gccagcaattttttaattgatcagggttacagctttaagggtaattactagcntgcctcctccgatgaaagggcctaatttgagctatcatcgtcttgaggatcaattggcacttcttgaaaaggtgttgagtgctggtgacgatcaagttggattagagcaactagatgaagatgcagatgaaatagcccttcagagtgcccgtcgttctcaaggatccatgagtgcaatgtcaggcgcaaaagggatggtttatatggagtacagtactgggcgtaacaaaggccaaggacagatcaagagcaagccgaaagatccagcgaagagacatttcttgtttaaaagaagatatggcgcaacctaaatggtgcacacctgctctgcgaatagaaacgagcacctatgtggcggctttgtaatggtacaatacgaaagtaatcaagtatgcaggatttacagccttacttgacacaatgctggttgcctttttcataaaaaaaaaaaaggagacttgtatacactgaaatcattggatgcttcgaaaagcaggcataatgcttatttttcaactgttcactttaaaaaaaaagaa

SEQ ID NO: 75605 - DNA, 488 bp, Glycine max
  Clone ID: PAT_MRT3847_39286C.1
ggctcgagttcattattgtttgccttttgtctatttcttcctacttgccaattcttgatctggaggttacgtttgggacttggacactctctgtcaatagtactaaataagcgttgaatttttagacaataacggggtctgtgtgctcagctggctaggctgacaaaaataaatacaaagaggctgaagggaaagccttggggaagaagcttaagaagtgaaagagcatggcgaaggggaaagaagatgcttattcaatttcaaggactgggagaaagcaaaagaagcttaactccggactttcaggcgaatacaaattatccactcctagtcgaaaagaaggcatagagagctcccagagaggctacttttggtgaagagctggtgaaagggcagtacaagttcttgacacacttggaagtgagcggccgaatttaagcaataggaatgggtctggctctagaatggctcctagagggaataaaaga

SEQ ID NO: 75606 - DNA, 227 bp, Glycine max
  Clone ID: PAT_MRT3847_39287C.1
atcggagtgcagcctcgcgtcgctccgtgcggtggctcgggaggtttccgacggagcgttggcggctgcggataagaaggggttggagaaggatccgcgcgcactgtggcggagatacgtgggtgggctagaccgaggacatggaacttgggattgactgtgatgtgagtcgggtcgtggtcagtgatgagttcgtgaaggagatggaagcccgtttccaagcagcg

SEQ ID NO: 75607 - DNA, 229 bp, Glycine max
  Clone ID: PAT_MRT3847_39288C.1
cacagttttaaccgcttcttactaacaacacatctagggggcaccttcagcggtccgctggaggcatcatatggaataacatacatctaaactacaggttgaatcaactagagatatatatggagaaattcacaaaaacacaaaggaatatccatactcaaatacaaaagctagaattatcaacagacccaatgctaaaacaataacctcatcaaatataataactata

SEQ ID NO: 75608 - DNA, 305 bp, Glycine max
  unsure (1)..(305): unsure at all n locations
  Clone ID: PAT_MRT3847_39289C.1
cngangangtcgcangcacgcgtacgtaagctcggaattcggctcgagnctccatcgtgttagggtttccacnnngcanagnanancnnanactctcattatcacatcgcaattcctccgngtnnctgtnnggataactcgngaatatnctacntaanagnccgacntctcgtnccctgaatatgatgttgagctttcccctgntttnatnagggnnacaaattntngcgccttcctntgtnccaatcatctccagtganccnncntgangaaanctnannnagaggttaanngggggcngggaa

SEQ ID NO: 75609 - DNA, 368 bp, Glycine max
  Clone ID: PAT_MRT3847_3928C.1
gttgatttctatgctttgttcggtcatgttgaaaagggaatccttgaaataaacagcataacactacatcttacatgctaaattacatcattgatgggagaggcactttcggaccctaaccgggaggcgcacgaagttgatcatgatgcagtaccgttcaaggtcggcgatgatatggacatagcagctgactgagagaaagagaaatccgagtaccattcgcgaactcatacaaacgcggatgcataaagtgcagagagcggagcggctaaagcgtgatctgactagaatacattggggaacgactcactgagcgttgaaaaaactaaaaacctgccaagccaaatgcatgaaggaactgaccaaca

SEQ ID NO: 75610 - DNA, 433 bp, Glycine max
  Clone ID: PAT_MRT3847_39290C.1
gccgatatggcctttatatatttaccaaaactaatataagtgattgctatgggttgatcattcggacccttacatcatccccaaaggctcgcaaaacatagaatttcctctcagagcgtgaagcctatgcatgacttattcccatgaagtcacatcctcccaaaaatgagattcaaaagggggaggttagatcgacctgaaaccttgtaatgctacaaaacgaagttgtttcactttactgcttcacaccttatgacgtgctgtgatcccttgagaccgcagactatagttcatgacaacatgaaagtgcaatggctattctattctgcgaacgtaaagcttgaactaggcattcacattacctttctggatgataagaacgacttctgtaccaatcttgtgaagaatcagaactggagtcaattgcttgcca

SEQ ID NO: 75611 - DNA, 221 bp, Glycine max
  Clone ID: PAT_MRT3847_39291C.1
gttttggcttctaattggctttctgcgtttggttgtttgaaggaaatttctttgactgataaaggaaaaatagggaaaaaattgtattatggtatgaacaactatcatggggaacttggagcatactaggtattatgaacaactatcatggggtacttggagcatactacgtgcattgagggaacatgtcaaattaatgattagttatctggtctttggtg

SEQ ID NO: 75612 - DNA, 693 bp, Glycine max
  Clone ID: PAT_MRT3847_39292C.1
gtattacgtggcgccggaggttctgtggggagggagtacgatgagaaggttgatgtgtggagctgtggggtgattttgtatataatgttggcggggattcccccctttttacggagattctgcggcggagatctttgaggctgtggttagggctaatcttaggttcccttctagaatcttccggacagtgtcccccgccgccaaggatctcttgcgaaaaatgatctgtagggattcttctagaaggttctccgcagaacaagccttgagacatccttggatcttgagtgcgggtgacacggcggaactcacttgagaatgtagctagagagagacatgacctaagttacatggtgcagtgtagctaattttgctccttttgtcttttctctctactgtctcaataaggtggtctactcgtggtggcagaggaaggaacggaacagagcacgcttctgtagatttttgttttgttttaggaatcttatatctgagactctgtatgagtcgagagaatcttgtttttccactctcggtgattttctctctgtgtagtagaaagtgagaaagtgggtgatctcccagactctctcccccctagtagaaaggagtttgtttgctgatatccttctggttttttgtatctgtaaatcataaataaacaataattttgaatggtgtttaatttaaaaa

SEQ ID NO: 75613 - DNA, 460 bp, Glycine max
  Clone ID: PAT_MRT3847_39293C.1
cctaaatggctcacgcacctcaacctcacgcaccttacctaaattttggttgtttgtaaactctatgctttgatgttgagaactaccactgagggtggttttgaaccctattttttgtttttgtttcattgtttggattctgaaatgtttttgagctggctttgtggcctacaacatgatttgaacctttgaaagacgtcgtacgtgacgaggatcgagtggatcgaagccgacgcgcgcaacaccgacgtgaagattgacgtccggtggtactaccggccggaggagtcaatcggcggccaccgccagtttcacggctccaaggaggttttcctctcctatcacttcgatgttcagagcgccgacacagtcaaagccaggtgtacggtccacagcttcaagagctacacgaagctcaatgctattcgaaacgacgatttcttttatcgttttgagtaca

SEQ ID NO: 75614 - DNA, 357 bp, Glycine max
  Clone ID: PAT_MRT3847_39294C.1
caactagaaactcaaattgagaaagataaacctaaagtattgttcgcagacgcagtagctacaacaaaaacttctatcttagtgggtgagttggcgaaaatcattaaacagaatggtgtcaacatcggacaacgaagattgtttgaatggttacgacaaaacggtttcttaattaaacgtcaaggtgtcgactacaacatgccgacacaatactcaatggaacgtgagttgttcgaaattaaggaaacatcaatcacacattcagatggtcatacatcaattagtaagacacctaaagtaacaggtaaaggacaacaatactttattaataaatttttagcggaagaactttaatac

SEQ ID NO: 75615 - DNA, 364 bp, Glycine max
  Clone ID: PAT_MRT3847_39295C.1
tttgggttttttttttttttttttttttttgccctacctaaatgggaataccaatcgggaaaaattcattcaaccccatctttcttccctaaatcctaaaaaatatatggggtatcttactatgactaaaaaaattccgcctaaattttttggtttcttataaatggggtgggaatagaaaaatgaaagactaaaaatgtggttcaataaacaacttaatcaatcaattatttaataacattttactatcaagggttatattataaatttaatttcagaacctattggataatctaaatcctagttggtttaataaggggaaccaaaaaaattaagaaaaacctatgaaatgaactattttttc

SEQ ID NO: 75616 - DNA, 1783 bp, Glycine max
  Clone ID: PAT_MRT3847_39296C.1
ctaggaattcggctcgaggttactttctttaaagttgttgctacttgctagtatccaatattagcttactactagggtgtttgaaagagatggggaagacaggcaaatggcttagaaacttgttgacaggtaagaaagacaaggaaaaagagaagggaaaatctacaaccaacctgaattgttcttcaaatggaacagaaaactcaaccactccaacttgcacaaccccaaaggagaaaaagagatggagttttagaagatcatcagcctcagccactactgccacaaccacaccaccaacaacttccaaggaattgaattttgtagaaacaaatgtgactgtttcacagacggtgcaaactgacactgatattcagaatgagcagaggaagcatgccatggctgtggctgctgccactgcagtagcagctgatgctgcagtggcagctgctcaggctgtagctgctgtgatccgtttgacttctgcttccaatggaacatctaaaagcattgaagaggctgctgccatcaaaatccaatcttcctttcgctctcacctggcaagaaaagcattgtgtgctctaagaggattagtgaagttgcaggcactagtaaggggtcacttggtgagaaaacaagccaaggcaacactgagatgcatgcaggctttggtgacagcacaagtcagagctcgtgctcagaggatccaaatggggtctgaaggaaaccctaatcaaaagcacagaaatgccacggaggataatttgttcaggcatatatataatgaaatggacagaggcttggaagacaacatcaagattgtaaaaatggatgtttgtgaatcaaaaggtaactccataagcagaaacagcagtgtatgtcatcatggacatgaagaacaatatgacaacagattttccacacattattcaacaaacggtttctactcaaaggaagaaaattacaaggtatcaccggctccattttctttgacagagttgagtccaagaacctgcagtggccattttgatgactctttcagcacagcacaaagcagtcctcaccctcagttctactctgcagtgtcaagaacagaagattcaaagcacccttttgctttccctaggccagcttatgcagaatccatgtcctatgactaccctttgtttccaaattacatggctaacaccgaatcatcaagggctaaagtcaggtcacacagtgcaccaaaacaaagaccggattcattcgagaggcaaccgagccggcgaagagcttcagttgagggaagaaatgtcccaaggccaatgaggatgcaaagatcatcttcacatgtgggtgccactgtccataactaccattatccttggtcaataaagctcgatagatccgcagtttcactcaaagatagtgagtgtggctctactagttcagtgctcacaaacggtaactattgcagatctcttgttgcatatggctcacgtggagatgggtactgactactgagagtgctccttgtgctacaccaaatagtagcccctttgcaagaacaccaaaatctagagttgagaatttcagtttgctgagtttttcccctttttagatttcaaaacaaaataataactctgcttttacaatatagagttgttgccagggatttattaaagtccaatgattgtagagtttcttcttctattcgttgtctgccatgtttgtggattgctttgtaataaaaacactgtaacggcttttggtctgtataaattttaccaagtgagatatt

SEQ ID NO: 75617 - DNA, 330 bp, Glycine max
  Clone ID: PAT_MRT3847_39297C.1
aacatggacacggtttatgagacaccgacgtttggagacgcattgggagggcatacatacaaacagcccgcccatgtttttaccagaacacttggaatagggcgatcgaacatacagatggcagaattggtggaagcggagagagacacacacaggaagagacccgccatgccctggatatgacccctataattagggcatcgctcgacagacttccaacgtatagccatggaatgacccacttacgccgtttcacaatcgaggggcatgaccacttcccatgcgaagggagggcctactgttacagagtgttgcctaccatgcaatctt

SEQ ID NO: 75618 - DNA, 661 bp, Glycine max
  Clone ID: PAT_MRT3847_39298C.1
atgggggcctttaatttttcacaagaatggttggtttttttttataaagggtgcccaataataattggaccgagacaaggtggtacactgttaagcaataagattgtccacttcttcgggaacaggttgcaccagacactacaatagacactgacatgctctctgacctgcaaagtttgtgtcctcaaaaatggagatgaaaacgttactacagtccttgatcggaactcatcggatctatttgacaatcactatttcgagaacttgctcagtggaaaggggcttctcagttctgaccagattctattttctagtgatgaagctaattcaaccactaaacctttagttcaaagttatagcaacgatagtggactcttctttggggactttgccaattctatgatcaagatggggaatataaatattaagactgggactgatggggagattaggaaaaactgcagagtgataaattcttagcaatatgaaataggctttgcaagacatggaataagcataagctcgggcgtcttccaagttatattagataatttaggtgatggttgttatgtttctcgaaatggaatgtgctttagaggtcccacacagtggatgtgggaacctaacccaacataagacaaaataaacaagagtttgaagt

SEQ ID NO: 75619 - DNA, 486 bp, Glycine max
  unsure (1)..(486): unsure at all n locations
  Clone ID: PAT_MRT3847_39299C.1
antnnnnannttttttttnttttttttttttttnntttggnttttgaaatgaaaatttcacataagaattcttattaataaacagaccatggcaatggacattacagggaaggcacgtaccccttaacggaaaagggaattattcccttcacaatttccttattaattttgggaatttccacccaatttccaacccaggatcgttttttcaacccgttttgaaaaagggggaattggatttcacaatgtttttctttacttttaaagcacttattaagcatttaacaggttatttttaggtttatttttattttaaaagaaaaatcaaaggcctgcttaggataagggcccaattaattctaagggcccttgcgtttgcccccatgagtattcaaacttgcctaccggggacaccctttttggtttccagcagggccaggtggcccccaattacagggtctacaacaagttccacaagctttttgg

SEQ ID NO: 75620 - DNA, 299 bp, Glycine max
  Clone ID: PAT_MRT3847_3929C.1
tggtacggctgcgaggacgcccacagaaggtgtaaggcttacgagaacactacatgcaaggtacagctcgcatcaagacgagtacaacggtattcgaattcaatgggacgtcattttggtacggctgcaataagacaacactagggtaacgctgcttaatcaccatacaacggtaccgccgttagacaactacagataggatcaataggtcgtcaccgatgcccttcccaacaattgcgcaaactcaatggccaatgggatgcaccctgtagcagcccattaagcgacgtcggagttct

SEQ ID NO: 75621 - DNA, 960 bp, Glycine max
  Clone ID: PAT_MRT3847_392C.1
ccacgcgtccggctgtccactccattctttaatcctttgctacctttttgtttcctctttggctcttcgcttttttataattatatttatctccaactttgacaaaaaaaagaaaagaaaaagagctcactttcctgaatcttgatcctttcttacttcaattttgaactccttaatgaagcatgtatcttcacttcttgtagctgctactgtaacctcaaccccaaaatgcccttcaatttcatgcaaattctctgggctgttgagcttgcatgctccaatctaacactacgcagattcagattcgccatgctttgttaagtacttgagaatctgaagcataggacaaggcagcaacttgcttagcttcttcactgtgaatgtatcttggcctgttttttaagctctgtgctgttccatgaatccttgtgcttcctctttgcttcccttcaggaaagtatgaaggatgacagaggttactttgaattcaagtgtcaatatcttataccatacagccaaaaaaatctccatgaagttctactccttgcaagcgcatcgtttccttttcatcattgttattctttgtcccctggtcattgctgacttaagttctgacaagcaagctcttcttgattttgctgctgctgtccctcatcgccgtaaccttaagtggaacccagctaccccaatctgttcatcttgggtaggcatcacttgcaatccaaatgacactcgtgttgtttctgtgcggctcccgggaattggactagttggcaccatccctgccaatacacttggcaagattgactcactcagaaatatcagcctccgcgccaacttactcagtggaagtcttcctgctgatattacctctctttcttctctacagtatctctaccttcagcataataacctttctggcaacatacctacctcattgtcgacccgcctcaatgtact

SEQ ID NO: 75622 - DNA, 156 bp, Glycine max
  Clone ID: PAT_MRT3847_39300C.1
gtaaaattacttacctatcacttgcaatcctcaaaagcactaggccttcagcagcaacttgcaattgcctagagatagctggaggatgtttggtgcgccctcttccgtttcatgtctttttgctccgtatagttaaccacaacattagcccaatca

SEQ ID NO: 75623 - DNA, 266 bp, Glycine max
  Clone ID: PAT_MRT3847_39301C.1
acagctttgatttggtgactacgatgactacatgaatttgtgattgcaacaaatctgaattcgttggatatatatttagacatactccattcttgggtttgaaaatactctgttttggatcttctgattatcttatataaacctatccaagcttgtgttcaatggtcaaccttatgactgatgctttctgttttgaatctttggattatcttgtatcaacctatccaagcttgtgttgaatggtcaaccttatgactgatgctttc

SEQ ID NO: 75624 - DNA, 235 bp, Glycine max
  Clone ID: PAT_MRT3847_39302C.1
gagcaccacaatgacctcagttcgagcaaatttcctggacgcctttgcttaacatctatcggggaccgatttcaacctattataccatttaattccagggatgatcaacatccttcacacaacttatccttgtttttgcttcttgacctgcctgggacaccacacaaatggaataaaatgtccatattatatcccctgtagccaatgtgcaacaacttgagacggcacaatttga

SEQ ID NO: 75625 - DNA, 346 bp, Glycine max
  Clone ID: PAT_MRT3847_39303C.1
aaaaataaagttttttgctttgtcgtatattactttttttttaattgtgggggttaactagccggcattactcgcgaaaaaaacaaaatccattaaaaaaaaaatatttggccaaaaactattatgtaaaaaggttaaatccccaaaaaccagaaaaaaaccaccccccggaaaaaaataaattttcccttttctttaaggggagaaaaaagaaaatcctgggaacaaggggcccctaaaaggaaactaagccccaaatttatttggggggaggaagatactaaacagggcccccctttaaaaaaaaaactcaaccatttaaaggtttttgccttggcccccgacc

SEQ ID NO: 75626 - DNA, 227 bp, Glycine max
  Clone ID: PAT_MRT3847_39304C.1
ataccactaaacaggccgtcagagacgctatcaaaaccctacccttcctttcttgattaacaaatatctctacacattaccttattactatttatcctgtgtggaggaatatcacatcgctgaatgaaatctatactcattctcacacacatcaacttacttaccttataccacactgtcataatctccatatatttatttatactacattctaaactttattacgt

SEQ ID NO: 75627 - DNA, 247 bp, Glycine max
  Clone ID: PAT_MRT3847_39305C.1
caaggaacgatcctgttttcgcaatgcgtggatcaatgcattctattcagagagacatgatcatgctagaaaaccagcttcccttgtttgttctagacagactttgggaactcaattgggaaaaccagaatgaaaggactagtttcaagtctagtactcaggttctttgaccctttaatgccaacagatgaacccttgacgaaaagtgacagaaacaaattggaatcatcacttggaggcactaaca

SEQ ID NO: 75628 - DNA, 946 bp, Glycine max
  unsure (1)..(946): unsure at all n locations
  Clone ID: PAT_MRT3847_39306C.1
tcggggtgcggctcgaggtggaacttcaaacaaacttgaatttccaacacatgtttagttccacagcctttccttgttggcgttgatagctttttcctgtgtttgctatgatagatcaataactagaacattccaaatataatgttatagctaataatagttttataggggtctgcagaggtttttctttttaaatgctgagtttttttttttgtaataaacagtgatctatattttccttttgttttgagtttattattctgtcactagcaaagtgaaagttggtagctgtctatatatgtttttttcaataccttttcatctattgcaaggcaactaggtttttgaagcttcggttttcttcctctgaataaatattatccacagataaataccttcattaccttgtgtcctgcatgtgagtaccttgtgaaattaagttttcaggcttttgttggagacttgcagtagcagtagatatctgtagtacatatcaaatctcaaaatatttaagtacacttggctattttaataaaaaattgaacttacccctccttacaaggcaaaagaatatatgggtgaaatacaggaatgtttatgggttttttccttgtggattgatgtttttttctagtgcttagatgtctccttcaggtgacacaatgccattagattttaagtatttattaaccaaaatgaagttcttccatttgttttaattaatttgaaattttgtaattgtcaatacaagtgtccaaagaaagtgcttgttatgtgtataatttttttaatgtactatttattcctgtttaaggtttgtgggatatgtcggaattatataggcatgctaagttgntgatatctaaagtcgcatcagtatttataagaaaaacgaacatcttgaacttcttgatccatgattactagaaactcaattatgcattat

SEQ ID NO: 75629 - DNA, 403 bp, Glycine max
  Clone ID: PAT_MRT3847_39307C.1
ggcgggtgcagcggttatgcgaatggaaacccggacccgaacgagatgggagaggttaggacctagaatataggatgcgaagtcgaactcatgcaaggactaagctatcgctaccttaatatctgactgaacacagaaatatactgcagcagatggcgaccacatgattacggcaccaaacacttgatccagcggaacgcgaacttcaaccactagcgactattcaaggtcaacactgactctatcaacataattcacaacggtctgactctcacgaaatgctgcagctagattaccgacctggacggaaactggtgcatatgggaatacaactatcgtgacttctacgtatctcgtgacacatacgcttgatactccatcgatctaatccgtcatcagggca

SEQ ID NO: 75630 - DNA, 585 bp, Glycine max
  Clone ID: PAT_MRT3847_39308C.1
attttataagttgccaaaatggaaacaaaacaaactcaaaatggcagttcagttgttctgagttaaattacacttcaccttctgtctcctccgtgcattttaagttgcagttagagggaactttggttatcgtcaaagtttacatattttttccttgacattgttatctgtgttttatatctcagggagcttgctatctgttttgcagtaagaaactgaacatatggaagtgaaaggggacagcatgagcgttttttcttctttttcttttaatatagctgcttcgacttccaagaagctcctcttgaggaagaaagtaaataaagattcttccttacagtagtttgatatttaggttctttctttgttgagagctgcttggtgttgattttataggccaagggttgatggagtgcctgtcttaatttgtttttcttgttgatcatttttgcattcaaaattgttttggggaagcaattacttagattgttttgataatcaaagtatgaagtttgtacagatgtgtaaaagccactcaacaagttatttattttggaaataaaagtgtgatttcccccccttaaa

SEQ ID NO: 75631 - DNA, 244 bp, Glycine max
  Clone ID: PAT_MRT3847_39309C.1
taacgactctatctctcttcgtttagttcttccttgcgctcctcctcgaaaagaaggggtttctttcgctgatcggccatcgctatataccgcgacgtttgctttccaagctgagatcaaccagctccttaatctcattattaacacctgttacttcaacaaggaaattttcctttgagaactcatcagcatcgcctttgattctctggacaagattagatttgagagtttgacttgcaagatc

SEQ ID NO: 75632 - DNA, 707 bp, Glycine max
  unsure (1)..(707): unsure at all n locations
  Clone ID: PAT_MRT3847_3930C.1
agttgaccttcttcattgattactatttctccctcagatttcgcttcaatcttccatccccgttccgttcaattctactttcaaggttgtgtattacatgaatcgttggttgaaagatgtttgactgtggttacaagtcgcaatatgtgggtgggcaatgtgaaaaatttgtgaggttggatgacttggattctagactatcatcatcttctgaagctgcagttaaaacatgtggatttagtattgataaattaagccatggtggccatggaagcagtactacttctcggtcttttaaaagaagaattagaaagggatccgaaggactgaagtcaattggccgatcacttggattaggggtatctagggcagtgttccctgaagatcttaaagtttcagaaaagaagatatttgaccctcaagacaagtttttgctcacctggaataagctttttgttatatcatgcattttagctgtgtctgttgatccattgtttttttatctccctgtcatcaatgattcatttcactgtcttggtatcgaccgaaagttggcaattacagttaccaccttgaggacattcattgatgctttctatctcgtacacatggccctccaatttcgtactgcttatattgctccatcatcctcgtgtttttggacggngtgagcttgtgatagatccagcacagatagccaaacgata

SEQ ID NO: 75633 - DNA, 1115 bp, Glycine max
  Clone ID: PAT_MRT3847_39310C.1
ccgactccctcggcttccccgcgctcccccgcaggttgtgctctattcccccattctctctccgtttagttcacagtatatttgaccagggccattgtctctgcctctcacccgcagggtttagagaaaatttaacaattagggttgcttctcctttgccgacccatggctcccaaagctgatagttcaaagaaggctgatccaaaggcacaggccttgaaaactgccaaggcagttaagtccggtgctaactttaagaagaagaccaagaagatccgaacatctgttaccttccatcgaccaaggactttgaaaaaggataggaaccccaaatatccacgcattagtgctccacccaggaacaagcttgatcactatcagatattgaagtttcctctcacgactgagtctgcaatgaagaagattgaagacaacaacactttggttttcattgttgacttgcgggccgacaagaagaagatcaaggatgcagtcaagaagatgtatgatattcaggccaagaaagtaaacaccttgatcaggcctgatggaaccaagaaggcctatgtcaggttgacacctgattatgacgccctggatgtggccaacaagattggaattatctaaactaatatatggcctcaccaaagtagatttctgtttagatggtagtttgttatggggtgttgaggggagacatttgaagcaacattaagttataaattttcggtttgttatctggtgtattttagttcaattggaattatatttacttttgttacaattttcagtttgatgagtaaatgggccgatattatttttcaaaaaaaaaaaaaaaaaaaaaaaaaattaaagaataattcgcacgatagtaccaaagaagtagtagtggatttgtatttttataagtagattatatgatgtgattgttgatgaggattgggtggttgtgttgtttgggattaggtgtttgttgagttggatgatggggtagagtgagttatttaatgatgagaatgagtattatgtggtgtggagtaattgatgattttgaaatatttatttgaattttgttttatttgatgatggtgtggaaaaaagggtggcgggtggcg

SEQ ID NO: 75634 - DNA, 864 bp, Glycine max
  unsure (1)..(864): unsure at all n locations
  Clone ID: PAT_MRT3847_39311C.1
ttcggctgctgaagacgacagaaggggggtgcctctgtttactaccgcagggtttcccgaagatttaacacctatggctcctaaagctgatagtttaaagaaggctgatccaaaggcacaagccttgaaaactgctaaggctgttaagtcaggtgctactttaaagaaaaagaccaagaagatccgaacatctgttaccttccatcgaccaaagaccttgaaaaaggataggaaccctaaatacccacgcattagtgctccacccaggaacaagcttgatcactatcagatattgaagtaggctctcacaactgagtctgcaatgaagaagattgaagacaacaacactttggttttcattgttgacttgcgggctgacaagaagaagatcaaggatgcagtcaagaagatgtatgatattcaggccaagaaagtaaacaccttaatcaggtgagcctttataaagtgatgcttatagaatttgtttgttgattcattattgctattttctaatgacaatggtatgcttgcagtgaatttgatattgcagttttccttccaaacatttattatactgagacatacatgttttgtgctttttggtttgtggcatgctggtgtgacaaagggttcatgttgtgcacagggcaacattgaaatgggacatgcattgaattgaatgtattttattgaaagtgtataatataatcctaagtaggtataacaaggcaaatgaaacaacaaatttatgaaaaacttgcattcaaacttacaacagatgccatttcttctgaattntaatttttctgttgcaggcctgatggaaccaagaaagcctatgtcaggttgacacctgattatgac

SEQ ID NO: 75635 - DNA, 505 bp, Glycine max
  Clone ID: PAT_MRT3847_39312C.1
caaattgagtatctggaaaagttggtgccaaactggatctacaagaaattggttgttacaggacatactgtgtactgatgagtcccttttaggaatgttgatcatatctaaattaaatattgtaggccattaagttagaattaattttgtctggttgtgtgtgttggggggtgtgcgctgtcttgcctggcggcgggggctccggactgagctgtaaggaaggtccaccccctcttccttccttgaactcgccatacgtggttctgctttctgttgagcctctcacgttgagcctctgaccttctcggtctaaggaagtaacacctcataaaggtttcttacatacctcacgtgtttcttttcatgggtgagataataagtagcaattgacatatcaagcctacaatttttttgtagatcaatgtgtggggtatgtaaaattttgtattactatgatacttgcacatgtgcttttatattagttcagtggctcaatggtacatat

SEQ ID NO: 75636 - DNA, 372 bp, Glycine max
  Clone ID: PAT_MRT3847_39313C.1
tggctcggaaccgttggactgatttatgtgcttgcatggtcgtcagaagatgatacacgggcatggtcgtgagaagatgatagaagggaaaatggaattaaaaaaaaaggaaaaaggataaaaaaaaaagtgggtgtctcagaggacttaagtccatgcatgagcgtacgtaatgctacagtctcagcacagcgctattcacacctaacttatcggttactgaccaataatgctacgatcgggaaaattacggtgctatttaagctaccacgttccgaactatacttatgccctgatagtacggtgcaccactaaataggtttgaattgactgaatccattaatacaggagtagttcgataggttaacggca

SEQ ID NO: 75637 - DNA, 770 bp, Glycine max
  unsure (1)..(770): unsure at all n locations
  Clone ID: PAT_MRT3847_39314C.1
aaatgggagtggaataatactttgaatttcttgttattatttgattgacactcttctcttcttcagctcttcttcttcccaccatgtcctctgttccactcctcccctgttttttttttcttcttttctcccttgtggtgtccctccaaacatgaactccttttcgtgatttgacctcatttccattctgttacagttctcactttctgcctttcctttttttaaaaacccacttgattgttgcactcttggcctcctttatcctctcttttctctgcttttttttttcttttatcctctttggtttcccatttgagttccacttcagaagaagaaccaacaacaacaaccacactggggtgtgttcatggaaattgatctgaatgatgcagtgacgagtgaggctgaaaagagtgcgtcttgcaatggggagtgtgagaaaggtgctgctttgtcatctccaacatgttcatcttctggctcctcctccacacgtgtgtcttcttcttatattgagctttggcatgcttgtgctggcccccttacttccctcccgaagaaagggaatgtggtggtgtatttcccacaagggcaccttagaacaagctgcatccttctctcccttttcaccaatggagatgccaacctatgatcttcagccacagatcttttgtagagttgtcaatattcagctacttgccaataangagaatgatgaggtttatacacaggttactttgcttcccccagctgagttggcagggatgtat

SEQ ID NO: 75638 - DNA, 155 bp, Glycine max
  unsure (1)..(155): unsure at all n locations
  Clone ID: PAT_MRT3847_39315C.1
aagatgagagaagggggaagaagaagaagaagaagataggattgggtattccagctactacgcctgacatacgtcggtcnagttctggcacttgttatcagcatactatggacgtgctcttggtcctcaattttaggggtggctagacgagggat

SEQ ID NO: 75639 - DNA, 941 bp, Glycine max
  Clone ID: PAT_MRT3847_39316C.1
ggagggccacattgtgacaaattatcacgtaattggcaatgccctttcaagaaacccaaattctggtgaggttgttgcccgagttaatattctagcatcagaagggttacagaagaattttgaaggtagactcattggagctgaccgtttaaaggatcttgctgtcttgaaggtagaagcccctaaagatattttaaggcctatcaaggtgggtcaatcgtcatctctaaaagttgggcagcaatgtttggctattggaaatccatttggctttgatcacaccctcacagttggggttattagtggacttaaccgagacatctctagtcaaactggggtaacaattggtggtggtgttcaaactgatgcagccataaatcctgggaacagcggaggtccccttttggattcgaaagggagcttaattgggattaatactgcaatatttactaggacagggacatcagctggtgtaggatttgcaatcccatcttcaactgtattgcgaattgttccacagctgatccaattcggaaaagttgttagagctggtttaaatgtggatattgcgccagacttaattgcaaaccaacttaatgttcgaaatggagctcttgttcttctggttcctgcaaatagtcttgctgccaaagctgggctaaatcccactacaaggggttttgctgggaatatagtccttggagatatcattgttgcagttgacaataagcctgtcaagagcaaagctgacttgttgaaagcattggatgactataatgttggagataaggtagttttgatgattcagaggggcagtgaaaagttggagctgcctgtggcactggaggaacaaagttcttgagatggtttatatgcattaatgtgttataacccactaatatattatgttggtagacatgtattattttgtacaacaaaca

SEQ ID NO: 75640 - DNA, 937 bp, Glycine max
  unsure (1)..(937): unsure at all n locations
  Clone ID: PAT_MRT3847_39317C.1
tcgcccacgcgtccgcccacgcgtccggttccaaatcccatatggaaataccataaatatgatgggttattcaaacccaaccaagaaggttcatgatcaaattcagctgtatggtgatgtaaaagatcttgatgatttttgtttgaaggctcaactagttaactacatacaatatagagctcttctggagggatggacttcgcgcatgtggaaaaaatatacaggagtattgatttggaagacacaaaatccttggactggtctgagaggtcaattttatgatcatcttcttgaccaaacagcaggtttctatggctgtcgatgtgctgcagagccaattcatgtacagcttaatctggctacatatggctcgagggttgttaatactacatccgaagaattgtctaatttagctatggaagtttcagtgtgggacctcgaaggcacatgtccacactacaaagttcatgaaaatctcactgcgctgccaaaaaaagtaacacctattgttgacatgaagtatctgaagtcaaaaaatcctaagccagtctactttcttcttctcaaactctacaaaatgtcagataatacaattttatctagaaacttttattggttgcatcttcctggtggagattacaagctattagagccgtataggaagaagaaaatacctctcaagataacatccgaagttttcattgaaggatccacttatatacttcaaatgcatgtgcaaaacacatctaaaaaaccagactctaaaagtttaacaatggtacacagttcaacagctagacaaagcagtggctgctttgttacagactctctggaaaccgtatatagtgggactggaaaagagcatgaagttggttggtttaaggggatacacacatgctttgctgggaaaagtcatggtcngaaggtttctgaaata

SEQ ID NO: 75641 - DNA, 828 bp, Glycine max
  Clone ID: PAT_MRT3847_39318C.1
ccgctacgcatccgatctcaaccgcatgattcttcagaattgactttgttgtcttgattgcggcaagtaatgctacgaaggagaaggcacaggtaataagaacctacacaaagcagctactacttgtactcgagtacttgcacaaaaatggaatcatgcacagagacattaaggggccaatattcttgtagataataaaggatgcataaaacttgcagactttggggcatccaaacaagttgttgagctgataatctcagtcttatatgtagctctactattgttgccttttccttttaatctaggcaaccatttatggtgccaagtccatgaagggtactccatattggatggctccagaagttattctctagactgggcatagcttctctgttgacatatgaagtgtgggttgtactgtgattgagatggccactgcgaagcctccctggagtcagcaataccaacaagagtagatgaaatagacccacagcaatcgtgaccggaaggtgcagagacaagaactatactatgcaggaagccatggcatggacatcactggtccaacaaaaagtccaaagcaagtgagagagagtttctaaaactaatcagtgtcttgaagattctatctttttgtttctttctggttagctttgccatttgtgcttatttgtttcaatgtacataaagttgagtttgggaaaatatgcaggaatacattgcaaaatcccttatggccaaggatcaatttttggattcttcagccaagataatgtacatgttggggatatcatcatcaaagatcaagtgtctattttgccctctatt

SEQ ID NO: 75642 - DNA, 329 bp, Glycine max
  Clone ID: PAT_MRT3847_39319C.1
cacgcccacctcgtccgcacaatatggtagtgggaaaactttgaaatatgatataagtggtgctggatcacattctatagaggatctttctgaaaaggaagatcaagaagcacccaaagagattgatagccagattgagacagagaatatatcctcaatacaatgaggtgcaggctcacatggaaacaaatttgtttaaattgcctcttgatgatgttgaaactcctaatggttccatgtaggatcttaaaatttgtcaatctacaaccgcacttcccaaaaacacagctggaggaaccattctgcgtagagagactatcggcaaattt

SEQ ID NO: 75643 - DNA, 163 bp, Glycine max
  Clone ID: PAT_MRT3847_3931C.1
tcgagctcgagccgaatcggctcgagagtgaacaagacccaattgttggggagttgctacaacctcttatgctatctcaaattaattgatctgggactgcagatattttcttcactaatttctcacttacccactgtttatttctttcaattcctatgttcca

SEQ ID NO: 75644 - DNA, 419 bp, Glycine max
  Clone ID: PAT_MRT3847_39320C.1
tcggggacataatatatcgagacgctcgaaattgaagaacggaagctctcgacaaattcaaattgtcataacttttaacaaggatgtctgatttggtgacataactcatctagacgctcgaaattgaacaacggaagctctcgacaaattcgaatgctcataacatttcactcggatgtctgattcggggacataatatatcgagacgcttgaaattgaacaacggaagctctcaagaaatttcaatggtcataacttttcacacaaatgtccgattcggggacataatatatcgagacgctcgaaattgaacaacggaagctgtccagaaattcgaatggtccaaacttttcacacagaagaccgattcggggacataatatatcgagacgctcgaaattgaacaacggaagctgtcg

SEQ ID NO: 75645 - DNA, 931 bp, Glycine max
  Clone ID: PAT_MRT3847_39321C.1
cacactggatcgaagagaataattgaaagcacgggagcagcggaacacaggaataatggccacgcgtagattgagggtccgatgacacacagctgtaaaccagctttggcgcatgtgagcctctgtcctctgtcccctgcccccaacacccaacaacaaataaaactcatactcactctctctactctattcccatggcttctcttctcaccctcgctctgttactcttctgcattgcctttacctcccacgttgccgtgcaggcgcacatggaggacacggccttcaacctcatgtcggacgccttggagtggcccaccacaatgtcgctctacgacgaagacgacgcccaagaggatgtcgagaacgcttacagtcggagatcgttgttctggcggcggatgaagtactacatctcctacggtgctctttctgctaaccgaattccttgcccgcctcgttctggtagatcttactacacccacaactgctacagggcacgaggccccgttcacccttactccagaggatgctctgccatcacgcgctgccggagatgagtttgatgtgagttccgatctgatcacacgcttcagatcggagatggaaataaaaaaaccgagtaccgtttatggtggttttgttttgttttgttttattggtgtactagatttatattgtggatttaaggcgtcgttagttgtgctaagcaagtcaagtcaagtgaaagtgtcgtgtttgagttaacggtttttggggattcttcacttgcatcgactcgttgcgctgcgcaaatgaatctgcttgctttttgtgttacttcgtcatttattcgtttgtataaacccaacggtttctttttcttggtgttcagagcactttcagtttctggttttatcttctatttaattttaaaaatattgttgtaaaa

SEQ ID NO: 75646 - DNA, 208 bp, Glycine max
  Clone ID: PAT_MRT3847_39322C.1
tatatgccatgcaatatgcaaggctcatttatggaagcagtgcgtataacgtactatatataatatataatatatagattaatgattaaataaatgtaagttttctttcatgatcttctgattcttctcctttgtagcttacaagccgatcgagttaattatatttttggtttgatgaattaattaaaaagccaaaaagtttaagaca

SEQ ID NO: 75647 - DNA, 254 bp, Glycine max
  Clone ID: PAT_MRT3847_39323C.1
cccacacattccctcactctctctctctacttttatacaaacactaaacctctaccccgggagccatctccaaaccatgtctgcttatcatatattacaactttctctccctaaactcatcactccacaataaacaatccctactaaacctacaaaatacactctaatttccttttaaaaaaactccaacgccctctttaaatgacccaaccttaccactccctccctgcaccttttaaacctctttataacat

SEQ ID NO: 75648 - DNA, 272 bp, Glycine max
  Clone ID: PAT_MRT3847_39324C.1
catgcttccgatctccttcctcatctcctccgatcatccttggtcatctcttccgatcatccttcgtcatttttttcttcttcctttgttagcatcacagaaaagttcaataaggcaacaaatttgagatatgaatataagcaattcagaaataggtgggattctttgaaaaaggaatggcaattatgggctaagcttattgggaaggacacaggtcttggctgggatggggagaagaaaaccattgcagctagtgatgaatggtgggaagc

SEQ ID NO: 75649 - DNA, 1474 bp, Glycine max
  Clone ID: PAT_MRT3847_39325C.1
aacggctcccattggagcagacagtggcgaagcgaaacggggttgcctcaacaattcgctgttgttgttctcttctcttctctttgacatgaatactctttctttcaacgctccaaggcgggtggcttccccgctcagcttcgaaaaccaataccccatctctctccaaatgccatcacatttgggtcactcataggttctgttgccattgagcaacaaactaaggtcgctctcatcagaattagcaccagaagaagtccgctatctctagcacaagcatatgagacaagggacaaacacatggcatcacaccctgacttagcctaagaggggactatcgagattgtgattataaagacgacaggggacaaaatcctcacacaaccacttgcagacataggtgggaagggcttgttcaccaaagaaatagatgaggcactcttgaacagcgaaatcgacatcgctgtccattcgatgaaggatgttcctacttacttgcctgataaaacaattctgccatgtaaccttccgcgagaggatgtcagagatgcatttatatccttgactgcagcttccttagctgatcttccccctgcaagtgttattggtactgcttcgttaaggcgaaagtcacagatcctccacagatatccatctcttaatgtgcaggaaaatttccgtggcaatgtccaaacaaggttaagaaaactcaatgacgggggtttgtccaagctacactattagcattagctggactcaaacgcttaagtatgacagaaaatgtgacttcaatcctatcaatagccgatatgcttccaattattaaccaacgggacattgggattccctgtagaagggatgacgataaaatggcagaatacattgattcagctttacctatgaagaagcaaggctctcgctggactctgaaagggcctttctttagaagaaggatgggtcgcgccgccttcttaatgcagggtattctagtcgaaaagaggatggcaattgtttgtttagaggattagttgcttcccctgatggaaccagagtgctagagacatccagggttggtccatatgctgttgaagatatgattgagatgggtaaggatgctggcaaggagcatctgtctcgggctggacctaacttcttcagtagttagcagcagatgattaaagtatgtcttggtacatgcaggtttcatggtcagctttcggctattgctaactaagttaattcattctttgtcctgttgtaactttagagtagattaaatgttcaattgagtttgggaaagtggacctctcattagggtcaaattgttgtattttgaggatattagaatgccaattttttaggtagtttgtataattaccacgatagtggacttttgagatttcacgctaaatacacctgggtgtttctcaaattctcttattaaaaaaaaaaaaaaaaaaaagaacggttaaaa

SEQ ID NO: 75650 - DNA, 832 bp, Glycine max
  unsure (1)..(832): unsure at all n locations
  Clone ID: PAT_MRT3847_39326C.1
cttgcatgcctgcagtggcatttgcaagactttntcttcccttcagaagccaaactagccatggacattgcgcatgctgagacaacatctgagtttgctggtctttctgcgtcaaactcaaaaggttcaaatggaaacttaagggaggttgatctcaatgagactcctatagtgcaaaataaaagacttctttctagaatggaagcccttacgaaaacaggtaattgcagtctttattttattttcctataaccatttgttgtaatgatgcttttaacatgtttgtttatcattcaaattcgtagccagttgggtagtgaggtcaattttgtttcaggcatgctctatttcttgtttgtggtacaggctttgtaagcttcattcatgtatctcaatactcagattttgttaaaaaagttgttcatatttgataatatatttttatgattaaaaaaaaatctaatggatatgaactagggtacacgttaaaattggttttgggttcaggggatgtaaaattcttatcgaacctgacccactggcatcagtacttgactaatttcaacctatgtggtgatggaccagaaattttttaaattagtaaattagtttggcttcaattttaataacacaaatccatagaatacccctcttttttgtatacaatggcagaaataaagtttgagcttaggatttcatgcatactacccaaatcccctacaactaagccacctctagtggattaatctataaaatatctgttatcatggaaagttgcgtctcactgtcttcgtaacatgcaaacttgtcagacacaaattaatgcgagtag

SEQ ID NO: 75651 - DNA, 389 bp, Glycine max
  Clone ID: PAT_MRT3847_39327C.1
aaaaaaaaaaaatagggcctttaacgggggggccccccaggaccagggggccccctctggagaatcccaaagccctagcccccaaggaattaaaagggtttaggacccggacccggacccggaaccccacccgccccccccccccgaaagcccgggaccccaccgggcctgacaaagggcatcccccccaccaccggggggggaaaccttagcccccaaaccggaaacctgaaaacccaagggggaacccctttgtccaaaaaaaacccccccccgttcaaaggcggggcccccacaatggtggccccccccattggccccccccaagggaaggggttcaaaacccttgggggaaaactgtacgggccctggaaccgggggcccccctt

SEQ ID NO: 75652 - DNA, 162 bp, Glycine max
  unsure (1)..(162): unsure at all n locations
  Clone ID: PAT_MRT3847_39328C.1
cgntcaataagaaccccataagacagaaggaagggcgggagcagtcttaagcaagaggtagcgaatcagacccgcgacggcgccgtttgggcggagaagcatgaccacgggggcgaaagcggaggaggaaaacaccgggacaggcaacaccaagaaccgcaa

SEQ ID NO: 75653 - DNA, 1692 bp, Glycine max
  Clone ID: PAT_MRT3847_39329C.1
acggctgcgagaagacgacagaaggggacacttcaacaaaaaaattacaaagcacgagggtctcgtttagcaacttgtaaaggacacaacagcatcacttacataacatgcacttccccttctccaccgcattctgtgttctctagtcaatagaaagtgagcactgaatttgctttgtgccgttcctgttttcttataatttgtgcatttttttgcacataaacaaaacccatgggaagggctccttgttgtgagaaagtgggattgaagaaggggaggtggacagcagaggaggatgagatcttggcaaaatacattcaggccaatggggaaggttcttggaggtcattgcctagtttggaaggattattaaggtgtgggaagagttgcaggctgagatggattaactatttgagagctgaccttaaaagaggaaacatttctgctgaagaggaaaataccattgttaagttgcacgcttcttttggtaacaggtggtctttgatagcaaatcacttaccaggaagaacagacaacgagataaaaaactactggaattctcacctcagcaggaaaatttacagtttcccaggtgcaggtgcaggtgcaagtgcagggatcatggatacacctaaggtagtatatattcctcccaagcgcaaatgtggtagaacaagtcgttgggccatgaagaaaaacaaaacatacacccaaaaagtcaatgataggattaaccagagacacacacaaattggtttccctcaacagaacagtgacaccgcagttccgacgccaccaactccgtctctagagagtgagggtttgtcaaacgccgttaatgacttcaaggtcctggacggtgacgtggcagagtttgatgagccgagaacggaggagctggaggcggaggtaaataaacgtgacaatagcgttggaggcgtggaagaaagtagtaataccgatgaagacatcttgggactgtgtgaactagagggcattaatgaggacagtgggatgttgttgggttttagtgacattttggaaagttgccttgcggaaacaacatgtggggtttgggacataagtgaagagagagaaagcaatgacgtggtggcggctgatgcttgtcgcgacaaaatagcatcgagtgaggaagggtcatgctcttccatgaatcaagactgggactgggagagcgtgttagagtttagtaacgctgttgataattgggaggaccaagacaaattgctcacttggctgtgggaggacgatgactgcaagagattgggagagacagatactcagatactacaaaacgacatggttattgattggtttctctcttgattcatccaagaataaaataggcttagtgtgtgtgcccccttggtcatgtttctttaatctgttcttcttggattgattagggaatgtgtaaacttaataaatactttttttagttacttatataatcatccttaagacacactagttaggaatactcttttccttttactttaatttgcatgtcacatgattcgaaaatatcatgcagaagaattggaccagacattagtcactgtagcattcctaggttgtttgaaaatatggatcttattatatacgagttagagtttgatttttttataattaatttatagtacataaataaatatagaattttctgtgata

SEQ ID NO: 75654 - DNA, 136 bp, Glycine max
  unsure (1)..(136): unsure at all n locations
  Clone ID: PAT_MRT3847_3932C.1
cccgcacaanaggcagacttacatacgacacgtacgaaaagctcgtgcttctggttcttaaaaggccactgctagaaatggataaatgctcaagagagaaaaaagactcacaacgagaggcatgtaaaacatccaa

SEQ ID NO: 75655 - DNA, 858 bp, Glycine max
  Clone ID: PAT_MRT3847_39330C.1
gcaccaggccaaaacattatctaccttctctttgtcaccttgtctccttgagctgcaaaaaaaatttcaccatattttcatattcacatactttgttgatgatcaccatgctagctatgcttcttgtcggatgattttcataaggccttttgttttgcatggctggtgatacagcatcttccttctccacttgcatggccattttcttctctttgctcctactttctcacttcactatggccatgctagaacacaataacttttctccttcaacatctaacaaagagggtgccaagaagaggaacaccaaagtagttgcttcagcaagagaagaaagtgaacaaaattccaagaaggatatggcactaggagacactggcaaaggcagcattcatgttccaaagagagagcactctcaacactctcaatctcaaaacaggatcttcaatgctagtgcacatgaagtcccaagtggtccaaaccccatttcaaacaggtaaattaagtagtagaagaaagaagatccacaaaaaaaaaggaaaaaaaaagtattattaccaaccttgaggtgtatggctttcatttttttttactttttctcttttttttctctacctttttttgggttttgtttttatctatttgcaaaggattaatttggattaattctaaggcttcaaagcagtttgatatcagtgaagtctttgttcacattgttgttctgaaatcggaagcttgatcatgtgtagtaatgatttaaacattataggatatgcgtatatgagattatattatataattgttgtcatcattatgttaatgttattggataaaaaaacgacgagggaatgatggttt

SEQ ID NO: 75656 - DNA, 667 bp, Glycine max
  Clone ID: PAT_MRT3847_39331C.1
ttgcatcgtccatggctgcaaactctaccgacgtcaaattgttctccaaatggagttacgatgatgtccaaattatggatatctcccttgtggactacattgccgtcaagcagaagcctaaataccagtgttatactcctcactctgctgctcgattcaacaagcagagattccgcaaggctcagtgcccaatcgttgaaagattggtgaactccctcatgaagcacggacgaaacaacggaaagaaactccttgccatcaagatcgttcaacacgccttcgagatcatccacttgttgactgacaagaaccccatccaagttttggtcgaggccatcgccaactctggaccccgagaggattcaaccagaattggatctgccggaactgttagacgacaggcagtcgatgtgtccccactcagaagagtcaactctgctttgatgttgttgaccactggagcaagagaggcttcgttcagaaacatcaagaccatttctgagtgcttggctgacgagctgatcaatgcctcaaaggagtcatctaactcctacgccatcaagaagaaggatgagctcgagagagttgccaagtccaacagataatatcctctgctttttgtcttctccttatgtcctttgtggaataaagtagagaatgtgatagt

SEQ ID NO: 75657 - DNA, 354 bp, Glycine max
  unsure (1)..(354): unsure at all n locations
  Clone ID: PAT_MRT3847_39332C.1
aattattttaannttattaanattanaaaatatttaaanttaacatatttttagactggtacttatgagtaaacaacttgagtactggcatattaaaggctggcaatagtaaaggaattcgaccacacatttttaaaccaaatacagcctgggcatttacaaacccttccaaccacacacacaccattaatttcctaagctattaggaatgggaagactgtcagcataaacgatttataagtgaaaggtggagagccagaatacccaggatccctttttttgaatttgtgaggcaatccctttacaggaagacaacactccatgaaaatggcatattctatagccttgcttttt

SEQ ID NO: 75658 - DNA, 931 bp, Glycine max
  unsure (1)..(931): unsure at all n locations
  Clone ID: PAT_MRT3847_39333C.1
ggactgttcctcaatttctcgtaggttgctccatcctatccattcgccaaccctcaggaatcgccggcttcggtcgcggccaagagtctctcccctcacaaatgaatctcaaaagattctcttactgcttagtttcccaccgcttcgacgataccccgcaaagcagcgacctcgttttgcagattagttccactggcgacaccaaaactaacggcctcagctacacgccgtttcgctcgaacccgtccaacaactccgtgttccgtgagtactactacgtgactcttcgcaagctcattgtcgggggcgtggatgtgaagattccgtacaagtttttggagcctcgctctgacggtaacggcggcaccatcgttgactctggatccaccttcacgttcatggaaaggcccgtttataatttggtggcacaagagtttgtgaagcagttggagaagaattattccagggccgaggacgctgagacccaatctgggttgagtccctgttttaatatctccggcgtcaagaccgtcactttccccgagttgacttttaagttcaaaggcggcgccaaaatgacgcagccgcttcagaattatttctcattggtcggagatgccgaggtcgtgtgtttgaccgttgtctccgacggaggtgccggtccgcccaagacaaccggtccggccatcatcttggggaattatcagcagcagaatttctacattgaatatgatttggagaatgagaggttcggatttggtcctcgtagttgcagaaggaaagcttagttttagtagttgaaaattaattaacacccaattcgattcacatgacatccacgacgttgtggtggttatagtctattattattattatgatttatttgtcgaactcataggggggccgctttagagaatcnaagcttaggtag

SEQ ID NO: 75659 - DNA, 396 bp, Glycine max
  Clone ID: PAT_MRT3847_39334C.1
aaaacaaacgtggcctaattaatatatacttgaatccatatacatagatctaaattagaaagacaaataaattgaatactgaccagctggtaacaaagaaaaacacacggatttaaacacaattaatgagcactatctgcatgaagtttcagagtggacgacagaatatcacacacacttttttgtgacagcaggcacaacatggccataagacaagtgtctaaagttttgccactaatacacaaccctcaatttcctttgaagcctcagtttcattcatgtcattttctttagaatccaactcacatggacttggcagagggacattcactgctggagaacagttgaagaattcatgaggcatgagcataaaactcgtgcgtttactggataact

SEQ ID NO: 75660 - DNA, 652 bp, Glycine max
  unsure (1)..(652): unsure at all n locations
  Clone ID: PAT_MRT3847_39335C.1
caattcgtcagataaaacaattcattccatagataatttgtcacaattgaccaatccaatcttagaccaacaatttgaggaatcattattggattgaatgttgggagaagaggataactttctatcagtagaagtcaatatggtcatccttataccaagtgaattttgggcttatgcaaagcaatcaaataaactagatggtgacttgtttgttgaagacgtagaatgtgcatcgttgattatagacccaaatcaacaagggaaagcaatgatattcgaaaagcctatagaagaaatggggagacatttgaagccattgtatatcagagcccacatcaacgacaaaacattaagtcgagtgattgtagacggtggagttgtgttaaatgtgataccaattaatactatgaagaaaattggcaaaggagtggaagatttaacaaccaacatgaaaatgataaaatttacttgtggtggaacttatgcttggcgtgtgttagtagttgatattacagttgggaccaaaaccaaaaaaatagtgttgtttgtggtggacgctaaaccagcgtataccttgctattgngacgtgattggatccataggagtaagtgtgtcacatcaactattcattagttcttgatgttttgggat

SEQ ID NO: 75661 - DNA, 350 bp, Glycine max
  Clone ID: PAT_MRT3847_39336C.1
tattcggctcgagcgcagcgaggccccaatagaggagagaaagatgaataaacactcgagaaacttctcacttcaggttaggatgcttagagcaatcctctctctccgacacttcatctcacgcgatctcgttccgatcgcacgccacacaaagatcgtcaactcccacgtcctctgctgcggctccgatcttcctcgcaggacctctccggacctatccgacggtaccatagatctccgagcaaagcgaccttcaccgccaccaccaccactaccaccaccaggcgcagctgaccgggtccatcaacacctctcggccgcagatcaccgcggatcacgtcgagccattc

SEQ ID NO: 75662 - DNA, 934 bp, Glycine max
  Clone ID: PAT_MRT3847_39337C.1
agaacacaaaaaagtgatggtcccgtgtaaagcaaagagggtttttacacttctagaatttatgactgttaggtcataaggcaacaataaaactaccttcaacaggtaatctgttaataatcaatgaggtaatacaaattataacatttcttatgcatttaaggattaaatctcaacaaaccacatggatctttctatggtatgtccattcatgggtaaactgaaaatataaagcacacctaaaacaataatattactccattatggaaaattcatgtatgtttccatcaaatatacaaattatgacacctaatatcatttcaggatacaagtgttataaaagttcaatatctgccttgtacccactctcaccattaaaaaaattattgaaaaaatatgaacattcctaaattgtgtaaaagaaaaaaaaacctgtttctttgaagcatatgtgtgactcagagaatcaatttcttgtgacaaaatgaaggctgctgacttatattgacgcttggttggattattatgtgacctgccaacaacctcatttgttgcatcagatgccaagaattcaactgatgaatcaggagacacaacatgttgcttagacatactgctgtcttcatatgttttgttcctcacttcatcatttgctgagcatctctcttgcaagatctgacagtctatcaaggcggaagaaggactagaacttgacaattgaggaggcatagttaccttatcagacaaattgctcccataacgtctcttctctgatgtatggcctgtagaattctcttcagtgtgattactattgaaataagaggaaagagaagggaatttctcatggccaggactgaggttcacatcttccaaacattctttcttgttaacattttgattctttgacttccatgataatcgatttgcagatgca

SEQ ID NO: 75663 - DNA, 268 bp, Glycine max
  Clone ID: PAT_MRT3847_39338C.1
catggttcacgtcgttttcgccttggccaacaagaatgtctcctaggccatgcacaaggatgtctcggatttgcagtggttcggtacccttctctcggctccctctgccactgccactgccactgccactgcccgtaatgggtcgctgatgccctcgctgtcatctctgagtccaaggaggtccctcatgattggatcaccgatgccgtcattgatcaggttcttggtgatatagcttttcagaaatttggaaaaggtttaatttcat

SEQ ID NO: 75664 - DNA, 236 bp, Glycine max
  Clone ID: PAT_MRT3847_39339C.1
attcttcctttacaatatatgctttcgtgcggtctatactctgacaataataatagatatggggggccacctctatcatttcttctaaagaagcatgcttaccacattatcatgttatcaccaacattcaattagtaataaatgtaataacgccacataaataattgcatgttcctctattcttttacttgaaatcttttacatcataatgggtttcaatcttcatctcggagtca

SEQ ID NO: 75665 - DNA, 170 bp, Glycine max
  Clone ID: PAT_MRT3847_3933C.1
tcaatgcggtagctgtatggctatatcattggaactatgatacgggacaatgcgccggtttcacatcatgactgagaatggggaattgctgtgggtgtgagacacggcatcggcagcatgaagactgcagaagcatgaggcatgggggaggcgataaacccgttgctcat

SEQ ID NO: 75666 - DNA, 337 bp, Glycine max
  Clone ID: PAT_MRT3847_39340C.1
ttctcggtggcgaaagaccaccaaagggggaccaattttgcgtgcacgtatattcattttcgcatcaaggccgtatctcaaagaaccacaaacatcaacaagcgtctttggacgaggaaagggaggcatggcactcggaatgggaggagccacacgactccttagggctacagagggacaacattcaaggaagcaccagactcgtcatacgacgtctggacagacgtgcgggcgtcaagcgaataaggtggtcgacactctatgaaagaaacgtcgccatgttttcaagatccttactagagtaacgtcatgtcaacacgctgtaccccacactgaa

SEQ ID NO: 75667 - DNA, 460 bp, Glycine max
  Clone ID: PAT_MRT3847_39341C.1
tccaaggaaggtttcccgtcatcactgtatgacgtcctccttctttggggggggggggggggggggggggggggggggggggggggggggggggggggggggggggggggggggggggggggggggaaaataagcggatttggccaaagggtttggcccaacgaaaagcaaaaaccatgggggttgaggttaagtttttttaaggccaaaaagggtttaaagggaaaaaacaacaacaacaaaaaaaaattggggaagtaggggaattttgggctagggaatttccccccctggggccccctaaaccaagggtttttttattattgttaattaaaggcccttttactataggccgtttttaaggatttggggaaataagggttttgggcccgccctttggcgcactaggaaattaatggtttggaggaaaccctgagttttccccggtgatcccctaaaa

SEQ ID NO: 75668 - DNA, 547 bp, Glycine max
  Clone ID: PAT_MRT3847_39342C.1
tccaggaaggtttcccgtcatcactgtatgacgtcctccttctttggggggggggggggggggggggggggggttaattaaagggaaactataacagacagtgggttgcatggttccgtgtgaaattcaaatagtggatacctaaatgataagaacaagtagggcccgtaaaagagccaagagcgccgagatgggcatatgggcgcatggagagctgtgttaaatggacgaattacataattaggaaaatacctgataatatacagaagcggccgagcaaagccataaataggttaatagatgggtaggagtaaccccaggggagtccggagaaggggcgccgaaataaccaattcccgtaccaatataacgattcaatcgtatgagatgaccgtgcacttgcttagaaagagccgttggatagcaacgaggtagcaaggcaaagtaaatacatcgtgtgcggtcacacagtacaaggttagtacgcgtgctagacacttaggttttagatgcagttgcagttactaagagggagccccattctggt

SEQ ID NO: 75669 - DNA, 446 bp, Glycine max
  Clone ID: PAT_MRT3847_39343C.1
atgctggcaaaagcttcattggttgagttttgacaagcttacaaagtcaaagaagataggaggatcaaagctttccacaaggctatgctggcaaaacagatgtggagactcatagataacaaagatgcccttgtaacataggttttgacagcaaaatacttccccaactcatctcttctggacgctaaaaaaaagcttatatgcctaattactcttggagtagtgtttgatagtcaaaagatcttgcggagcatggagcaatatggagaattggtgatggcaggtctgtgttggaagttgagatttttctcttattgttataattaagatatctcctgcagattttgtggttgcttgcaactatgtttaaagcttgcttgtgctcagagaaagtaacttgtagttgcaggctaatgatgtctagctttgtcataatttgctgtatg

SEQ ID NO: 75670 - DNA, 256 bp, Glycine max
  Clone ID: PAT_MRT3847_39344C.1
caatttgtttatgcaacagtcgggccgaagaactagaaagtcgaatacgtgaagaggtgagtgcaagagaggagctaaagaaggaatcagacgcagagaaggagcaaacagaggagatgagaacggaggtggaagagaggaagaggaggctgagctcgctcacggaagtccaatcggagctctaaaccggctccaaatatggacgttagcgaagattcgggcggagacgcagctggagaaggcggtgggggagagg

SEQ ID NO: 75671 - DNA, 466 bp, Glycine max
  Clone ID: PAT_MRT3847_39345C.1
gtgaaaactgcacacatagtcacatagaaacagcaaattcttgcttcatgtctctccacaataaatcccttaacaccctccctagccacattgcttttgtgtcaaaatttgatcaaagtttttcttctcctatgatggaggaggatcacaaaatgtttggtcttacctcagaacaagaggaatattgcaaagagttagatgctgcagtcagagcagttcaggtggcatgcttcctctgtcagaaacttcaagactctttgatttctaagtctcggagcaacaataatctcaattctcccctcacagttgcaggttggagtgtcaaagcaattgtcagcaggatattgtttgagtgtttagagaatgaaaatgtctcaattgtaactgaaaaagaggttcagacactatccagtactgatgcatctgaactattggaagctgtggttaaaattgtgaatgaatgtct

SEQ ID NO: 75672 - DNA, 555 bp, Glycine max
  Clone ID: PAT_MRT3847_39346C.1
accagaaagaaacaccgttttttttttaaaaaaaaaaaaatttttttcaggcggcccctggggggtgggccaaatcccaactagttaaaattcgaaagaaatttttaaaaaacaaagccccccccggaatttccttttttttttgcccaagaaggggcgggcaagttaaataacaagggggaaacaggggccccaaaaattccccccccccttaccaggccccccaattttgataattccccgggaaaactggaaaagtttgccccccccccccaaggaaatttcccggggttggcccgaaaaacccagtggggaaaaattgttttaaatgtctccccaacatttggccaccccccctaaattcagggccccccccccgggaaactgggggccccagggggttttttcaagtaaaacaatggaagcgggggagggcggttaaacccccggggggagttttggtttaaaaacccgactttccctaaaacaatacactttttaaaatcttccaaggaggggcccccagggaaacaaattcccaaggggccctggggg

SEQ ID NO: 75673 - DNA, 471 bp, Glycine max
  Clone ID: PAT_MRT3847_39347C.1
ttgatgcgtgggttccaaaccacattgcttttgtgtcaaaattagaccaaagtttttcttcaccagtgatggaggaggaggatcacaaaatgtttggtcttgtctcagaaccagaggaatattgcaaagagttaggtgttgctgtcagagcagttcaaatggcatgcttcctctgtcagaaacttcaagacactttgatttccaagtctcggagcaacaataatctcaattctcctctcacagttgcaggttggagtgtcaaagcaattgtcagctggatattgtttgagtgtttagggaatgaaaatgtcttaattgtaaccgaaaaagaggttcggacactatccagtactaatgcatctgaactgttggaagctgtggttaaaactgtgaatgaatgtctagctgaagcgcctcgatttggagttgaagaaccaaaatcaacccttggaacttcaaaggttcttgaaa

SEQ ID NO: 75674 - DNA, 259 bp, Glycine max
  Clone ID: PAT_MRT3847_39348C.1
cacacgaccacacaactgcgcgaagactacagatggtatctatctgacatatagggcacgctatcatgcatagaatgaagttgatcactagacatatgatgatgctgatcgcgttcagagatcaaaattgactcagagtattgattatgctgacaaatatctttatgattactaagccatcagaggtgatcgattctgatgtaggatcctccagtacataccatgctcagactgcaaatgctaaactaagtgctgtctc

SEQ ID NO: 75675 - DNA, 407 bp, Glycine max
  Clone ID: PAT_MRT3847_39349C.1
ttgttttttctctggctctctcgcccttttttttttttttttttttttttgtgtttttttttttttttttttttttttggacaacggacaaaccccttttaaaatttttattaagcaggccccccccccgaacaggccaaggtttttaagaaagcccagtctaacaacaggggggggggggattgggggccgggtcaaaatggggccttaatgagacatgcctctcatgggtggggggggaatattataaccaaccctgggggtgcccaaggtggctgtgtgggaaccccctgggggggccatccgggggggggggaggttatccttactttgggggccaagccaacgggggcccacaattacaaaggggggggcaggtcatgaattgggcgactaggtttgagccc

SEQ ID NO: 75676 - DNA, 513 bp, Glycine max
  Clone ID: PAT_MRT3847_3934C.1
ggactgtgggggaaccccgtatcgagacctaggaagcgcgaccccaacactgatcatagggaaaagtcacgcccactgccaccggggccaaagatgatcgatgatcaacatctgggtatctttgccaatgatgttggcggctgcatctttgctctagtgatcgcgtatcatcacgtaatggctgaccccaagcttaaaggaacctatacacgctactaagtctaatatgtctatgagagtggtatactcgggaatgtaaacgtgagctcactaaagcttccatagccatcataggagcatatcatgtgaatctctgctatactgatgcgtgctcccttacatgattgatttgctgatgaggagtgtatgtaggaatactaatgagaatactggattttctttatgctcaaagtagcctgtacatgttaggtgcggccgactactagtgcgctctactgcccggcacttactctcggaccgtgaccggcaggcatcccaactatacgtatagtg

SEQ ID NO: 75677 - DNA, 278 bp, Glycine max
  Clone ID: PAT_MRT3847_39350C.1
tccttttttattttttttttttatcatttttttgccttctaaagaaggggggctgtttaaaaacgttgtatgtgctttcacacccaaaaatgagaattggggggaacctcttcgtaaatagttccatgggcacacttgggacgaaaagattaattttaacgttcccgctacgagactggcactaaggatttttaaaaattgaggataaaattctttttaccttatgactagaaatgtgttaccaatccctcccccactaagatgcttttttgtaaaaa

SEQ ID NO: 75678 - DNA, 131 bp, Glycine max
  Clone ID: PAT_MRT3847_39351C.1
aattcccgggccgacgcacgcgtccgtccactcgtccgaacacctctgaaaagactttttatagccgatcctctgaattatcataagaggtttttttctatcgccttagagcatccaaacgacccacaact

SEQ ID NO: 75679 - DNA, 2055 bp, Glycine max
  Clone ID: PAT_MRT3847_39352C.1
ataagacgacagcagtgagactgtcaccagcgcattataccacacgcagcgcattatagcacaccacacaaaaaagcaaaacagagagaacaactgttactcacacacgccatgggtaaatgaatggtttttcgagcaacagcggtttaaagagaaaagggattcagcgaagatgacatcggtcgaagaggcaccaacttggggtttgagagaatgcgagtgggcgtgaagcaactgcggatggtagattgggtgttggagatgaacgataggaaaagtacgagatgataattgaagttgaagcagaaatggaagtcacggttgttgatgggaatagaacggatacaggacatatcattgtgagtaccgttgggggtagaaatggtcagcacaagcagactataatctacatggcagagcgtgttgtagggcatggatcattttgagttgtattccaggctatatgcttggaaactggtgaaactgtggctatcaaaaaggttcttcaagacaggagacacaagaaccgggtggtgaaaacaatgcgccttcttgaccaaccaaatgtcgttactttgaagcactgtttctttccaactattgaaaaacatgaactataccttattgtggttctgtagtattttcctgaatcaaaaagttggatgataaaacaatacagtaatttgatacgttggatgacactgataattgttaatctctcaaacaaccaaaccattaaggcctaatcttttatgcttatatatattggagtctataattgcgagatcattagtgcgttactattttataatctacttggtttgcgagtctgccatcgggaatatcaagcttcaaattttattgttaaagccacacactcaccaggttaaattatgtgaatttgcaagtgcaaaggttatggtataatgcgaaccaaatatattataaatatgttctagatattatagagcacatgagcttatatttagcgcaaccgaatacactgttgcttttgacgtctgggcagttggaagggttttgggtagagatgcgaattggatagctcttacatacgtgctgagatgtagagcatgacccagttcttaatagaatcaacattctatacgattaaagcacacgcatggtataagggctttcatattagcaagccgcaacttggatgtccatttggtatcaggacaactacgagactcacctaatttgtgaggcacagctttagatgcctggacgcatcctatctatgacgaactttctgatccaccctaactcttgccaaatgaccttttcattccttaacgattcatttcctaatccaatgaactgaaaggtatcccaggcgtgattttggtgaaattggttccagagcatgcaaggaagcaatgcccgtttcttggcttgggacgtgtaacagaactgcaagtgttgtttccatatgagaatgcagcgctttcctcctatttaaaatgatatttgttggtatctttattgtattcggttgccctgtaaaatcagatttagagatacatgctactcattatcatcctaccccccgatgggtatgtagtagaataccctgtttcctgtatcacagcagattgtaacatacaatagaagacaaaatgtctgcaattatctgaatgttgcatcaatatttgtatttgttgagacagtgatgggttgttatttttattagttatgcttagcctgtaaaatcagatttagagatacatgctactcattatcatcctaccccccgatgggtatgtagtagaataccctgtttcctgtatcacagcagattgtaacatacaatagaagacaaaatgtctgcaattattctgaatgttgcatcaatatttgtatttgttgagacaaagataaaaaaaaaataaaataaattaaaaataaaaaaaaaattagaatttgtaaaacaaaaaaaaaaaaaaaaaaaaaaaaaaaaaaaaaaaaaaagaaaaaaaaaaaaaaaaaaaaaaaaaaaaaaaaaaaaaaaaaaaaaaaaaaaaaaaaaaaaaa

SEQ ID NO: 75680 - DNA, 458 bp, Glycine max
  Clone ID: PAT_MRT3847_39353C.1
acgagaacactctatccctcgttctttctctctctctctctctctctctctctagccagctttggttagacaacatagttctgaccaacatggtgcaatcaaggaaattcagaggtgtgaggcaacgccattggggctcttgggtttctgagattcgtcacccattattgaaaaggagggtgtggcttgggacattcgagacagctgaggaagcagcaagagcatatgatgaggcagccattttgatgagtggaagaaatgcaaaaacaaacttcccagttggtgaaaaccaaatagtgggaaatcacagttcaaacacttcctcttcctccactacaacattgtctgcagttctgagtgcgaagctgagaaagtgttgcaagtccccttcaccttccctcacttgcctgaggcttgacactgagaattcccacattggtgtgtggcagaagcgagcg

SEQ ID NO: 75681 - DNA, 310 bp, Glycine max
  Clone ID: PAT_MRT3847_39354C.1
ggatcgagtttcgctgtgtgacaaaaatgttgtaagaccaatcattgcgaaaccacatactgccgacgtgatcgagcagagctactacattattgacctgatactacgaaaactctaacggaatgcgtaactaccccgagactacacgcccatggcagcacctcaacttacagatccctcaaaaccacaattttattcgcgcacagctaccggatggccatcgctatgctgaattgagacctcttcctacagaacctcctcgggaccaccgagggcgtcaccctagtggaacgcctatgatctgctacat

SEQ ID NO: 75682 - DNA, 671 bp, Glycine max
  Clone ID: PAT_MRT3847_39355C.1
tcggggttctagtcgatgtgattgatgagactcgctcttcttcgccgttatcttcttcttttagtgattgtgagaatgttttgtctctcacctgaaaatgtcttggtgcgtggggagctgtgtctgcgcaagagtctgcaagtgctgaaacggatgcgtgggatgcgagatgtacccaaacttgagctacaccgaatcaaccaccaccgaaaccttggtcatgccagcgtcaacagtgaacgctcaattctagagtggtgaaatgtgggatcccgcatgagaacgatggctgcgaatgcgtagctaactgcacctgcaaccacctgcacttgcaagtagaggtgcatggagagctagagcttcaaggagaaatggaccttataaataatgataaaaactatagtgtattttcataacttgcaaaattatggacaatgaattatgttgcactctgatgtgttgtgtctaaacaaacacccttagaataccgtggtcatttcttgcccttgagcaaggtcaagtgtcttgcacttgcgatgggagcgccaaggccatgggagccttttttttatatatatatatatatataaatgctatggaattgcccgcttctgtataaagctcggctagttaatctgaaaaaaaaacaaagaaaaggcccctacgaccgc

SEQ ID NO: 75683 - DNA, 181 bp, Glycine max
  Clone ID: PAT_MRT3847_39356C.1
aaccatttatcttcttatatgtcttggactaacatgggttcctattgccggggtcatggttgctatgatgatcatgctgataatcccggttagacagtactttctacctaagtttctcatagggatacaccttcaacacttggatgcgacatcatgtgaagatcaaacagctctaccattc

SEQ ID NO: 75684 - DNA, 484 bp, Glycine max
  Clone ID: PAT_MRT3847_39357C.1
ggaacccaaaaaggggcttttttttatgggcaatctttttttttacctcatttgacccattaaaaaatggggtgtttgttattgcccaacaacccctgggggttcttttaaaaaacaaggggattttgctataatttcttagggctttaaatttcaaggaaaaaatttggaaagacttacaagttccaacaaaaattgggaacttaaaaaatcctggggttttccccctttaatacaaaaatggccattggtcctgaaacatccccggcaaagcgggtatccctagttggagttgaattgccagcaaacccatagcctttccctaatcccccataatggacaaaggcgtgctcacatttttgaaaaactcttgcaagggaaggtgtttttttttttgcccgttttgcccctgggaaaaaaagggtttaaagtaatcccgccaaagctggggccttaacaattttttttggtggaggtggccctc

SEQ ID NO: 75685 - DNA, 261 bp, Glycine max
  Clone ID: PAT_MRT3847_39358C.1
ccggatgaagaaaattggtacaaagagatgtatgtgaaggtgatggacacgaatgatacaatgcaagcacatgttttggggcacaaaatgactggtaactgttgttttcgtggctgtaccttgcctgttttttgttcctctgcttttgttctttggactatgtgtaaatacattgactttgattgctgcatcttctttgtgggttactctggatctctcttgctctatatgaatatctggcttaatggagaagttaattgt

SEQ ID NO: 75686 - DNA, 467 bp, Glycine max
  unsure (1)..(467): unsure at all n locations
  Clone ID: PAT_MRT3847_39359C.1
ggacgaaggaagatgaaaagagtaagttccatgtgttgctcaatgagcttcaagccactgatgagtactttctttgtcttcagactactattccacttcacgggttggattgataaactcaaaggattgcatgcacgacttgatctatttttcaaggatttcnataactcctaccaagaanccaccgctcatcacatcgctcccactagacaacaaatgcaacaacatcataccggctgatctcttgcttcaatccaaaaacgatcaccctctttcaatagatctcacttacgatcacatcaaaaaggcccccatggacatactggtaccagggacanatacaactgcatccacatcaaccagggctatgactgccctcataaaaaaccccacacgaacgaaaaaagctcaagaagatattagaaatgtgggaggcacaaaaaatttcttacatgaagatgatggtc

SEQ ID NO: 75687 - DNA, 553 bp, Glycine max
  Clone ID: PAT_MRT3847_3935C.1
tgtgtgttgaaccacaatctgcttgttaattcaaatgttgtccttgaattctattgaattgcattggaatctatctaatcgtgagctcaatcaaatgtcctttttttcattttgttcctcagcccttgaaaaagtgttacatacatattagttctcactcttgtttaccacaatctgcaaattgccaacttgtattttttctccttgaggaagcattttattcatcaaattttatgaagcagtagacgtttcaaatctttcataaattgaagtggcctccatttgattgttttaacttatagtgaaagttacaatgctgagatcattgtcagactttatctgtaattggttctttgtgtgtgtatctgcggtaatattgctcacttaatccagctataatcaacgttttccaatcttttgccactgagaagcatagctgatgcatagaaaacttttagtttcgacatgatttccctctggaaaccttcaagaaacattgatgtggccttcattggatgttccagtgctattcttcatgaatgtctcatctctg

SEQ ID NO: 75688 - DNA, 536 bp, Glycine max
  Clone ID: PAT_MRT3847_39360C.1
aattggaggtggaatgctgataagtccccttcttctacatgttggaatagctccagaggtcgcaattggaccatgttctttcatggttttcttctcatccaccatgtcagccttgcaatacctattattgggcatggatcacatagagactgccctcatcttggccctaatatgttttgttgcatcacttattgggttattagtggtgcagagagcaattcaaagctatggaagaccatccttaatagtattttcggttagcatagtgatgactttaagtattgttctaatgactagcttcggagtcattcgaacttggaaagactatacatcaggtagatacatgggattcaaactaccctgctgaaaaacaattttgctgaattattatctgatagtattctagtcctttatctcgctaaattcgcgtgtcaacatcagagtatagttatcaatggagtaaaatttttggaccttatggatttcatgcaaaacttgttactaaggggaaccttagaacaagattgcattctagt

SEQ ID NO: 75689 - DNA, 160 bp, Glycine max
  Clone ID: PAT_MRT3847_39361C.1
gatcgggcatttctcacacatggcactggaaatgcgacgatcagatcctttgtcagtgcttcaggttactggacaactggagcttggacacgctctcattgagctcgtcacgaatggagcatttcaagtacgcgaggagtccaagagtccaagactatga

SEQ ID NO: 75690 - DNA, 443 bp, Glycine max
  unsure (1)..(443): unsure at all n locations
  Clone ID: PAT_MRT3847_39362C.1
acgaggggtatgaagctcatgtaatttggttggttcatcctatgagatacttcatctagaaatataattgaaattggtgctgaaggcctaattgaatgtggtctaaatgcagttgacaatggtggaggtatcaagattgtttcctacaacaataataaatattgattanctatgcgtaacataatttaacaataactattcaattatatgtaaagtcactcacaacactaggagttggagcactttaagtggtagttggagttggagcaacaacactttcagcattaggagttggagtaattttcaaattagttaaaggttgttcaacttgtggagcagattaagagcagttaatctcatcctacaaacatgtaacatataacataaataagttgtaagtaacaataaaaaaaattaatcaaatttttagaaatatgttactg

SEQ ID NO: 75691 - DNA, 211 bp, Glycine max
  Clone ID: PAT_MRT3847_39363C.1
caaaaaacatggcttagaacttagaagtggaagagagtccaatacaggcaatcagatctcgccacttccagcctctcatacgtcgaaagtatatgcaccatgtgcatttttttcttaattttttttggtatcgtttctttccaccagacacgatctctctttctctgaagaagcaaagagtcgatctaaccgtgtcgtcgttccacacaac

SEQ ID NO: 75692 - DNA, 145 bp, Glycine max
  Clone ID: PAT_MRT3847_39364C.1
cccacgcgtccgcacacgcgtgaggacacttttaaggtctcccaaagatgacgctaaaacggaattgaagcatgtatgtacctccataagttggagatcaacctaaaccgtatttcaactctgcggattgctggataaagccatg

SEQ ID NO: 75693 - DNA, 571 bp, Glycine max
  Clone ID: PAT_MRT3847_39365C.1
ggctcgaggtctttctattactatctcttctctctcacatcgctttcacttcctcaaaccccaacaccatcactctccctctctcccctctcctcaccaaacctcattcctcagactcagatccattccactctgtcaaactcgccgcttcctcttccctaacccgggcccaccacctcaaacaccgcaacaacaactccccctccgtcgccacaaccccagcataccccaaatcctacggtggatactccatagatctcaacctcggaaccccaccccaaacctcccctttcgttctggacacaggtagcagcctcgtatggttcccctgcacctcccactacctctgctcccattgcaacttccccaatatcgaccccaccaaaatccccaccttcattccgaaaaactcctccaccgccaaactcctcggttgcagaaaccccaaatgcggctacctctttggccccgacgttgaatctcgctgcccccaatgcaaaaaccagaatcccaaaactgttccctcacgtgcccctcctacatcatccaatacggcctaggcgccaccgca

SEQ ID NO: 75694 - DNA, 984 bp, Glycine max
  unsure (1)..(984): unsure at all n locations
  Clone ID: PAT_MRT3847_39366C.1
ggccccccacgcttctcaaagttggagtagttcccgtcaggtaaaaacaatcgagccagccaccgccacatgactgagaataaccccaaaacccattacccttcttcgggtgggattcccagtcccagtgatgatggcccaaaaaagcttccagggaagcagaagatgcatttcaacccgccagagaaagagattccggacgcggccactctgagggatcaatggaggtatgccattaggcagtacagtaaatggtactctcacgcttggggcactgccattctcgctggcaccgccttcttcgccctcggctggttcatcaaaggagagaaccccataccctctttcaactctaacaaagacaaagacaaagacaaagacaatcacaattctcacccctgatgtcatgtgcccttcacttcttttcaggtaccattcactggaatcaagccacgcaagatctgcttttggttgacaatgccctggcaccttgcttgcaatggtctaataaggaattttgatgtttataaagtctcgtgacacagtggttattttgcttctcttgaactagtttctgtcgctgtttcgatatggatgtaaggcaaaagattatgtatattcgaatgctttcggcatggaatggatgtaaggataaagattgtacatattcaaatgcttcatcccaactgttatggggatatataaaaaacactcccttcgatttaaattattttttttcattatcgcccaatgttagttgtttgtttttgttggtgaaaggatttgaacccactacctcttctctctttaacctccaagtcaatcttataactccaattgaaattagtcttttgattttngttttccatctttcaattctaaggctttttggttgaattagtcctgatagtgtagaaacagcttctaggtttgtggagaaagacccaggtttcgattcctagataatacatccttttggaggag

SEQ ID NO: 75695 - DNA, 181 bp, Glycine max
  Clone ID: PAT_MRT3847_39367C.1
attacactgcgagaaatcgtgtacttttgtggaaggctagtgccaccgtatactgtgccacagaacagaatggtgccggctctcctagctactttgcattgtagcactcgtgatcgctctacatatattggtcggggatcttgttcattacttcacatcctttgaattgcgtcgctgtgtt

SEQ ID NO: 75696 - DNA, 457 bp, Glycine max
  Clone ID: PAT_MRT3847_39368C.1
aggaagcaacccaagatactgatatttatggaacatattctcagaattatgacaataataaagttctaaaattaagatactttcccttagcgcttctctaagaccaagaatgcatgagcagcaataggaaattttgaaggttcaacatatgaatattacaagacatttttctcttcctaagataaagctactatagcacgattgcttctcgggaaatgtaacctcttccacatgaagcaaaggaataagcagttcagtcttgcagccttgggttacttgttcttgaaaaattccaaacagggttcttggtctaagttcctgctccaaaacttcttatagtattctgcatatgtaaatcctctgtatattgcttcggatccaccttccgtgagtggttttgcagggcttatcaatgcctcgtcatttggacaaagaaatgaagccacagaaagccttg

SEQ ID NO: 75697 - DNA, 372 bp, Glycine max
  Clone ID: PAT_MRT3847_39369C.1
ggcagccaacatacgatattcaaattagttcagtggcgtgtatttacaacacatcattgcaataaaattgaagcagagcaactaaataaagaacattatctatttgagttaaaactggtgaaaagtcattgtaaaataaactaacatcaacaatttactatacaatgtagctgctagatgtaccagcttggtcagatgcaactgtgccctgcaaaaaatacataatccctgaacaagctaatgtacaaattagagatacaacatcaaattagcagcacacaatgcagttgtgaatgaatgtgatgtgtaatctaggtataaagcaggggggggggttggtttgggtggatttgggtcaaaaattaaactttt

SEQ ID NO: 75698 - DNA, 206 bp, Glycine max
  Clone ID: PAT_MRT3847_3936C.1
ggagcaaatccctaagccctactattcttcctcagtaatgtcaattaagcttctcgtctctgcagcaactattcctaaccctaaggtcttcttcgaaatgaccatctgcggtcaatctgctggccgcatcatgatggagctctacgcccatatcactcaccgcaacgccgagaatttccgcgcgcttttcaacggccagaacggcg

SEQ ID NO: 75699 - DNA, 306 bp, Glycine max
  Clone ID: PAT_MRT3847_39370C.1
agctcggaattcggctcgaggctggaacttggcacctttttattacaaggtccacacacccttggataatggaggcaagattgtcatccaattcataccaaaaaaaattgatgctctcttaaaaaaaaaagtacaaaaacatgagaaaaacaccttcacaaagaaaacgaataaaattcatctcatagcctacataaataaaattgcgggtcgtcctctgactatggcacaagttaccccaggaataaattccactccgaaccctatacatgaccctcctgctccttacaggataccattataaac

SEQ ID NO: 75700 - DNA, 201 bp, Glycine max
  Clone ID: PAT_MRT3847_39371C.1
acgcccacgcttccataacttcttctgtctcaacctcatcttcatcctactactactacccaccgtctggtcctttgctgatcgagtccacaaaacatggcagacaatgaggattgaaaggataagactactcgtcggaattaattgcatgttttatctcttacaacatcaacatattcaactgcttcttgttctgattaa

SEQ ID NO: 75701 - DNA, 171 bp, Glycine max
  Clone ID: PAT_MRT3847_39372C.1
ctttcgcaactagctattactcttagagttcctactcgatctcccttctgaatacctgaggactctgaatgtcgaatgtaatttgcaagatgtattattgtgatgctcttatcgacattgtgttgttagatcatgtcattctctgaagcggtaacgccgcattacgcgaat

SEQ ID NO: 75702 - DNA, 1140 bp, Glycine max
  Clone ID: PAT_MRT3847_39373C.1
gattcacaattcacaacaacacacaacatattattaagacgcaccccaaaccaaaccacttcacacagaacacatatccattggtgaaggagtatcatgggtgaacaattagggctactaaaagtcatggttgtgcaagggaaaaggttggtgatccgggatttcaagaccagtgatccttatgtagtactcaaactagggaatcagactgcaaagaccaaggtaattaatagctgcttgaatcctgtttggaatgaagagctgaatttcactctgacagaaccattgggagttctgaatttggaagtgtttgataaagatcttttgaaggctgatgacaagatgggaaatgctttcttgaaccttcaaccaatagtctctgcagccagattaagagacatcttaagagtgtcctctggtgagacaacattaaggaaggtcatacctgatggtgaaaactgtcttgtccgtgaaagcagtatcaactgtgtcaatggtgaggtggtgcagaatgtttggttaaggcttcgtggagttgagtctggggaactagaattgactatcaagttggccacacctgttgctcctgcaatatagtgcaacaattgcatgtgtcataagtgtagatgtctaactattgcatgagtcacttttgccttttattttcaaatttaaatttctttttttttagttccttttaattgatttttgactgtttgaattcattgtagtggttttttaatagatgatagactaaaaagaatatttttttaaaatcgaggactaaaataataataatttaaatttgaggcataaaaaacaaaagtaatctaatttgagaaaattaaaaacatatttaagtataaaaaaacattaatagatgcttattccaattaaatttagcagtgagttggtgatgtctcatccccagttaaaagggcattagaagccgcatcttcaaatcaacaagtagaaatttatggcttctttagactttatggtgttcttctcttgtgttaccttgtactacataccttcctcccccaaaatagtataaattaatattcattgtagctatgagcattcatttgggtattgcgtgagttttgatggtattgtattgatctgcagataagtcaa

SEQ ID NO: 75703 - DNA, 1536 bp, Glycine max
  Clone ID: PAT_MRT3847_39374C.1
tgttacggaggctttcccggtgctccgacaccaccattctctgggattttgccttcattccctggtgttggaggtgttggtttgcctggagtggcacctcatgttaatccaacctttgctttgagaaccatttcctctttctctgtgaaacctgttaccaccacaaccctcttaccatttacttcaacaaactcatctctccccagaactctcaaactcaacacctcttccccacatcctcacctttcactaccccacaagtctttcacttgtagaagccaggctgagccatcttctgattcagccaaagtccaagaactgagtgtgtatgagatcaatgagagagatcgtggaagccctgcttatcttagattgagccagaaaactgtcaattcccttggtgatctagtccccttcagcaacaagaaggagtataatgggtgaacaattggggctgctaaaagtcattgttgtgcaagggaaaaggttggtgatccgggatttcaagaccagtgatccttatgttgtgctcaagctagggaatcagactgcaaagaccaaggtaattaatagctgcttgaatcctgtttggaatgaggagctgaatttcactctgacagaacccttgggagttctgaatttggaagtgtttgataaagatcttctgaaggctgatgacaagatggggaatgctttcctgaaccttcaaccaatagtctctgcagccagattaagagacatcttaagagtgtcctctggtgagacgacattaaggaaggtcatacctgatggtgaaaactgtcttgtccgtgaaagcagtatcaactgtgtgaatggtgaggtggtgcagaatgtttggttaaggcttcgtggagttgagtctggggaactagaattgaccatcaagttggtcacacatgttgctcctgcaatatagtgcaacaattgcatgtgtcataagtgtagatctctaactaacattttatgtctagtcgagtcttgcttttgattaactcctgcatagatgtttctacccaaaaatgaaaaaagaaaaacttaaatacgttttttatctattaaattttgagtcacttttgccttttattttcaaatttaaatttctttctttttagtccctcaatttaaaaaaaaatctttttagtcccttttaattgatttttgactgtttgaattcattaattgtagtggttttttaatggatgatagactaaaaaagaatatttttttaaaatcgaggactaaaataataataatttaaatttgaggcataaaaaacaaaagtaatctaatttgagaaaattaaaaacatatttaagtataaaaaaacattaatagatgcttattccaattaaatttagcagtgagttggtgatgtctcatacccagttaaaagggcattagaagccgcatcttcaaatcaacaagtagaaatttatggcttctttagactttatggtgttcttctcttgtgttaccttgtactacataccttcctcccccaaaatagtataaatt

SEQ ID NO: 75704 - DNA, 1145 bp, Glycine max
  Clone ID: PAT_MRT3847_39375C.1
gagccccagactaaagaatttacattaatagtccactcggatcaaagtagttcagagtagagaaactttcccagtgtagtcccaaaaatctgtgcagcctcacagcaagatacacaccacataaggtaaaaagggccaacctcatgtcacagttagtattattattagaggtgacagatacaagcagcgacgcgacacgcaatcttagtaatgccattagccaaggttcctgaaacagagtgaaaagaaaaattagtaaatcaaaacagtgtcaatcgttacgaggggctacgcggccttggcgtgctgggggctgaggtccgctccttggctcagggcggggaccagaaactatcaactcttgaaaggaaaagtctccccccactccaaagatacaaatgaaccttatcttcagatgaggactcccaaaaacttctcaaacgaataaagctaaaatatcaagtaattttaccagctgaaagccacggttcactcagttctctcaaatgagagaagacaaaatttttatagcataatcgcctagaataataagaagaaaaaaagaaaagaaaagagtagaatgaaccttaactcagcgatattaacaccagaatctgaataaaaatttcactaatacttagtgccatagaaaccatttggtccagggaatgaaataggtcgagtgacaggaaagccaggttgcagaaggggaatgtggctttgaagtgcaaagggctgatgtccacttgttaggacaggagggggaacagaaactggcattgctggaccaattgttcctccctgctgctttggaaattgtacatgattcaacagagggcgagctgagactggtgggacagttgttgttccatgaatcaaatcatgggaaactggctgaacatagactaactggggggaacgtccaaccataacctgtgttcagaaaaaaaagatcatatcttgcttatggctgatttttcagttaactgaataccgattatctcctaaaccatatttttgtacgtacagcaggagagcttggttgcatataagcatgttcagacaaaactggactgtaatgtgtagcataccgtagaggttgggttctatgtgccacatgtccaacaataggctgtgaaaattgc

SEQ ID NO: 75705 - DNA, 297 bp, Glycine max
  Clone ID: PAT_MRT3847_39376C.1
ggtgtagtcaatttcattgtaaactacataagtgtagtcccatagctctcaccattttaaattgtgatgcattaatctgaaaggcattaacatatgccaccaaactcaatcataccacctgttttggtcatcgtttgtctggagaatggccaatttgtatgtggtctccatatgacactatgccctgttcttaattgtgtatgattttcttttgatatttattcaaattttaagattgcaagttaaaaaaaaaaaaaaaaaaaaaaaaaacaaactatataaaaaaaaaaaaacaaa

SEQ ID NO: 75706 - DNA, 173 bp, Glycine max
  unsure (1)..(173): unsure at all n locations
  Clone ID: PAT_MRT3847_39377C.1
cacaaacgcacacagaanacaaaaacatcgttttgagagaggcaaggccaaacaaagggggaggacgatcaagcgggagggggggcaaagaggccaaatcggccagatgacgagcagagcagaaaggaaggggcgataacctgaaagggacgaaacaccgaacagaggaccga

SEQ ID NO: 75707 - DNA, 363 bp, Glycine max
  Clone ID: PAT_MRT3847_39378C.1
gccaggtcttgctgcaaatgtgaaatttggtggatgtggttcttacccaaatctgccttgggtatccacctcaggttcaggtccaaatggaatgacaatttctggtgttacttataaatacagcactgaccaagtcagaattgtctgtgcatgccatggttctcacatgacccctgaagagtttgttcgtcatgcatacgaagaccaagcctttgcagagggcaatgcaagattggggacagtaacaaacggcaatcctgctgcctgttcccacagctaatcttgtaccgatggaccgtaatatgtaaggtcttaacaagagaatcacgggaattgagctttaatttttgtatagatgaatga

SEQ ID NO: 75708 - DNA, 1366 bp, Glycine max
  unsure (1)..(1366): unsure at all n locations
  Clone ID: PAT_MRT3847_39379C.1
gttctagaatcgcgtggaaattaaaagaaacttctgcatcgaccacctcgtcacttcttcttcctcttccatttccatttctcggtgttccattttcatttctcggtgttgttgttcttcatccatggcttttcctcagcaccacttccaacagcactaccaaacccaacagcaacaacagccacaaaacaaatccttcagaaatctgcaaacaatcgatggtcagatgtcacagcaggtggcgttttacaaccctactgatttgcaagatcaatcccaacatccaccctacattcctccatttcatgttgttgggtttgctccgggtcctgttcctcctgctgatggcagtgatggtggagttgatttgcaattgcaatggaattatggtttggagccagagaggaagagactaaaagaacaggattttttggagaacaattctcagatatcttctgttgatttccttcaaccacgatcagtgtcgactgggttgggcttgtcactagacaatactcgcctgacatccactggagactcagctttgttgtcactcatcggtgatgacatcgagcgtgagttgcagcagcaggacgcagagatagatagatttctcaaagtgcagggtggacgtttgcggcaagcagtcttggagaaggttcaggcaacacagcttcagagtgtctcactaattgaagacaaaattccttcagaaacttcgcgagaaagaagctatggtagaaaagcatcaacaagaggaacattgaactcgaagatcaaatggagcagttgactgtggaagctggttcgtggcaacagcgagcaagatataatgaaaatatgattgctgctctcaagttcaaccttcagcaagcgtatgtccaaagcagagatagtaaagaaggatgtggtgacagtgaggtcgacgatacagcttcttgctgcaatggccgttccctcgattttcatctgctttcaagggagaacaccgacatgaaagagatgatgacatgcaaggcttgcagagtcaatgaagtgaccatggttttgttaccttgtaagcatctttgcctctgtaaagattgtgaaagtaagcttagtttctgtcctctatgtcaatcctccaaatttatcggcatggaggtctacatgtaactgcaaagtatacttctacttgtgaaatctctaatttcatgtttttattatgtgtcctttcatgtagcttgtgtctcaaggaccatgacaccttgtaactagtttttaagatgtatttgaccataatgaatttcacttgcttgagaacagtgaattttgaaagcatgtctaataaaaaccatcaatgcatcgaagcacnnngttnnaacgc

SEQ ID NO: 75709 - DNA, 282 bp, Glycine max
  Clone ID: PAT_MRT3847_3937C.1
attagattaataactactttttttctcacattcactatccaaatcaaaaggctctttcttcctttcggtcagcactcttctttcccttctctctatcattcttcttcatttcaattcctaccccattcatttcaatcaccccatacaccatcaccaccctctcttttccactcataactacatatacactataaccaaattcattctcttatctaaaatccataattcatctaaactccctactaaccaaacaatttcttttatcataaactctttcctctc

SEQ ID NO: 75710 - DNA, 464 bp, Glycine max
  Clone ID: PAT_MRT3847_39380C.1
gtttggatttgctcagcctttggacccttttgggggtttcaggaagggttttggaaatggttcagtggggtgatggacaatgctctctacccagttctcttcctggattacatgaagcaatccttccctatctttgatcgtttggctgctcgaatccctgctcttctggggatcaccctttcactcacttacttgaattaccgtggccttcacatcgtcggcttttctgctgttttcctcgcccttttctcactttccccgttcctcataatggcccttctttccattccccaaataagacccagccgctggcttcttgtggattttgccaaggtggattggccaggatacttcaacaccatgttctggaatttaaattattgggataaggccagtacccttgcgggagaggttgaggatccgagttaaaccttccctcgggcaacttgtggaggactagtttt

SEQ ID NO: 75711 - DNA, 219 bp, Glycine max
  Clone ID: PAT_MRT3847_39381C.1
cgtggtcaagtcgtcttacaatcatgggtttgggcaaagttgctgtcaagatacgcggcgccgagtgcgcgagtgaagccatcatacttggagtgattacttcgataggtggtttcctgtttggttatgacacgggtcaaatttctggaatgcccactttggaggattcaattcacggattcggaaaggaccagggcaatggcgagaaggctttcagcc

SEQ ID NO: 75712 - DNA, 313 bp, Glycine max
  Clone ID: PAT_MRT3847_39382C.1
acgaggttgttgacatactagttggctgaaaaaccataggcttaaagttgtgtgtaaaagtggatgtcagtcagctcttcgagtgtatttccttctaacggaacactagtttagtggaacggattagtaactgtttcctttatttggctatactctgtgctactagaatttattttctattctcagtttagctgcctgtttaatttatagttttataggtgttaatatgattttttttattatttgttagttttttatatcagatatccaatacttttggctatgtggctttattccaaaagcacagttcttg

SEQ ID NO: 75713 - DNA, 628 bp, Glycine max
  Clone ID: PAT_MRT3847_39383C.1
acaataaaaaacaaactattgaaataaagaatattttataaattcaataagttaactaattgacttttgcaattttgaagactaaatgagtttattttaaaggaaagaaattaagattgcatttagtacttatttgatatacatttataaatagaaataaacaaataaaaatgacgttgaccaagtaagaaagagagagaggaagatttgggacattaactttattgatttatatatgtttttataatattaatgattttttttagattgtacctgattaagaaaattaagggtaaaatatgaatgatgtaatctaaaatttaaaaattattaattttattctcataagtttttttattaatttagtttatgtaaaaaataaaacaattttgttgattttcggtgataaaacatttggtgtaaaaaataaacaagaaagagaaagatgagtgaaaaataagctaagaaagagaaagtattaacttttagtctttataagtttttctcatctttccttgggggtattttgaatgcactttaaagaataattaacagggggactttttaatgaaaattatataaagcatcaaattaaaatatttttttggttttacatatatttaaatta

SEQ ID NO: 75714 - DNA, 621 bp, Glycine max
  Clone ID: PAT_MRT3847_39384C.1
gcacgttcatctatggcaggagcaaaagggttcgttgaagcagataatgcagaggccataattaccagaattgaacacaaatcgcgaaagatcgaaactttgctcaaacatgtataagcccgtggaagcccttaaaactgcccttgaaggcacatttgccatcattggggatgagcgttgcaagtcggcacactggcttgtggtgcacagagctataatggctataaaagatgtggatgggatgctttcttccttggatcctgagtactatgatatcctaatgaagtacttgtatagaggcttagctaccggagatcgcccgacctgtgaccaatgtcttctgattcatgaaaaattgacagagaaagcaggactaggttgcatcctacgtttcctcacagatattgtaaatacgagtttgatttctggacattcctttttatttggaattctttgttcttttcccttttggtgttttgatttttctcgtgtttgcaagactgcagcaatcaaggcagtgaaatatcagggaaaatatatcaattttggattcattgcgccggttttgttattttgaaattgtttacagttcaaaataacatttttttttaacttttcaag

SEQ ID NO: 75715 - DNA, 131 bp, Glycine max
  Clone ID: PAT_MRT3847_39385C.1
cccacgcgtccgagcacgtgcaagcaaggcacgcggcgaccttgcgagcaatgcgtgctatgcccctccgagcaaggcaggctatgccgctccaaatacaggcagcatattcttgtgccgaacgacccagg

SEQ ID NO: 75716 - DNA, 445 bp, Glycine max
  unsure (1)..(445): unsure at all n locations
  Clone ID: PAT_MRT3847_39386C.1
tttccgtcatcactgtatgacgtcctccttctttgggggggggggggggaacattttaaagcgtaggctgtgcggctagggaaagccgagatagatgatcccaaggtgaaaacaacagtgaatggaaacggatgttttggggggggccagttatatagaaaggcatttcctaaggtaggagggagcacatgaagaggtactaacctatccctacaacacgccttgacatgagtggtcaaaatggcttggataggccagtacgtgggatgagcaacggtgggggggtgttaggggtggtaccccgagggcgcctataatgtacttaggatgtgggagccctagtaatagggcaacccccgggtagtatggggaatantgcctacgggtgaagggcttagtggtacgagtacgacgtggcctactagtagtaagagtatcccaacga

SEQ ID NO: 75717 - DNA, 259 bp, Glycine max
  Clone ID: PAT_MRT3847_39387C.1
atgttttcattatccactgctactccccagcatgggactggtattattcgcctggcgaccgggttttaatactattggagtcttttacatgccccgcgtacatcgatgtcaacagcctcatgcgcaaataccattcgaccctaaccataaccgaagactctgtattgaccttcactctcacatcatcatagggaattcctatatcttactccgtaaacaataatactacggtgtacaccgtttccaatcctaataaaat

SEQ ID NO: 75718 - DNA, 246 bp, Glycine max
  Clone ID: PAT_MRT3847_39388C.1
gggatgggagacacagttggactcatcgaatctaaaatctagagtaggcatcagaagttttctgtcaactcatgctagttttgtcaggcgacaaacacatcacataatgcggtatgtaccgacctctgtcaacgtgcatagcccttataggcaacccgtcatttttcaagggtgcaaaagtggttataatctaactcatcaccctagtgaagacatgaggtaatggcacaatcaacacaacacaaa

SEQ ID NO: 75719 - DNA, 361 bp, Glycine max
  Clone ID: PAT_MRT3847_39389C.1
ccctccaaaattactaggcctttatcatgggggagttctatgaaaaccccttaaataacttaggctttccctgattaaaggcgccccaccctatgctcatttaggaatactggaggtaaattattaaaatttcccggggttaaactagtttacagttttaataaaagggttgggtaaactcccttggcggataaagcatggtttaaccctgaaacattaactttatttgattatgaccctatgggcggggggagggcccttttcaacaaagaacaacagattcttcatttaactacgggtaaaattcgatatcacgggcccatcccaaatttacaaggtgaaaattgggcggaatttgggg

SEQ ID NO: 75720 - DNA, 426 bp, Glycine max
  Clone ID: PAT_MRT3847_3938C.1
cccacgcgtccggccttgaaaaaaaaaaaaaaaaaaaaaaaaaaaaaaaaaaaaaaaaaaaaaaaaaaaaaaaaaaaaaaaaaaaaaaaaaaaaaaaaaaaaaaaaaaaaaagggtggccgataaaaaaaaagcgaaaataaaaaaagattacttgcaaaaaaaataactctattttaaagtgacaaaaaatttaattaaatgcccgtgaattaacaaacagctgattgaaaaaaccctaactttaccaaaataaaaggcgttgaaacaaatacccttttaaaaaaatggggcaaaacgaaaaaggcctgaaacaatcaccttaaccaacaattgaaaagcctaaatgacaaaaggaaccccccctgtaggggtgcattaaccgggacggtaaaaaaagatacttccaatgggaccgctacatttg

SEQ ID NO: 75721 - DNA, 714 bp, Glycine max
  Clone ID: PAT_MRT3847_39390C.1
aaggggtaaaactacaataagtcattaaatcagatagtagccagaagatattacaagtaaaagctaaaacagaaaaccgtaccataaaggtccacgaggaggagcaatgtctaaagctataaatcccctaatgcattgtgctgtggctccttttcccactttaagaatatactggttcatgtaacaagcattcattaaaaaaaaattgtgctaaataagtaaggattaacactaggaagttaagataggacagtagaaaagacttgaatatggagggtgtgatttttggaggctagggaaagataaattaaatacaacatgccttgttagcaagttaccagtatctcttgataaaaactaattgagacactacggcgaaccaggaaataaaatttcaattagatgccacatgctacaccttggaagtgattattcctgctctggggaaagctcaaacacttttccccctatggtgaatgaaacattaggcatttcagataaagtactgcattcaacaactgattctccatttggactgggaagcatatcacagagcgcattggcatagtctaagatttgatcttctgtctcatttaatcgtagaggattttttatccataccacagccatctcacaagctgtgcatccggcaccattccaactataagaaggtctctctatgggtttatcaaccacactctggatgcccatact

SEQ ID NO: 75722 - DNA, 318 bp, Glycine max
  Clone ID: PAT_MRT3847_39391C.1
catcaatcatgctcgcatccattgactaggtatgtatgtcataaaggcgcattgcgagcgatcaagctgcacacacaaagacaagagaatgggaaagaaacaggttgcgtcaaccctgcgcaacccacatattctgccaaaatcatgtcgcgaaaaggttttgggcaatgcaccatgaacaccgattaccacgagtcgtgaatattgtcaaagtcatgactacgttccagtctcagtctctacaccaggctggattccgtcaagaccaccagtaaccttgtttttaagtttggcgttcccaattgaagcctgattctt

SEQ ID NO: 75723 - DNA, 515 bp, Glycine max
  Clone ID: PAT_MRT3847_39393C.1
ggaaagttccttttaaccttctctattttttcacttattttgcttttcttttttgtttgctttctattacctttaaagcatcccttattttttcagtgtgtacctcttttctctcctatgaaattcttatatccttttgcatctgtacttggtgaaagtcatccctctgaattctgatactatttcatattaccaaatacgtactttattgaatgctttaagtttaagctgataaataagggttataatgtttcttaaaattgaattaacccattattagtgattagagtttgttaatccaatgtgacttcacaagagagaccctcaatgtcgctactcaaaacaacaacccttcttcccatatcttctcacaccaccaccttcccattccttctacccaggcacagcttcaccaagacactagatccacaagctcttcccaatgagactcttctatttaggccctccacctgtgacatactggttttgaatctttgataatattttctacctta

SEQ ID NO: 75724 - DNA, 589 bp, Glycine max
  unsure (1)..(589): unsure at all n locations
  Clone ID: PAT_MRT3847_39394C.1
ggctcgagaaatacttccagctctgttgtatctacttctaactcacaacctgtggctgtgcctccagtggtcccaacattgccagctgtggagagtttgccggtagtggtacagcaagttaaagagataaccccacccgccaaacgtggtcgtggaagacctaaaagaataacttcagataagtcaccagctgtggtgatctctccagtaacttctggaactgttgaagtagacacgcagttacagaaaggaattgggtctggacatttagcatcatcaactcctgattctgttgctcattctgctgaagttgtaggtgtgaatgcacccgtgcaacagtctgatccgggagtttctcctaactcacagcctgtcattcctatgccttctattccaccaaattctcaggtagctgctgttcctgtttctgtacctattcaagcaagaggacaagggaggaaaagtcatggtggtgaaggaattagacgtagagggaagaagcaggtcatgacttcatctccaatcccctgctggttctgtgttcctgatctaaggttaatgagaaatggnaagatacattgtcagtcct

SEQ ID NO: 75725 - DNA, 692 bp, Glycine max
  unsure (1)..(692): unsure at all n locations
  Clone ID: PAT_MRT3847_39395C.1
naaccatagtatnnactctgaaactcgagccgaatactcttcagcttcgttttaagaaaaagaacattttggaggaaaagcgcatacgacgtttgcgagcgaaattgcgatttatttattaccaaagagaagaaaaaaagagaaaagaagaggcgaatggcagatcagagcgagcattcgaaaacggcgtcgcctccggaggaccaggaccgtcccgttcgagtgtacgcggatggcatctacgatctcttccactttggccacgctcgctccctcgagcaagccaagaaatcgtattcatcaatcatttcccaatcctttgctttgcctccgagatctgataatagatttcatttatatcaatccatttattaatagaaggcatttcttcaaggttccattcacatacactcttactttggtattttaggtttccgaatacatacttgcttgttgggtgttgcaacgatgaagtcacccacaaatacaaaggcaaaactgttatgacagaggccgaacgatacgaatccctgcgccactgcaaatgggtggatgaaagtattcctgatgccccttgggttatcaatcaagagtttcttgancagcactacattgactatgtggctcatgactctcttccttatgctgatgccagtggtgctgccaatgatngttatgaatttgttaaatct

SEQ ID NO: 75726 - DNA, 826 bp, Glycine max
  Clone ID: PAT_MRT3847_39396C.1
aacatagtatactctgaaacaatcatgtagtactcttcgtcttcgttttaagaaaaagaacattttggtgaaggaaaagcgcatacggcgtttgcgaaattgcgatttcatgtcatagagaggaaaagaggagaggcggggcggagcagagacgaatggcagatcagagcgagcattcgaaaacggcgttgcctccggaggaccaggaccgtcccgttcgggtatacgcggatggcatctacgatctcttccactttggccacgcccgctcccttgagcaagccaagaaatcgtttccgaatacatacttgcttgttgggtgttgcaacgatcaagtcacccacaaatacaaaggcaaaactgttatgacagaggccgaacgatacgaatccctgcgccactgcaaatgggtggatgaagttattcctgatgccccctgggttatcaatcaagagtttcttgacaagcacaacattgactatgtggctcatgactctcttccttatgctgatgccagtggtgctgccaatgatgtttatgaatttgttaaatctgttgggaggtttaaggaaacaaaacggactgaaggaatatccacgtcagatgttataatgaggattgtcaaagattataaccaatatgtgctgcggaacttggatcgtgggtactcaagaaacgagcttggcgtgagctatgtgaaggaaaagcgactgagggtgaatagaaggttgaaaacgaggtgatcaagaaaatgatttggcatagatctctttgatgtattctactttaaaatttaacatgatacctctttcagcaaattgtttgt

SEQ ID NO: 75727 - DNA, 468 bp, Glycine max
  Clone ID: PAT_MRT3847_39397C.1
caggggcgcagggacaggtggttgggggcgtggtggtggcccctctggtggcttcgagtcacgtggttttggtggctgcttccttcgctaacgccatgttcgaaaggttacccttgcccttgaatcagcatgatgatgatgatcaagttctgcaagaggcaccacgtggcgtcatgggaactgaacaggtggcagatggaaggaactatcccttctccgcgtcgctgcagggtgaagtatttggatggggtggaactggaactacatcatcaacatcaactgcaccacccaaaactcatcctttctagtattgcaatgtactattatatatatacatcaatattattatatgtgcaacacatgcatgatttgaaattaaaaatatctagacaatgttttggccaccctgcaactgcaaatgtttttttttttattgttttcaatgttatattatcatatatgtcctaa

SEQ ID NO: 75728 - DNA, 503 bp, Glycine max
  Clone ID: PAT_MRT3847_39398C.1
tacgggcgagaagacgacagaaggggacacacaccatttaaccatttttcccgcacaaacaacacagacactgactctctcactacacgcgcgcgcgcgcgagagagaaagacctcagtgtctgagacgcacgcagcgtgcattttcccataagacggacagcatcacgccgttttcgcctccccgtcgtttccggatccgtcgtcgtcgttttcgtcttcttcaattagtttagttgagaatcaatcccaggacaccgagctggagcctccgcccgccgcctcctccaacggtcagatccgctaccggtcgccgtcctccgctgagctcttcgacggccaggccagcagcaactctccgccgtcgcacgccgccgaccagcactcgccggagttcgagtccagcaaaatgctgaagcgccccggccgccaggagtccctcgccgacaagatctaccggttccgggggacgctgctcgtcgtggcgatcccgcttctcctcat

SEQ ID NO: 75729 - DNA, 741 bp, Glycine max
  Clone ID: PAT_MRT3847_39399C.1
agtgagcacagttcagttgcacacaccttctctgtgcttcttcttcttcgatgttcaattacaataacaccaactcgtttgatgaaacaccccactccaattgcgccctttcacagtcacaacacccatgcattgtccactgtcacatagccgcgatcacaggatacgacaccgtttcggtctagggtttaccctccaccactatggccatcagaggcgtcaatttcaaatggttcgatggcctaattcggctcgagattttgacttgtagagctattgtggcaattaattggaagcggtaccaatcttgtactcaccctttgcacatatggactgtggttgactatgctgctgttttcactttccggcttttgatgtttgttgataacgggcttgcttcgggaatgggcttagattttgggtggccgcagagatatgctcgtttctgtggaagagtagttgtactttcaattcttgcattgcttctctatccatttctttgggcttggacaatagttggtaccctgtggttcagcaacactaaaatctgcttgcctggagggggtcagaaatggggcttccttatctggttactttttagctactgtggactcctttgtattgcttgcttggcaatggggaagtggttgaaacgaatacaagcacgtatgttaagcgctcaaaaaggtatcccggtatccgcatttggggttctaattgaaatgatccgagtacctgatt

SEQ ID NO: 75730 - DNA, 612 bp, Glycine max
  Clone ID: PAT_MRT3847_3939C.1
ctcccgcatgacggatttagcgtgggactgacagcctgactggaatccgaacttaagacagacctgaactctctacatgccgttctgccgagagtcatgagtggacataagcaagtgcgtcaggaactgcaaagagagaatgaggacctaactgtgcacccttcattaccggctaaagagcgccctctggatgccgcccttggtgcactgggtaggcctctgttttcctttctcatgagctagataatgacacaaggagtgcctctctcccagcttgcatatgccgttgcagatgccactgtgctggcaacggacatgccaaacacaataccaccagatcttcagccacagccagatatatcaacaattcaactatttggttgggatgatatcatctgggcccaagttggagcacgatatgtaagtcgttagctacaaaatagcacacaatatgaagcactttctcaagcacgttgcgagtcttctcacgccttaactataagatcatgggtccgatgtgggtgcaaatgcacatgcaacagctctttgaccactgactcggtgactgacgtgaatcctgaacaggccgctgaacaagacgacatggaacag

SEQ ID NO: 75731 - DNA, 469 bp, Glycine max
  Clone ID: PAT_MRT3847_393C.1
gggaaagaacgcacgggggcaggaaccgaaccggaaaaaaaccccgggacgacgattttcacaacacggcggccgcccacaaataaggggggaatgaaaaggaaagaggggaaaccaacaaacaacaagaggggaaaaaacagggacaagaagaaaaaaaaaaaaacgagaggaaggaaacacaaaaagggagggagcggaaaacccaagaggaggtaaaaaaaaacaccacgggccagacgaacaaagacacgacaacaagaaagagaaaacaaaacgaaagggacaccccgaagaacaagcgcaaaggccaaacaaacccaagcgaaccattaagaaagacaagcaaagcaaatcgaaagaaagccccaaaccccacgacaacagagcacacaaaaacaaaaacagccaaaaaaggaaaccaagggaagccaaaaacaccaagcccaaaaggaggaagaacgaaccc

SEQ ID NO: 75732 - DNA, 303 bp, Glycine max
  Clone ID: PAT_MRT3847_39400C.1
gagaattgcactcatcgatttaaccactctttttttgtttatctcccttacaacactttgacttttgccattttgaggggttgtggggcaaaataatttccttattatcaacttttacaatgaatcattccctcattctatatacatcattacatatcatgtcaagctcttcatacaagccccactagaacacttttttctcctggctcaagaacatcttccttcattgttcattctatgtttttttgattgctttactgtttcttgactccacattaacgatcttttctaataatgaaacat

SEQ ID NO: 75733 - DNA, 881 bp, Glycine max
  Clone ID: PAT_MRT3847_39401C.1
ccacgcgtccgtacggctgcggaagacgacagaagggggatgaacaatcaaccaagaaaacagtgagcacagttcagttgcacaccttctctgtgcttcttcttcgatgttcaattacaataacaccaactcgcttcatgaaacaccccactccaatttcgccctgtcacaatcgcatcactcatgcattggccactgtcacataaccgcgatcgctggatacgacaccctttcgtcctagggtttcccctccaccactatggccatcagaggcgtcaatttcaaatggttcgatggctttttcttgtccatgctcgccaccagcatagctattgtggcaattaattggaagcggtatcaatcttgtactcaccctttgcacatatggactgtggttgactacgctgctgttttcactttccggcttttgatgtttgttgataacgggcttgcttcgggaatgggtttagattttgggtggccgcagagatatgctcgcttctgtggaagagtagttgtactttcaattcttgcattgcttctctatccatttctttgggcttggacaataattggtaccctgtggttcagcaacactaaaatctgcttgcctggagggggccagaaatggggcttccttatctggttactttttagctactgtggactcctctgtattgcttgcttggcaatgcggaagtggttaaaacgaagacaagcacgcatgttaggtgctcaagagggtatccctgtatccgcatttggggttctagttgaaatgatccgagtacctgattgggcatttgaagctgcaggtcaagaaacaaggagtatggcccaagatgctgcatatcatcctggactttacctaactccagccc

SEQ ID NO: 75734 - DNA, 387 bp, Glycine max
  unsure (1)..(387): unsure at all n locations
  Clone ID: PAT_MRT3847_39402C.1
aagaataaaattgcatttaagcctatttatttatatttatatcnnnntttatatttattaacattaattaatattatatgcaaaaatgttctttttcatctgtcatgactttgtcaaaagcttacatcgagttttatgaaatcctcttatacatacacttaatttacaatatcnnnnattaatatgtcacatgtactcttagagcatcttcaatgattttcatttaaacaattcaatttaagtcacctcaactttaagctaatccaattagttttccgtttgagtttttatttaccaattatttaactcaccaaatatatcatttctctcttatatttaatacaaaatttatatgtgtccattttttactgtaaaaaatgaatatta

SEQ ID NO: 75735 - DNA, 245 bp, Glycine max
  unsure (1)..(245): unsure at all n locations
  Clone ID: PAT_MRT3847_39403C.1
ccttgattagattaacttttncatgggcatttaaaaaaaaaaaaaaaaaaaaaaaaaaagggggaaaaataaaaaaaaaaaaaaaaaaaaaaaagggcggccgatataaaaaaacacaagcttacatacacttgcatacaaaaaaaataaaatgttctttcgttttacctaattccatttttctggccgctgttttacaacaaaaaactctgctaaaaccctccctaaacccaatttaattgcct

SEQ ID NO: 75736 - DNA, 226 bp, Glycine max
  Clone ID: PAT_MRT3847_39404C.1
gggggtaacaaaaaggcagtggggatctataataacaagccagaagaccgaaattcaaacgtgaaaggccgaacctacaaaacggtataaaacaacaacactgctcattgcaataagcagaaaagtatgggttcaatatacaaaaggagaaggccagccctgaacctaacaataagtgaccttaggaatgctatgctaccaattattaagcaccagaaaaatcaaa

SEQ ID NO: 75737 - DNA, 130 bp, Glycine max
  Clone ID: PAT_MRT3847_39405C.1
acaagcttgaaaatttcaaaacatccattccattatggacaccctcaaagatcatatactttccaaatttgaaatacggtcactgactttttcatgcgtgggtgaatggaacatgggacgataaaagaaa

SEQ ID NO: 75738 - DNA, 213 bp, Glycine max
  unsure (1)..(213): unsure at all n locations
  Clone ID: PAT_MRT3847_39406C.1
gatcactaacgtactaatnnnnnaatgttgctatgttggttcatcacttacctacctaggactgagggcgcatatatagagtcaaagaggtccacactttacctatgaaacataactccaaacgaaactcattgtcacatcaacgagccactaatgcagagcatatggtattgaccacacccttaaacgaacagggagaggggatcacaaatg

SEQ ID NO: 75739 - DNA, 1044 bp, Glycine max
  unsure (1)..(1044): unsure at all n locations
  Clone ID: PAT_MRT3847_39407C.1
tagtagaaaaaagtttcatagtnntattgcattttaaataaggggaagagaatgataacatgggctaatattaaaacattttacacaagatttgtaatcaaactaaagattatgcaaactgacgtaaataaataataaaaaatgcattcatctgttactagctagagtggaacaatgtggtgttgcctatggattttaggatcagctgctcaatcaaagagatcattcttatttggaagcattgaaatgctaatcaagctggtacctggtaattctgctggaacagttacagcctactatgtaagttcactggatctcagagatctcaaaaacactaaaatatgtccgtttgaacaaccaaatctatcaaactcccattactaaatgaagtgtccatgttcctcactcaaaatccatacagatcaaactcccaggaagcaagcatgacgagatagattttgagttcttaggcaacagtacaggacagccatacactgtccacactaacatatacacacaaggaaaaggaagcagagagcaacaattttacctctggtttgacccaactgctgattttcacaattacaccattcactggaatcccacagcaattgtgtgagtagataaattttaccagaacacaaagctattcatttttttctctaagtgtgtatgatccattaactaagtatgagtctatgacgagtacgtcaggtggtatgttgatagtgtgccaattcgggtttttcgaaaccacgaaaaagagggcattgcttacccaaccaagcaaggaatgagggtttacaccaccctatggaacgcagacgactgggcaaccagaggcggccttgttaagacggactggcacggcgcaccattcacggccagattccaccatttcagagcaagggcttgcaagtggggcggagcaaagagcatcaatcaatgtgcctccaatctcccagcaaattggtggacttcccggagatacaagcagctgagtcactcccagatcggacagctaaattgggtcagaaataatta

SEQ ID NO: 75740 - DNA, 157 bp, Glycine max
  Clone ID: PAT_MRT3847_39408C.1
cttgactgagtcaactggggcctgaggagatgatgaagggtgtctaaaggtgtgggatgccatagagcggacttgtagcaattcttttaatgctaatgaggatgacatttacaacatgactttcgtttctgatgcaatgaacctcgtggctacaagt

SEQ ID NO: 75741 - DNA, 560 bp, Glycine max
  Clone ID: PAT_MRT3847_39409C.1
agtagaaaaaagtttcatagtttattgcattttaaataagttgcaactgaattataacatgagcatcacaataatatatgttcatataccactttacacaagatttgtaatcaaactaaacattatgcaaactgacgttaaataaataataaaaaatgcattcatctattactagctagagtggaacaatgtggtgttgcctatggatttcaggatcagctgctcaatcaaagagatcattcttatttggaagcattgaaatgctaatcaagctggtacctggtaattctgccggaacagttacagcctactatgtaagttcaccggatctaagagatctcaaagacaccaaaacacgcacttttgaacaaccaaatctatcaaactcccattactaaatgaagtgtccatgtttttcactcaaaatccatacagttatcctctgcaggaagccaacatgacgagatagattttgagttcttaggcaacagtacaggacagccatacactgtccacactaacatatacacacaaggaaaaggaagccgagagcaacaatt

SEQ ID NO: 75742 - DNA, 275 bp, Glycine max
  Clone ID: PAT_MRT3847_3940C.1
ctgtaaccacatacacccccgtttttagtttttgagcaaccgtaaccttggtgttttctcattggaagggggcaaacacaccaatattcaatcatatacaaaagtaggccaactttcttacatttcaaggaccactgcacattaaagtttaatcaggttacattcttaaccaagacatcccactgagctttgctaccaaagctctcaaatctaacgaaattcatttagacacagatcttttactttcctactaccactacatttatttacatctt

SEQ ID NO: 75743 - DNA, 420 bp, Glycine max
  Clone ID: PAT_MRT3847_39410C.1
gtcacacggtaaaaatacgcgatgaaaaacaaaaacaaaaaaaagagcaacggtctgagaagtataagaggcggtgtgggagggtggtggcatgggccggggctataatacccccagtggcatagagtaacagggccaccaaaattaaagatagagagaccttacctgggtggaacgcttgccatgtaactagcgctagtattaatgctgcgtaaaaggcgcaggttactgcctatagattaaagcccgctacggcagcgtaaaccgttggctaacctgttgaggcaccggtaacggcagccaataaggtaactattgctaaatttaatgcattggaacctcctgtagtaagcccgggcgccgtaagagcggaatgtgggtatttgcgatccgaaacccgcgggggcagccgtaacccct

SEQ ID NO: 75744 - DNA, 276 bp, Glycine max
  Clone ID: PAT_MRT3847_39411C.1
ccaagcaaaccactccaatcactgggctttttattttacattctcacattttcaagccattacatagtccatatgatccattacataccacagggtatttttattatcaatacattttcaccactttttttattttggggggggggggtgggtttacaagaggatattggtttttttttttcaagcacacatttgattttttacaagataagggaaaacaaattaatattacccataaggtttgaatttccttgacagaaagttggacggtttttt

SEQ ID NO: 75745 - DNA, 1126 bp, Glycine max
  Clone ID: PAT_MRT3847_39412C.1
aatttcgattcagtaaaatttcagttcctaacgtacggctgcgagaagacgacacaagttcattacttggccagacagacagacaaaaaaatgttacgataacgtgttgcgcttgttgtgggtttggaattggattgattcaaacgagttaacgccatgctcagatcactgccgaagctctcactcctcttttcctcagccaggaatccccattatctgtcaagtgctcagcgtttcatatctcaagggagaatagcagcttcaagagtcaagattggagtggtaagcactgttcctattcgatccatgtcgacttcaacaatttcatcagcaattgcatcagaaatggctgcagaagatcaagttcaaagggttaacctactaacatcaactgatgataattatgatggtgttattgtggaacttgatcagcatatggattctgcaacatttgtctcgatccttagagcttcagtttctcattggaagctgctgggcaagaagggtgtttggataaaattacctattcatttagtcaatctggttgaagctttagtgaaggagggtttttggtatcatcatgcagaaccaaaatatttaatgcttgtatattggattcctgaaagtccaagcactattcctgcaaatgccacacacagggtgggcagttggttcatttgtcatgaatgaaaaactcgtggttgtccaccaccagctcccagaatatagtgcaacttcatagttcataatcaggcttatacttaattggaaggaatctcttattgtttgagggctatatctttgacaaatactgttatgcctgcctgtcctgtatattgataaaatgataacatcatggattaagatgaaaaagaacttttcaatcatttgagacagctgaagggaaaaagcaccttgcttctcatttattcataggaaaaaaagaagtgatgaatggactgtatctttattgtttattttagttcctctctttattttctcacccattgctcctgcttaatttgattcttgtcagtttctgtctggtaggtccattatcagaattttcattggaaaagagtaacatgtctctcaccaatagaaattcttcagaatatagttctat

SEQ ID NO: 75746 - DNA, 357 bp, Glycine max
  Clone ID: PAT_MRT3847_39413C.1
aaaaaaaaaaaaaaaaaaaaaaaaaaaataaaaaaaaaaaaaaaaaaaaaaaaaataagggatattaaaaaaaaaaaaaaaaaaaaaaaaaaaaaaaaaaaaaaaaaaaaaaaaaaaaaaaaaaaaaaaaaaatgggttccctttttaaagaatccatttttacttacccttcattgcaacctattactttttttttaggttaccttaatttaattttattggccgtttttttaaaactttatatttgtaaaaaccttgattttacccaatttaatcgcttttaaataaatcccctttttacaaatttgcgaaataccaaaaagcccctaacctaactcctttccaaaaattttacc

SEQ ID NO: 75747 - DNA, 274 bp, Glycine max
  Clone ID: PAT_MRT3847_39414C.1
cggaggccttacgcaccgcataacggaaattccctctaacacacagattacatagacggcgagtgttgcttcaatgtcaacactcgcactcgattggaaagatgagcctgtcactagagcacaatacgatcagggaaaaaccttcattggtgatgtagatgccactctttgacactcaccatgagataatcgtgcaagagggggacccttaaaagaccatcagagtgcttccaggctgtgactatgagctcatcctccgcactgtcatgaacag

SEQ ID NO: 75748 - DNA, 293 bp, Glycine max
  Clone ID: PAT_MRT3847_39415C.1
gaattcggctcgaggcaaagaagtgggcggtgagcaaattccgcaaatgcgagctgctttgtttgttgttaattgttcaatgttgatgggcaacaccgtcacacattctcctgagttacgaaatgaacactcgcaaacactcaattccttcaccgcgcaacttcccttccgccaacacctctcccgtcaatttccgccgcagctccccgaagactcacctttccgccaggaagctcgcagcgcgtttatggcacttgcgctttttcaatcttgaatcttctccgccacttttc

SEQ ID NO: 75749 - DNA, 1098 bp, Glycine max
  Clone ID: PAT_MRT3847_39416C.1
tgaaaacaccaagtgaatctacacttattagagacttgtcattgacgatcaaggaaaaggatagtttactggtaatgggaccaagtggaagtggcaagacttctttgttaagagctatggctggtctatggaaaactggaactggaaagatcacatactatgtaaaaggtggagaatatcctgagcaatccatttgttcagatgtgaatactccagtaaataatgctaatgacacatatgaagcacgtggaaaatgcttaagcagaaaatctggaatttttttgtgaagatcaaccctggtccgcaaaggtatatgttcttgattaaccaaaaaaattgttcataattgggtacccttcgtgaacaattaatgtatccaacttggacagatgacgtagttcctatgtcagacagtactaaagaaaaaaatgcacttcctttcttgacaaacttgccaaacttggataatgcaaatgataagcctatgaagccaacaacagacgagctgataaaggtcttagaggatgtccgccttgctcatttcttggctcgtttcagtttggattcaatacatgaatggtctagtgttctttctctgggagagcagcaacgccttgcatttgctcgtcttttgctttcaaagcctcaattggctttactggatgagtctacaagtgcacttgatgaagtcaatgaggtacatttgtaccaaaagattggagcagctaacataacatatgtcagcattggccatcggtcatccttatgtgcttaccacgacaagatcttaagcatatccacatttaattctgacagtgaacagctaaattggtgcattgaacccattgaacccactagacccgagtcctctttaaaatttacaaatctttgagctagcaatgctttgctgcttaccatctcatgagacacacatggttcaattgcattgaacaataattttgatatataagatgtcaatctgtacattttcccttgcaacttgctgctataatattttattagaatcaaaaaaaaaaaaaaagggcgacaaaaaaaaaaaaaaaaaaaaaaaaaaaaaaaaaaaaaaaaaaaaaaaaa

SEQ ID NO: 75750 - DNA, 965 bp, Glycine max
  Clone ID: PAT_MRT3847_39417C.1
cgtagatgggtcatggtgagtggttcttggcacaccattccccccaccaccttccccccaccccctttctcccgctcatcctcttctcctcttcgtccccacctccagcatacccttttggccggagatgagtaatagtaattgggtgttggattatgattatctagacaacattcctctcaccacccttgaaccacccaatttctcttggtcttcctcctctcctcctcctacactcagtgtggagctagatgactcatttggaatttcggatggtctcaaggaaaacaggtcaagaaaacgtttgaggtcatctgattctaaagcatgtagagagaaaatgcgaagggatcgacttaatgacaggtttatggaactggggtctatcttggaccctagaaagcctctcaaaatggacaaggctgttatattaagtgatgcagttcgagttgtttctcagttacgagaggaagctcaaaagctgagggagtccactgagaatctacaagagaaaatcaatgcattgaaggatgagaaaaatgagcttcgcgatgagaagcagcgactaaaagtagagaaagaaaaccttgagcagaaggttaaagctttgagttcacaacctagctttctggctgcagcaggacaagttgttggcagcaagctggtgccattcatgggctacccaggagttgccatgtggcagtttttatcacctgctgctgttgatacctcacaggaccatgttctcaggcccccagtagcataacttgccaaaggctctgtgttttggtccaatggagaaagagaatttatctttttattttttgcttttgtgaaatgtgaaaaaagaaatcttattgttgaggcagctttttgataactatttaacttccggttataggctaagtttgaataaacttctttataggttctaatataaaagttctatcatctaaattgtctat

SEQ ID NO: 75751 - DNA, 415 bp, Glycine max
  Clone ID: PAT_MRT3847_39418C.1
aattcggctcgagaaatccatgcttcatagccccacttgtgaattcccctggtgctacccttggttatgatgacagcaaggagctcttctccatgggaaggattgattctcagtggcttaatcgatccgcaaacaaaggaaacatccccaatgggaataatactcaaatcttagattttgatgaggctgatctatttgaaatagtcttggatggttcagaaaagtctcaaaacacagtgtcatagctcatagcaaaggaggcataattcaatgtggttgtcttgtctcagggaattaaccttatttctccttgctcaaataccctttgatctctcttggaccctttttctttctcctcaaaacatagtgcggtaactggagaggatctaggtccattcaaacatgggtatggtat

SEQ ID NO: 75752 - DNA, 229 bp, Glycine max
  unsure (1)..(229): unsure at all n locations
  Clone ID: PAT_MRT3847_39419C.1
gagcaagtttatagatgagaagataaaaaatttcccgagtcgtgatcagcagaagaaactgcgggagtattccgagaaattcacggaaattatagatcgtgcacaacaaaagccgacccctnccttacttctatgtaccgtttacaaccaaagtccgttncctcaccgacaaacgcaccaccgaagcaaattattaaaggcctgttcgtngtcaaagattacttatctg

SEQ ID NO: 75753 - DNA, 291 bp, Glycine max
  Clone ID: PAT_MRT3847_3941C.1
gacggcactcgttttcggtctcgttctggtttatagatctttgcgaaagaagtttacagggctcaaccaaagatgccagaccagggaaggccaatcaattgaccttacaattcttaggaaggcttcggcaccaaccaaatggatacccgttaaggacaatctcttgtttacataaacaattggcatgtggattagaatagcgtgtacaatggccatttttccactttttccctctgcggatttatacccgctcacagggatactctcacagctctataccccgtttgggac

SEQ ID NO: 75754 - DNA, 215 bp, Glycine max
  Clone ID: PAT_MRT3847_39420C.1
aattcggctcgagcgtatctaaccgccacttcatcacgaatagcacattccttctactattctaggcacccttcgctggggggtttcctttttgaccccctccctccccttatatggaccttcatcatcatcatattccatacgacaccaacccattctaacgggcactcgtatttcttctcctccatatatacactgtcattaaattatcctct

SEQ ID NO: 75755 - DNA, 540 bp, Glycine max
  Clone ID: PAT_MRT3847_39421C.1
ctctggacaaggaatcaattaccctgttcacgtttgttttctcactaccacaaacacaaagcctacaaaccaagcaaatcatccccttcttcttcaatcatgcccctgtcataacacatcgacatactagacaacctagcttccatggcagctttttaaccttcctctatttctcacacctagaacaaacccctaccccaccaaacaacactttattattcccctcttcctcaccctccaatctctcatcattctctttcacccgtgctgctccaattttattacacacccaacatgtacacaacaaagagagaacaacaaaggttcaggttccaaaacgactctaaaaccccctccttctcttcaactctactcgataaagtctaccgttccatcgaccagagcaacgacatgaagctctacaacgaaacgatggggaagaaacagagcagagtcgtcgtcgaagaagaagagataacagcttgcagcattcgccgcgcttgttgcttgaaaatggaatcgaagcgaaaaggtggactc

SEQ ID NO: 75756 - DNA, 526 bp, Glycine max
  Clone ID: PAT_MRT3847_39422C.1
cttacgcgtgggtcggataacaactacatctggaaaatcagtcaataaacaacagaagttaattcgacagggaatgggttttttgttgcaacagattagagcagacaacgcaccctccgatgtgtcaacgagtcaaagggaaagttcaattaccaaaaaaaacaccgcctctgaggaaattacttcgaaggaacaaatcgtctctctcccgaacaaaaatttaattcattcggctgttgtcgagaaacgtgaaaataaagaattaccaaatgattcttcgttttttgctaatctgaagcctgcacaagtcatttccaattgttttaacgagggaacgactcccgacttcggcttacacattcacagatttattggagaaaacaattacgtccggtcttgcagatggtccccggatggaaattggctgctgacagattctgtggatcgaattacaccgacttttttgtactcggattccattgtatttcgtttttgcacatttgcatatgggaggggagaggaggaa

SEQ ID NO: 75757 - DNA, 376 bp, Glycine max
  Clone ID: PAT_MRT3847_39423C.1
gcgggtcccggtcccggattcgagccacgccccaggctttcgtttttaacctaaaacagagcgttgccagagcacacaagacgggaggaacacaaatgctacggcgtagcatcgattggacgaatttttcgacagagggcctactttagagcatgcgatgatttgagggaactaatattattaaaggggatgatcacagaggtggtcacagatggtattactgacatatcatgtataggatagaccctttcttagaaaagatatgactgggggcgcgacagaaacgatatttgcaccatcttctgttaagagtgcaaattaaagataaactgcgtgacaaaagcgatgactgcttccactataccaaacgctatag

SEQ ID NO: 75758 - DNA, 876 bp, Glycine max
  Clone ID: PAT_MRT3847_39424C.1
ctggcatatgcttcccgtgccccctccacgcactttagagcaaattgttaggaaagacatggcaagaagggggacatggatggaccttggacttgacacagaaacaattggttttgagatgggtgaggccattcttgctgaactgatggaagacaccattttgagccttgtgattgaaagtccagaaagtaaatgtttctctgcttcaatttgagtttgaagaacaatgagagcagcttccacttaaaagacaactcactgccttttgatcatgcaagatgttaaaggaattcacatgtgtgaggtggaaggaaagtagagaggtgatgaaaattgatcaggaagaataatggagagttatagacttctttaaagcatatacatggaccttggtaatgtttcttttcaccctacctgactattttgatattggatagtataatgtgagtgagattgaggatactcaaataagtcacaagaagtaaattttgatattggatagtataatgtggaaaaaaaattaagcttgtttacaatgacaaacagacaaagcgacagttctattcggtgtgtgactcacttcacccagtgaaggccaaaggtgtttgattgtagattttgtaaagtttgatttgctgatcccattagatggtgtgttgtaattttgtttgtatcatcctttgtatacttgctttttggttaacctatattgatttcacaaagtttggaaataatgtacactcagctttctgtggtttcgaagggaagaactgagcagaaatatgaatgacaagttgacaataaagaaactaggaagctgcagcatgctttaaaactctccgtgtgaattactactattgttcttggttttaaaaa

SEQ ID NO: 75759 - DNA, 1110 bp, Glycine max
  Clone ID: PAT_MRT3847_39425C.1
attaaagctgtcttgcatgcctctggcttgactacggatcagttgttgatgaaatgcctttcctcagacaagatactggatccttccttgtttgatcaagtagagtacttctcgaacctgctttgccacgatcagaagctcctatttgactctatcaatgaagttctcatggagatttgtcagcattactttggggcctcaccttgggtttcatttgtaaatcctagcacgaggctaactccaagtatgaaaagggttactttaaaggtctgggaaggagtgtgctggcatatccttcccttgcccccaccgcgcactttagagcaaattgttaggaaagacatggcaagaagggggacatggatggaccttggacttgatgcggaaacaattggttttgaaatgggtgaggacatacttggtgaactgatggaggacaccattttgagccttgtgagtgaaagtccagaaagtaaatgtttctctgcttctatttgagggaaagaacaatgagaacagcttccacttgtaaaagacaactcactgccttttgatcatgcaagatgttaaaggaattcatatgtgtgaggtgaaatgaaagtagataggggatgaaaatcgatcagaaagaataatagagttatagacttctttaaagcatacttggaccttggtactgtttcttttcaccctatctgactattttgatattggattagtataatgtgaacaaggatacaaaaaataagtcacaagaagtaaatgaggagccagtggcaattgcttcttgcaaaagtgaaaagctaagcttgtttacaatgacaaacagacaaagcaacagttttattcagtgtgactcacttcacccagtgaaggccaaaggtgtttgattgtagagtttgtaaagtttgatttgctgatcccattagatggtgtgttgtaattttgtttgtatcatcctttgtatatttgctttttggttaacctattgacttcacaaagtttggaaataatgtacactcggctatctgtggtttcggagtgaagaactgagcagaaatatgaatgacacgtgagaataaagaaacttagaaagctgcagcatgcctt

SEQ ID NO: 75760 - DNA, 190 bp, Glycine max
  Clone ID: PAT_MRT3847_39426C.1
aaaggttagaataaaaaaaacagcctccaaaactgtttactgacgaagcccatggtacggcccggaccgtgtaaagtacttggacccattctgaggtgatccccaatcctatctgactggagaattcccaggtgactatggttgggacactgctgggctatctgctgacccacagacttttgtcaaaaag

SEQ ID NO: 75761 - DNA, 151 bp, Glycine max
  unsure (1)..(151): unsure at all n locations
  Clone ID: PAT_MRT3847_39427C.1
ttaacatctcttctctgaaaattctctttagagagatagagagaggaagaaagaatggcagcttgcactatctactaccacacaacatttcgaagccgaaaannnccaactcaancccatcaaagacgcaacncagcnnccatcacacaac

SEQ ID NO: 75762 - DNA, 2275 bp, Glycine max
  Clone ID: PAT_MRT3847_39428C.1
tcaagtcatcccatttcctttctcctctatgtcaagctcagccattatattacataactctgtactacgatcctctttgtgattaatctcactcgcattatcatctaattcaggcaaagagaaagacaatgatcttaccaggttgttcttggggacgtgagaggattcactggcggagggtggcaacataagagacggtggatgactccctctgcactctgcaattgagaggaaagaacctttcattggcaaattggagttcacccctccaaatgtgtgattagctgaaaattcctccaagggtgaagggacatcttctttgtgaagtaaagaggaattttttgagaaagacgagtctttaacattaaagggttcagctgattcaaggccggatgacaatggctgcctaggagacaaaaatgacaagtcggaccagttggtagaggaaggtgaaaaagtaaatgaactggcataatcagaacttgaaggtgaaagtgttggtgacttggaattgaattttggactgcaacttataaaacaaggaaaaggatttgatgtgccaggaggagacagtggcaatgatgaagcaacaccatgaacagagaagtccctgacgtcaggactacctttttccctatttggatagcattcaaaggaatccggtgaaccacagggaggaattgatgatggtgacaaaggctcatctgcagaatcttgtttttcaacctccacatctacactgggttgatgatcattgcatgggtctgaatcagcatcacagttcaatttgggggatgtgagcaatccactagcaaacttcctcctcagtcttgcccaaccttgttctctagcaggaagacaagtttctaatcctgtatcagacaaggaaaaaggtggaacaaccccaccagcaagtgccttgtggaaaatctcaaaatccaaatcatatgcatcaacttttcttggaccagtagtccccgaatcaaccagctcagcactttccatgccttcagagggttcctccatgaccatgacctcttcttctttgtcagaatcacctgaaagagcaatccaaaacccaggaggttcttcaccttcatggatggtcaaaataggaccctttgcaccctcataacgtatcatctgaaaggctgcagtccttgcattgcaagacatcacagagttacaatgtttcccattccaaacatagatagcagaaggaatatgaataatgaagcccccacgagaatcaagggctcgtgcacctggctggttaaccatcttggggacaagatgaagagggtcatagggggagtgaggagccatccgatacatcttgtgaacagaatttggacttgtaggcatagcatggacccttttctggcactgcaaaagttgacaagcaaaacccatgttcgggtttgtcacagcccttgcagtcttcacaaactgaaaagcatcttcaaagctctgcccctccctccacatgaggtaagcaatcaccaaagccgttgatcgagaaaccccttgacaacaatgaacaaggacacgcccaccttgctctctgacatcctcaaagtaatcaaacacatcatagagaatacttgtgatgtcctccgtggggctgtccgccaaccacagtgtcttgtacacaaaatcacctttgaaatactcgggacaaacaaacccaacacagttgagcatgtgtgtgattccattctgcctgaggagttcatggttcttggctactgtgtcactccccaagtatatgtgctcagcaattctggaacactccttgtcaaagaaggccaacttgtccctcttgaagagaaaatctttggtgggttgttgtgacttgaataggttctgatggagcctcgtggagtctgaggaagtggccaaactccaagatcatcagatccagcactaggccattcctccacgttgcgtttgttgattgagagaggctgaaggggtggcaaaagtggtcttgttttgctgtttgtcggtggcttgcggctattgggagacctatcagtccatgaaacagaacgagaataagttttccatgcaacaccaccggggggggctttgtccttcttacccgcttcccctaacatggtgttttttttttttttttctgaagaaaaagggtgtgctataagatggaaaagacagaaacttgatccgcacccattaaagcattgttactcactattgagtactacagagggaaaaaattagagaggggttcgagccgttcaagttcaaaaac

SEQ ID NO: 75763 - DNA, 339 bp, Glycine max
  unsure (1)..(339): unsure at all n locations
  Clone ID: PAT_MRT3847_39429C.1
ttttgaacacaaattataaanagagggcgggccaagccaggggtgggacactacaaatagaaaggtgacatttaataaaccaaagcaacacaacgcagcaaaggcctgaaactcggtgggcttaacaaaaatgtaatcaggggttccgacaaacacaacacattaaaacacaggtaaataaaagcaattttggcaccggcgatcaagaacccaggtctgggaacaacaggtgcgaggtgatgggggagacttcaaactttggccgaaaaacaaggtacctagaaaaggagacacaatggttcagaaaaggaaccaacatttattggaaccaacatcccc

SEQ ID NO: 75764 - DNA, 806 bp, Glycine max
  unsure (1)..(806): unsure at all n locations
  Clone ID: PAT_MRT3847_3942C.1
gcctcgcaagctcatggttctaaaaccctaaagtgagtgagtgatggaacttcagaccctttgttgcgctcttccctctcaaccacttcacttttccaatcatcgtattctatcatcaccagcgtttggaacccacgctccattaacaaaccaaattcatagatttcggttcggaaacccctcaaaatgtttaaaatgggtgattaaagagacttcacttttgggattgagcgaatccaagaagcttctagtacatgcttctgattccaatttaaatggtggcttggaagttcatccaaaacaaagttctagtgtacccgttactacatttaacggggtggaaccgtttcatggtaaatcaggttctgtctccttttgtggcttgacacaccaatcggtagaagaagggaaattggaatcttccccctttggagtaaagggtggctctttcttgtgggtcttagctcctgctgcgttcatagcatctttgactttgccacagttttttgttgacaatgtggttgaagctttccttaataatgtgatgttaatagatattgtgactacattctctcatgaggtcctgttctacattggactggcaacattcttgcatgtgactgatcgtgtccagaggccgtatttgcagtacagctcanaaagatggggtcttatcactggcctcagaggatacctattctctgctttcttcaccatgggtttgaagattattgctcctctcattcttttgtttgtgacctggtcagcaattccattgcagcatttgttgctataactccattttt

SEQ ID NO: 75765 - DNA, 2438 bp, Glycine max
  Clone ID: PAT_MRT3847_39430C.1
gaaacttaattgtttattaattaatggaagcagtaactaatgacagatgatgattcattctacaacaccgtaagctacttctactaacttgtacacattaacattaattcctgacgagttaagatggactccatattcaatttagcaactgttatgtacttcaattgcaattataatatgcatgtaatcacaaatcatcagtattgggcacgcacggaataatctgatcgtgagtgcaaatttacatccaaaatttgcagaattcgtgctcaactcatcccatttcctttctcctctatgtcaagctcagccattttattacataactctgtaccacgatcctctttgtcattaatctcactctgcggttcaacacctgaactaataatatagtcatctgatattagtcattttcctttgttttcaaggtcagattgtttgcaagtatcacccttcaccacattatcatctaattcaggcaaagagaaagacagtgatcttaccaggttgttcttggggacatgagaggattcactggctgagggtagcaacataagagacggtggatgactccctctgcactctgcaattgagaggaaagaacctttcattggcaaattggagttcacccctccaaatgtgtgattagctgaaaattcttccaagggtgaagggacatctttgtgaagtaaagaggaattttttgagaaagacgagtctttaacataaaagggttcagctgattcaaggccggatgacaatggctgccgagaagacaaaaatgacaagtcggaccagttggtagaggaaggtgaaaaagtaaatgaactggcataatcagaacttgaaggtgaaagtgttggtgacttggaattgaattttggactgcaacttataaaacaaggaaaaggatttgatgtgccaggaggagacagtggcaatgatgaagcaacaccatgaacagagaagtccatggcttcaggactacctttttccctatttggatagcattcaaaggaatccggtgaaccacagggaggaattgatgatggtgacaaaggctcatctgcagaatcttgtttttcaacctccacatctacactgggttgatgatcattgcatgggtctgaatcagcatcacagttcaatttgggggatgtgagcaatccactagcaaacttcctcctcagtcttgcccaaccttgttctctagcaggaagacaagtttctaatcctgtatcagacaaggaaaaaggtggaacaaccccaccagcaagtgccttgtggaaaatctcaaaatccaaatcatatgcatcaacttttcttggaccagtagtccccgaatcaaccagctcagcactttccatgccttcagagggttcctccatgaccatgacctcttcttctttgtcagaatcacctgaaagagcaatccaaaacccaggaggttcttcaccttcatggatggtcaaaataggaccctttgcaccctcataacgtatcatctgaaaggctgcagtccttgcattgcaagacatcacagagttacaatgtttcccattccaaacatagatagcagaaggaatatgaataatgaagcccccacgagaatcaagggctcgtgcacctggctggttaaccatcttggggaccagatgaagagggtcatagggggagtgaggagccatccgatacatcttgtgaacagaatttggacttgtaggcatagcatggatccttttctggcactgcaaaagttgacaagcaaaacccatgttcgggttggtcacagcccttgcagtcttcacaaactgaaaagcatcttcaaagctctgcccctccctccacatgaggtaagcaatcaccaaagccgttgatcgagaaaccccttggcagcaatgaacaaggacacgcccaccttgctctctgacatcctcaaagtaatcaaacacatcatagagaatgcttgtgatgtcctccgtggggctgtcctgcaaccacagtgtcttgtacacaaaatcacctttgaaatactcgggacaaacaaacccaacacagttgagcatgtgtgtgattccattctgcctgaggagttcatggttcttggctactgtgtcactccccaagtatatgtgctcagcaattctggaacactccttgtcaaagaaggccaacttgtccctcttgaagagaaaatctttggtgggttgacttgaataataggttctgatggagcctcgtggagtctgaggaagtggccaaactccaagatcatcagatccagcactaggacattcctgcacgttgcgcttattgtatcttaacgcatacatagcatgcacattgtacacttcaatctttttaattagtccagcattcgttgccaaaccaaattttaatcctctcccttttgtctcatgttcttttttcccagccat

SEQ ID NO: 75766 - DNA, 343 bp, Glycine max
  Clone ID: PAT_MRT3847_39431C.1
ctacgcgtccggggttttaggttatttggacttgtcatagcttttggaacatgtttactgcatcgcaagcatattatgaagaggtacagggatattatggtgcctctcacaaaataaaaaacaacacactcacaaattccaaaaaatgcccttctcatataaaagaacccttctttcgaatccttcccgctctctctctctgtatgcttttgtccctaccacatgaagctgatcgtagatcctaccgcaactaagcctctccgagctctgtgatttttgggttgataaaaaaaattagggtatgatggctgaccaacgaatgaaagggagcaaaccagtgcat

SEQ ID NO: 75767 - DNA, 675 bp, Glycine max
  unsure (1)..(675): unsure at all n locations
  Clone ID: PAT_MRT3847_39432C.1
gcgtacgtaagctcggaattcggctcgagctcgagccgctcgagccgcgagaattcttcttggcctccttccaggattcaaccattgtgagaagaaagaggtaggggaaaaaactggtgttccggcgacattgctgtggttttcaacgtataaaccatttcgccggaacccagagaaattaacaatgtcttcccctcataactctgctcctcataattcctcacccgataactccacccctgatgatgccactcccaataactccattcctgataattccacacccgataactccattcccgataattccacacccgataactccacatccaataaatccgctccccataactccacacctgataacgccactcccgataattctacacccaataattccaataaatcacacaaaagttcctcggtgtcccctccttcgatggagggacaaagtactccaacatcaggaaaagattcatcaaacaaatcattatcaaatgagaaatcattgggttcaaacaatgatagtagcaataaagtagcaatgggagctgggattgnagtaggggtcattctttcttgtgctagtcatttgtgtgtttcatttggagttgtaggaagaagatgcgaaaccatagtattattatccaaacccttctaacggaaagcgagtac

SEQ ID NO: 75768 - DNA, 379 bp, Glycine max
  Clone ID: PAT_MRT3847_39433C.1
ctcgagccgaatacgactcgagctcacgctttttttaccaatagcgacacactctgggggtcaacaccaaccgaggggggaataatcagctaacaatcctgatgggtagtacattgcttgaagcgctacgcacaacaaaataactatgtctcattggatgcgtcaaacaccaagagcaaaacaatacataacgtgcactagaagggacaaagcttcactattataagaacaacaaaagcacccatctggaggcttcgactggacctgttgtcaaatctacaaggcacctagtggaacacttactatctgcacagtaccctatgaaagatcctttgatgagaacctataaccggtcatatgctaaaaagctcaggatttt

SEQ ID NO: 75769 - DNA, 223 bp, Glycine max
  Clone ID: PAT_MRT3847_39434C.1
aggggaagatcttcccctgggggttatcaccttgggtccagtcccagaggactattggggggccctcaccaacacctccagaattcttgtccccgggaaaagcatccccattaagaagaacattggggcccatccttatagctcggtggccatcccctaagccacgggcttcagaccaataaaaagacccaacaagatagcgggccttggagggtatcacccg

SEQ ID NO: 75770 - DNA, 642 bp, Glycine max
  Clone ID: PAT_MRT3847_39435C.1
ctttgttttttttttttttttttttttttttttttttttttttttttttttttttttttttttttttttttttttttttttttttttttttttttttttttaaaagacaaaaaaaagggtttaattcaaccccaaacggggagcccccaaaaccaaatcgggggggggggaacaaaaaaaacaaatggcttcaaaaaaggaaccctttttttttttaacaaaacccaaaaaaatggcccaacaacggggctttaccttggggggaggaaaaacaaaaaccccccaaaaccccgggggaaaaaaaaaaactaaggaaccaaaaccccccctaaaaaaaccttattaacccgggcccacggaaaacattggtttgcccaccccccaaggggggggttgccggcaaaaaaacacccggggccccaaaaaaaaaagagggggaaatcttccaaaaacccccccaaacttttggggcgggggggaacaacccttggaaacaaaaaaaaaaaaaaaaagggggtcccaacccccccccaaacccttaaaaggggcccctcccggggttaaacccagggggggaagtttcaaaaatggggggccacaaaaaattcacggccccgggggtcgccccggaaattccggacc

SEQ ID NO: 75771 - DNA, 416 bp, Glycine max
  Clone ID: PAT_MRT3847_39436C.1
acaattcctgaatgagctacaccccaatcaacacaaacacagcctagctgtagttggggaatctgattcaaaagacacatatattattaatgagttggacataacacgtcacaaaaacacaaacgatttgaatctgatcttaaaagtggacttaaagcattctacacatctactatcatccaaaaactttataaaacaatccaagccaaccattatggtgtgaaactaggattatcactctgcatttaagcgactaacttcttaaaggaaattctcgttgaggggtctgaacagactacatccttatgttccatcaaatacttaactggttattgagataattttgtccgttttttgtaagattgtaatcacaattttccaccgtacattaaacaacttgtcaggggctctataac

SEQ ID NO: 75772 - DNA, 1171 bp, Glycine max
  Clone ID: PAT_MRT3847_39437C.1
ggctcgaggtatattcagtcataggagactttcagtatctgttggaattgcaacagctgcttttgcacttgcaattcttgaaggaagcacgcagcccggagtttggtttcctgaagaggtatgtgttgagtacaagtgtgaggtaaagtctcacatcggataaaagtggaaaggttgagcaccatataagtgaggagaagacccataaacctgagccttaaggttttgggttagagtgtggtgtcaggtctcctcatgtggtgactcgtggtccacaggtgtacccctcgaatctgcccaacaattggtatcagagccgatggttcaagttggtgaccggctcagacgagtatgcaaagacttctccttggggggaaggctagcgggcatggcaagaaccgcaggtggacatggctatactcgtggatgataaagacttccccttgagggaaagactaccatgtggaagagactcacacttgagggggagatgtattgggttacaagtgtgaggtgaagtcccacatcggatagaagtggaaaggttgagcaccatataagtgaggagaagacccataaacctgagccttaaggttttgggttagagtgtggtgtcaggtctccttatgtggtggcttgtggtccacaggtgtacttctcgaatctccccaacaggtggattggaaggggtattcaatccttgtcaagtcagatagatggctaccaagctcaaaagttgcgtaagtgggatgttcaaaaagttcaatcaattttctctccggaggggtcctttagttatattcaaggagatttttggaaaaagctatggaagattaaagccattccaaagtgtgtccatttgctctagagggcatgtaaggacattttgctggtgatgacaaatttgaaaagaaaaaaaagattagaagttgacagtatttgtcctagatgcagtgtggggaatcaaacagtggtccacactctcccttttatgtgaggaagttaccagaatatgttttgcataaagcttaggtggtaggattcaggctcaaccccagtcctcatttgttgtatgagttgggagttgtatacaggttggtgatgctatttttttgggagaatttgtgaacttgtttgggttatttggtatgaaagggatcaatgggttttt

SEQ ID NO: 75773 - DNA, 747 bp, Glycine max
  unsure (1)..(747): unsure at all n locations
  Clone ID: PAT_MRT3847_39438C.1
gataaattttaccacaaggaggggtgttagcattgtgttgggcanaactgggaagacactacacctgctgtgggttttgggtaagtgttgctagttacatttcctattggggggggaaacatatataaatttaatgtgaggtgctactgtgaacgtgggttctttgcgtaactttgcagtaataacttatcaagcttcagcgatttatcaatgtgtcctcctttgtgtccttgagtgtgaaagtgcatctaaacaagcttgccttggagtgagtttattgtgtggtgggtgactaatattattagggtgttagagaataagtaataaaataccaattatgtgaaccacattagaatctattacatcggtagatttttgtggtttactctatgagttggttacttaacaaaaaaagatagtttttgagtcaattatggttatgcgtgtgacgtgctangagaaatgagacaggttgagtaatgcgttactttggatattgagtcatttaactactactagatcaattatatatagttttgatatcttacaaaggcgttangtgttaaggtgaancanctgtanaggccactgaaaattatgtgttatttttttttggggatgagttttatatctggcagtgtctcacttaggagtgagtgtgttttaacctgtgtgaacttccagtgttttttttaatcaacaatttccctgggggggtgctcttccactcacttgctcctaatctta

SEQ ID NO: 75774 - DNA, 659 bp, Glycine max
  unsure (1)..(659): unsure at all n locations
  Clone ID: PAT_MRT3847_39439C.1
ctttgccccattccccctaaccaagtttaagtttctagaatggaagaaatgaacagaagctcctcctccacttcctcttcctctcactgttgctctttagagtccaaccataggagccccaacaagccagacagaatcaaaggcccatggagcgcccaagaggatcggatcctgacacgactagtcgaacaatacggccctcgaaactggtccctcatcagccgctacattaagggcaggtccggcaaatcgtgccggctgcggtggtgcaatcagctgagccccaccgtggagcaccgccccttctcgacccaagaggacgagaccatcatcgctgcccatgcccggnacggnaacaggngggccaccatagcccgattattaccgggccgaaccgataacgccgttaagaaccactggaactccacgctcaagcgcagagccaagggtattaacgttaatgttaatgatgccgacaacgaggatgacccgttgaccgcattgactcttgctcctcccggtattgctaatgccactttgaccgaagacgccgtaccggaccaccgggcctcgccggagagtgcggcggaggggttttgggatatgatgagggatgcgatcgcgagggaagtgagggaaaatgcgccttctaatttttc

SEQ ID NO: 75775 - DNA, 294 bp, Glycine max
  Clone ID: PAT_MRT3847_3943C.1
gcaatttatgattgttatttgatggaattaaataaaaaatttagctgtaatacttttgtctaagataattttcttgcaatgagaattgaggtcaatctagaaattagatgcatgcaattcaatgtgttttaacaaaggtagcttgtcagtaaacttgagatacaaatgaactatgactcttttgccagatcagatatgctatcttttaattgtatgtgacagacttgcaagtgctaagaaaaaatagtgtagttattattatttttttatattcattttccaagttctttatgt

SEQ ID NO: 75776 - DNA, 1122 bp, Glycine max
  Clone ID: PAT_MRT3847_39440C.1
ctcgagccgcttctggcttctgctgttaataacaaaaaaaaaaaggaagacataataacaaattatgcttatgatgattgatttaatgaaaaccctagttattatcagaaaaattagactcaatctctccacacacatatataaacccaaacaagtgaacaacactccctcctttgtcccattactagtacatacattcccctaaccaagttttaagtttttctcaacagaatggaagcaaccaacagaagctcttcctccacttcctcttcctctgattgctgctcttccgagtccaaccccaacaagcccgacagaatcaaaggcccatggagcgccgaagaggatcggatcctgaccggactcgtcgaacgatacggcccacgaaattggtccctcatcagccgctacattaagggaaggtccggcaagtcatgccggctccgatggtgcaatcagcttagccccgccgtggagcaccgccccttctcggcccaagaggacgacaccatcatcgcggcccatgcccagtatggtaacaggtgggccactatagcccgattgctaccgggccgaaccgataacgccgttaagaaccactggaactccactctcaagcgcagagccaaaggtattaacattaatgttaatcacgccaacaacgaagtggctgcttcttcttccgctccttctcgccacttcgacttcgaggatgatccgttgaccgcgttgactctcgctcctcctggtattgctaatggcactgtggcggaggacgccgtgccggaccatcgtgcctcgccggaggggttttgggatatgatgagggatgtgatcgcgagggaagtgagggaatatgtgtcttccaatttttctgataactcgggttttcattaaatcaatcataatcataattgttattatgcttcttcttttttctttttttttttttaactttaggcaaattattctgcaatttgattttgccttactggactttggaatcggatcagagaattaaattaaattagacccttctgacttttgctattcataacaattttctcttccggcgaatcatacttcgttttctagctaaaaaaaaaaaaaaaaaaaaaaata

SEQ ID NO: 75777 - DNA, 511 bp, Glycine max
  Clone ID: PAT_MRT3847_39441C.1
gaatatgaagttgccagtttcctttgtcgctgcactatttttggtagcatggccatgccatggcgcaagctaccaaaggttacctcttcgaatgaaaactgcctatggcgagcgttcttcggacgtaaaatgcaccacttataagctagctgtggaagcacacaacatccgaccctttaaaaccattcctgaagagagcgttgaaccaacacaggactacactagtggcgaacaacttagatcagactctcgaacagttaaccatcaagctgtcttgtatgcttgtgaacgcgaataccatcacaacgacatatttatattcggtatagataacacccgactctctaatatcccatactatgaaaaacatggatatggggtggaggaatctaatgatacatcatatgatcaatgctctaacgagggcgactgcccggcattgccatagactctcaaaacacacgaccagctttcgactcttgactacacttacgtatctcctgtaggaaga

SEQ ID NO: 75778 - DNA, 996 bp, Glycine max
  Clone ID: PAT_MRT3847_39442C.1
tgacccatggatgtgtgcatatgtaactgcttcatcaactccatttctaattgtactgtactgacgatatggttccatatatactgcaaaggccgtttcgaacctgcatttgttagatatcccttacaggaagcgatgatgaaagacacattggaacgagctacagatcccaactttaacttgaaagcttaccttcagaatgcatatgttcatccagttttcaaagctagcctttttgatgaggacgaagaggacgaagaggtaatgagtctaaagttggaaactgagagtgtaactgtgcccacaaaacggcaatcaagaaggaacacaccattggctagcagaattagtggtgcatcatctccttctctgcctgatcatggcatccgaaatcataatccagagccataaatcatggaccaaggattcatatcattgttattggaccgaccacatatgtaacatacaatgggctacacatgcttccagcataaactgagagaagcaagctagtgtgatcggcacaaactgtaaggtagagattctttgatatattattatttccgattttgttaatagtgaatttgttcccttacaccacggaatgctgtaaattatcccagaacttgtcatggtttagatcgtgtgtatatttttttcttcttttttttaccttatgcttttccttcggattcagctcagtttatatgaggaaaaaaagtgtgtttgcacttgtgcacgtttttaagttttaacacaatcaatgaacgactttcctttacgtttaaaaaaaaaaaaaaaaaaaaaaaaaaaaaaaaaaaaaaaaacaaaaaaaaaaaaaaagaggggggccccccctcatgagtgtgacttatccccgaaccgagtgattacggttgttgttaataaaaaaaaaaggactgcgtgcatttaaaaatgtattgttggccgtatatatatggtttaagttcacccatgttgaggctttaggtctag

SEQ ID NO: 75779 - DNA, 341 bp, Glycine max
  Clone ID: PAT_MRT3847_39443C.1
tgtttatttgttcaccctttgagcggcggcggccaatcattctttcttttatgatggtactccctcactgaaaaccaagggcccttcctggtcatgaacacgccatgtgtcggaaacgaactgtatgggttacttcatcaaatttgaagcgctgactgaaatttgtttaactaacccttgggccgccctaggacacgcacattaaaggggggcacccaactgcgtaaaagaataaatactgggcgaacaaccctttgtgcctatatcggccctatgataaaaaaaatccagaacttaaactagcacgtgggtgatgcagctggcaataattttaccactga

SEQ ID NO: 75780 - DNA, 353 bp, Glycine max
  Clone ID: PAT_MRT3847_39444C.1
taagcaagcaagcgggcgcgagtgtcaatatggacatcaaggcttataatgtgttttagcataactatcgcaaccccgggggggtttatttaggaccggcggaactcaatgaacacaaccaaactcatttatgcaccagaatagctggcacttatgggtacatggctccagaatgtgcaatgcatgggtatatgacggacaaagcaaatgttcatagttctggaattactacattggaaattgtgtgggggatgagcatcaccattaatcaccctacagcagaatgttaatgaatgaaacatcgcgggcacaaatcgttggaatagcactatctaaaggagatagctgataac

SEQ ID NO: 75781 - DNA, 2106 bp, Glycine max
  Clone ID: PAT_MRT3847_39445C.1
gtaaattggcattattatatttcctgtgacctgtgttttgggtgcaatttagtaaccatgtgctagttctcaacatattatgtcacgtgaaaatgtcattaattctggattcacttctactattaaaaaataatggtcttatactctactatgagagattccttttaatcaacaatatttttaacattattgatcaagaatttgtctggctttgtcaggctcctattacaattggcactgcaattcctttgaaagcaagtttcttcatcacttatataatggttgatggatgggctggtatagctgcagaggttttgatgttgaaacccctaatcatatatcacttgaagaattttttcttggtgaagactgaaaaggatagggaagaggctatggatcctgggagtattggcttcaacactggagaacctcgaatacagttgtactttttgctgggtctagtctatgcttcagttacacctactgttcttcctttcataatagttttctttgggctcgcctatgttttgttccgtcatcagattatcaatgtttataatcaagagtacgagagtggtgcagcattctggcctgatgtccattttcgtgtcattattgcactgatagtgtcacagatagttcttatgggacttcttaccactaaaaaggctgcttcatcaactccatttctaattgtactcccagtactgacgatatggttccatatatactgcaaaggacgtttcgaacctgcgtttgttagatatcccttacaggaagcgatgatgaaagacacattggaacgagcttacagatcccaactttaacttaaaagcttaccttcagaatgcttatgttcatccagttttcaaagctagcctttttgatgaggacgaggacgaagaggtaatgagtctaaagttggaaactgagagtttgactgtacccacaaaacggcaatcaagaaggaacacaccattgcctagcctaacttagttgttcatcatctccttctctgcctgatcatgtcattagaaataatacagagccgcagatcacgggcatcatgtacatttatgattatttatggccctgatcgacccacacatagttgtgatgggactcctatccaccaagaaagctgctttgtctactccttatctcattaggatcccagtactaaccatatggttccacagcaactgcaagagtcgtattgattctgcatttgttaaaagtgcctttcaggcagtaatgatgatagatacaatagaatgagctacagatcccaacttgaacttgaaaggttatcttcagaatgcctatgttcatccagttttcaaggatagcattgatgacgatgaagacgaggaagatatactgagtatagacttggaaactgaaagtgtgactgtgcgcacaaaacgccaatcacgaaggaatacaccattgccaagcaaaaataatgatgcatcatctccttctctgtctgatggtattggaaatcatacagagccttaaggcaaaatgagataactgtacattcgaatttaggtcagtattttctcaccagaccccgatgatgtgcaagtgcaaatatagtaagttgcatcacttgccaaagttgagcctgttgcgcttgcccctgcagtgccttcggctgcagctttcgtcttcacgttttttccgggccgtggttggcccggcatggcggctgtcgggttgatgttgaaacccctaatcatatatcacttgaagaattttttcttggtgaagactgaaaaggatagggaagaggctatggatcctgggagtattggcttcaacactggagaacctcgaatacagttgtactttttgctgggtctagtctatgcttcagttacacctactgttcttcctttcataatagttttctttgggctcgcctatgttgtgttccgtcatcagattatcaatgtttataatcaagagtacgagagtggtgcagcattctggcctgatgtccattttcgtgtcattattgcactgatagtgtcacagatagttctgatgggactccttaccactaaagaggctgcttcatcaactccatttctaattgta

SEQ ID NO: 75782 - DNA, 680 bp, Glycine max
  Clone ID: PAT_MRT3847_39446C.1
tgctttttgtaaaattgtaaacaggaagcgatgatgaaagacacattggaacgagctacagatcccaactttaacttaaaagcttaccttcagaatgcttatgttcatccagttttcaaagctagcctttttggtgaggacgaggacgaagaggtaatgagtctaaagttggaaactgagagtttgactgtacccacaaaacggcaatcaagaaggaacacaccattgcctagcagaattagtggtgcatcatctccttctctgcctgatcatggcattcgaaatcatccagagccataaatcatggacaccaaggaatcatatcattattttggaccgaccacaaccacgaccacataggctagtaggatggatagatgaaccatggatgtgtgcatatgtaacataaactgagaaagcaagctagtgtgatcagcacaaactgtaaggtagagattattattatttcgaattttgttaatagtgaatttgttcccttacaccccggaatgctgtaaattatccaagagctgaatcatggtttagatcgtgtgtatatttttttttttcttttaccttctgcttttccttcagattcaactcagtttgcatgaggaaaaaaagtgtgtttgtactgtacttgtgctcgtttttaaatcaatgactttccttttcgttta

SEQ ID NO: 75783 - DNA, 251 bp, Glycine max
  Clone ID: PAT_MRT3847_39447C.1
ctgaagcttacgtggaccatcgaagcacagtagcagtgatggatggactaccgccgcgggggaagagctgtgcagagaagagacgtccattgaatgacatgccatgaaagccataggacggatgacctctacatatggagcgccactacccaagtataggcgctacaaacgagggacagcatcggacatgagagcgaccacggacagaccatctacacgctgcgatgagacacgaatggtcggcgaatatg

SEQ ID NO: 75784 - DNA, 1076 bp, Glycine max
  Clone ID: PAT_MRT3847_39448C.1
gcgacctcgcgtccggatttgtgccccttttcatgttacctatttccatctttcattattattatttttttatatttatatttttcccttaggaaaattgtcttaactaggagccttagctcacgaatatcatcttaccacgaaatcttggctagtactatattagggttcaaattcaaactatttcaatttaggaggatctcaactcaactcatgttatcattattattaggactgtttcatattaatactgtcaaagtttcaattaattttcacatgttcaaccacagaataggttaccaaaacaaatattaagtttaagacacaatccaactgtatcttactcacgtcagattgaacacttttttttttttttttgttaaactttgattattcttttaagctcagcataacttagctctactgtttcttcttttctttttttctttaggttttgaattggatgtaaatagtttgtactttgtagcataatctgcggttttctgaatttgctggtagaagattaaaaattcagattagtgttagttttggacctgaggaggagtggaggaactgagatttggatttggatcaggttgagattgcgtttgcttgctctgattttccggcatgaatttcaagagctttggaaacgagaccggcggcggcggagggaggccgtcggggaacttctccctgacgcggcagccgtcggtgtactcactgacgttcgacgagttcatgaacagcatgggaggttcggggaaggattttgggttcatgaacatgtttctcccttaggaaaacattcttaactaggagccttagctcacgaatatcatcttggctagtactatattagggttcaaattcaaactatttcaatttaggaggatctcaactcaactcatgttatcattattattaggactgtttcatattaatactgtcaaagtttcaattaattttcacatgttcaaccacagaataggttaccaaaacaaatattaagtttaagacacaatccaactgtatcttactcacgtcagattgaacactttttttttttttttttg

SEQ ID NO: 75785 - DNA, 265 bp, Glycine max
  Clone ID: PAT_MRT3847_39449C.1
acatcccatcaaggcatataaggagtcatagcctagagtggcattaatatgaattatgacaccgccatcaactattcacaattgtattacatagacagctctggtgtgcgctggctacatttcacttaacatgagttgctgaaattagctgctaagatacatgactattgattgagttttattggaataagtggaattggatagttgaaggtagctttactttatgctttctagatctcaattttccttcagcaattatgatttg

SEQ ID NO: 75786 - DNA, 749 bp, Glycine max
  unsure (1)..(749): unsure at all n locations
  Clone ID: PAT_MRT3847_3944C.1
aaaaccctaaagtgagtgagtgatggaacttcagaccctttgttgcgctcttccctctcaaccacttcacttttccaatcatcgtattctatcagtgagtaaaccttaaccgacaccttcgaatcaatttttctttgttaccattctaacccttctctgcaattcccgattactattcaccaactcgttaatgttatattcgcagtcaccagcgtttggaacccacgctccattaacaaaccaaattcatagatttcggttcggaaacccctcaaaatgtttaaaatgggtgattaaagagacttcacttttgggattgagcgaatccaagaagcttctagtacatgcttctgattccaatttaaatggtggcttggaagttcatccaaaacaaagttctagtgtacccgttactacatttaacggggtggaaccgtttcatggtaaatcaggttctgtctccttttgtggcttgacacaccaatcggtagaagaagggaaattggaatcttccccctttggagtaaagggtggctctttcttgtgggtcttagctcctgctgcgttcatagcatctttgactttgccacagttttttgttgacaatgtggttgaagctttccttaataatgtgatgttaatagatattgtgactacattctctcatgaggtcctgttctacattggactggcaacattcttgcatgtgnactgatcgtgtccagaggccgtatttgcagtacagctca

SEQ ID NO: 75787 - DNA, 779 bp, Glycine max
  Clone ID: PAT_MRT3847_39450C.1
ttttttttttttttttttttttttttttttttttttttttttttttttttttttttttttttttttttttttttttttccccccaaatccaaaggggggccttttttcccaaatttaaaaccttattaagggggggccccccccaaaaaaaaaaaaaagaaaggccttttttctacctatttggaaaggaagttaaaacaccaacatttcccccagggggggaaaaaccaaaaaaaaggggggggttttcccttccaaccccccccgttccataaatggggtgggccccccccaacccctttaaccccaaaggagcccccttcggcccggttttttttttccccccaaacgggggcccccccctgggggggccctttttttcggcccccccctggccggggaaaatttggcggggcccaatcccccgggggggccccaaaaaaccccccttgggggcttttttttccaaagccctttttccgggacccctttctttctggccaaaacttttaaccctttaaaccccggggggcccaaaggggccctgggccccccgggggccccaaacacccttggccccctttccggggggggccccccccaaacgggggggggggggtctcggaaccccgaacccctgtggggcaaaaccccgggaaccctcccttcttttcgaaaaaatgcccccccccccccccgggggggaaaaactgtccggggggcgccccccggtaaaacccccctcttggggggggggggggtgaaaaaagaccgggggt

SEQ ID NO: 75788 - DNA, 282 bp, Glycine max
  Clone ID: PAT_MRT3847_39451C.1
gaacccccggggacgccacacgcgctctacagccccagacacccacgcggcaacggggagctttagaacacctggggcaggcaccccccgcagacacaacagaaacgcaaaaaaggacacacgggacgggaccgcttgacgggcaagcaagggagcaagctagacgaggaacaagagaacggaccaatgacaatgaccacatacggggcacaaaggggaggcgggagaaacaacgacccacagaaataggctgggaaggcaagcgaaccaacaaaggggggg

SEQ ID NO: 75789 - DNA, 244 bp, Glycine max
  Clone ID: PAT_MRT3847_39452C.1
catcctccaccatcgaaattcctcaccacctacaacacaacaatgaccgtcgcggtcctgagactgatgatagcgttgacgatctccgagggtgcagcactagttacgactcatatggtcgtaactcgacgagatgctgtcgacgagccgcattgccagatctgagaaatccgaggtacaccgacggcactcatgacgacacaggtctatactagcaatgcggaagccgtaagggcgagtatct

SEQ ID NO: 75790 - DNA, 294 bp, Glycine max
  unsure (1)..(294): unsure at all n locations
  Clone ID: PAT_MRT3847_39453C.1
gtcgcatgcacgcgtacgtaagctcggaattcggctcgaggcaaganggaatgcaggagtcttacagagcacactgattccaagggcatagcatggcattgggggtggggatgtttgttcatctttattctggtttggttttgattcctcagagcagagagtatagtttgtaaccatcatggcacagacatttctcactgggagaggagaggcgnnngacaacatctaccggggggctgggaatatanctcagtggtagaatgtgtgtttagcagcataaggcccaggttcatc

SEQ ID NO: 75791 - DNA, 256 bp, Glycine max
  unsure (1)..(256): unsure at all n locations
  Clone ID: PAT_MRT3847_39454C.1
aactttctttcatcataaaccttttaaatgctgnacagtattctttatgaaacatatttaaattcactatttccaattttatacatattggggtatttgattattaccaccagtccaaattaccactattacatgtacttattctggacaatttattatgggaagttttctaaacttaatgttaaataaatttatttatacttttatcaccccaaattttcacaatttttccaaccattatagttacacttatatt

SEQ ID NO: 75792 - DNA, 218 bp, Glycine max
  Clone ID: PAT_MRT3847_39455C.1
aactgcaaaagagccttctttttttctactttggagataaacaaatatccttgaaaagaaaaataaatgaatagccttacaaacaataaatttgtttttgcctccaaaaaagtcttaaccttagtccaacgtcttatccgtcttgggcaagcaacaaaaattttaaagcaaatgctacaagggctcaaggcacttttaaggtctaaattgaagcctga

SEQ ID NO: 75793 - DNA, 714 bp, Glycine max
  Clone ID: PAT_MRT3847_39456C.1
gcttgttcatctttaacatatacatttggtatttcatttcatttaaggttctgtttgataaacttgtcaactacaggagaatgaaataagaagggaaaattaattaaatttctcttggaattttaaatcaacttatgctcttcaattttttttaatagaaacactcatttaacttctgctgaagctgaggtgcataacttattttttacttgtggaagaggtttaattcattagagcataaatcaaattttatggttgtgatcaaatttaatgacctatttgttttaattagctttgtagaaaatgagattattgtgaggatagtttagtttatttggaaattggttgaggattatgtaaagcactttctgggtgggaaatttcttgtcatttttgtacatggtttattttgcatgaggaaggtgatgaactatttgaaaaaaaaatcatacgaacccaccttttaggaagtgtcttttaccttctatcactcatttatgtccatgcttaccgtgattggttagttacctattcgtgagttttggtaaaaaaatattctgtacaaaataaaacaactgtttgcataatatggtatgtagtttggagaaagcttgagttacaagataatggcaactttctttatcagtgttatttataccgttctggtgaaagaaatcttgcttccttggatttagaattctcttcactacttac

SEQ ID NO: 75794 - DNA, 214 bp, Glycine max
  Clone ID: PAT_MRT3847_39457C.1
gcagctcaaagacttgcagaaagacccaccaactttttgccgcgctagtccaataactgaagacatgttccattctcaaccacctatcacaggtcctgctcatagcgcttatactgcatgagtatccctaatcactataacctttcctcccgatcatcctcgcgtccttccacggttacctctaacacaaggtgtaatgcctcacatcaccacc

SEQ ID NO: 75795 - DNA, 263 bp, Glycine max
  Clone ID: PAT_MRT3847_39458C.1
acggctgcgagaagacgacagaagggatgaggataaagcaatggggcattcaatcgcaatgccttatgcatgtgatatctaacaaggtgtgcccaatcaatttgtaaacctttatgaaaggcccacatgacaatgaaatcttcttcaaaaactgagcaaggtttgaagatctagggagtaagatacgaacaataagataatgcagaatgcagctctcaaaagccaatgaaccggcaagaagtcttccggtcatatccgcttgg

SEQ ID NO: 75796 - DNA, 398 bp, Glycine max
  Clone ID: PAT_MRT3847_39459C.1
gggtgcaacttatatatctggggggcaacttcacttaatgtcaattagttttaagctgaaatctaacatggtattagagcccatagcccatcttggttctcgcctattatagtaggcttgcatgttctgacagacatctgtggaggggggtgttaggaagtttcacattgtctgcctcaattctcagggtgcaacttatatatctattgtgtaactttacttaataccaattgattttaagttgaaatctaacagaaggaaggggtaggggggcaattaaagaagcaatgccaaggcatgcttgtgccttttgctggaagataagaaagagaaattacactgttagataatatatgaatcaaatgtaaaattttagaatatacttagcatattacata

SEQ ID NO: 75797 - DNA, 240 bp, Glycine max
  Clone ID: PAT_MRT3847_3945C.1
agggaatacaacataagaaaaactcttggcaggatggagtttcaggaactaattggccaatatcaccacgttggaattggacatattagtttcaaggtgaagatcacatagggagttttttctacttcccttccctaaattttcaaagggcttctcgaagctatggaggaatcatcctaaattaccgaccaggtattcctgttccttttggattaccaaatggagatattaccctatttt

SEQ ID NO: 75798 - DNA, 1233 bp, Glycine max
  Clone ID: PAT_MRT3847_39460C.1
tgcaaagaaggaccaaactgtcatctggcaaaaacctctgacaaatgaatgctatatggagagagaacccggcactcgccctcctctttgccagtctcatgatgacccagatgcagtttttggagtgaatatggaagcctgcataacaccttactctgaccatgacaacagagccaagggtagtggattagctccatggcctgcaagattgaccactcctcctcctagattagctgactttggctattcaaatgaaatgtttgaaaaggatacggaactatggcaaggaagagttgagaattactggaatctattgggtccaaaaatctcgtcgaacacagtgaggaatgtgatggacatgaaagcaaacatgggttcatttgcagctgctcttaaaggaaaagatgtttgggtgatgaatgtagtacctcgtgatgggccaaacacacttaagcttgtatatgacagaggcctcatagggtctatccatgactggtgtgaagcatattcaacatacccccggacttacgatttactccatgcatggactgtgttttctgacattgaaacaagagggtgcagtaaagaggatctattgattgagatggaccgtttgcttaggcctacaggtttcatcatcataagagataaacagcatgtgattgattttgtcaagaagtacctaacagcaatgcactgggaagcagttgcaactgctgatgctagtgctgactctgaccaagatggcaatgaagttatttttgtcatccagaagaaattgtggctcgccactgaaagccttaggaatacagaataggacaaagacgacgataacgacaacaacaactatatggctttttcgtttccactttcttatatattattctctgctgctacaagggatcccaagcatgccccctcccccagtgaacaactgccttctgtagcattattacattacataatatttatcaaagtccattattttcattctaaatttttgtgattatgatgcaagttattactaagccataggcattattatgcttctatgggctattcattattttgcccttcatttgggtaacaatgtaacctacttaataatcaacacatagtagatttgtcttcgtgattaaaggctaggacttgtcacactaaagtgtaatatttattcaggcatttttctgcttggaatatattataagtttcttgctttcatattacagttta

SEQ ID NO: 75799 - DNA, 1480 bp, Glycine max
  Clone ID: PAT_MRT3847_39461C.1
gctagatcggttgcttaggccaggaggttactttgcatactcatctccagaagcatatgctcaggatgaagaggatcaaaggatatggagagagatgagcgcccttgtgggaccgtatgtgttggagaattgctgcaaagaggaaccaaactgtcatctggcaaaaacctctaacaaatgaatgctatatggagagagaacccggcactcgccctcctctttgccagtctgatgatgacccagatgcaatttggggagtgaatatggaagcttgcataacaccttactctgaccacgacaacagagccaagggtagtggattggctccatggcctgcaagattgaccactcctcctcctagattagcagactttggctattcaaacgaaatgtttgaaaaggatacggaactatggcaaggaagagttgagaattactggaatctgttgggtccaaaaatctcgtcgaacacagtgaggaatgtgctggatatgaaagccaatatgggttcatttgcagctgctcttagaggcaaagatgtttgggtgatgaatgttgtacctcgtgatggacctaacacactaaagcttatatatgacagaggcctcatagggtctatccatgactggtgtgaagcatattcaacatacccccggacttatgatttactccatgcatggactgtgttttctgacattgaaacgagagggtgcagtccagaggatctactgattgagatagaccgtttgcttaggcctacaggtttcatcatcataagagataaacagcatgtgattgattttgtcaagaagtacctaacagcaatgcactgggaagcagttgcaactgctgatgctagtgctgactctgaccaagatggcaatgaagttattattgtcatccagaagaaattgtggctcaccactgaaagccttaggaatacagaataggacaaagaccataacaacgacaactacaacaacaacaactatatggctttttcatttccactttcttatatattattctctgctgctacaagggatcccaagcatgcatgccccccagtgttggaagcattgaacaattgcattttgtagtattattacataatatttatcaatttcctattttttgttctatatttttgtgattatgatgcaagttattattaagccataggcattattatgcttctatgggctattcattattttgcccttcatttgggtaataatgtaagctacttaataatcaacacatagtagactttgtcttggtgattaaaggttaggacttatcacactaaagtgtaatatttatacaggcatttttctgcttggaatatatcatataagtttcttgctttcatgttacagtttgtagtgcccaagttaccccttatatcagggaagctgtaacttccaaaatcaatgtatccattcaatgattataagaattaataaatttaattaacact

SEQ ID NO: 75800 - DNA, 353 bp, Glycine max
  Clone ID: PAT_MRT3847_39462C.1
ggaattctctcgagtcgaggttgcgtttggactttggagaagaagaaaatggcggagtcgaattacgagtacccaaggctacggcggccggaaatagtcacaatcctagcgcagttgcagatcgcgaacgtgaccgagcaggacttcaccaaccctaaccctgatttcatctccgatctctacactcgcgtcctcattcatctcgacattctcctcgaggaagacaacgagcaactcgagttccacgccctagagcatcttgaaaaccctgatttccacctggattccgttcgcgccgtgaaactctacaaccagatcaacgaggttctcacgacactcgagtgtccgcgcaa

SEQ ID NO: 75801 - DNA, 501 bp, Glycine max
  Clone ID: PAT_MRT3847_39463C.1
ggctcgagcgggtgtccatagagccgggggaaggagagacaggaccatggacatagagcaaagggtacaacgagaattactcgatctttcaacggcactgccgactctagcccaaaaccctatattagatacctaaggggcacatgcggcaatagaggctttgcgtttactgtgaactacgaactgggactcgctacaatagcgtcaccgcttgaagagatcgctgtcgccatccacggtaaccacgtcaagagaccctctttatctctcttgatggtaatatgagtctgctgctcactgtgccagcagtgatgtaaactcggtggtaagctgagcacgcgcgctgttcagattgaagcgttactagtcaaccaaaggtgtggcacagatggccactaaacaatatagagagaccgaggctgacgactaagcaggtcattgatacaactggatgtaaagtatgataaacatgtgacatgagattcagttcacacatggatg

SEQ ID NO: 75802 - DNA, 1500 bp, Glycine max
  Clone ID: PAT_MRT3847_39464C.1
tttaggacactagctacgcttctctctctttccttcccaggcactcttcctaatcctccatggctctatgttttttttcttcttgcgcttctctctctttcattctcagagcttcctgtgtctgtggaatcatcgtatcttctttcgtccgaaacaatccattgtcttgtgtgttttattcacccttccggagtatatcagagaaaatctgatgcatgcgcggttaatgtttccttacacaaaggaattacgtaaaggactagacaggttcaagcttaaccagttacaaacatagcagtcttctggaccccgtagatgtttcttcatcttcagaagttgacaatgaccttcataatgaagatgtgtgtaatgaatgagtcctttatgatcctgtggcaaatgtgcaatctcctgatcctcatacatctttccatatccagtgtgaacatccattgcttccaagaagcaaaccttcacattcagttcctagagttttgaccttcagttggtgctttcactgtccaatgtgcatcctgcttcaaatggaggttgattccaacaaaggaaaaatatgaagaaatacgtgagcatatccttgaacaaccttttgtttgtcaaaaagctcgtgagtggcgacctcatgtatcttgtgatgatccagaggatatttctcaggatggcagcagggtttgggctattgataagccaaacattgcacagcctccggctggatgggagcgactgctaaggatcagagctgaaggaagctccaaatttgcagatatatactatatagcaccatcaggcaagagattgcgttcaatggtagagatccagaagttcttgatggagcatcctgagtatacaagagatggggtaactctttcacagttctcatttcaaataccaaggccattacaagaaaactatgtgaggaagcgacctgctagacttacctcttcatatgaagtcagtgagcctgttgaacatgaacaagtgagtcctctagcatgggtagatccagaagggcatggtcgcagactggggcttcctgcccccccattcatggaatcccatgatattgaccctatcagtatcagccgtccttcaaagaggcaagcaactcataaaggtgccctgtagtaaggaccctcatcaaatcctttcgtgttatgtgcattgtgcagtcagtcagttgcatcttacttacaaatagagaaatagttcgtttatcctttttaatagggcattttaggtgtaatgagcttgcggggaaaagcagtgtagagacggttcacttgtcctcatgaggagatcattatcttggtattcctaataaaaatgtattttgcatctgggagaatcttttgtacaaaaaagggtgcctgtcccaagagaaacatgttagactcaagtaatattctgatatgaaaatatggtcattcagcaagaggctaatttgatcttaactttagcttcttttgaccttttttttttcag

SEQ ID NO: 75803 - DNA, 311 bp, Glycine max
  Clone ID: PAT_MRT3847_39465C.1
gcgtccgcccaccaagggtctacaccgcaaaaataaacaagagcttccaccgtcgacttgcatctcttcaaaacgccaccgtactgctcacaagccaatgccttgctcttccatcacttccaccgccgatgacagcagcagcaacaacaacaacaagaagaaggatggttcttctctccatgacttcaagctgaacgaatcgaccttcttagcttcgctcatgcctaaaaaagagattggcggcaatcgcttcttcgacgctcatcccgaatacgacgggcgcggggctctcattgctatcttcgattctg

SEQ ID NO: 75804 - DNA, 680 bp, Glycine max
  Clone ID: PAT_MRT3847_39466C.1
tacggctgcgagaagacgacagaagggtcatctattgtacgaaagttgattcaatatttgatgagggagactctgccttcctggtttttatcagctaccatgttcgagcaagatggtggagaatctggagttatggttgctaagctcaaaggttatgcactggcattttttgtttttcttagtgcagcatttgcctggggtattgacaattcgtattcaccaaaacaacgggcagaggttgtcggcttgcatttgaaatttcttgcaagcaccctgaacaggaacggagcaatgttttctcgttgtactacttggaaagcctatgtgtcagggttagtgagctcgatggtgggtcaagctccatcatgggttcgggaagtcgatgctgatttgttgaagagactgagctggggattaagtcagatggatgaacacaagttggctcttcgccttttggaaattggaggaataggtgtcatgggtgcagcagctgaaatgataattggatttgaacatagatcttaaatctatctgaactttcaaactattctgtagttagactagaaagattggtcagattgactatcatatctaccaaaatagaagaataatgcaaacaagatctttgcaatgaattggtctacatgcttttttttacatttcaacacacttctctcgac

SEQ ID NO: 75805 - DNA, 283 bp, Glycine max
  Clone ID: PAT_MRT3847_39467C.1
gacctcacccagttgcagaaacaaaagaccatcaaagtttcacttcagccttatccggttcagggtttcggtttttgacccaacctttgacgtggcgaaaccttaagtttccgatcacgtctgagcactctggttggtataacctttggtcttagagagtcatcgttttatgtctgaattacacgatcaaattcctactgccttcgatccttttgctgatgccaatgctgatgactccggtgctgggtcaactgactatgtgcatattcgcgtacaacaacga

SEQ ID NO: 75806 - DNA, 176 bp, Glycine max
  Clone ID: PAT_MRT3847_39468C.1
ggctcgaggactccacatgaaagcacttctgtctttggacggacttaatggctcattaatggaggctatgccgcgcatttgtgctcttttcctctcatcgcattgcccaattcgtccctgcgaacgctgatagtcacacgcatcagctgctagctatccacctctcttgagtactc

SEQ ID NO: 75807 - DNA, 397 bp, Glycine max
  Clone ID: PAT_MRT3847_39469C.1
tttcagtctttcttggaactttgtttttctcacacatgtctcgctcctagccttggctttcaaccattgttgtcttgcttctgcttctgatgcctattaaaataattgtcccactattgttgccaataccaaaactctttaattctaaaagccaccttttttaagggtccattttttatttacaccaactgtgtttctgtttgccaaacctaacttttcacttgaggacactgccttggcttccttctcatatgcttcttcaccaaacattgttaattttaaaaaattaattaacagtgctttcatataatatgatagatctatcatccttctactcgtgttgttaaattacccacttttgttttgataattaaggttacccattctactaatgttt

SEQ ID NO: 75808 - DNA, 456 bp, Glycine max
  Clone ID: PAT_MRT3847_3946C.1
ttttgttacaaagacaagatcaaggtatttcattaatcataacttgaaatatacatgagggtatatgatgaatttctttaagactaacataagccgtgccaacttaaccgaattgataagattctgcataagaatatttttacattgaagaattatagaatcactttttgaaaaatctatatcaaaactggtgatcctatctacaaccaaattgcagtccaattcaaaaatagcattggacatgcccatatccgagagccatcttatagccttaaggagccccatagctttacctttggaaattaaaagttataactattaatttcctaaattcatatttgatgcgtaagtaggtaagccattacttctggtggtttatgtcgcatcactatttttggtgcataaaatcactaaatgtcaattattcataattatcttatttcttattcttatata

SEQ ID NO: 75809 - DNA, 234 bp, Glycine max
  Clone ID: PAT_MRT3847_39470C.1
accgctgctagaatacgacagagggggacagcacaaacaattaataaatatgagtttgaagaacaacatggatggtgctaaaggtgttcttgttgcttcttttgcttgctcgggtaacagctgtacgcatggaactgtgctttatcaaatgtgatcagttatcaagctatgaagacgaagagtactagaaagcatgtcttgatctctgcatgtgcacacgctcaatgcctgctc

SEQ ID NO: 75810 - DNA, 486 bp, Glycine max
  Clone ID: PAT_MRT3847_39471C.1
gttgttacttcctttatttttttcttttttttttttttttttttttttatcccccgaggggggttttattttcatttttcaaacaaaaaattttttataatatcccgggccaaacacaaaaaatttgccaccccgattgggggggggtcccttaaaaaacccacaggccgggggcatcggcgcggagtccccaaattcacaaggcattttggggctcgtgcccttcttgaagggggtttttcctccacataacaactggggtctaaaaaaagacgggggaaaaaaaccccccagaatcttaagaaatttccctccgtttttcctgctaaagggtctctttgggcagcagggggtttttttcctgccactcccttttttttaacttggccttataaaagctggagatttcccccctgtgtgggttggccgccctttttttaaaacaaacccggcagtttttttcccaaccccaaaacctggggcccc

SEQ ID NO: 75811 - DNA, 244 bp, Glycine max
  Clone ID: PAT_MRT3847_39472C.1
acccacgcgtccgggaggatcgaacacgagcctaattgtgtgtcagagcctctcaggatgcttcggggtattccctatcgctgtctacctaagcgcatatcaacttgccgtacgaagggaatcattctgcatagtcataaccctaatcgcatcacaaatcgagctcaatcagagacagatcaaaggtgatgagcctgctacagaacatagcacggtggacagacgtctaacgacggctcagatc

SEQ ID NO: 75812 - DNA, 270 bp, Glycine max
  unsure (1)..(270): unsure at all n locations
  Clone ID: PAT_MRT3847_39473C.1
gagaacataggttgactctattgtggaancctgtcctcaagttatctgggtctgataatctcagtcagagaatatgctgatnnatcataaaggacatagtcaagtgccagagctcattccttgngatgcgtcactattgatagctgaagaggacatcattaagcatgaggagatgcactagcccttcgagggtggctaactgatgtgnctgcatttgagtngagtcctaaagtgttggantgagacatatcatcactngctatagaagag

SEQ ID NO: 75813 - DNA, 448 bp, Glycine max
  Clone ID: PAT_MRT3847_39474C.1
tataaagagtggtttctgggtggatactaaaagatcaggattacctacggctaacaaccaagtgagtactgatggcttccaacttgaagccgaccttgcattcattggataactgctggagcaagagggaaatgacccaagcttctaaccgaacaatatctatctatcgcagataataaaacaggtatgaacattacggacaaatctatgctttaaaagactcgactggaacgtgatagtagaagagatccgcactgaatgtgacacacttcttgaaccttcaccacttgaacataatgttatcttgaaggatttttcatctttattgtcaggtttcaccctgcctgtgccgacttaagatgaccagaccgcttgttactttggctctgtgctaccttcacccattatgtaactttcactctgactatacagaagatctgtgctgaca

SEQ ID NO: 75814 - DNA, 396 bp, Glycine max
  Clone ID: PAT_MRT3847_39475C.1
acaaacctgcatcaacaagggaattctacagtctacttttttttttaatccccttacactggccctcgggcaaaaaaaaaatgaaaaaaaaaactgggccttttttttccccgggggggtaaaagggattcttttttggaaagcgttaaaaaactcctaagagtaattaacctgaacactccccttaatgcctgattgacaaagagggcaattacatccgggggactaccacattgtgcacagacacaaatgcctacttggggaccccaccactttcgatttttttaccccacactgattgcacattcttttgcccaaaacgccgtggctttgttttccgtttccgcttccgccgaaaaccttcttcttcttaaaggggcggctgtctttgttttt

SEQ ID NO: 75815 - DNA, 388 bp, Glycine max
  unsure (1)..(388): unsure at all n locations
  Clone ID: PAT_MRT3847_39476C.1
gccgcccttggggggtgggggtgtttttttttttttttttttagggggcggggcttggcgtttggtgccctttgtggcttccgccgtcccggagagccggcccccgcctgctgcagcccgaagcacctgtacagaaacaattgtcttcagttctccaancngcncctgcggggggggggccctgcccacttttttaagccaaacagacttgttactccaaaattacttgccattaacctatcaaaataccccggaattgtattcctaagtgtgttccttaccctggaatttttcctggattgattcgcgcacctgccctaaaacattggaaaaaaggaatgtttctcgggccactgaatgccctggccagggaagaggggattcatct

SEQ ID NO: 75816 - DNA, 457 bp, Glycine max
  Clone ID: PAT_MRT3847_39477C.1
gtccggattcccgggtcgacccacgcgtccgataacattacggtttgttgtgtatcatgaagaaacttcaatgtgacccgctacttgttgcactcaaggtaagctgaaactctgaattgatatctcaacttgagaaagtctttttgtaccaaaattatcacaagaggggcattcgggttctaaatgtcaattgtggtgggggtgcactgttccctggccctgtagccgtggcctaaatctctcggtgaagaaccatcttactagatggctggtgaactatcattaagtccttggagtatgtctctacaataaaaccatcctgtaatctgagttctagctttactcggggaacactttgtggttcttttggatgatagatataaaggtatgaggttacttctttctaaatcaaataccttcgggacatgttctattagctaatccttttaaggataat

SEQ ID NO: 75817 - DNA, 116 bp, Glycine max
  Clone ID: PAT_MRT3847_39478C.1
ctttccgcgccctattttgcgaccacctccgcttgacgtctctctctatcctcaattcctatccgctcttttttcacgactgtccccttcgggggccttctggtacatggcctccc

SEQ ID NO: 75818 - DNA, 251 bp, Glycine max
  Clone ID: PAT_MRT3847_39479C.1
tgaagggcagctgtctgttgttgattagtatactggacttgatttctaatggatgggtagggtgtggccaggctgtttttagttgattattcacatgtgattatgtctgggctctttctgtttttagttaatggtatatcgcaggctccaattttcaaaattacaagtaggacattgtagtagtgccattttttagctgtagccccagtgtaaaagaatttttatcgttgagattttacatgtttgtttga

SEQ ID NO: 75819 - DNA, 279 bp, Glycine max
  Clone ID: PAT_MRT3847_3947C.1
attatcttgggttcactcattataccccacttacaaaaacagtggaaaaggctgcgacaaacaacaaagccaagtctcggatcttttaaatttgtttgaaattcatatgtgctcattttgggataattttggcgcttcaatcatcaaatttctagaaaggggaccaatttcattgccattttttttttttatgctctagctcaattaattacaattgatttgtgaagtttgtctcgcaccccccccaacaaaaaaaaaaacaaaaccaaaacaaaaaaa

SEQ ID NO: 75820 - DNA, 420 bp, Glycine max
  Clone ID: PAT_MRT3847_39480C.1
attctttgcaggttcattctctgacattacacatcttatatctgtcacagactcataatttgaaatctcatgtactttgttaacttttcacttcctgctggaattgaagtacatcttatagttaggcttcaatgtagggaatctgttaactgaagaactcatgatctattaaccagattctgatcaattgctatgggttaacttggacaataaataaagcttaaatgataaaagcagttgattttatctgaaaacaagattgcattatgataaacatgaacctagtgggatttcccattcctgactgcaattccttttatctaatatgtgcatttacttaaactgagtaatgaactcccagggtggatgctaaattaatcccacctaatatcgcatatacacagtttattttcaagtgta

SEQ ID NO: 75821 - DNA, 187 bp, Glycine max
  Clone ID: PAT_MRT3847_39481C.1
atccactcaacccactattctcctttctagcacaacacaaactttatacacatacgtcatctttcaaaacaggtcaccttatcacatacagacacatcacccaccaactcttcactcctaatatctcacaacataaaaccacaacaacacagaccgtaccaatttcacataaaattcatccttccca

SEQ ID NO: 75822 - DNA, 1998 bp, Glycine max
  Clone ID: PAT_MRT3847_39482C.1
gcatggtgcatgcagcggaacatgtagtagaatagtagagaagagcagcttgttaattgaagcaatctcacaattaatataccttttaattcatctcactcacaaatcacaaagctcttactttcttccttaatgaaaacacaatgatcgtttgtgagctgacggggcgccactgtctgttacagagataacgtcaagagtctctgctaccgcttgaaccatagacatctttcgtcgctcgttacagatgttgcgggttacgctaggtcgccagggagatcccctgtcatctttggtcccaccgatctagtttgttgtagaactctccagggtcatgcgggaaaggtgtactcattggattggacttcagaaaagaatcgaattgttagtgcatcccaagatgggagattgatagtgtggaatgctctaacaagccagaaaacacatgccataaagcttccctgtgcgtgggtcatgacctgtgctttctcaccaactggtcagtctgttgcatgtgggggccttgacagtgtttgctctattttcaatcttaattcccccactgacagggatgggaatctacctgtttcccggatgcttagtggacataaaggttatgtttcctcttgtcagtatgttccagatgaagatactcacttaattactggttctggtgatcagacatgtgttttatgggatattactacaggccttaaaacctctatctttggtggtagagtttcagtctggacatactgcagatgtacttagtatctccattaatggatccaactcaagaatgtttgtatctggttcttgtgatgcaactgctcgattgtcggatactcgtgtggcaagtgcgagcatgtgcggacattgcatgggcattacgagcagtgcagtgatttcaagtgcatgcgggagatgtttatacattcaacatcttcagatgagggaacctgcagattatttgacattaggactggacaccaacttcaagtttattatcagcagcacagtgacaatgacatcactcctgtgacttccattgcatttgatgcttcaggaagacttctttttgctatatacacaaatggagattgctatgtttgggacactttattggcaaaggtggtcttgaacataggatctctccaagactctcatgaggacaggatcagctgcttaggtttgtcagctgatggaagtgccttgtgtacaggaagttgggacacaaacttaaagatatgggcatttggagggcataggaggacaacttaagccattgcgggaaggtcaaattggagacgaattgcgtgctaatttatataacccttcattttagccttgcaactcatgtccgtttgtccatgtgtgtgatcttagtactttttccattgtactacccactccgccaactgtaccattcccttataactatgataattataatacttaaaggtgtgattagctatggagcttcctgaaagtggcccgaactatataaaatgaaaatttgcattcctctttaaaaaaaaaaaaaataccaaactagacaaaaaaaaaatattgagcttcctctttaaaccaaaatgaaggactgtttactttcttgtcacaccaattttatttgaagacattacaacttagtaagatcgacctacttcacctgcctcaaaccgcagtgaagaatgatggagtgacagacaaagggagctaaatgagtttgctgaggtcgtcgagttaaaaagtgaaaaacttaatgttcataaccttataaatagcgaaccagacgatagattttgcttgaaatatttatacatgagaacgacaattacattattgaatcttcttgtggagtttttttttttttggcggtctaggatatttgaagtgaaaaaggatttttggattagtgatgaaaaaaagttgaaggtgaagttatttggaaaaatgaagataaaatataaggcaagaggatgagagccttcattactt

SEQ ID NO: 75823 - DNA, 640 bp, Glycine max
  Clone ID: PAT_MRT3847_39483C.1
cggacgcgtgggtgaacgtggagcacgtgcatatcatcgggatgagcgagtctgcgcacatagcaggcgtcacgggcgagttcatcagcagcggccgtgtggcccgcatcacaggtttggacccatcccgaccatttatcgacatgacgaagaaacgaggtcgcctgtctgttgacgacgcagacctagtagacgtggtgcacacaaacgctggcacactgggcgaacagtctgccgtcggccacatcgacttttatccgaatggcggcaagaaacagcctggctgcgagaacgagtttatagggtcgtgttcgcacgaacgcgcagtcctcttatttgttgaatcgatcaacagccctcatgcatttcaagcttggcgatgtgagaatgaatgggcagctctgcacgaccgctgccaaatcagcgatactcttgctactatgggcgagcaccttagctacagggttaacggttcgtaccttctcaaaactactgggtccagtccgttcgaacgatgaagccgcatcagtttggccaccagaactctgcaatcgtggtgatcattaagactttggaaagacgtttagtttcagaatgaagcactccttaaccaacactcaacagaaagggatataaaaag

SEQ ID NO: 75824 - DNA, 253 bp, Glycine max
  Clone ID: PAT_MRT3847_39484C.1
cacgccctcgcgtttttaagagaccgagaaatccatggggacgccttaaaacgaaaaaagggacaacggcacggacagggcacttatcctgaccaaccattgaacccgaaagaattacacggtccaagcgggcgaatttccaccaggagacggaagattgtcaaggcagagcgatttgaccggccaaacggaacaacgcgggccaacctgtggggagcgcaaccgaattacaccaaaaggacgggccaagaac

SEQ ID NO: 75825 - DNA, 688 bp, Glycine max
  unsure (1)..(688): unsure at all n locations
  Clone ID: PAT_MRT3847_39485C.1
gagaaatgaattcatatacaagcaaatttcttgatatatcatatactaatatgtatattttacaacaacaaaaaaagagagtaagcataaattcataaacacaaacttatttaaagacccaaaaaaaaactaaaagaaaaaacaagccagtttctaagagctctatggctatacacagaagaaaatatggggaagtgaaaatcatttcccctttcttgtttaaccgtcattgctgcattcccatttagaagtagggacacatgttaagtagcgacaccaatggcagtggtcataccctttctcaccccgaaatagcatcaccaatgcagtcgataacctgccattaaataaacaaataaattcagggattttaacatctattcttctttctatttttatcaaagtagagaagtgcatggattcatgacagactataaacttgcaacacaatgcaaggaaaaataaccaataagtccgtacaatatttggtagggagcatacaaagaagtaaaaaacaagcttttcatttgataagaacagcccatggaatatcgaaagattgaattgacgaatacttagacatataccaaatgaantataatatatgaattttatctcctttagcaaaatacttatcaaagtaacaacattccttatgagggattaatgggaagggaactaaccctgc

SEQ ID NO: 75826 - DNA, 348 bp, Glycine max
  unsure (1)..(348): unsure at all n locations
  Clone ID: PAT_MRT3847_39486C.1
gggttggggaattttataaacccggaaccccgggtggccgacctttaaacccggaaccaaaggcattggtacttggttttcaagaatttctcaatttcttcttctttttggggacaattcttaggggaaaaaaatcactctttggctggcacagacttcgtgatcatttcttttcactctagttattgctgaacacttctattgatatggacttcggtagatttaaactttctgttcttctcantctctgttaatttaagttaagctgggaaattttggatagtgccccacttcctatctggataggacttcgtgggagactttttacttctctcttttttcactctc

SEQ ID NO: 75827 - DNA, 263 bp, Glycine max
  Clone ID: PAT_MRT3847_39487C.1
taggtaagagagcatgctctaattttgattttggaaaagcgtaaaaatcaccgagaggccaagctggatttgcttgtgattgatttatgcaacattcattaactatccattggtgctgttgccaaggtctactgtggatactgacgcttgccttactatgtcttatctaacaatgttcaagtcaaaagtttaagagttattgacctgccaccgtatacgatgcattagaacaccttgctgaatagagtataatgattgcccaa

SEQ ID NO: 75828 - DNA, 324 bp, Glycine max
  Clone ID: PAT_MRT3847_39488C.1
agaaaaactagtacaagtgagggtagagcataataatctaggtcccataaagaggatccataattagcagagcctgctgtgactgtgcctggggtggacatacgcgctgcctactccgaatagagcagtggccactactagttatgccacactgaggaaggattgaataccaatgtgttacaaagaacatctaaagcttgtccacatggcattggaagaaaccagacgcaccaatcacttgatccctattggagtactggaaatgttaaattacctgaattgcccagatgttccacgcaggactactctgctatgcctataaag

SEQ ID NO: 75829 - DNA, 316 bp, Glycine max
  Clone ID: PAT_MRT3847_39489C.1
ttatgtcccctgcattagatggtgatgcacttagacctacatacagagtggcacagcaatgttagccctactcacaaagccatttgtctcaagttttagcaacacttttgatgaagtcgacacagaaagcaactgttttggcttaattatcagcattatccgttgctaattggttacaaggatggagataatagcaccagtaccagaaacagcaacaacaacaggcagaaaacgccaccgcgaaggccgcataacccgagggagagacgcagacccggcgccagcaaaacccgaacctgaatcgagaggcgggggg

SEQ ID NO: 75830 - DNA, 987 bp, Glycine max
  Clone ID: PAT_MRT3847_3948C.1
tacggctgcgagaagacgacagaaggggattgtggaagaacaaagcaatggcttcagctaaaaggtggcttccgctcgaagctaatcctgacgtcatgaatcagttcctttgggggcttggacttcgagaggatgaggcagaatgctgtgacgtttatggcttagatgaagagcttctggaaatggttccaaagcccgttcttgccgtgctttttctttatcccataaccacccagagtgaagaagagaggttgcagcaggaaaatgaaaaaaaggaatataacagtagagtctattttatgaagcaaactgtgggtaatgcttgtgggacaattgggctgcttcatgctcttggtaacttgacttctgaagtcaagctcgttgaggggtcgttctttgataacttttttaaatctactgcaagcttggatccattgcagcgtgcaacatttcttgagaatgacaaagaaatggaagtggctcatttggtggcagcaactgctggtgatacagaggcatcagacaatgcaactgcacatttcatatgctttgcttgtgtggatgatgaactttatgagcttgatggaagaaagtcagtgccaatatctcacggtccatcatcaccaagtactttgttaagggatgcagctaaagcaatacagagcatgatccagaaaaatccagactccttcaacttcaatgtcattgccttgtgtaagaaatccgggtagatattgatttaggcttgttggggtcagtgagtatgcttagattttactttcgtaagtcatctaggaagcagagcattttccactccagattaatgctaagcgagttatttccatgatgaacaatgtgaatccatcgtgtgaagcgatatagaatattttttttgccgatgtggatggggacgtcaaacgtcgagtgaaatgcagatagaaaagggtggcaacaggatgagctccagggggtcgcgcaaattgttct

SEQ ID NO: 75831 - DNA, 305 bp, Glycine max
  Clone ID: PAT_MRT3847_39490C.1
aaatgaataccaacgccaaaaaccacaagattgtgggagggacctaaccatcgaaagttgccagccaagataggtcactaggaggcctatctgctgaaaactggcaggagcggcggccggaagaaagtggggaggtcgggctacataatcccccactcacccactggacgtgaaactggaggggacctccgaagtaaatactcgaacatgggtgaccctgtctgagagaactgcctaagcaagatctactcgacgctgtggccgactcataccagtgagttagcttgtgctcccaccaccaatcc

SEQ ID NO: 75832 - DNA, 1809 bp, Glycine max
  unsure (1)..(1809): unsure at all n locations
  Clone ID: PAT_MRT3847_39491C.1
atattttatttgcactactactactactttatttaagcagaagcaggcgagtgaggaagagcgaagagtgaagagaatggctcccaagggtttaacctttctggctgtgttaatatgcgtttcagcactgtcactgagtccttctgttgcgggggaagggcaaaataatggccttgttatgaacttctacaaggaatcatgccctcaggctgaagacatcatcacagaacaagtcaagcttctctacaagcgccacaagaacactgctttctcctggctcaggaacatcttccatgactgtgctgttcagagttgtgatgcttcactgttgctggactccacaagaaggagcttgtctgagaaggaaacagatagaagctttgggttgagaaatttcaggtacattgagaccatcaaagaagctttggaaagagaatgccctggagttgtttcatgtgctgatatcctcgttctctctgccagagatggcattgtttcgctaggaggtccccatatccctcttaagactggaagaagggatggtagaaggagcagagctgatgtggttgagcagttcctcccagaccacaatgagtccatttctgcagttcttgacaagtttggtgccatgggaaattgacacccctggcgtcgttgcactgcttggagcacacagtgttggtcgaacccattgtgtgaagttggtgcaccgtttgtacccagagattgatccagctctgaaccctgaccacgtccctcacattctgaagaagtgccctgatgccattccagaccctaaggcggtgcagtacgtgagaaacgaccgtggcactcccatgattctagacaacaactactacagaaacatattagacagcaagggtctcttgatagtggatcaccaactagccaatgacaagaggaccaagccttatgtgaagaaaatggccaagagccaagactatttcttcaaggagttctctagagccattaccttgctctcagagaacaaccctctcactggcacaaagggtgaggtcagaaagcagtgcaatgttgccaacaagcaccatgatcaggacccttgaattttcctccccttgtctatgatcgaggaagaaaatctgtaatatattatgcaaaaaataattaaggtcttttcctttaaatgggctggttcaatgaaccgagaccactgcaggttcatggggatgggaggattaagaggctatgttttttaatcttccgatgttactgttgtttttttttttaatttcaataaggatattatatatgtagtactatgcaagtagcttagagttgggtagaagggcatgttcatggtgttaattatgttatgtatgcgtgtgagtgctgttatgatggcagtgacaatgcttatgatattcatactcataaagctaggttgttctttctaaataaataaatcatggcccatgggcattatacactgttaaaaaaaaaaaaaaaaaaaaaaaaaaaaaaaaaaaaaaaaaaaaaaaaaaaaaaaaaaaaaaaaaaaaaaaaaaaaaaaaaaaaaaaaaaaaaaaaaaaaaacaaaaaaaagcttgaggggagnagggttaaaataaaataaagtgataatggttgggggggggggggacccgaaaatcccaaaaattaaacaaatttttatgcacttcccccctgtccccctttccccaacttcgggaaaaaagaaaacacgggtggaccaaattcccatttccccccaaatccaccccctttttgaaaatggggaaaaaaaaaaaacacaccgctcaaatc

SEQ ID NO: 75833 - DNA, 295 bp, Glycine max
  Clone ID: PAT_MRT3847_39492C.1
gttcaaataatgaaagaagttcctagtgagagaacgggagcggcgttgttccttctttgctcattgctcattcacatacactattctctctttctcgcaaactctcaaaccctgaaacctttttctatgatgttgtttcgttctaacaccttcactatggtgggacgaagaacctggaaaacaacaccttttttatttatttggtgaaactgagacataaacgtgtttttcctcggagacacacgcatccttccgattacttgaacatatggtttgctcggaatgttccttgttc

SEQ ID NO: 75834 - DNA, 308 bp, Glycine max
  Clone ID: PAT_MRT3847_39493C.1
gtcgttataagatcatagcacgggacaattacgttgctcaatctcgtccgggtctggcatcaatctcaacgatcactgcttactatcaataccgcatccgttcaaaaggtctacatctaagtctacgtcatagtctttatccttaagcatcgagaaaagaacgtacatcacgtcaagaaagtgagacaatcttcaacaccgatcaactttacgaatataccaatgttaccaacaacgtagacatggatcaatatcttaacattaccatgaaaataggatacaacacacctaaaacgccaaatgtcaac

SEQ ID NO: 75835 - DNA, 286 bp, Glycine max
  Clone ID: PAT_MRT3847_39494C.1
cctattatccctaaaagttttatatcaagacacttttcattctcactggtgtacatcttaaatggcaacctggaccaaatattagtggacttctcatcctcaaacttataccatcttcacacttatcatcacacctttatacttcaattacatccaatctgcacccacattctgctccgactatctttacactacacctaacccatcatcttgtatcatacactaccaaatatcactaacgcccatacttgatctttaaccctaacagaccacctttcaactattc

SEQ ID NO: 75836 - DNA, 281 bp, Glycine max
  Clone ID: PAT_MRT3847_39495C.1
ggagagattggatacaagtcgtacaagttgggaaataatatgaactgatgttatataaaggccattgaacgactgtgggctaaatgggggcaccactggactacacaagtgacctgagactgaaacgtcaacctggcttgctgatccagcgcttgagcaccatgccttgcatccacacatctacccttgcaaagagttatgaccagtatagggactccacaatgatgagaatggccgaggaataacctgaaggacatcaatatcatcccaaagaaaaaaga

SEQ ID NO: 75837 - DNA, 350 bp, Glycine max
  Clone ID: PAT_MRT3847_39496C.1
cccaaacccaacttttatttggaggaaagggggaactaaacccacttccccaaacataaaagggggagtaaaaaattccctaatctttccacaggggggccccccgggaaaatttttaaaagggggggattaggcaaaaaaagggggacggggggtttttccccaacaattttgcgggtttccccccccattttttggaggggcggggcctttccccctaaaaaactaggccccccccaaaaaaacacggggggggggctaaaaccccgattccctcccccaaaaaaaagggggcaaccaaatttttggggccctcaagctcctttgcctcccccgggccgggggggccc

SEQ ID NO: 75838 - DNA, 835 bp, Glycine max
  Clone ID: PAT_MRT3847_39497C.1
tttcaatttattcatttttatcattcttttggtaagaaacatttttctttcatcacctttggaagattttggagaaagcatttacaatttccatttgggttcaattgaatcaacatgagcaacagaaaagataatactgatgatgagtctagtgaaagaggtatattttcacatctaggctatccaagtgcaccaccctaccctcctccacatggatacccaccatcaggctatccacctccaggagggtatcccccaacagcctatccaccaccagcatatccgcctcccggagtatatccgcattccggttactatccttccgaatatccacctgcatatccgcctccgggagggtatccacccactacttatcctcattcaggatatcatccaccagcttatcctgccccacatggctatccacctgctgcacctccatatcctgcagggcgtggagctggcatgggaggattgttggcagggggtgttgctgctgctgccgctgcctatggtgctcaccacatggcacatggatatcatcgttttggacacggagcctaccatggtcatggaaagttcaagcacgggaaattcggcaagcgttggaagcatggcaggtttggatttggcaagtataagcatggttggaaaaggtggaagtgataaagagactaatatgttaaaaatgtgattttgagcaaggtcatggagcttttagttatgggatgaataatgtaagcctacaacaacatattgcatgtttgtaatactactttatttatgacttactatcattttacataaagaaatttgtaaggaattttttttttcc

SEQ ID NO: 75839 - DNA, 726 bp, Glycine max
  Clone ID: PAT_MRT3847_39498C.1
caagcattttctttcatcacctttggaagattttggagaaagcatttacaatttccatttgcgttgaaccaacatgagcaacagaaaagacaagaatgatgatgagtctagtgagagaggtatattttcacatctaggatatccaagtgcaccacccccctaccctcctccacatggatacccaccatcaggctatccacctccaggagggtatcccccaacagcctatccgccgctgggaggatatccacattccggttactatccttcagaatatccaccagcatatccgcctccgggagggtatccacccactgcttatcctcattcaggatatcatccaccagcttatcctgccccacatggctatccacctgctgcacctccatatcctggagggcgtggggctggcatgggaggattgttggcagggggtgttgctgctgctgccgctgcctatggtgctcaccatatggctcatggatatcatcgttttggacacggagcctactatggtcatggaaagttcaagcatgggaaatatggcaagcgttggaagcatggcaggtttggatttggcaagcataagcatggttggaaaaggtggaagtgataaagtgttaaatatgtaattttgagcaaggtcatggaggttttagttatgggatgaataatgtatgctacaacaacatattgcatggtttgtaatgactaccttatttatga

SEQ ID NO: 75840 - DNA, 233 bp, Glycine max
  unsure (1)..(233): unsure at all n locations
  Clone ID: PAT_MRT3847_39499C.1
cccaagcgtgcggccccattggacaagcatttactctttactatatgtgncttctgaaggaccagagttgnagatggatgctgattacaaggccccttgctttctgaacaactgctactggccactagacctggttgctgaacttcttggcgagtggaacttgaatgtgagagatgtccattcaggaaagcctcagagttgcagagccgcagcctctgaggaatttcggaagt

SEQ ID NO: 75841 - DNA, 166 bp, Glycine max
  Clone ID: PAT_MRT3847_3949C.1
taaaatggtggccacagttggtattcctgagaatacaggaataccaactgtggccaccatttgaatcattactttaatacgatgactgcgctgcaaatcaacacttgctctagacattgcacactatcagataatttgccaatagaacactacgcagaatagttcc

SEQ ID NO: 75842 - DNA, 1121 bp, Glycine max
  Clone ID: PAT_MRT3847_394C.1
aatggagttaagagaagattggatatagtgattaacgtccgattgatgtggaatgggcgtagagtggttattggtgtgccatggcttggtcactgcggtggtcgttgtctctttcctctgcggtcgatggccaatctttgagggcactttcatccaacgcattcactacttcctcactttcggcgcttacgattacttcctgcgtttcgttggcgctgtttttggccctaagtgtacggatgcggttctctccgtcgaatattactgttgtgatcgtcccaatcctcttctacagatcacatatatcgtgataattggtgtaacgtattatttcattgcgaagtcttgctttgcctatatccctggatactatttaagtggaattcacaggtacacaagcttcttggcagttgtggttggaattctgctctttcttttgaccagcttttctgatccagggacaataaacactgagaatgttgctcactatatttctgcttatccctatgataatattatttattcagagaaagaatgctccacttgcaaaattccaaaacctgctaggtcaaaacactgcagcatttgtgatcgctgtgttgctcgatttgatcatcactgtggatggatgaacaattgcataggggagaaaaacacccggtatttcatggcttttctattgtggcatttccttatatgcttgtatggaacagttgccattgtcttggttcttgctggaagactgagagaattaagagttgttgatattctaaccgtttattatggaatagaaaattcttttctggatttagctcctaatgttgtgcagtggttgttgggatcttacaacactcagatacttcttatggtgttccttgctatcgttgggatgctgttagctggtttcttcggttaccatgcaaagctttgccttaccaacactaccactaatgaggtaccttctacctgtaaccttcaaatgtattaagcaattttgttgtaaatgataaaggagccaggaagtggcaaggaatctttttatcttttttttcatgtgaacaaaaatccccataaatagagagggaccagaatacgatgcatttaaatagttgaattagaga

SEQ ID NO: 75843 - DNA, 2157 bp, Glycine max
  unsure (1)..(2157): unsure at all n locations
  Clone ID: PAT_MRT3847_39500C.1
ccacgcgtccgccgaaagagtcgaaggaggacggagccgtcaaatcaaccagtgttgcttcgcgtcgtgctgctgaaggaagtgttgaaaagcgtgcggcggagtttcctgctcagacctccgctggcggtggttgttccgatgaagatcggctattcatttttctttcatcacctttggaagattttggagaaagcatttacaatttccatttgggttcaattgaatcaacatgagcaacagaaaagataatactgatgatgagtctagtgaaagaggtatattttcacatctaggctatccaagtgcaccaccctaccctcctccacatggatacccaccatcaggctatccacctccaggagggtatcccccaacagcctatccaccaccagcatatccgcctcccggagtatatccgcattccggttactatccttccgaatatccacctgcatatccgcctccgggagggtatccacccactacttatcctcattcaggatatcatccaccagcttatcctgccccacatggctatccacctgctgcacctgcatatgctgcagggcgtggagctggcaggtctcgttctcgagccaaatcggctcgagtacggctgcgagaagacgacagaagggggcatcaattcaaaatatatcatcaattataagcatgggtttgtggaacacaacgaatgcagtgtcttgccgctttcacaagtttggtgatgaccaaaagaatctggtcttccaaggtgatgccacgtcttcttccaggggcatagaactcacaaagttagacggtggaggaaaaccagtgggtggcagtgtggggagagtgttatactcttctccagtgcacctttgggaaagctctacagtggtcgcaagctttgaaaccgacttcaccttttccatctcatcagactctactactccaggtgatggccttgccttcttcattgcaccatttgacactaaaatccctccaaactctggtgggagcaaccttggactcttcccatcagacaatgttgttgctgtcgagtttgacacctaccctaatcgtgataagggggatccagattatagacacattggtatcgatgtcaactctattgtctccaaggcaactgctaggtgggagtggcaaaatggcaaaatagccactgtacatatcagctataactctgcctctaagagactcactgttgctgctttctatcctggcactcaaactgtgacactctcccatgatattgagctcaacaaagtgcttcctgaatgggttagggttggattatctgcttcaactggacagcagaaacaaacaaataccattcactcatggtctttagccttcaacaacagtatcggatgattctggtcattcactttccatcttaataaatctcatctagctatgctatgttgtgttgtgttgtgtgccaataattaaggacaaataaggagactagagtacgtactacctagtccactactgcttaattatgtacgtacgtgtctgttatttcacttttataagtaatgaatatgaatattatgttattaagagtaaaaaaaaaaaaaaaagggagatgtgatgggaggattgttggcagggggtgttgctgctgctgccgctgcctatggtgctcaccacatggcacatggatatcatcgttttgaacacggagcctaccatggccagggaaagttcaagcacgggaaattcggcaagcgttggaagcatggcaggtttggatttggcaagtataagcatggttggaaaaagtggaagtgataaagagactaatatgttaaaaatgtgattttgagcaaggtcatggagctttaggtatagggtgaataatgtaagcctacaacaacaatattgcatgtttggcttctgtatttaaaagaatggaatatttcggtggaatgtgtgtggcttctctattttaaagaatggattgttactattttttcccttcaaagggattaaagttgagacagcagtaatgtatcagttgtaagttttagtgtagaataggacccaactttttacaaaaaaaaaaaaaaannnaaaaaaaaaaaaaaaaaaaaaaaaaaaaaaaaaaaaaaaaaaaaaaaaaaaaaaaaaaaaaaaaaaaaa

SEQ ID NO: 75844 - DNA, 215 bp, Glycine max
  Clone ID: PAT_MRT3847_39501C.1
ggttcccacctcacattccaaaccgacgtcaatggcagcctcatcctgcttctccaccctcttctccttcctcctaccatccaaagccacaccctcctcccaagatgactcgctttccactccagaagctacgtgccaagcattaggaccaggaccaccactcgtcgggggagctgtccgccgtggagaacccagtccacgcgcatgcgagcacg

SEQ ID NO: 75845 - DNA, 1638 bp, Glycine max
  unsure (1)..(1638): unsure at all n locations
  Clone ID: PAT_MRT3847_39502C.1
gtttttctcctacgcattcatttgatttacttaccatagcaaacttcacgctatctttctttctctctcctctgagctgttcattattgcttccgaaattcaactttgatgattgttgggaagaatcctaatttgcgctacctaattcgctgcgaccgtgaaacaaacgaggtttgatttcatgtctggttgttccaatgaggaggaggagatttcgttctcagaatccgatcgtcacggttacgaaggaggcagtgacgatgacgattccgaaatcggaaagaatgaacatcgcagcagcagaagaagaagaatgggtagtggttttggaaaggtggtggtgcaccaattcacgaaagcgaagaagcaagtgcgcaggatcagtagcagaaagagtcttgttccgaaaccaaaaggtaaggtggtgaatgttgaacgtggcgttagtggaaggagtgggtgcaggttttgtttttctcggcccatagtgttggaatcgctttatgaggagtctccaacgagtgatcctaatgaccctaatttcactcatgccatgttgactactttgttggacacgaatgatttctattccaaagaatgcaacccccacttggacttggattagtttatttattaatgttgaagattccttgcgttggtgccttttctgtccaatttcaatttgaaaaatgatgagattgttacagtatggctcaaaaggggcaatgattggattggattggatgttcaattaaaatggtagagttgaagcctgagaggtgggaacagtgaaatgtcaaacccttgtttgtttgcgtttgtattcatttagagtaatgtggttcaagagtttatagacagggaacttgctgcaattcaattattaaggattgaagaattgaaacaggttaatgtggattggaaaaatgaaagggttgcttgatcaacttctgctgttggagcggttggtgaaaactggattttttgtcattctggtattatctccacttgttctcagaggttggagaagtggtgtacaactgtacactgtacatatcaatacataattttttttggactctgctattttcatattctctttccagctgttaaaacttttggtgctttactcgtgcatacaaatttttcattcggctttgtgagaggtcttgagtggttgtaattttggaaagttttctgcatagcgatttaaacacaaattgttcttctcatcattagtttgttctgattcttttgatttttcatgtcctcatatgtgttcgatgatctttggcaatggctcccattcttgagtctgcacatatttggaaaagcatagagacttaggaagcaacgtttttaagtatgttgtaaagctggacaaatttgttggatagtagattggcctgacatatgtttgttgctatatacaagttttttaatacagattatatgtttgtcactaatgcagtgtttgggcaaatttcttttgctgcactgtccctttgtttacttggtttagaggacttctgtgtgtgctgctgctgttcatctcttctagtatggggtgcattctatatgagataggaaacaagaaaaaaagaagaccaagatataaagaagaaaaaaannncagtt

SEQ ID NO: 75846 - DNA, 441 bp, Glycine max
  unsure (1)..(441): unsure at all n locations
  Clone ID: PAT_MRT3847_39503C.1
gtgtggggggtccccttgccttctgcgggtactgctgggggctcttccctcagnggttgggggcggcaacgggtttcatggggttcttctttccgctgtgcctgcgctccctggggggcgggacaagcctgcggtgtctgcgcgtgacagttctctgtttccctactgcgggaggcgcgtcggggggaagaacaggccggtggggtcctggtgcgtaggggggggggggccggccatgtggggaagccaggagggcttaaggcggggtggttgggagggggcgagggtaggcacccgggaggtcgtgggagggctgggtgctgtagcccagtgggggggggccgggggagcgacctgggggaggggcgggccgtgggtggtggcggggggcgggggggggggcggcgggtgggggtgggcgggggggggccgcctggggga

SEQ ID NO: 75847 - DNA, 429 bp, Glycine max
  Clone ID: PAT_MRT3847_39504C.1
gttaagtcagagatactgaggattatgaaggaagcttctcacagtctgaagcagagtttgccactgttagcacggagaagaaagagaaacatttttccttctatgtaattttaactctaatttctttcttttttttagttttatcacttgatagttcttttaatgtatattttttgtatgtatttttaggccgttctacctccagggattgacccttttgtgtttgctagggaatacaacgttcatcctgacataataagcgttcatcctgacataataagcattgggtttgcattcctctattcctcatttgtttttgctattttatcatagaaaaggaactggttataggaaattatcatatagtgaattatcgtgtttattttctagcaaggttatatttgggatgctaattgctcttcccattac

SEQ ID NO: 75848 - DNA, 422 bp, Glycine max
  Clone ID: PAT_MRT3847_39505C.1
tgggtgacggttcatttgttcacccatcgagccaaagcctaacaaatcaatttatttttgcaatatggactaccatcatagaggcaatgggcctccatggccatgaatacacccccagtacaaacacaacctcctaataatacaaacattggtggtatagggagtggaccaacaaatggtgaactaacgcaccattatactctggaacacccagataactgggtaccacacaaaccttataatgtcctctagctccaggacacacatacctgcacatttcatgcctgtcgactccaaagcttaatagacatccattgctaactgaatgaatttgtattaaagtcacaatctctcgctacttacaaaccagaacacttcaaaagcaccccttgctggactaaacattgagctaactaccatta

SEQ ID NO: 75849 - DNA, 461 bp, Glycine max
  Clone ID: PAT_MRT3847_39506C.1
attcaatataactataaatggatgagatcgctctgggcttagagtgattctgagcaactctgagctttttcaaaaggaagagttcatttctcgatgttacgaaatatgctctgctgtaatatcagctgtaacactcaactgataattcgattatcttaaacagacacactcagaatcaaatgaattactggatgacgtaattaaatatgaccggcttgagattgatcccaacattattggctccggaggatcagcttctgttcgggtcgcttattgtaacaacacgctagcaaagtttgcggttaagatatttaacgaaagttttcaggaagaaataattaaagaagtatgttactgatatggttttgtttacataacatttttgacataggtacttatttttttttctagatcaagataacgaaaatagcatctcatcatccaaatatatttcgatttta

SEQ ID NO: 75850 - DNA, 562 bp, Glycine max
  Clone ID: PAT_MRT3847_39507C.1
aagtaggacaacacttatggtacacgaatcatgggagtactttataaaatgtttatgtggtggagaagatgatgcactcatattatgtggctcgggcacaactgcagccatctacaagctgcaataactgatgggaatcactgtgccatctgttttgagggaaagggttttgaacatccttgtttcacaagaaagatgggtggcttttgttggacctcatgagcaccattcaaacctcctttcttggaggcaaagcttggatgatgtggaagagattgttcttgatctcaaaggggtgcttgatattgatgctctaaagatacaacttgatgcctatagagataccaacccacccatgttgggatctttctctgcttgtagcaatgtcactgcaatttactcacatactctagcagttgcccatcttcttcataagtacatagcctatgcatgctttgattgtgcagccaccggtccatacgtggatattgacatgatgtcaggtgagagtgatgggtatgatgctgggttccctgatgcacataagtttcttgagggtcct

SEQ ID NO: 75851 - DNA, 366 bp, Glycine max
  Clone ID: PAT_MRT3847_39508C.1
cgacgaagctcggaattcggccgggaaacaaaactttacccacgcccagcaaaccaccgggggtgataaaggggccgccgccacaccccacgaagagagaccgggcgacgaccaacgccgtacaaggaaacccaaccgcaacaaaacaacggggccaggaaaacggaacaaaaccctagacccaccgacgcagaccaaaccctgacaccgaggacgacgccgacgggcgcactaaggacaccgacgccaaaaaaaacccgccgcccgaagctggaaacgacgctccggtaacagaaatgcagaagaaaaagcgccgcgccgagcgacgcggcatacccgcccgagacggccgagaaagagaaagcg

SEQ ID NO: 75852 - DNA, 279 bp, Glycine max
  Clone ID: PAT_MRT3847_39509C.1
attcaagccgagggatcccaattggtgcttcttaaaatgttaaatgaatcgttgatttaacactggtggaaatgttcaacgaaccgttgttttacaaataacaattccttttttagctacactgactttgttttctacaaatccatttgctgggtctcaaaaggggggttattcaaatagggccaatctcacaatttaaacaataacattttttgttaaatagtttctaagccctcaaattgatgagttgccaaccccaccattccccaatccgcaaag

SEQ ID NO: 75853 - DNA, 167 bp, Glycine max
  Clone ID: PAT_MRT3847_3950C.1
gtgagccacacacacaatccattccctttctgcactacggcaatgaccacccaagcttccgccttcttcgtaaccgttccgtccgtcgcaacccctttccgtctccaccgtaatcccttccttgttctagcccaatcgtaacctatcagataaatccttttaaatta

SEQ ID NO: 75854 - DNA, 248 bp, Glycine max
  Clone ID: PAT_MRT3847_39510C.1
aaaacacaaacctataagacgggggttttaaaaaaagacatcttctgtgacagtgacaaaacactatactaaatgaaaaaagaatagaaaaaaaaaaatcaacaatttgaaagaaaacatatcttataaaaaatgggtgaccataaccatctatcactattttaaaaaacaattatgaagagtgagtaaaatgagtttagaccataaatggataccctgaggtcagagtgcttagagctggttacaaa

SEQ ID NO: 75855 - DNA, 178 bp, Glycine max
  unsure (1)..(178): unsure at all n locations
  Clone ID: PAT_MRT3847_39511C.1
ctccaacagcaaganagancggcggttctagtngcaagtcatggnganngaggaaaagggggcagaaggcattgctnnngtnnnatnanccgangnnaccctgtggacacagacaaaaactggaggatggcnagcagnaagggctcagccacgaggtacagaaggccagaaagaacnt

SEQ ID NO: 75856 - DNA, 851 bp, Glycine max
  Clone ID: PAT_MRT3847_39512C.1
ccgtcgtagctcggacctcggcgtccgctcccttcctcttgcagtttgccggttccattctctctatacccactcacctctcattcgttctggtcaatcaatcattcattcattcctattccttcttctttctcttccaattccaaatcacgatccttcgttttccctctctagaaccttcctttttcctctttccgtgtctgtctgtctgtctctctctcccccatggcttccgatctcgaagcaaaagccaaagaggccttcgtcgaagaccacttcgaactcgccgtggaccttctttctcaggccattcacctcgaacccaacaaagccgaactctacgccgaccgagcccaagccaacatcaaactcaacaacttcactgaggctgttgctgatgctaacaaagcaattgaattgaattcttctctaccaaaagcatatttgcggaaaggtactgcgtgcatgaagcttgaggaatatgagactgctaaggctgctctagaggtgggtgcatcattgtctccagacaactcaaggtttgctactttgatcaaagaatgtgataagctcattgcaggtcttatctacctataaactctattctttctagtagtaaaattctttttatttgatgaaacttatttgtcttttggatttactttcatgttttagaatttgttttatatgtgaccaatgattgtgtcttgactgttggaaggtaaaaatggtggattatgtcatttttggcttggaaactgacatgagcttgatggacatattgtgttgaacagaagaatcttataccatacctattatagaggaaaagaccacaacacaggatgctactc

SEQ ID NO: 75857 - DNA, 578 bp, Glycine max
  Clone ID: PAT_MRT3847_39513C.1
caacttgcctacactgtcttagcttagccattaactgcttcagttttttccacagatcatgaaactgtcacagacattggtgcggacacccttctcaacaacatcaccagcgttactccgcactcaaaattccattttgttctcaaatggaaaaagggtctctgtgttggagtatcaaagcctcaggctcccgagttgcgcctgcagcaactcgggatccgctgttacttcttcttcttctgcggcggccaagaagaatccttcgccgccggcgccgcaggttgttaccaattctggatatgattctgcggtgactcaggagctgccagggaagttggaggccttagaggaaggcattgagaacgcgatttataggtgtcggattatggctattctgggtgtatgtgggtctttaactggatcatctctgtgatctatcacgggctgcacatttgatacagcatcgtttatgcaatattctgtcaaccgcagtagagtaatccagacgctgatagaagctatcgatgtctatcttttaagaactgtgatgctcgacttgtgatggggctctatgagct

SEQ ID NO: 75858 - DNA, 274 bp, Glycine max
  Clone ID: PAT_MRT3847_39514C.1
ttttttttttttttttttttttttgttttttttggttttgtttttttaaaaaacacaaaaaactgttctgacatacatgctataatatatatgtactttacaactattgtaagataaacccgtggttttttattttttacaaggggatgggtttaaaatgtgaatgaagaaccccatgaaacaaatctgttccagggggacaatgaaatgacaactttttttcctagacatgggtttaaacagctgattttccgttcaatcaaaatggggagag

SEQ ID NO: 75859 - DNA, 226 bp, Glycine max
  Clone ID: PAT_MRT3847_39515C.1
ggggcctggccggaacggccgggccgacccacgcgtgcttagcagcgccccaaccacacagcagggggggggataaataaaagacagcggcgctacagccccccagcgaggcaggaaggacgacggggcggacggaccaaagcgggcccagaagagagagccgagggagggaaaaggaccctccgacaaggaacacacagcacagacaggacaaagcaggggggag

SEQ ID NO: 75860 - DNA, 112 bp, Glycine max
  Clone ID: PAT_MRT3847_39516C.1
atttccagcctaaaaacactccattttgcattcgaaagcgcattttattgtgaatagtccgtctctttcatccagttattgatggctcttttgttccagaaattacaagagg

SEQ ID NO: 75861 - DNA, 1095 bp, Glycine max
  Clone ID: PAT_MRT3847_39517C.1
ggctcgagattaaaagaaccaccgctccctcttgattatgtgttgtgccttcattcgctcatacaccaagaataattaatgctttggtgactaacttctccatctactccctttgtgcgtgtccttatacatatactactacttcctcttgaaaacaaaataaatttcgagcaacaaaaagcttctggtcaattcctcatgaattttttttccatctcttcattctacctagtgcttcctcacctttacccctactagccacccgtttataaatctacatgctagggttagggttattcaccaactattcgttaattgtatatagacatagctagtgtgcgctattttattttatatatctccacgaagaatatctatctatctttcccgttttctgggtgaaatgaagaactgaaaggatctatcgatccatcccagattcaaccacacagagaacgagggaattgaattgggttagggttttgggaaagatgaaaaagaggcaggtggtcgtgaagcgagattacgccacgtcatcaccagcggtggggaatattcgatacggggagtgccagaagaatcatgcggcgaacacgggaggttatgctgtggatggctgcagggaattcatggccagtgccggtgaaggaacaaatgcggcgcttacgtgtgcggcttgcggctgccacaggaactttcacaagagggaagtactgcacggcgtaaactgaacgaacaagttctcaacttgtcatatgaattgagtgagttcacacaattacccctctttccaattctgctccttcatatatgattcgtacgaaccacccacaatgaggaataaaaaaaatagaaacacaatatatatatatatatattttgcagagtttgtgtatcaaattagatgattgaattgaaggtttaagtttcttcccatcttgctttttttctctggtgcttgcaattaagtgttgattgccgatacaatagacattgatattgatattgttgtaaaagaaaatatattgaacttatggacttttttagttcttggaatattattcaattgttgttctctcaaaaaaaaaaaaaaaa

SEQ ID NO: 75862 - DNA, 152 bp, Glycine max
  unsure (1)..(152): unsure at all n locations
  Clone ID: PAT_MRT3847_39518C.1
aaaaactatagatatcaatagaaaganatnncacttgccaaagtngcaaacttgcnacattggcaagtgaaatttctgtcnattgatntccantagacangaaattnccacttggccaatgnagcaagtttgcaacttttgccntntgaata

SEQ ID NO: 75863 - DNA, 258 bp, Glycine max
  unsure (1)..(258): unsure at all n locations
  Clone ID: PAT_MRT3847_39519C.1
gcgcgttctacacgtgttgccgatctcggatgtngnanaattagtnnatnatgtgnagctatngagtggcaaatatgtggatgtnggagatttcgggangaatggcctcaaaacgctttntcgtntgtggttattnagncctgnntgatcttgtcatccgacctttgccatgatcaggtgcgcttgcatggcaggtcaaaaantgttaatacnannagtttcatggtttggggnnagntcgcacgggggtnncccggg

SEQ ID NO: 75864 - DNA, 1295 bp, Glycine max
  Clone ID: PAT_MRT3847_3951C.1
gcacgagtgagttacagacggatttttattgaacaacgtatggctttcattgaatttgatgcaaagattgtagaaatggaggccaatctgaagcagcatgagaaatttgccctgcaagcatcattgcactttgataactgtaagaaagaatctgagaattgtagacaggatcttacagattccttgaagtatgctaaatcaattgctcggcttacacctgagctaaagaaggaatttcttgagatgcctactacaattgaggacctggaagcagctatccaagataccacttctgaagccaattcaatcctttttgtcaatcataacatattggaacaatatgaagatcgccaacaacagatagaagatcttgcagcgaaactggaagcagacaaaaaggaatctacacggtgtttggctgaattaaataacattaagggaaaatggcttccaacattgagaaaccttgtggcaaagataaatgaaacattcagttttaatttccaagagatggctgttgctggagaagtttcactagatgaacgtgatatggactttgatcaatttggaatacttataaaagttaaattcagagaaaatggacagcttcaaaatctcagtgctcaccatcaatctggcggggaacgctcagtttcaactattgtttatcttgtttcccttcaagatcttacaaactgcccatttagagtcgttgatgagatcaaccaagggatggacccaataaatgaaaggaagatgttccagcaattagtgagagcagcaagcaagccaaatacaccccagtgtttccttcttaccccgaaattgttaccagatctgcaatatagtgaggcatgcagtatattgaatgtgatgaatggcccttggattgagcaaccctcaaaggtctggactgctggtgatcgatggagtatcatcacgggacttgttggagacacccattgttaaacacctgagttttgccaaccaacattgtttgttttggtgggttctaccaagacttttcctttatgtatatttttgtagtgaagggagaaaaaaaaccgtttacatttgaagtaacttactaccttctcattggttatatatttatagtattgtaaatgtctttccttttttatttatgatgttgtgataattaacacctttgttccccccaagtcgctggcagaatcattaggggtataagcaaacatggattattttggccagttgactatagtttgttcatttgtaggggtgcacgcaatggtatatattctttatagcagatc

SEQ ID NO: 75865 - DNA, 901 bp, Glycine max
  Clone ID: PAT_MRT3847_39520C.1
catcaaaatgcttctggtcaattcctcatgaattatgatcatttttttccatctcttcattctacctatagtgcttcctcacctttacccctactagccacccgtttataaatctacatgctagggttagggttattcaccaactattcgttaattgtatagacatagctagtgtgcgctattttatttactatatatctccacaaagctacctatctatctttcccgttttctgggtatgttttcggtgaaatgaagaactgaaaaaggatccatccaacgatccatcccaggttcagtgctaatcaacaatagaaatcgaaggaattgattagggtttgcggaagatgaaaaagaggcaggtggtggtgaaacgagattacgccacgtcatcaccagcgggggggaatattcgatacggggagtgccagaagaatcatgcggcgaatacgggaggttatgctgtggatggctgcagggaattcatggccagtgcctgtgaaggaacaaatgcggcgcttacgtgtgcggcttgcggctgccacaggaactttcacaagagggaagtactgcacggcgtaaactggaattcggctcgagaacttgtcatgactcttgagtgagttcacacaattaccctctttcttctaattctggtccttcttcattcgtacgaaccacccccagtgagaaagaaaaaatagaaagtttgtctatcaaattagatgattgaattgatgaaggtttaagtttcttcccatcatcttgcctttttctttggtgcttgcaattaagtgttgattgccgatacaatagacattgatattcatgattcttgtaaaagaaaatatattgaacttatggacttttttgttcttggaatattataaaattgttgttc

SEQ ID NO: 75866 - DNA, 265 bp, Glycine max
  Clone ID: PAT_MRT3847_39521C.1
cagcatcgttcatgttcacatgccttgagattttacgctactccacccacttcagattacggcatatgtgcctgggctagactatgtacttgcataatcgtaacgtgtcgttaatgctcgctttactatggccacgtatcacactcagtgaatgctcgattgtacatgaggaggatgccgtaatcatgaactagcttacacttatgatgtactcaatgttgagcctgctctaatgctcatgtgtacaagaagtcattacactatt

SEQ ID NO: 75867 - DNA, 414 bp, Glycine max
  Clone ID: PAT_MRT3847_39522C.1
ggctcgagggcatctcctatattattggcaaagtgctctgactctctatgcagcttggatttatatgtactcggtgtctatatacatctgtttttatgtacttggtctatatatacatttggtgatgattgcccattcaatctgtgtgtgttctctttgcctcatagactgatactttctgctattccccactatgtgcttcatacagtgaatgcacacagtttgaggtatagtgcaccgattgccttacttgacacagaacccttagcctacattatcggctttttctgcctttccaagccttctatgaccatacctctagcgccgtataaatcggcccactaagtgactcatggcctatactatgcagtctgcgaagcgttctacctgtccatgacgcatgcaaacttactg

SEQ ID NO: 75868 - DNA, 2153 bp, Glycine max
  Clone ID: PAT_MRT3847_39523C.1
gcaaaatctgattagccaaaatcgatcaactaatgttgactcctcaaattctagcttggatattcagacgtcaggtgctctttgggacatgatacaattagttggtgagagagctcgtcggaatactgtccttttgatggatagagataatgctgaagtgttctacagtaaggtttcagatcttgaagatctcttttactgcttagatgcagagttagaatatgttataagaccagagcatccattaggaatccagattcagagggcatgcaaactctctactgcatgtgttaccataattaggacatgcttcaactataagaatgagaaccgattatggtatccaccacctgaaggattaacaccttggtattgtcaacctgttgtacggactggtatttggagtgttgcttctgtcctgcttcacttgttaaatgaaatatctggacttgataaaactgcaaaattagatctgtataatcatttagaagccctagctgaagttctattcgaggcatattctggtgctgttacagctaaaaatgagtgcggagaagaacacaaaggtctgttaaatgaatattgggagaggcgagatagccttcttgaatctctctatcaaaaagttaaagattttgaagatactcacaaggattcgattgaaggagctggagagcagaatgaagaggccataatgaaggttacttcacatctgttatcaattgctaacgacatggatgctacaaagttatgtggacaatttgttgtgatgtgaatgactcggaattactgagaaacattatgcatgaaagcctgggacctaatgggggatttagttactatgtctttatgaaactccatgaaagcagacaattttctcaacttttaaggctaggggaagaatttccagaagagctatccattttcctaagggagcatccagatcttctttggcttcatgatttgttccttcaccaattttcttctgcctcagaaacacttcatgcattggctctctcacaaaacttactatctacgtcagttgctgaagaggaaggagaacaggagtatatgaaaatgaaactaaaattgactgacagaaaaaatcttttatttctctctaagattgctgcctttgcagctggtaacgatgctggtactcaagtcaaggtggaccgcattgaggctgatttgaagattctaaaattacaggaggaagtaatgaaacgccatccttccattgaagatagacaacttgttgaagctcagctgcttcatcccgaagacttgattaaattgtgcctggaaggtgaagatcgagaactctcattgtcggcctttgacgtgtttgcatggactagttcctcatttcggaagatccacagaaaacttttggaggattgttggaagaaagctgctagtcaggacgattggagtaaattccatgattcatacagagctgaaggatggagtgaccaggaaatcctgcaaaacttaaaaaatactatacttttccaggcttcaagtaggtgttatggacctcaaagtgaaacatttgaagaagggtttggccaagtattttccttgagacaagaaaacatggagacttctattttgggggatatgggtagttcagttcaaacaatattgatgcagcacaaggattttccagttgcaggcaaacttatgctaatggcaatcatgctaggtagcgagcattgtggtgacatcagaattgaagaagggccttccccaatggaataacgtggccaaggatcattccttaaccgtaatccaagttggtgtaggttttgtacaacatgacatgtggaatatgtagttgttattgttcgctcctctcttccatgcattgcattcacaatcacaacgcaaccctggatgatattggtaaatggtgttggatagaagatatgcagcaagcacaaacacgcaaatattaatagagaaatgcttcctgtatacgaatttggcacaccattccggaaaccttatttgccaaaagaaaaaggttgtgattaatatatatattttaatcaaaaaaatacaaaacaaaaggagcagtgtaagaatggcgcaattaaattgccttgcaaataacattgttgatattgaaataaaaaattaattacacc

SEQ ID NO: 75869 - DNA, 709 bp, Glycine max
  unsure (1)..(709): unsure at all n locations
  Clone ID: PAT_MRT3847_39524C.1
ggcggacgcgtgggcggacgcggctgtttccgttcccactcccactgctactctgccattcaaatatgcaattgattcccaccattcaaagccaaattctctattctcatcctcaccacaaaaactgaacacaacccacctcatattacaagtagctgattctggcaagtggagcaacatggtttcatttttcccaggttttataaccgaaggtagagatgttcagagcctcaaggtggatctctatgaagcaattgcaccacttgaccgaggtgccgaggctactcctgaggaccaacaacgtgtggaccagattgctcgtaaacttgaggctgtgaatcctgttaaggagcctctcaagtctgatttgctcaatgggaaatgggagcttttctatacaacatctcaatcaattctgcaaacacagagaccgaaacttttgaggccaaatggaaagatctatcaggcaattaatgtggataccttaagagctcaaaatatagaaacttggcccttctacgccactgctactgcagtgcctcttaactcaaaaagggtggctgtcaagtttgacttcttcaagattgctagtctgatacctattaaatcacctgngagtggtcgtggtcaattggaaattacttatttggatgaagatctacgaatatcaagaggaaatagaggtaatttgttcatcttgaaaatggtg

SEQ ID NO: 75870 - DNA, 2524 bp, Glycine max
  Clone ID: PAT_MRT3847_39525C.1
gggagggagtggtacacctgccacgtgtgacaatcctctaaacattgacagaggatgaagatatactttgtgctcaatatgttaattgcataaaatatcatattggagtgttagatggaaaatctcttagttggtatggtaaatttaaattacatgatttgatagagcagattggtaaagaaattgtgaggcaggaatcaccaaaagagccagggaagcgcagtagactatggttaccggaagatataattcaagttttagaagtaaacaaggtgtgaaagacttaagtgcttttggttgcaacatgtttatgaatttttccaaccatccagatttccaaatataagagaatagtttgaaaatgaaaaaggaacttcatttgcagtacactgccataaagtttgactgtcaattttttggagttgttcagttaccaagtagcactgtaataataccagaacagagaaatattaatgattttggatttaaagtggaagcaatggctataaaacatgaagatggtatagaaaagtattcaggtacaataataacttcaaaattcatatcattagagatggtaatttttccaacaatcccaaatattttccaaaaagtttgaaaattctagtcatggggaaatatcctgcacattgtttaacaattgaagatcaccccaaaaaaattagcaaatatatgttacttttaagctgaggcaagcttacaaggaacattttcctcatctggagaagtaatacatagtctttagattattcattcagttcttatttcttacgttttcctttctattttttgtaattacagaagtacgtggatctaagaattttaaatttgggcggttcaaatgctttatacagatacctaacgtaactgatctcccatttttgtaggaatgttcatctgaacgttgtctgaaacaaattacagttcacgcttcaatcggttgtctgtgtaagcttaaaatattgagttcttatacaagaaaaaaacttaggagttttccacctatcaagttgacctctcttgaaaaacttgatctttcattttgttacagtcttgagagttttccagaagtattaggaaagatggaaaacataagggaactttatttgttgaaatcctccataaaagaaattccattttcatttcaaaatcttaccggacttccaaaattaccgactatctttttcaagcagtgcaatggttaaggtgccaagtagcattatcatgatgccagaactgactaatacttccgctacgggattgaaagggtggaaatggttaaaacaggaagaggatgaaggtaaaatgggatcaatagtatcttcaaaagtaaaacagcttagcaccttaagttgcaacctggatgatgattttttttcaatagatttcacgtggtttgctcatgtgaaggaattatacatagctgagaataatttcacaatccttcctgaatgcatcaaagaatgtcaatttttaaggttacttgatgtgtgtgattgcaagcatcttcgagaaattagagggattccaccaaacttaaagcatttctttgcaataaactgtaaatcattgacttcctcaagtataagcatgttcctaaatcaggaactgcatgaggcaggaaacactgtgttttgtttgccaggagataggattccagagtggttcaatcagcaaagcaggggggaccttcaatttctttctggtttcgcaataagttccctgacaaggttctttgtcttcttgttgcacctatgcaagaccaaatttttcgtcccatggtgttcatcaatggcaatgaatgttcctcttatagtcaccattacctgataggaatgcaccatgcatatctttctgatctacgagagataaaattcagaaatagtccctatgaggtgcctgtcgaaaatgactggaaccatctgaaggttacaggtccatgtggtttagatacctatatccaccctgtaaaaattggaatccatatattcaaacaggaaaatagcatggaggatgttcaattcactgatccttatagcaagagaaaatcagatgatgatctagaaagtttggaatcacaaaccaccagttgctaaaagaggctaggtttgtggacatggaactttcacaacagtatctgtgcaacagcaacaatgtatagttttatggtcacatctattgagctgggcagtgggcattgtatgatattgtgaagttggattcaaattcaatggagtcaaagtatataaggggcacaattagtgtcaaaggtaaattatcttgtggcttgctacatcacagtaactgattttgattgcccttattattgtgatctgtataaatgtaacaaaagaaaataagtattagaactagagtgcttaattgggaaacatgattcatttttttttcttgaagaataaatttgcttctgttagagaaactgaatgaatatcattagatgtgaattactagtagtaagaaaatactatcataaattttgatt

SEQ ID NO: 75871 - DNA, 386 bp, Glycine max
  Clone ID: PAT_MRT3847_39526C.1
catcaaacacttctggtattttcttttctttttcttctttgtccaaaaagaaatatgacaattcgtttcgttcctcttcaaaataagctctgtttttcaattgccatgccaccaaactgacgttttactagaaggaatagtttcttacttctcatctaactaaaccttgaaacgtgtgattgtccaaccgaactatacacaaattaaggtatgattggtttaggcggaaactaaggtgcataaataaaactctgtaagaaagttatcacgatatgattccaatagttagattttattgattgaaaatcaataaaatttaacgattgtgattgcatcgtaaaaaaaaaaaaaacaattttagaaatttctctttataaaggggcggc

SEQ ID NO: 75872 - DNA, 1398 bp, Glycine max
  Clone ID: PAT_MRT3847_39527C.1
cggtccggaattccccggtcgacccacgcgtccgcggacgcgtgggttcgcgaccgtgactagggctgcggagttgatgttctatttggaagatcctctcaattttgataccttggcggtcgttttcaacaggtcaagtagatttggcaggcttcaaagcattaagtgctctattgcagggaagaatgtttatattagatttacctgtagcacaggtgacgccatggggatgaacatggtttccaaaggggtccagaatgttcttgatttccttcaaagtgatttccctgatatggatgttattggcatctctggaaattactgttcagacaagaaacctgctgcagtaaattggattgagggacgtgggaagtcagtggtttgtgaagcaattatcaaagatgatgtggtgaagaaggtgctgaagaccagtgtggctgctttggtagagcttaacatgctcaaaaaccttgctggttctgctgttgctggtgctcttggtggattcaatgctcatgccagcaacattgtttctgccatttttatagccactggtcaagatccagctcaaaatgttgagagttcccattgcataaccatgatggaagccatcaatgatgggagggaccttcacatttcagtgaccatgccctccattgaggtgggtactgttgggggtggaactcaacttgcatcccaatctgcttgtttgaatttacttggtgtgaagggtgcaagcaaggagtcaccaggatcaaactcaagactcttggccaccattgttgctggatctgttttagcaggagagctgtctctgatgtctgccattgcagcagggcagctagtgaacagccatatgaaatacaacagatcaagcaaagatgtaaccaaaatatcataatcttgaggtcaaggacgtggttgcagtcattaattgtggactccagaataaataaaaaattgagggtaagcgaaatttgggaaggaaaatggagaaacattagattagattgttgtcatccacgtttggctttgcattgctgtctgtgtagatctttaattatttggagagaggaaagaagagttctactccacatgttccctgtccccttctggatccttcctttctttcctgtatacttttcgttgcttgttctgccgagccattgagtgggtgttaacgctcttttttctcctcaaccaagacatttgacgtgttgtattgtaattcttttcccctatataatatgcttagcatatctatcattgtcttttcttgtagccgaatgagttgatgaatgttctcttcatgtccgctagtgcccatcaatttaacttgaccgtgtctttttcattatttactaactcttgtcctatttatacgattttcaatcaatc

SEQ ID NO: 75873 - DNA, 202 bp, Glycine max
  Clone ID: PAT_MRT3847_39528C.1
agtttacagcagcatctgttgacgacgcaaacgggggatactatcttcgaatactttgatcgcattgcaaccatgtctacgagaaaggtcacatagccaaaggaggaaaacgagactcttggcctatctgttagagatggctgcatgtctttggcgtccctagcatatatgcctactttaatgataccttgattaatgtcac

SEQ ID NO: 75874 - DNA, 723 bp, Glycine max
  Clone ID: PAT_MRT3847_39529C.1
atgatgttaatcgatacgcatgtacatttaaatgatgaacaatatgatgaggatttaaatgaagtgatatctcgtgcgagagaagcaggcgtagatagaatgtttgtagtaggttttgatacacctactattgaacgtactatggagctaatagataagtatgactttatctatggtattatcggttggcatcctgttgatgcaatagattgtactgatgaaagattggaatggatagaaagtctttctaaacatcctaaaattattggtattggtgagatggggttagattatcattgggataaatcaccttctgatgtacaaaaagaggtatttaaaaagcaaattgcattagctaaacgtgttcaattacctattattattcataatcgtgaagcgactcaagattgcatagatattttgattgaagaacatgtagaagaagtgggcggaataatgcatagttttagtgcttcacctgaaattgctgatgtcgtgattaataaattgaacttctatgtttcgcttggaggacccgtcactttcaaaaatgcaaaacaaccaaaagaagttgctaaacacgtaccaatggatcgtttgttatgcgagacagatgccccgtatctatccccgcacccttatagaggtaaacgtaatgaaccagaacgtgttactttagtagcacaacaaattgcagatttgcgtggtatgacttatgaagag

SEQ ID NO: 75875 - DNA, 394 bp, Glycine max
  Clone ID: PAT_MRT3847_3952C.1
ctccaagccaaccctatccttttcctcatcaagtttctatttaggctaagatgaaaaagagctcattgacaagaaccaccattaatccttgagcagctccgcaaaaagtgcccattggcagctgctcattttgtgcccaggtgacaatctagtggtttggttttgtcctttgcggaagaagcctgatgctgctatcaagaatgcagtaaatagtgcaatgaaatcagtaagcaaaaatgcagagggaaagccaccctaacatgggcctcagtggattgaagtaaagagtcatgttcaaacaggaaactacgagtgtggatactatgttatgcactggatatggtgcatcgtaagtgccagattgaaggatgaatggattagctgattttctgat

SEQ ID NO: 75876 - DNA, 660 bp, Glycine max
  unsure (1)..(660): unsure at all n locations
  Clone ID: PAT_MRT3847_39530C.1
cgtacgacatcgcccacgcgttacgtaagncttggnattccttctanagacggccgcaccttatttttttatttttttattttttttntttttatgttgatttaccaatcgatataaaaaattgaagttacttccatccaactataaaattaatgtaattgaaatacttctattatatatatatatatatatatatatatatatatatatatatatatatatataaagcttttggcagcacatgatattggccagttgaaaagctacttgaactttactacaataattcacttttcccaaaagcataaaagaagaagaagaagaaagcatgtcatgaactttactactcttgaaaccattttggaaatcttcagtggaaaccctcagatgcttgcttctccattgatgatgtgctcctcaataccaacaaagagtgacatggcataagcttactgaaagcaattggatccagagcaagatgcaaagccgctgatatgaatgtgatttcagtgtttggtcagtagtcttaaagatgactctcttcacgggcaaagatgcaccatgcatgaaagaaacactccactttggatcatagtatcaaaattaccgacacatcatctatttggaagcaaacgatctttcaaaatcactacacttgtc

SEQ ID NO: 75877 - DNA, 333 bp, Glycine max
  Clone ID: PAT_MRT3847_39531C.1
gcgcccttgctggcgtccacgcgtacgagaacatgagggagatgatccttttcttggtggaatttaaaaatatgccactcccatgatgcccctagatgaagaaattctttctaaggttgcacaagacatgggtgaggaatggcttgattgtgttgatgaggaggattcctttgaggaaagaatctttaagtgctatcacttaaaggaggctgaggcgtttggactctattgtcatgaatatcgaccatcacatctgtcgtgatgtcgtgatatgctttcgcacatattggtgaaaaaggcataaggagagttgtttctacggatagtgaacag

SEQ ID NO: 75878 - DNA, 223 bp, Glycine max
  Clone ID: PAT_MRT3847_39532C.1
cgcagtgttactgagcatccttcagtttctaccaccgactccggggaaggcaagatggaacgaaggtgtggactataatgccggctcaacacccatgagagacgtgttgttcgtcgttgcattcatgttgtagctgctcctcactctctcactcgcttcgtggtcatagtctgctagatgcaaggatgagtgcgtcctccatcacgcggcaaaagacgccgtt

SEQ ID NO: 75879 - DNA, 219 bp, Glycine max
  Clone ID: PAT_MRT3847_39533C.1
agctgaccattcgaggcatccttcttcatagcttatgttgcgacatcttgatggaccgctataggatcaggactctttggattgactacactcacttccaattatatgagtagagctgtgtgtaaaaagaacggtacatgattatgaggatcaggaaccaccaaaccactacggcgatttccaggaatccattctttgggggtcgtgggggaacatact

SEQ ID NO: 75880 - DNA, 485 bp, Glycine max
  Clone ID: PAT_MRT3847_39534C.1
caggaaacttggttgctgctcgggagttgtttgatgctatgtcgcagagagatgtgatctcgtggactaatatgatcacaagttactctcaagcaggccagtttacggaggccttgaagcttttcaaggaaatgatggaatctaaggtgaagccggatgaaataacagttgccagtgtgctttctgcatgtgctcataccggttcacttgatgttggggaggctgctcatgactatatacagaaatatgatgtaaaagctgatatttatgttggaaatgccttgatagatatgtattgcagatgtggtgtggttgagaaagcattggaggtgtttaaagagatgaggaagaaagactctgtgtcatggacttcgatcattgcatgccttgcggttaatggctgtgcagattcagcacttgattatttgtcacggatgtggagggaagtgggcagccatctcatggaccctttgttggaattttgc

SEQ ID NO: 75881 - DNA, 280 bp, Glycine max
  Clone ID: PAT_MRT3847_39535C.1
aacacgcgtactgtcaggcgttcgataattgcgaaaaaccaacggggaagtgttgtttgtttcggtccaggctggaccagggaaatgaatagagatgggggggctcgctgtttaagaaaaatgattaaagcgggcgagtgaaacgcaatatctgttgtatagattgacataagtagaatgtatgggacgggtgaactaaaaagaagaattggataaaccatttattctttcaatttaaaaccctaagaaaaaattacaacttttagtaggaaagaaaaat

SEQ ID NO: 75882 - DNA, 141 bp, Glycine max
  Clone ID: PAT_MRT3847_39536C.1
tatgacatcccatgctccctaacctaagcatttggctcgagccttcctttaaacctaagccgttagcctgaatgggtggtgaagaccttttggcaatggccttccaaaggccttcctgccaaggttggttggtaccttcct

SEQ ID NO: 75883 - DNA, 394 bp, Glycine max
  Clone ID: PAT_MRT3847_39537C.1
cacttgaagagtgataaagaagtggctaacctgtggaatgggatgagcaagtccttgagattatcaagggtgccattattggataatgtcattgaagatgttaacaagtattacaatggtagaacgaaggtcaaaatttggaaattcatgaaggtttatgtgttcagttcttggcagtttttgacattcctagctgccatatgcctcttgctcttgatggctttgcaagctttctgctctgtctacacttgtagtcgctttttccgatctgcactaaattcccagtgattgatatgcatgatgtcaactattcacacatggactctatttagtaagtgataacccaaattcacgatgcggtgttggttgctactgaaacgtaccctttgtgatg

SEQ ID NO: 75884 - DNA, 600 bp, Glycine max
  Clone ID: PAT_MRT3847_39538C.1
ccacgcgtccgccgcgtcctttgcccctccctttttaatgcagcgccaatttctctctctctctctctctcattacatctgatctgatctgagtgtaacagcaatggcggggaagcaatccaaagccagaaagccggaggtgttcgggaagggcaaggtcacccctactcagatcgctttcatcgtcgaccgatacctctgcgacaacaacttctcttccactcgatccaccttcagaaacgaagcctcttccctcatctcccattcacccattcatgaggcaccaaagactttgttgacattgggggagatgctggatgagtatatctgcttgaaggagcagaaagtgatgttggatcaggaacgggctgttgtagaacaagagaagaaccgggttcagatgctgttgcaaggcatgcataatgtaatgactgcttacaatgctagtggaaatctccctgcaccagcacctgctgtaaaatctgcagttgtagcagttcctaaaccaacacttggttacaaaatctcaaccaggcaatcctacttctgtgcaaaataaaataaatgcaccgccattgcctcaatctagcaattcaaacg

SEQ ID NO: 75885 - DNA, 192 bp, Glycine max
  Clone ID: PAT_MRT3847_39539C.1
gctgcttgcaccattgtttcatctctcagaggtcagcaaaaagtcgggtgttgaaatatactattcccatcctctactttttgcttacaccatcttattcataccatattcttgtccaaacacacgtgttgcttcccgccaattatgtacatgtactcaaatgctttccttctttctatgttctctatatta

SEQ ID NO: 75886 - DNA, 969 bp, Glycine max
  Clone ID: PAT_MRT3847_3953C.1
gagaaaaaagagtttgatcttaaagtttgcacaacaagtttctaaaactatttttgtaaaaatgaagtaactaactaacttccactaatatatacagttactactcaaaaaaaaggaatgagccttgatttgacctatctaatttacctaagtaaactaattacacaaaacaaagcccaaatttgtaacacaattattcaagtgtagaggttctgactttccagcccaatttgaccctcgaaatggcagaattggcccaaacttatttgtgccaaaattgacgatctttttcaatgagggctctctctctcattctcttcctccattgaagcttcctctctaagcttcttatccaaggcactgtcttggtggtgaagcttctccttccatggtttattctctaggggatgacacctcctctcacttcttctcctttatcttccgttgcaactccatggttgaaaatcaccattgaaagatctcattggagctcaaagataagggatggatttcatccatgtcataaccaaggagcatatactttaaagtcttttacgtcattaatattaagacttagagttttctccttgttccaatggaagagtgagttaaaatctttgatgaaaaaaacaatgataattggcattgaaaacctttgtgcagttaccttcattcttctttaacctgttctcccttgaaaacttcacgcttatgagcttgaggagcaaataaaatcctccctttcgtcaaatgtgttatgtaagtagtatgttatattaagttgaactaaatctcatctggaattgaacattagagaatatccctaaccgacgaaagcatgttcactcccatcaacatttacgaacaagcccaatcaccccgtaagatggtttagaattatattccaactttcaatgtagatttaccatcttgtaatgataataactaatattatattaaagattcttt

SEQ ID NO: 75887 - DNA, 1694 bp, Glycine max
  Clone ID: PAT_MRT3847_39540C.1
gttgcgagttgagaccgggcctttgcattttcttgcgcagcccatacagactctgcgccctgtgctgcgtgtgtgtgtgtgcgagagagagagacaacgaccccagacgcttccactctttctttggcggcggcgtcgttttctctacgctttacccattcattcattcattctcaggttcggggcatttcattctgattcactatggccaatggtccagcaccgttttctgagattgggaaaagggcaaaagaccttttatacaaggattacaacttcgatcacaagtttagcctctcaattccaaactccactggattggggcttatagcaacaggattgaagaaggataaactttttgttggtgacataagtacactctacaagagtggaaatactacagtggatgtgaaagttgatacatactctaatatatatacaaaggtgactgtgaatgatatcttgcatggtacaaaagctgctttgagcttcaacatacctgatcacaagtcaggaaagctggatgtgcagtaccttcatcctcatgcagctgttgattctagtattggtttgaatccatcccctctattggagctttcagctgcaattggcagcaaagatctttgtctgggtgctgaagttggatttaatacaacttctgcttcgttcacaaaatataatgctggagttgccttcaataaaccagatttctctgtggcacttatgctggctgataaaggacagaccctgaaggcatcttacattcattatgttgatcgccctgatggatttacggttgctgctgaaatctcccacaggttttcttccttagagaacagatttactattgggagctcgcagtcaatagatccaaagacagttttaaagactcggttcagtgacgatggcaaagctgccttccaatgccaacgagcatggaggccaaattcacttataaccctgtctgctgaatatgactccacgaagatctttggttcatccaccaagttcggtcttgctctagctctcaagccttaacttggcctgcctattaaatcttatttggcgacttcaacttttaccatcatatcattttacattgtttccaaagcccatggtgggttgtgttaagccctatcatatcataaggtaaaccaaagaaactagtaatatttgtgaaatcttctaaagcggcaccgggaaggaggacccagttttgaaatacttgcataatggctagagggttttgtagctggtttattataccatccaggatctagcatatgattttgggccaaattttattatttgatacagtgactcatgatcaggtggatttgtcgatgcctgatgtctcatttcatatttattttctccctaatatcttctcatatggctccaattttatcgttctatttctccagctccctcgtctccactggggaataatacaccatgacagtgttcggagaactttcctatgattatcctgagcagttgaataattgcaaattagattatatgttttatatttcggcacctggtttgaattgagcaagagtaagtgatatttttttgaggggttaaataaaatgttacctgtttatttattctgtacttacatttgtgtttttaaccttgccagtagaaaaccacaatatggagaaaatggatctgatgttcaacatccaagg

SEQ ID NO: 75888 - DNA, 509 bp, Glycine max
  Clone ID: PAT_MRT3847_39541C.1
gagcgaccttattggtttctggcaaagttgaaaccatcatgggttaggaacagactcacatcatcattgtcgtcattggacatgtagactctagcaagtcaactaccactgggcattcgatctacatgctagcaggtattgacaagcgtgtgatcgataggatggagaaagaggctgttgatatgaacaagaagaacattcacggctgcctgggtgctggacacgctaaaggctgagcgcgaaagaggaattaccattgatattgctttgtgcaagtttgaaccaccaagcactcctgcacagtcatcgatgctcacggacatagggactttatcaataacatgattactggtacctcccagggtgatagtgctgcacctatcattgactccaccactgctggacttgaagctcggataactcaggatagacagacgtgtgagcattctatgacgagctttcaccacttgctgagaagcagataatctgctgcttgaacaagatggatg

SEQ ID NO: 75889 - DNA, 368 bp, Glycine max
  Clone ID: PAT_MRT3847_39542C.1
ggagaccgggcctttgcattttcttgcgcagcccatacagactctgcgccctgtgctgcgtgtgtgtgtgtgcgagagagagagacaacgaccccagacgcttccactctttctttggcggcggcgtcgttttctctacgctttacccattcattcattcattctcagtaagtcccctttactccttctatcatcattgggttcggggcatttcattctgattcactatggccaatggtccagcaccgttttctgagattgggaaaagggcaaaagaccttttatacaaggattacaacttcgatcacaagtttagcctctcaattccaaactccactggattggggcttatagcaacaggattgaag

SEQ ID NO: 75890 - DNA, 230 bp, Glycine max
  unsure (1)..(230): unsure at all n locations
  Clone ID: PAT_MRT3847_39543C.1
cccacgcgtccgaattggtaaccataaccttcctgaacaacctataaacccattttctcaacggcgtggcttaataatatggaaacatcnattccctttggttcggctcacgtattagcactataatttccttacccacagcgtaccaacaatgccccaccaaacacgacttttcttttggccaaccggggtaccttcttttttgggaaaaatacttattcttccaacaa

SEQ ID NO: 75891 - DNA, 511 bp, Glycine max
  Clone ID: PAT_MRT3847_39544C.1
aacactgtcactgagtccttctgttgcggaggaagggcgaaataatggccttgttattaacttctacaaggaatcatgccctcaggctgaagacatcatcacagaacaagtcaaacttctctgcaagcgccacaagaacactgatttctcctgactcaagaacatcttacatgactgtgctgttcagagtagttatgcttaactattgtctgtactacgacagatggagcttgttctgagaatgaaacatatagaagctttgggttgagaaatttcatcgtacattgagaccatcaaagaagctttggtaagagaatgccctggagttgtttcatgtgctgatatccatcgtctctctgccatatatggcattgttttgctaggaagtccccatatccctctttagactggatgaatggatggtataaagagctaatctgatgtggttgagcaggtgcaaccataccactatagatacatttctgctattctagataagttaagtgccatt

SEQ ID NO: 75892 - DNA, 1209 bp, Glycine max
  Clone ID: PAT_MRT3847_39545C.1
ctcagtcacaatggtttcttctaattgctactatcttgcattggtatgctgctgtgttctgctgctgctgaaccccaccgtgggggagcaggacgagcactatcttgcctctcttcttctgctactgctgctcaacccacacaccaccctgggagcgcagaacctcatgctaccctaccataacggcgccctcctcaaaggaaccattaccgttaacctcttatggtacggcagcttcaccccaatccaacgctccataatcctcgacttcattaactcgttaagttccaccgcgggggccccacttccctccgtagcatcgtggtggaagaccacggacaagtacagggggggatccactacaatcgtcctagggaaacaaatcctagaacaaacttattccctcggaaactacctcaacggaacacaactagtctctctctcctcacgcttcgaccacctcaacgccatcaacgtcgttctcacatctagcgacgtaggggttgacggcttctgcaggagccgatgtgggacccacgggtccattactaacgggcagaaggcccgtataccgtatgtttgggttgggaactccgaggcccagtgtccggggcaatgcgcgtggcccttccaccagcccgcttacggcccacaggcaccgccgttaattgcgcctaacggcgacgtcgggcttgacgggatggttataaacgtagccacgcttttggcgggaaccgtgacgaacccgttcaacgaggggttctatcagggtcctcccacggcgccgttggaggccgtttcggcctgcacggggattttcgggagcggggcgtatccgggttatccgggtcgggttctgctggacaagacgacgggggccagctacaatgcgtacggcggcaacgggaggaagtacctcttgccggccatgtgggacccgcagacctccgcatgcaagacgcaggtgtaaacgacttggctcaatgaatcaaagctcttgtttgttgtgcgtgacgtgtaaattcattttctacgtggtcaatgttttaaatattgatataaataaacaatggaatagaatattcttattttcatttttaacttttgaaaaaaaaaaaaattgacctgtacatgtattattatttttgattaagagttgttcgttttgagggtttacaagacgaacgtgtaccaacaatcggaagccag

SEQ ID NO: 75893 - DNA, 1270 bp, Glycine max
  Clone ID: PAT_MRT3847_39546C.1
ccacgcgtccggctaaacgaagaaaatcattccaatacacatggcttccgaaaggcaagcgttaatgcttattctcttaacaacattcttcttcaccataaagccttcacaggccagtactactggtggcataacaatctactggggccaaaacattgacgacggcaccttgacttccacatgcgacactggaaacttcgagattgtcaacctagctttcctcaatgcgtttggttgcggcataactccatcatggaacttcgctggccactgtggggactggaacccttgttccatagtactagaaccccaaatacaatactgccagcagaaaggtgtcaaagtcttcctttccctcggtggtgctattggaacctactccctctgctcacccgagaacgcaaaagaagttgccaattacctttatcaaaacttcctcattggcaaacccggtccagttggaagtgtaacattggaaggcatcgatttcggcattgaagttggttccaacctctattgggacgtccttgtcaaggaactagatgctctcaggcaccaaaacgaccactacttctacttgtccgcagccccacaatgttttatgcctgattaccacctcgacaacgccatcaaaactggtcttttcgatcatgtaaacgttcagttctacaataaccctccatgccaatactcacctggcaatactcaattgctttttgattcatggaacaagtggacttcctatgttcttcccaataactctgttttcttgggactaccagcatctcccgacgctgctccaagtggtggttatataccaccacaggtgctcatttctgaggtgcttccctatgtaaagcaagcttccaactatggaggagttatgctgtgggacaggtaccatgatgttttaaattatcacagcgatcagataaaggattatgttccaaaatatgcaatgcggtttgtgaccgcagtttccgacgctatttatgagagtgtctctgcagctacgcaccgcatcttacagaagaaaccatattagaaatatggggagccgtacgtgcaaactatttatcagctatctatgcatgtgtccgtctctgtaacgtttgtatggaaaaatggaaataagtaacaaattgttattagttgttacctttgtggcatctactccagctttgatttcctagctagttgttatgtaatgtaaccaatataatcgaagcatgttgagaataaaatactccctactcattccaacttcaaa

SEQ ID NO: 75894 - DNA, 458 bp, Glycine max
  Clone ID: PAT_MRT3847_39547C.1
cctaccgattctcgaacaatccccgcgatgatggtaataagttacttgcaagcgaggatcaccgtcaactgtaggaagcccatgggggtcgtgaacaaccttgaacacttccacctccacaactattaagtccgacgcctatagttcattctcttgggggtccacatggctgggggtgctccctcgtccatggcctccgaatccgccatgaattggctatgttccactgcagcggggacctcacacgtgaacttgctgctacggtggaaatttgggaactgatggctgatcccgaagacatgggcgaggtagaccccatctatgttggactgtgacgataacgggcaaaagcctgttctagttatatggaggagaggaggtggcattttcaacaccactatttggcctcagcacaagttttaggatggcagctataatgagatttcttctgggaagct

SEQ ID NO: 75895 - DNA, 261 bp, Glycine max
  Clone ID: PAT_MRT3847_39548C.1
cctaaagaccctcatggctaatagacgttatccactttcaaacatagccagccaatccagaccagccgaaatctagaccaaatcagagaacaaaggatgatgtggaagataagacgaagccttcagcacttgaagttgcaaccttgctcgatcctcatcatgggccacatttttactcatcactctccctctccactcatcaacatgcgaccttcaccctcaagaattctcatggctcgctatccccaaaccaagtcacat

SEQ ID NO: 75896 - DNA, 294 bp, Glycine max
  unsure (1)..(294): unsure at all n locations
  Clone ID: PAT_MRT3847_39549C.1
gactcaccacttcaaaacactcataacacaaagcacaaagcaaagctcatccttgagttaaaaaatggcagcagcttcttccatggctctctcatccccatccttggctggcaaggccgtgaagctgggcccatcagccccagaagtgggaagggtgagcatgaggaagaccgtcaccaagcaggtctcctcanggaagccatggtacggccaanacgagtcaatacttgggccaattcccgggcaagcccccgtctaactaaaccggtaatttccaagccaacaacggttgga

SEQ ID NO: 75897 - DNA, 220 bp, Glycine max
  Clone ID: PAT_MRT3847_3954C.1
tttttacttatttatgaagaaagcttaatgacccgaggggggggcaataacaccggactgataaagaggagttatgaatacataaaaagaaacggggatgggaagacaccactattggatatgatgattaacttaattaaaaaagggggttagatgcaacgcgcgatccctgcagggggaaaacaaacgaagaaatgggcccgtggaactgtgggggcaa

SEQ ID NO: 75898 - DNA, 377 bp, Glycine max
  Clone ID: PAT_MRT3847_39550C.1
ctcaagtggaaaaagaaaacttaccattggcattatttttattaacgttattttacccgtagggaaggtgaatatgttttaacatcgttgtatcttgtatccttctccattcatttggcccaaataatgcaaaattgagaaaaagcttccagctgaatagagagacttgtcccaataaattcactgaaatttgattcacttcctctttgattttgccaggtgaggaaacactgtcagaatgttgtatgccagtagatcttgccgggtcaggatcccaatcacaggagatacccctgaagcttgatactttggcacaacaagcatatggcgaagtcctacttgtctgaagagaaccattgcttttgcaactgacatac

SEQ ID NO: 75899 - DNA, 419 bp, Glycine max
  Clone ID: PAT_MRT3847_39551C.1
tgtcgtccttttttttttttttttttttgtaaattttttatcttttttaaaaaaaacaaagggatttattgaaagagtttacattgccatgccggcatttaattcacgagaccgaaggtttgcttctaacaccacagcccgaccctgacctttattgcgggaacaatggctctgaaatttactcaccttcagttctctcgtttagaaggggatcgactgcttgacgaagctcatgataacaaatccgcggtttttgtgagaaaagtgactgaaccgcgagaaaacaatgatcctatcttcatagccttgacttatgtgaaccgaacctttcttttgacggcaccgaaccagacatgtgtgaaagcccaaattgccacttttctacagcactcactaagtctccgacgaatgacccctat

SEQ ID NO: 75900 - DNA, 474 bp, Glycine max
  Clone ID: PAT_MRT3847_39552C.1
cttccaggaaggtttcccgtcatcactgtatgacgtcctccttctttgggggggggggggggggggctaaaagaaaagaaaaaaaccaaaaagaagtgttgtgtcgggggggtcccacaaggggtcattgagataaccaacaaaacaaaaccaacttagagatgctggggtgattgggggcacaatcatcaagaaagtagtataacgaaggttgggggggtgggtatggtcttaaaaagaggtagggggttcgttaacgcgatggttcggattgggatgcggcgaaaaaggcgtgaatgagtgattagaattgctattgtgttcgtattcgtcgtcggattcatagtggcgttcgttgttgtcacttattcgcgtatcccccaatatgttcttgcgcgtctcaatggttaagtaagtctgccgtatgtctcgcactaagaaggtattatcttgcatatacaatattggtcaaat

SEQ ID NO: 75901 - DNA, 545 bp, Glycine max
  Clone ID: PAT_MRT3847_39553C.1
ggtggttttcgaaaggccaaccatgttccacgcgagtcctggagagccgtgataaacatagtaaggctctaggagaagagacacttggacagattccagactacactcatctaatagtttcagcacgtgtaaccggacctcagcaatcaggctatctcgcagcctcgtggcttgtaaagagaaggaagccagtaaagaatgccctggccatctggaatcgtgtgccacacattggagtcccactgctgcggcagttaaggccgctatcactcgaccgcgagatgattcactccacgaggactgacggagcagaggagtcactgattgcataaactcgatttcatggaagataaagatgaaccagtgcatatggtcaaaatacgcctgtaaagcagcatccataaccgcaggcgggggcattgacatcttctccagcgtccactcaggtcgagggttgggctggggactggcacggccaggaatgcccgagatgtcattagagtagagggtagcgcgcttgccaaagatatttaccgcgaagccac

SEQ ID NO: 75902 - DNA, 382 bp, Glycine max
  Clone ID: PAT_MRT3847_39554C.1
cttccatatttttttgaaatcatattcttttttatcatagcatcgggcatatattattccacggatggatttatgtccacccctacataggacaagttttccctttgcatggaaaacgtcccccgccctcatcctaaagactatacctggctcgccggatgccaccaagggctcctaaataaggggctgtggcaaaaaagatcaatggtcgccggattgccatactggaagtactaagcgaccggtcacaagccttttccacctgcaatgtggagggaatggagggcaagcctttacttcgaccgtaagctacttccgcaacataggattgatgctccgaagaaaaccgttcactcgacaatgccaactttgtatcatggaa

SEQ ID NO: 75903 - DNA, 127 bp, Glycine max
  Clone ID: PAT_MRT3847_39555C.1
ggcaggaggtatcagcgtgatcaggcccaagtgtgatgactcacaacatgaggatgaagaggacgacgcccacgattaaaatgagctgcctcactctcaccctactcaacgaccaagccgtgggagg

SEQ ID NO: 75904 - DNA, 272 bp, Glycine max
  unsure (1)..(272): unsure at all n locations
  Clone ID: PAT_MRT3847_39556C.1
aaacaagaaacaaaagaagaaaaaaaggaaagaacccacaggcgttcctcttcaagggatcccatcacatagctacaaagcagccttgcgtttaacttaggntttaaaaggaagttttgggaccaaccccaaaggggccaagaaaaaaacaccccaanaagggcggggggggcagacaccacaccccacaaaaanagaagnaaaggcgcggaaaagggcccaaccccaaaagggcggaaaaaaaaggggagaccaggaacaaaaaaaagaaa

SEQ ID NO: 75905 - DNA, 341 bp, Glycine max
  Clone ID: PAT_MRT3847_39557C.1
ggaaagaatagttatgcctatgctatttcaaaccttttcattttaaccctgtccctgattggccaataaaaccctttgttatcccgggaacccatgaaatacccttgttaccctttccttacattggagggaaaacaaaattttttaacggagtggggggggcaaagtaacaaaattacaaatctatggggaaattaattatgctgctttcgaggttctcgactagaactctttttggggggcatcattgttggggtccataaaacggtccttgcaatgggatcttttggtgggagcaccctccccataaggggtgtccatataacccacaggtttctttt

SEQ ID NO: 75906 - DNA, 329 bp, Glycine max
  unsure (1)..(329): unsure at all n locations
  Clone ID: PAT_MRT3847_39558C.1
cgtctgagcgtacgtagctcggaattcggctcgagagangccgcgacnccntntatnccnncaagcntagcangttntcncgagattaacgcngcagngnnnaaancctacagnctnacgggnnctctgngatngttctttcgctacacgtcgcttgtcggggatgacggtaaancgcaagtgcgnangngctacctatgnnncncacttgcactctanccaanctnngtccaaattttgcacacaaagcgggcacaactnaagctnggggttnatcnccatgttnggnaatcttaannanttgggaccaaagggggnaaggaaancna

SEQ ID NO: 75907 - DNA, 299 bp, Glycine max
  unsure (1)..(299): unsure at all n locations
  Clone ID: PAT_MRT3847_39559C.1
ctcaagtccancctacccctttttcttctcccaccaacttcaccgtcttcttcctcgatcatgtctcacttgcaagggcaagtaccatgatgancttattatnaatnctgcttacattggcactcctggaaagggtattnttgctggntgatgagtcaacagggacaattgggnangcgtttgnncnggcatcagtgtaggnantgttgaatccaacangcgtgntcttaggnagttgnttttnaccgatccnggggngcgtgaantagctcagggntgntcagccctcttgngggaaa

SEQ ID NO: 75908 - DNA, 226 bp, Glycine max
  Clone ID: PAT_MRT3847_3955C.1
aagagtagtaactaagacaataaaggtagctaatttatgtcgttcaattctccggcggcaccgcagccgattccgcagaaggtactacttacaaggtattctactagtgatgaacaggagcgagcgctgcttgcgaacctatgcgtacagcataagctccgtcgacgggaatccgtcggagcttggggacgacgatggctggaacgccgatgatgacgctgtacga

SEQ ID NO: 75909 - DNA, 601 bp, Glycine max
  Clone ID: PAT_MRT3847_39560C.1
ccctcgcgttcgcttgatgattctgaggaaggtgaaacagatggggggaaggaggattccagtgttaggaagtcattcagttatggaacactggcttctgcaaatgctggggcgagttttcattccaatgcgagagtaaattgtaatgatgaagactgggtttattacagccatcgcaagtctgatgttgggtgttcacagagggaggattctactgcttcttcttctcagccttatttagtacaaagttccaagcgcagcatacttccatggaggaagaggaagttgagtttcagatctcctaaagcttataagggagagccattgttaaagaaggtgtatgcagaagaaggtggtgatgacatagactttgatcgccgtcaacttagctctgatgaatccctttctttgacttggtacaagattgaggatgacacgtctgcacatcgatcatcaatctctgatttcggggatgacaggtttgctgtagggagttgggagcagaagaagtcacgagtcgtgatggtcatatgaagcttcagacacaggtcttctttgcttcattgatcaacgcatgaacgtgcgcaggtgagagtgcatg

SEQ ID NO: 75910 - DNA, 593 bp, Glycine max
  unsure (1)..(593): unsure at all n locations
  Clone ID: PAT_MRT3847_39561C.1
ggcatctggcttgggctgatgcatttgttgtcncagcagattcagttagcatgataagtgaagcttgcagcaccggngaagcctgtgtatattatgggagctgagctttgcagatggaagttcacagaattccacaaatcattgagagaacgaggagttgttcggccttttacagggtctgaggatatatcggaaaattggagttatccaccccttgatgacactgctgatgcagctagacgggttcatgaagcgcttgctgcccgagggtggaaactgaagatatagaacacatttattaattcacatgatactcaatttttcttatgtttatcgtaaaggccgtaaccatttgttgtttggaagatagtttccaaaatttcatgtttctttgatagcacgaatagaacataccgttttgggtgttcgtcattctttctaccatagcaattttcaaggatgtaatgtaatataagtgttggaagattaactgtacgattgcagcttgttaaactgggaggaaattttttacttttttgtgccgattgacacattttaataaatgatgtgaataaaaaatttgtttgtgctgt

SEQ ID NO: 75911 - DNA, 208 bp, Glycine max
  Clone ID: PAT_MRT3847_39562C.1
acgtctacgcgttcgtgcactcgtcctgtttattttccacgaattccaaaatccaataggggtgggctcttggggggaagggggtatccaattctttccaaaaccctaaccttaatactcctaaatgaacgccagttcaagctcacgtggagttcgtttactacggcttacccgtcagacttctccttttcaccacggtttaaggtta

SEQ ID NO: 75912 - DNA, 903 bp, Glycine max
  Clone ID: PAT_MRT3847_39563C.1
ttatatatgacatatgagcttagataaatgttttattaggagaggtgagagaattagatagtaatttaattagtaattaaatctgaatttattttgatgtaaggattgttatttttctctcacctctaataataaaatactcatatcaccttctcccaatatgtatatacatatatatatcataagtgtggatattatagagtgttgaatttaatttgagaaaatatatctgttacaagttgtatcaaggagaagcatagacatgaagaagcgaggatcaggcaggcgtttcctgatgtgggttatggtgatttggctccacgcacatctcagcattgcagctgaactgtccaagtccaatgacacggacactgcttctgagagttctgtgtgcgatggctccgtagaagactgcctcaacaacgtccaccgcttggactcagagcttcttcccaccatctccagctcccacttccgcagaatcctcgctggaggagccaataaagtcgtttttgatacactcaaatctgcagccttcttgtgtacgactatcaatggttatcgtcggtgtggggccagagttcctcccggtggtatacccaaccgatgtgctaataaaggtagctttttaaggaattgccataagattgataggtagtgatcgcgtcggtcaagctattttatgtgttcttatgcttttgcttactccctcctcagccgatgtgctgtgcatgtctccattgttgggcgtgttttcgtttattgcaacaataactcgatctcctatgttggggaagagattatgaacatatgtattcttttctgctttcaactttttgaagccaatgactatatttcctctcttaaggaggagtttcgtaaggatattctttaatctcttat

SEQ ID NO: 75913 - DNA, 172 bp, Glycine max
  Clone ID: PAT_MRT3847_39564C.1
tttgggcaaacaaactcccgagcaaagggagggaaaatactgaacggtacaccgcctacaatgtggaaatacactgcctgggtaaaaaaaatacatttttaaacaaagaaatatctttaaacatggagttatccccggtccaaacaaatctcgtaaaaaaggggcaggggga

SEQ ID NO: 75914 - DNA, 768 bp, Glycine max
  Clone ID: PAT_MRT3847_39565C.1
caggaatgcaaggaaagtgtagtgatggagagagagagcgaaaaggcgaaaccgcacttgatcttcgcgtacggcacgttgaagcgaggctttccgaaccactatctgatggaggagttgaggagcaaagacgacgccgttttgcttggcagctacgtgacgaacgagccttatccgctggtgtgtgggccccacgggatcccatacctgatcaaactacccgggtcggggcatcgcgtgaagggcgaggtctatgccgtgtcggaggaggcggtggttgtgctggacgagttcgaaggcgtgagcgcggggtattacgagcggttagcggtgacggcggcggaggaggagggaggggggaaggtggaggcggaggcgtattggggacacaggagattcggtgaagtgttgtggaagatgaagggggaagttgggttgagggagtatggggagaaagaagcaagagagtatgtgaggaaggaggacagaagcggtggcagaaacactattcttgaccttgttccttaaacctgtgttctgtcgctgctgaattttcatcgcatttaaggaaagtcttcagcctaatattatttgtaatttttcaataaataaatatgtttgttattgtatcctctgggacggatcgtattccgatcattctccggataatacagtttaatctatgcacacctagtgctgaaacctaaagaattcgatgtattcggtccaattcaattaatgttaagtgatttgtgtttaatcacaatt

SEQ ID NO: 75915 - DNA, 132 bp, Glycine max
  Clone ID: PAT_MRT3847_39566C.1
gttaaataaaatagggggggtaaatatcattataaccaattggaccttatcaactccacccgttaataactgggccataacacacaagcagtgaaataactcgggaaaatacgagctcggcaaaatatgggg

SEQ ID NO: 75916 - DNA, 532 bp, Glycine max
  unsure (1)..(532): unsure at all n locations
  Clone ID: PAT_MRT3847_39567C.1
gccttcagaagacaacgtttgtaggcatactcgactaaagttgaaactatggttgttcgtggatcggcgaggaatggcgcagtgtgatgatttggtttccgtcgccgtcttgtgttatgccgttttccttcttcgaaattgtcgtttctgaagaaaatgacagtgcatggactttttgttgacattgttgtgacggttgaggcatccagaattatcactaccaacaaactagtggaatgctgtaacaaactcaggaagattctacaagaacttggagccttcgcgcaattgaaactcaaataaagtcctgcaagtaagtgggcttcttactcactcttcttggcctgttagtagcttctgcaatgtggcntgtgtgggtgttctgttgctgaattgctgtcaacacccaccgctcaaaaaacagaacaccacacagaacaccaaaccacacagaattgctgaattgctatccggcaggtcggaccaattgatacgaaacactattccattctactgctactgctaaggaaag

SEQ ID NO: 75917 - DNA, 261 bp, Glycine max
  Clone ID: PAT_MRT3847_39568C.1
attgatagatgtagtaactcgatcctacagagcgtgtcgtaatatgtgcgcgtctgtgaattcccgcatgtcatatcgtctttcatcttggcgtacgcgtcgttgatgttgcatctgcatctctggaaatgatagactgcgttgcaatctatatcgagaagtccgggattcaggttggtaacgcctgctgagagctttagtgcattgagcactgtagtcagcctgattggcagatgtgaaatgactataccgttggcggag

SEQ ID NO: 75918 - DNA, 347 bp, Glycine max
  Clone ID: PAT_MRT3847_39569C.1
aaaacactcataacacaaagcacaaatctttgcttatactcgagttaaaaaaaggcagcagcttcttccatggctctctcattcccatccttgactggcaaggtcgggaagctgggcccatcagcccaagacgcgggaacggtgagcatgatgaagaccgtcaccaagcacgactactaacgaagcctaagggacgggccaaacccagtcaaggacttgggcccattctatggcgagaccgcgtgctacctaaccggcgtgttcccaggccactacagctgggacactgctgggcttaacacataccctgatacctgcgacaagaaccgtgaactcgaattgaacca

SEQ ID NO: 75919 - DNA, 381 bp, Glycine max
  Clone ID: PAT_MRT3847_3956C.1
gaccagatcacattgctcaaacgccgagccaaccctatccttttcctcatcaagtttctatttaggctaagatgaaaaagagctcattgacaagaaccaccattaatccttgagcagctccgcaaaaaggattgcatcatgtccataagtcagctgaaatggtgtacaactagtagctttggttggagtatttcggcaaacccacaatgcttcttgcaatgttttgtgccatcttttcagatttttctctaaactcttcttgaagatctaccaagatcttgttagtggcttccgcttgttcatttgcttggtgcccattggcagctgctcattttgtgcccaggtgacaatctagtggtttggttttgtcctttgcggaag

SEQ ID NO: 75920 - DNA, 306 bp, Glycine max
  Clone ID: PAT_MRT3847_39570C.1
tttttaacacttagatatatctctataaaaaaaatcatcttgaaaatggtgacggggttgctgagttctccaaacccaaatgcaacaaacataaacttctgtgcctccaatactcttatcatccctgatagaaaaataaacattaactctgacactacccattactgtaatgtgggaaattctgaccaacatgctagcatattgcccgcccagaacatacacaagataatactactacggcgaaataaaaccttaaacttcacaggaaggccacccaatagtctaaaactcaaatacatgtggaaa

SEQ ID NO: 75921 - DNA, 382 bp, Glycine max
  Clone ID: PAT_MRT3847_39571C.1
gtagtgtttaggatctggcggtgtatgatgggatcttgcatatgcgcgttggagactccggcgaggttgctttggaccacaagctttcttccgtcataagcttatgatcttctaatagttactaattcacacacaaacaaaacacttcataacaacaacccttctgaaattctcaacactagtttcgaaaaacagagtaaaacacacagaacaaacacacacatacaagagcaaagacaccttttaagtactaaggtgtctctttctctcgccggaaagtgtctttggcagcggtgattgaccggagtgccatggagtctggacggattttctttgatgccttttgtttttgcgggaacaacatgctctttcttggcaacac

SEQ ID NO: 75922 - DNA, 655 bp, Glycine max
  Clone ID: PAT_MRT3847_39572C.1
ggtttttacacacgaggaaactatatccacaaaccaacttagagagtccaccactgggccttctgatggactgctgatcacatcatcaacttgctggcagcaagaagatgacaaaacaacaattgcctctgctgcatgcctcataagctcatcctgcagcttttcaactgtgtcttgtgggccaagtggtgatactagaggagtttcaagcttcttttcttcaggaatggcatcctcctctgcctcaggaacagcagggacttcaagatctatttctgccttcgtttctaagttggttgctggaatatttgtcacaaatgcttcatcctcattcatacacaagttcagatcaatctgctttctagaggtggcttttgttgcggatgatcctgactcacaaacaataacttgagctacagcttgtttgtcaaactcaggaacagaagcattccaaggcaagttaatatcaagaatatggtgtctctgggtattttgcactagttctacctccaatggatcacgaactgacccttaccaacaggtgaatgaagactactcctttacaaaaagatgaaatatgtcaaacatggtgacccccaaaaatcttccttttactagagctggcaactaacttgctctcctttttgggtcttaa

SEQ ID NO: 75923 - DNA, 528 bp, Glycine max
  Clone ID: PAT_MRT3847_39573C.1
gggaaaaaagggggggggaaaaacccccccccccttttttttttaggaaaatcaacccatgcctgccttcaaaaaaagggctaggctggggttaaaaacccttttaaaaaggaaaaaccttagggaacccaaaagaggcccttgaaaaggggggggggtcaacccgaaaaaaagggtgccaggcccaactgaaggccccaaaacccaaaaaaacccttaacaaaggcaaaaaaccccccttttaaggacaaaggtttggtcaccaacccctttttaacaaaaggggatgttaaaagggttccaagggaaaaattcacaggttccttttcacagggggggccccacccaacaaaaggggcccccccctgggggggcttcacctttgcctttggaggcaacccaattttgaccccccccccaaaaaaaacaggaaaggggggcccctcatatgggaaaaacaaaacccccttaatacccccccaaaccctggggccaaagaccacaatttcaaacccctttaaaagcaaa

SEQ ID NO: 75924 - DNA, 470 bp, Glycine max
  Clone ID: PAT_MRT3847_39574C.1
gttctagatcgcgagcggccgccctttttttttttttttgttatctcttcacttgttaaaggggaataggaaattaattaatgtgattgaatccttatcctgtaggtttttaaaaaaaaaaaaaaaaaaaaaccgaaaaaaaagacaaataaaaaaaaagaaaaaaagaacaaaaaaacaaaaaaaaaaaaaaaaaaaaaaaaaaaaaaaaaaaaaaaaaaaaaaaaaaaaaaaaaaaaaaaaaggggggcccccccaataagaaggttcaacaccctgaaaaaaactcagccccggatcaaaagggcaaccaaaatttcctaaataggactgcttataaacaattgtgcaaaccaggaggaaaaactctcctaaggggaaaaattatttcccataaaattgcccccactgactagaccctgaaccaaaaagcaaaagaccggggtacccaaaggagagacaccacccaa

SEQ ID NO: 75925 - DNA, 141 bp, Glycine max
  Clone ID: PAT_MRT3847_39575C.1
ccttttactttttctcgtttggctgatttgaatcttgattggaaaaggaggtgatagtagactgatacccgtgaagtcaattttaaaccgagccttttttaaaaatcataatcaaccccttttactaccacaaggaaatat

SEQ ID NO: 75926 - DNA, 374 bp, Glycine max
  Clone ID: PAT_MRT3847_39576C.1
atcacttccattattgggggtgcacagccaaacaacaatagtactaccagtactaattataatggcaccacatcgaccaacaccagcaatggcaatattacatcaagcaacaacaaataaaatcaacaattattccaatttctcatggaaattgaactagtcatagttttgttttattgttcacatgttactctattccaatttttcttccctttaatcttttgctagattaatttgatttttccccctgtcaattgagctcaaaatttaagttgagctgaatactgtttttctcttttacatttgttcgactcaggatatattattataagaaggatagttgatattcttttttttataaaaaaaaaaaaaaa

SEQ ID NO: 75927 - DNA, 152 bp, Glycine max
  Clone ID: PAT_MRT3847_39577C.1
acacgcgtacgagtacaggttcattgattatttcacgcacgctatgtcttatgggaagagtggtagatattctcaagggatgaatttgttgacggcttagagcaactagatatgctgacacttcaatttgtctgaataggctaagatttgga

SEQ ID NO: 75928 - DNA, 437 bp, Glycine max
  Clone ID: PAT_MRT3847_39578C.1
cccacgcgtgcggggaattgatctttccaatcgaggtgcgcggtcccaataatggctacgaaatgtacgagatctgagtgggcaaaacaaactctatgggatctgagccttccacatcgacaatcccaaacagtctacatcttaagatattcactgaggcactctcttaagagttggaaagcgctgggtatactttaaagccaccttctttcgctccacaggctgctgtcagatcttcatgaaaaggcggaatcctctgcatgatctgcaatacgtgtatatttcgctaggacgccgtataatgaaataaatgaaaataggcatgaccctctagtgagtatgctctgactatttgagaagatccacacctgctttaattgacaaacgatgcgtgaagcgcgtgattttttaactaaatagtttgaagagacaacaca

SEQ ID NO: 75929 - DNA, 335 bp, Glycine max
  unsure (1)..(335): unsure at all n locations
  Clone ID: PAT_MRT3847_39579C.1
aganaatccgangcgaanagaagagaananttaagatggagncggnangagcaggatgtgtcgctnggngcgnacaagttcccgganagacagccgcttgggacggcnncgcaganccaagacgacggcnangactaccaggagccggcgccgncgccactggtgacccgacggatttacgtcatggtccttttacagagcanggtagcagagtttgtggcacttttcttgtttctatacatcactgtctaaccgtcatgnagtcgccggggctaagctaagtgcagtaccgttggatcaaggaatcgttggncctcggtgcatgnctttcnccc

SEQ ID NO: 75930 - DNA, 269 bp, Glycine max
  Clone ID: PAT_MRT3847_3957C.1
ccacgctcggggtattggactacacacacaggctatagactgttgcaagcagcctagtcacttactggacttggtcaggcctttgctttacatcactggctctaagcattactcactgtagctcaaaggagcacctataaggattagcataacggccacatggagcggaacccatcatcacttgacgatggactgtcaacctgccgatcagacgatggcccatctaaggacgggggccggcacgtcctttgggcccatcggaagcgcct

SEQ ID NO: 75931 - DNA, 389 bp, Glycine max
  Clone ID: PAT_MRT3847_39580C.1
aaaaaaaaaataaaaaataaaaaaaaaaaaaaaaaaaaaaaaaaggaaaaaaaaaaaaaaaaaaaaaaaaaaaaaaaaaaaaaaaaaaaaaaaaaaaaaaaaaaaaaaaaaaaaaaaaaaaaaaaaaaaaaaaaaaataaaaaaaaaaaataaaaaaaaggggggcccccccttttttttggtttcaaccccctatttttttttacgaacaactctctacagacaccccttttcccatttaatggggtatttaaaaatttgcgaaaaataaggaaaatatttttttcctggataaaaaattttcccccactaaaattccaaaaaaatacaatccgtaagctatagagttactcctcgggggcccctataaggtggccaccatcattttt

SEQ ID NO: 75932 - DNA, 449 bp, Glycine max
  Clone ID: PAT_MRT3847_39581C.1
cttaaactccttactacattctccttctcacatgaaatggatacatcctagttcttttttgggatcaataaggacaggctggaaggatccaaaaccaaccccactcaccattattattattattattatcagggcagaaacaaacacaacactaccctctccaataaagtgtatttctgtacacaaaactcttcagtcttaaccaaggtagtagctagcagcagaaaaattaaaattaaaaattaaaaaaattaaagagacttacaaaaagcaaaaaaaaggacgaggattgaattctttcttgccttttctttttccttgcagactctgctaagcatctttggttcctcacttttccattcttttatctgccttcccactccttcttcattcctcttcgaattttctcttcttttttttcaaccaaattatcttggtttgagcttctc

SEQ ID NO: 75933 - DNA, 279 bp, Glycine max
  Clone ID: PAT_MRT3847_39582C.1
atagccgtataaccatttgattggacctctaaaagctcttggtggaagggcataagaaactgtagatgtaacaaacaatacttatagaggatggatactccatgagcttagtgccatccataattacatattcgatggaaaccctcttgagatccgaactgcttctgtttcaacgacagttactccacctaataccagcggatctcatagtcgtcatcattctgcatcaggttcacattgtaaaacacattcttctgctcatgtaaactctaatggcca

SEQ ID NO: 75934 - DNA, 291 bp, Glycine max
  unsure (1)..(291): unsure at all n locations
  Clone ID: PAT_MRT3847_39583C.1
gttgttgtacttggncagtagctgctgctttttcccttgtctccagatacctccgctcctcgatctcattcaccagagagaacagaatgggttgtcaaggtagcaaggagaaaaaatcaaagacagaattttctacttcctatggctcagnagacactggtagtggtggtggtactagttacaacactgttcagcctccgccgccgccaccaccacctactactactgctactactactactcaggcacaaacatcaggagcacccaccccacactcaagttcttctccta

SEQ ID NO: 75935 - DNA, 438 bp, Glycine max
  Clone ID: PAT_MRT3847_39584C.1
agccaagacaattattatgatttgcaatcctttgcaagcatcatatctaccttactttaatgacacaaaaacaaaatgatgaatattgtagctgactaggcctatctgactacctctgttagattaagttctggcatgcaccactatcttaatccaagtatgaccaggcttctgtccctattataacaacccaagctatgcatactccaccagagtgtggttcctcaacaaccatatggttacttcattgccgcactcaccaagtgaaaccacccctgatagtactccaactgttgacatagatggaatcccgagaaaggcacagtcattcaacatcctatttcgcgctcatgaaaaccacccacttgattatccaactgaatgcacagctcctcactactaaatcaggcggggttaccattcttgtacccgatgaca

SEQ ID NO: 75936 - DNA, 259 bp, Glycine max
  Clone ID: PAT_MRT3847_39585C.1
aaaaggggagttttttaaaaaattgatattgtaatttgtgggaagggaaaacccgataaccttttctgttattgatcattatcataaactttacatgtaaaggttttggctgtaaatatgctatacatgtgctacattagagctacataaacgcgatcccattttgctatgacacttaagctgatcttctagttcacctttttgaagacccaattaactttgatactctgccataagcagggttcccactcatttaatg

SEQ ID NO: 75937 - DNA, 1008 bp, Glycine max
  Clone ID: PAT_MRT3847_39586C.1
ccaaactgagtctggaaatgatctggcttccctgcatcaggagaaacaggaattagaacagcagtgtgaaaagatgaagttggaggtggattccatacagaacccaaagagtgaaattgaagaacaaatgagagctaaagaccatgagaactccgaactgagagaggaaattttgggattgcatggaacaattactgcactggagaaaacattagttgagaaagagtcagagttatccactttacaggaaaagcttcacgaaaaagagagtgaggcttcaggccaaataactgccttcacggcccaaattgataatctaaaacatgatttggtgtccctgcagaatgagaaacatgaattagaacagcagtgtgaaaagctgaagatggagctggattccacacacaaccagaagagtgaagttgaagagcaatcgagagctaaaggccatgagaacactgaactaagagaggaaattttgggactacagggaacaattactgcactggagaaaacattagctgagaaagagtcagagttatccactttacaggaaaagcttcatgaaaaagagagcgaggcttcaggccaaataacttccttcactgtccaaattgataatctcaaacatgatttggtgtctgtgcagaatgagaaacatgaattagaacagcagtgtgaaaagctgaagatggagctggattctacaaacaaccggaagggtgaaattgaagagcagctgatagctaaagaccgtgagaacaccaaattgagaggggaaattttgggactgcagggaacaataactgcactggagaaaacattagctgagaaagagtcagagttatccactttgcaggaaaagcttcatgcaaacgagagcaaggcttcaggccaaataactaccttcactgtccaaattgataatctcgagcatgatttggtgtcggtgcagaatgaaaaacatgaattagaacagcagtgtgaaaagctgagaatggagctgga

SEQ ID NO: 75938 - DNA, 248 bp, Glycine max
  unsure (1)..(248): unsure at all n locations
  Clone ID: PAT_MRT3847_39587C.1
tanccataaaaactcaatgtgggatgggggcttttgtgacgtacatcgtcagaaacaatatatgaaaacatttttcccccagaaaaaacataactaaattttttgggtaaatgacccagccgggctctgtggggtggttaaaagccttaaagggacctggcgggctattaaaaaaatgtacgccgcgatgagaaaaacgggtgcggagacctgtgtgtgagaacacacaaacggggggggcatttggc

SEQ ID NO: 75939 - DNA, 334 bp, Glycine max
  Clone ID: PAT_MRT3847_39588C.1
cccggccatttgggtaaaaaattaataaaacccccttgggaaaagggttaaaaggggttccggggccccctgggaaaaaagggcccccctaaaacggtttttaggggttttacaaaggggggaaccgtttccaaaaaattaaaagggggctgggcaaaacccatccccgggaaaggaaggagggggtcccacagcaccccccgggggcaaataaaaggggggagggggggtccccgccccatccccccccagtggacttctattagggaaaccccaaaaaggggggggaaaataaaaatgcccctagttaatttcgggaaaaaaaatggggggg

SEQ ID NO: 75940 - DNA, 247 bp, Glycine max
  Clone ID: PAT_MRT3847_39589C.1
cagtcctggtatttctcagcgcgtatagcatggctttgttagtggagtgaacgacgactggtcgcgagtacacggtcacggaccttacccaggccgacttcggccgcctcgagatagacctggccgacgtttagatgaccggcctcatggcctgtcggtccgagtacggcccctctcagctcttcaaaggggcccgcatcacaggatccctccacatgaacatgcagactgccgttctcatttagac

SEQ ID NO: 75941 - DNA, 1813 bp, Glycine max
  Clone ID: PAT_MRT3847_3958C.1
cgagaagacgacagcagaataccccgccgccgccccgcgccttcacaattagaaaaaaaaaaaaacaaaaaatgggcgtttctcgttctcaaaagcctcatgttgtttgtgtgccattcccagcacaaggccacgtgaacccttttatgcaactaagcaaactccttctttgcaccggtttccacataacctttgtgaacaccgagttcaaccacaagcgtttggtgaagtctcttggacaagaatttgtcaagggacaacctcattttcgatttgagaccataccagatgggttgcctccatctgacaaagatgcaacacaaagcattgcagcattgtgtgatgcaactagaaaacattgttatgagccactcaaagagcttgtgaagaagctcaatgcttcacatgaagtgcctttggttacctctatcatctatgatgggctaatgggctttgcagggaaagtggcaagggatttggacatttctgaacaacaattttggacagcctcagcttgtggtttaatgggatacttgcaatttgatgagcttgtcgaaagaggcattattcccttccaagatgaaagtttcactactgatgggtcattggatacaaatctagactggatatctggaatgaaaaatatgcgaatcagagattgtccaagtttcgtgagaactaccactctagatgaaaccagttttatttgctttggtatagaagcaaaaacctgcatgaaatcatcttcaatcataattaacaccatccaagaattggaaagtgaagttctcaatgcccttatggctcagaacccaaatatatataacattggtccacttcaattgttaggaaggcattttcctgataaagacaagggcttcaaggtgagtgggtcaaatctttggaaaaatgactcaaaatgtatccaatggctagaccaatgggaaccttcctcagtcatatatgtgaattatggaagtattactgtgatgtccgaggatcatttgaaagaatttgcttggggactagcaaatagcaatttaccatttttgtggataaaaaggccagatttggtaatgggtgagtccacacaattgccacaagacttcttagatgaggttaaagatagaggatacataacaagttggtgcccccaagagcaagtgctgtctcatccatcagttggggttttcctaactcattgtggctggaattctacactagaaggtataagtgggggtgtccctatgataggttggcctttctttgctgaacaacaaacaaattgcaggtacatatgcacaacttgggggataggaatggatattaaagatgatgtaaaaagggaggaggtgacaacacttgtgaaagaaatgataaccggagaaagggggaaggaaatgagacaaaagtgtctggagtggaaaaagaaagcaatagaagccactgatatgggaggatcatcatataatgatttccatcgattagtgaaggaggttcttcacaatgatgttgtttgagtctttcaatatattgggggtccgaaggtagggtattaggtgtttcaatattggagatcctagtgttgggctgggctatcaaacaaaatattatgaagaaactagcatgacttgatggctgaaaatcaagtctattaaataaagatttgtgtggatgtaattcatcatatattgtattgatttgaagtgtatgtcggtttacaatatacatgtaaactttcaattcgatgtaattgaggttaaattataattttgatcctctaatttaaaaaattcatgaacatcattcctct

SEQ ID NO: 75942 - DNA, 349 bp, Glycine max
  Clone ID: PAT_MRT3847_39590C.1
gaccgtcgcgagtctccatcttcttcatgggcctgcgccacccttacgatgcctgagttgcgttccgggccagacatattgcgccctgtctagagggtaaacggcagtccgacaagtcagccaggctcggcgtcggtcgcctgaacctgtcaaaggaggctagccgtcgtcgccgtcacgaccgggatgaatcatacgctgaagtacgcgattgccgtcacgatcgatcagatcctgaacgctgtagagtaaagtcgtaccgttcgtggaagcacttcgatgaaactgaatcaggatcacggattgatggagaatcttgggaatcagagggtttcagttagggttttgg

SEQ ID NO: 75943 - DNA, 606 bp, Glycine max
  Clone ID: PAT_MRT3847_39591C.1
tccgggacaacacatagataagaagacagaaagatccaacactcactcttccaacttccactctctctctttccgaccaaaatgtcgatcaacagcgaatctacgccgccaccggtgatcggaaaaatcgggccttacaccgtcttcatgacgccgccgtctacacccaaacccgccgacgacaaccccgttaccaccaccaagatcgcacctccgccgcctcagattcccaaagccgttccttcccccaaacccaaacctctctccgattccgacgattccgttttcggcttcttcagaaacgccgttgccaaggtccaaaccggaaaaaggagacattaaagtgaaagaaatatcgagcaaagtacaaagtgtttgacttgcctagagttggtggattatccaaaagtgaggtgtgaagactcctgctttgagtatatttatacctttgtatttatgtggagtagaatgaatgcatctgatatgtcaaagttatttgatctacatccattgatatgattcaatggttattttccaactcctgccagttgagtctcactggacagtctctacctgtaatctaattaccaagttattttcagggcg

SEQ ID NO: 75944 - DNA, 879 bp, Glycine max
  Clone ID: PAT_MRT3847_39592C.1
ccacgcgtccgggaagcgtccggtgaagtagtacacaacacatagagataggaagacaaaacattctctctccgaacaaaatgtcgattaacagcgaatctacgccgccaccgctgatcggaaaaatcgggccttacaccgtcttcatgacgccgccgtctacacccaaaccctccgacgaccaccccgtcaccaccaagatcgcacctccgccgcctcagattcccaaagccgttccttcccccaaacccgtctccgaccccgacgattccgtcttcggcttcttcagaaatgccgttaccaaggtccaaaccgcacactcaagtttggatgatcatttggcacgttggtttgggttgaatcagtcaaagtatcaatgggctcttgacgattattatgagagcaagggaatggaaaaaggagacattaaagtgaaagaaatatcgagcaaagtacagagtgtttgacttgcctagagttggtggattattcaaaagtgaggtgtgaagactcctgctttgagtatatttatacctttgtatttacatgtggagtagaatgtacgcgtctgatatgtcaaagttatttgatctaaatccattgatatgattcaatggttattttccaactcctgccagttgagtctgattggacagtctctacctgtaatctaattaccaagttattttctggggcaaatgttttgtttttgtattgtagtttgggtcaagtttttgggcttctcatgatggctgggttgtctcctaagtattttgtttgtaatcttgggggtaaagtctgcaaaaaccctatgcaaattatttcaagcgatagtgattagttattgaaaaaaaaaaaaaaaaaaactcagactagttc

SEQ ID NO: 75945 - DNA, 830 bp, Glycine max
  unsure (1)..(830): unsure at all n locations
  Clone ID: PAT_MRT3847_39593C.1
acggctgcgagaagacgacagaaggggaacacatagataagaagacagaaagatccaacactcactcttccaacttccactctctctctttccgaccaaaatgtcgatcaacagcgaatctacgccgccaccggtgatcggaaaaatcgggccttacaccgtcttcatgacgccgccgtctacacccaaacccgccgacgacaaccccgttaccaccaccaagatcgcacctccgccgcctcagattcccaaagccgttccttcccccaaacccaaacctctctccgattccgacgattccgttttcggcttcttcagaaacgccgttgccaaggtccaaaccgcccactcaagtttggatgatcatttggcacgttggtttggattgaatcagtcaaagtatcaatgggctcttgatgattattatgagagcaagggagtggaaaaaggagacattaaagtgaaagaaatatcgagcaaagtacaaagtgtttgacttgcctagagttggtggattattcaaaagtgaggtgtgaagactcctgctttgagtatatttatacctttgtatttatgtggagtagaatgaatgcatctgatatgtcaaagttatttgatctacatccattgatatgattcaatggttattttccaactcctgccagttgagtctcactggacagtctctacctgtaatctaattaccaagttattttcaggggcaaatgttttgtttttgtattggagtttgggtcaagtttttgggcttctcatgatggcagggggtgtctnctaagtattttgtttggtatcttgggggtaaagtctgc

SEQ ID NO: 75946 - DNA, 163 bp, Glycine max
  Clone ID: PAT_MRT3847_39594C.1
attttgattctatcctatcccctcttttttttaaaccaacctaacttccattaggggcgtttttcaccaacgggggacccccaaccaaatattgctaaccccctcatgcacgttaaactcccacatctttccattcaagcactatccaaaaaatattgacccc

SEQ ID NO: 75947 - DNA, 489 bp, Glycine max
  Clone ID: PAT_MRT3847_39595C.1
cataagctaatttagtttcttaccttggagtaatactgtttggtacaaaagaaattaaatcaaaagacatagaactcaatctcgtgatttccattaaacacgtgagtttacttttacttctttaactttcaaataataaataaaaaagtgtacacataacctcttgtagaatttgcactattatttttcgttctaaatagacctatgattgtcaaattcagacactaaattggatgatttaaagaactaagttgaccaatgtatcaatttgaaggattaaaataaagttagggacttttcttaatgttaatgattaagagtatgtttgatttgtcattgagtgacctcaaacgtccgtttagttgtagctctctctcatatatttctgtgtttggtttgttattgagtgacctcaaatgtccgtgtaattgtagctctctttcatatacttgtcctttcaacggtcttggaacgtgtgctgttaataaa

SEQ ID NO: 75948 - DNA, 193 bp, Glycine max
  Clone ID: PAT_MRT3847_39596C.1
atttaatgtgaaaaacatataagagcataaaatactttctccttttagttccttaatcattactctaacaacattgattagcaagacctaaaggagaaagtatttaatgtgaaaaacatataagagcataaaaaaaaagttatggacaacataattttatgcatttcaataaaatttctccttttagtttttt

SEQ ID NO: 75949 - DNA, 629 bp, Glycine max
  Clone ID: PAT_MRT3847_39597C.1
cgactgtagcatcaaagctgttagtgaaatcagcgaccacactcggaccatgcaagcagatcgcgatatctacaacgggcatgatcatggcggtgggcctactccgactcaacagcaataagctgtgataacgtcaagccgccaacaaggaggcgctaatgagcaaaattattcaaatcaccccatgcaccgattggtattacgcttacattgataaagacgatggagattggttcgttagccccattgctgcctgggcgcttaccgataccggagaggtccttgggcttctccctgccagctacgcaggtgacccagcaaaagataaaaatcctcatttggttcctgtaccaaatgcagttgttggacactttgtccacgaatccaagttatccgagcggcagaaaactgcggcggcaaggcgcccccacttctaaaatcttaaaccgccctgaaacccacttcgcgcgcgcaggtctgcaccatgcattcccatggacgcaggcataaacccaaccactggcgacttgacgggccagcgtatcagtacgctggcgaacgccggctacatgcggctgatgactgctgtgcggacctggtgggctgacgactgtgtggggtgacgcctg

SEQ ID NO: 75950 - DNA, 334 bp, Glycine max
  Clone ID: PAT_MRT3847_39598C.1
ctaaaagcaccaatgcacctctaaaataacctggatgtaacaagcttcccgctttgccaaggaaccggggtttcattaataactttaataaagaaggtttccaggcaaaaataaagggttttccttccatatccttttttccaagttacataaaaaggaaagattcggggaatctaataggttttcttcatcaggtcaaaattctttttcagccctcaggcaaaaaaaatttaattcttttctatcgggggcctacccaataaaaggaggaggatcttttttaaactcccagtttctgcgcccacaactgacatgggctttgaatttctccaaa

SEQ ID NO: 75951 - DNA, 476 bp, Glycine max
  Clone ID: PAT_MRT3847_39599C.1
tcttttttttttttttattttttttttctttttcttttgttttttccttaccctttttcaatattcatgtttcgatcctaattaccttttctctccttttcgggggcaaaaaagacccaccccccggaatttttaaactctcctcctcccaggtggggggggttttttttaaaaaaaagaggcccaacacacgctccttttgtggggcgagagccccccccatctcttgggcccgccggtacctaatactctcttttggcgcgccccgaaaaaggacaaatctgctgagatcattttctcccagtccggagacccccccaatttttttgtgaaaagggttctcaactactcctgacaagggggtcgctcttgtggcaaccaaaaaaaaggcttctggactacaccacgtggtatagacagcgcaccccccccacgggggaaaaaaacggctttccccacaaacgtgcaaaaaagac

SEQ ID NO: 75952 - DNA, 231 bp, Glycine max
  Clone ID: PAT_MRT3847_3959C.1
ttgggggaaaacaatctctaaattaaacctgaacccgaagccaatataggcttagtccgacttctcaaatgaacatttggtttagttaaccacttagtacatgatccgggcaaaggggggcgggcaaaaatgcctatttataggaaaaaagacccaagaaaactcgggggatggcgggggcaaacccaagaatgggcaggtccctttccccgcagaactgaaagaaaagac

SEQ ID NO: 75953 - DNA, 227 bp, Glycine max
  unsure (1)..(227): unsure at all n locations
  Clone ID: PAT_MRT3847_395C.1
cgaganngcagtcacgcncnanaatggtgnngtttcttaaancgngcaaagccgncatcgnacctttatggacgntnncgccgtcaaaanagncgttgatagtgcgaancttcnatgaaggnacgcgcganngcccctagngggcacttnttggtggcaggggtnaatnagctacccggcgaaggtgatcnagaaggatttcggccaagaagacggccaagcnagtt

SEQ ID NO: 75954 - DNA, 462 bp, Glycine max
  Clone ID: PAT_MRT3847_39600C.1
gtaagctcggatttcggctcgagcagaagactagttcttatcaaagactgaagacgagctttcccttgcgcctaatggccaccgatggttgaatccactatgtacgcagtgactgctgcatatgtggttccacctgcggacactatcgactgagttgccattcctcatgattcctgacactgtgcgatcattgagctgatcatctcattcatgaccagtatatctgcctctgcacacgcatggcctgacctcgtcataggacctggctctaccatcttcatcaaatgtgtgattgataatggtaatgggagcaatgtgaattatgatctggacaataagtctgcgctatccaagatcggccctctgctttactcaatcggatgtgatcatcacagctatgggtttatccatcgtgctatatgggatgactgcgatcctctggatgacgctgctattatgcat

SEQ ID NO: 75955 - DNA, 993 bp, Glycine max
  Clone ID: PAT_MRT3847_39601C.1
acgaggttctgcggcgtttattctcaaaacctccgagggaagcgaacaaattcggggctttcatcaattacacccttcattcgcttcattccacccttcacctgaaaaaaaaaaaaaaaacaaacaaacaaacaaaaaggagtgcaaaccatgggcgatgcaattgatttgtccggcgacggaggagtcattaagaccattgtcagaaaaagcaaagccgatgctgttggtccaacagaaaattttcctcttgttgatgttcattatgaaggcacacttgctgatactggtgaagtttttgacactacacatgaagataacaccatcttctctttcgagattggaaagggcagtgttatcaaggcttgggaaattgctgtgaaaaccatgaaggttggagaagttgcaaaaataacttgcaagccagaatatgcatatggcagtgcaggatctcctccagatattcctccagacgcacaacttgtttttgaagttgagcttgttgcttgtcggccaaggaagggctccagtttgggaagtgtttcagaggagagggctaggcttgatgagctgaagaagcagagagagctagctgctgctgccaaagaggaagagaagaagaagagagaagaagcaaaagcagtggctgccgcacgtgtgcaagccaagttagaagccaaaaaaggtcaaggaaagggtaaaggtaaagcaaagtaggaagttatcaaacatctatatgagtttggtatatgatgacaatcaaatagttatgtgttatacactattcagtatctcactacttcccctttggcccatccaaaaccttatataaatgaaatgctgctttggctagatgcttttgtctaattatatggacaccatatttcgtcccttctgaatgtagctagctgatatatacaagcaattctgtaataataagcgttggatacgtaataaagttgatgggaatgatgagttccctatgtcaatttc

SEQ ID NO: 75956 - DNA, 119 bp, Glycine max
  Clone ID: PAT_MRT3847_39602C.1
cagcaaaaaaaaaggggatggggttttactaggcctgaagttctacttccaacttttcgcaagaatttaatatttttttgcaacataacccatattaaatgggtggccaatttcggttg

SEQ ID NO: 75957 - DNA, 192 bp, Glycine max
  Clone ID: PAT_MRT3847_39603C.1
gccgtcctttttttttttgtttttttttttggaacacacatgcgaatttaccttcatgcaccacccaagctctaatatttaccaatagggactggtgggagaaaaccctttaaaagtacaagccgaacagactcttcatccaacgttgtcttcagagggactgtgcacaatccacatgcagtcgatgaccat

SEQ ID NO: 75958 - DNA, 401 bp, Glycine max
  Clone ID: PAT_MRT3847_39604C.1
actagccggcggccgcccttggctcgggacccttttaaaaacaccctttttttatatacaaccagcggaagcgaaaagaggggaaacggagagaaaacaaaggcgggaacaaaccccaacaaagggaggggggaaatgctcgccaaaacagaccccaacgaggtcgacctagacccggaacgaaacccaatcggcgaacaaaaaacaccctaaaaacctgccaaagtaatcgaacccgcctgagcagcagcggcggcggccagcccccagagacgacccgcccccccaggagcaaagaaacccaccctcgggccaggaggagcattaaacctcacggcacttgcacgcccaaacagcggaggagaccaccccccgagaggggggacaacggggcccaaaga

SEQ ID NO: 75959 - DNA, 568 bp, Glycine max
  Clone ID: PAT_MRT3847_39605C.1
ggcctcgagccaaattcggcgctttcattatttacagccttctctcgcttcgttccacccttcacctgaaaagcaaaaaggagtgcaaaccatgggcgatgcaattgatttgactggtgacggaggagtcattaaaaccattgtaagaaaaagcaaagctgatgctgtcggtccaacagaaaatttccctcttgttgatgttcattatgaaggcacacttgctgatactggtgaagtttttgacactacacatgaagataacaccatcttctctttcgagattggaaagggcagtgttatcaaggcttgggaaattgcagtgaaaaccatgaaggttggagaagttgcaaaaataacttgcaagccagaatatgcatatggtagtgcaggatctcctccagatattcctccagatgcaacacttgtttttgaagttgagctagttgcctgtcggccaaggaagggcttcagtttgggaagtgtttcaaaggagagggctaggcttgatgaactgaagaagcagagagagttagctgtttttggcaaggaggaggagtaaatgaagaga

SEQ ID NO: 75960 - DNA, 256 bp, Glycine max
  Clone ID: PAT_MRT3847_39606C.1
ctacaatcgcgtcggcaatggagccttgtccaagtcaagtggacatggcttctcaacacagtcgactaccacagaatacaaatggtggtaccgatatcatgcctttcagcatagcgaatcaagcccttggaatcgttgcggatctcggtcttcagccggctctgacactgtatccgatgcggagttggatgaggcatttatggatagcaactcaagtgtttctgttatcctctgcagcaagcaatctgcacgccac

SEQ ID NO: 75961 - DNA, 439 bp, Glycine max
  Clone ID: PAT_MRT3847_39607C.1
gtgtcgttttttttattttttttttttttttttttttttttttttttgggaataaattcctttgcattgataactcttgaagctcattgtacatcgttggctttttaggcctgccaggccctaactagggggttagccacttactgcctttgggggggtacaactgggggggggagaaagaaaaggctaataaaacaaggagtgtgggggggggggagaaaacttatacttgagggactgagaaaggggctctgaaaccggatgaaatttccttgggactgcctctctatttatagttgctgaagggggcttatgggccttcgtagtcgcgctcaacgccacacctcgcgcttagcgcgttcaaatcgcgcgctgggcgcgccatgcacgctgggcctgtgcttttgtcggattgggcgctgggcccctaactgggctt

SEQ ID NO: 75962 - DNA, 290 bp, Glycine max
  Clone ID: PAT_MRT3847_39608C.1
ggcaaatgaaaatacaggatgggctgctcctactcaggggctgcctccagtggatgcgagtgactggaaaggacctgggcaaggacgacaccatgtaaatgcaactgcatggtgaactgaggcccgtcatgggccaacacctgtaaatgccaatcctgcatatactgcagcggtggtgaatgcaagcatatggggaagtgagccaagtgataatggagacagggtccccaaccataccgatcacagtgcacatgcataaggacttaattacggtgtttaatgttgtaata

SEQ ID NO: 75963 - DNA, 332 bp, Glycine max
  Clone ID: PAT_MRT3847_39609C.1
gaggtctgttaaatatctattttattgtttgattagcactggaactcaacctggttggacatggttggcaaccactttgtttccaaatgagtgaaaagggccacattatcatggtgggtgatcacgcttgacaaaaaaatttgaaagatatccccatgatgcaatgaactaggggtaaaaccaggaagacacttaattggaaaaaaacaaccacgtattgggggcattatcaggggatccatgtaccaccttaacaaaacttatactgagctaattcgaggacgaaattgcggaaagggttgaacaccccctaaacgccctatcgggaatcc

SEQ ID NO: 75964 - DNA, 364 bp, Glycine max
  Clone ID: PAT_MRT3847_3960C.1
gaaacaaccaccttcaaaaggtttttttttttccccccccaaattggatttgggaagaaaaaaaaaattttcacccctcaccaaaaaacgtttccttttccaaataaaccgacccactaaggggcccgaaagatcacgttctccccaattgggatgttaacccaagggccaaccggctttagaccaacttaggaagggcctttctacccccacaaaatgacgccccaaaaaaccagggggtgaaggggcccaaattatttatctatccctccacgggggccccagggccttttggaccaccgaaaaccgaaaacccggagggtgttttttaccccctccatttttgacgctttaagaagccccc

SEQ ID NO: 75965 - DNA, 267 bp, Glycine max
  Clone ID: PAT_MRT3847_39610C.1
gttgttagcatagatctggcgccccgcggtcgttctctaaaactattatgaaacaataagagggctatccttagggtaattagacatccgaactggatatgggagacctcttcaacggctggcggattatctaaggctgatatactgcacgcctccattccaggtcactgactattgtgcaagaaatgtggggtcgacatgcacctatgtagcctaatgaacctgaactgagatcttttgtgccacccatcgatagtacgaacaggc

SEQ ID NO: 75966 - DNA, 363 bp, Glycine max
  Clone ID: PAT_MRT3847_39611C.1
cccacgcgttcgctcaaagacaccaattttcattgctcagagaccccaactccacaccaagagaattaattgtattctaatcccactcttattacgtggccgcaacaaccaatgagtcccatcctatctaactgaaccgcgtgggatccctccaaggattccactcttcaatatgctcttgctcaaccagatatcctgaaggccttaacgataaaagctagtaaacctgagcaccgggaacgactgcaaggagaccccaaatgcgcacgtaagcaaggcatagctccaatgactgaagaacgaggaagcgaaagctcataatgaacacgacaatgttactcacataatcggacagaggaacgt

SEQ ID NO: 75967 - DNA, 401 bp, Glycine max
  Clone ID: PAT_MRT3847_39612C.1
aacattaagaaaggtagacaattaaaaccctccaatgacaaatatttacattatgattcaacatcaacatcccaaatatcctcataaaaaaatagaagcttcccattcccacataagtagggcttatcttttttaaaaaaataaaataaaaaggggctaatatttcgaggcatacaatactacaagcaggagccgccattctttgggtcactggcggatttctcgggattggcattcactcctataattaatagccaccaacctaacgaacaaaaagttctttagaattcagcaaaatttaaaaaaaaaaaaaaaaaaaaaaaggtggagtaacttgtaataaataaataaacaaatcccctaatccacttggaggaaccatgatccttcaatttcatgac

SEQ ID NO: 75968 - DNA, 217 bp, Glycine max
  Clone ID: PAT_MRT3847_39613C.1
gcttcaacctatgtggttgaggcatgcacggggggcaatattgcagggatggatggtcgattccctacaaaagaacgtatggacaggaacgctgtgatgacttacaacgtctacatttacaaggcctaatctcatgcccttgaaaagcatactgcttgcaactgaaaaggccctgctgtttctaacctaacaaacaccaatgcatttatcttgaaag

SEQ ID NO: 75969 - DNA, 260 bp, Glycine max
  unsure (1)..(260): unsure at all n locations
  Clone ID: PAT_MRT3847_39614C.1
aaaagatctaagcatacagaaatgtaggaaagcgatactttgtttgaaaatccagaagcgtttgacgacagttcagaatttacggcatcagagttatgtgatatttcagcatttgcaaccgaaaacaagagattaacacgtgtttcaaattcgacaaagcctaatgttcattctcgcactcctcaaacttgttgtcacgtatcaacgcaatcatgtcatccgggtgtctgggtaacaataanatcaaagagagcaaaatt

SEQ ID NO: 75970 - DNA, 432 bp, Glycine max
  Clone ID: PAT_MRT3847_39615C.1
cattgagagcccatggccgccttccatggctgccatagccatttgcacacacctaagttgctgcacacccctcctccctttgcacatcctactcaattccttgggattgattttgaaagtacccgccaacggttgctgagtttgttcgattctgagaggacccctccttcatttcaacaaccaccatacaaagcttccatggctgtcgtccatggctgccacttgccgtacggagcttccaccttccactaccaccattcctttcctagtcattctttccacacagccaaccaccagcaaccatgtccgcagcacccattcccttccatgttcgacacaagcaagcacgaaggatccttgactcacctcgaagctgtcctcactcgtctcgacgagagcatgcactccatgaatctaaagatagatgaactc

SEQ ID NO: 75971 - DNA, 114 bp, Glycine max
  unsure (1)..(114): unsure at all n locations
  Clone ID: PAT_MRT3847_39616C.1
ccncctttgctgcttcnaccactccctaaccttcgntctcanacactctctttcatccntcgtcatctctgnattggagactcnttnttcttccntgncnttncganaacgaag

SEQ ID NO: 75972 - DNA, 277 bp, Glycine max
  Clone ID: PAT_MRT3847_39617C.1
tacggctgcgagaagacgacagaaggggggctctcagctgagaataaaataaaatggagaaagcatgcatttgatgaagacggtgtttgagtttgcaactctagtgatggcatcacttcctctgttggagatgagtcccatggcataggctgtgacttgtatccctggggagttgagtccctgtttcgaggcaaccacgttctttacaccaccattgacaactttgttcccttgtggaggatccaaggcccttcccttgttgtttccctaaaatccc

SEQ ID NO: 75973 - DNA, 453 bp, Glycine max
  Clone ID: PAT_MRT3847_39618C.1
gatcaactttgtttaggaattttacacttcaagaaagaaatttcatccttctctgtagataattccatgacttgatagttgatacttattgatcaccagtctgctgactaagaaatgccctggacagcctttttgtaaagccacatcattaccaaaaaccttcctctcaacctctctgaactttacacaggaagttcttttccaagccattttttcttgattgggttaactaaatttcaaataaaaatgataattcctacaattattcaaatccctagtgatcatcttataatcttattcttatccatccttcccaagtgcataagttggaagtataaacctactgccttgtaaacttaaatgtaatatgtatacgttagtgcagaacttgcttggctagggaaaatgtagacactttcaaatatagggatcagttctaacaacaagaaattc

SEQ ID NO: 75974 - DNA, 179 bp, Glycine max
  Clone ID: PAT_MRT3847_39619C.1
cttcgccgaccccttggttccggccaattacccgattctttggcccggttaactaacctcaggttccttgacctttcctttaataacctttaaggcccaatcccaagttaattttccaagttgtccaacctagtttccttacccttggaccggaataggctcacggccccaatcccgga

SEQ ID NO: 75975 - DNA, 352 bp, Glycine max
  Clone ID: PAT_MRT3847_3961C.1
cgcgagagcacatctgtatagcgatggtgcctgcttaactcttactattcacactgacaggaaccaagttttttgccatagatggggacccaatccaatgtttcccccgaatgcaccactgcagtgcctgtgtcctacggcttctagatcctattacttcaaccacattgcaagagccaaatggtagtgtctcatatcagcgaaacgccagaagaagtgaagaacgaacgacattatgattgcggtataagaaaagagcattgaagatcaatcaattaccatacaatgccttgcagaatgagatagatgttgtccaaaataaaagatcactgcttgcttacgagcatgttgt

SEQ ID NO: 75976 - DNA, 390 bp, Glycine max
  unsure (1)..(390): unsure at all n locations
  Clone ID: PAT_MRT3847_39620C.1
acgaactcgaattcggtcttctacactcatgagatctgttaatgaggacctggttgattactgactatggaacaaaataagtgggcgtgggaccgagtccggttcctgctcgcttgtggaaagtattcgcacaggaactgctgctagngtttggaancacangtctcacaaacaacccagccggggggcgggctcaatatttcacccattgctcctgacttccacaggcccagtctaaagcgtggaggagtgagggggtcccatngtgctcaactcttcataacactacacttatcattccgcatgtgcaaggacaataatgcatcatgcttgggactgacggaacgttcgttaccagctgctcgttacaccactctcccacgtctcttc

SEQ ID NO: 75977 - DNA, 110 bp, Glycine max
  Clone ID: PAT_MRT3847_39621C.1
cttttataggcggtaggtccattcgggtggatacaattccgaataccattgctcatagtgaataagtgatgaatccatatgtttttagcctcttgactaccacctaccac

SEQ ID NO: 75978 - DNA, 205 bp, Glycine max
  Clone ID: PAT_MRT3847_39622C.1
ctcacactttctaacacccactcaatcaaactcagtcccaaacccttgcaatcagataccacatataaatactcaatcaattacttcaaaatcctacttctcataaatctaaacttgtagtctctaaactattcaacttgacaataggctaataaatcctctcacctccctactagtataaccacagccatccttttaactcatc

SEQ ID NO: 75979 - DNA, 325 bp, Glycine max
  unsure (1)..(325): unsure at all n locations
  Clone ID: PAT_MRT3847_39623C.1
tgtctacaaattcggaagatatgatgggtccctaacactctaaggtggatgaggaaatagaaagatttcttaagtgtctttattattctgtccttgtgaaataattggtttccaatacgtatggttttcttggtggctttttaacctctggaannaaaaacccttttttgggggccttttttaaaccccnnttatttgttcattccattttgaactcaaggggttaataaaactccccccctcttttgttggccgcggaggnnnnnnaagaannnnnnaaaacnnnntncaaaaaaaaaaaannnaannannaaaaaaaaaaaaa

SEQ ID NO: 75980 - DNA, 635 bp, Glycine max
  unsure (1)..(635): unsure at all n locations
  Clone ID: PAT_MRT3847_39624C.1
caacgctgacacatggtttgctcttctccccgacttgttttgtgtgttttgttcgtgggttgtgaaaaaaaaattgttttgctcttgctctctgctctcaatctctgaatatctactttctacgtccatattttcattgtcctttccatttgcctgggtaaaaatgacaaagcctaagcgttgggttgttaaccttggctttaaagtctatgtattgttgttctttgcacgaaacgacaatgaaggggatgtctcaaaggtttgatatgattggagctattgatgataacaaagaaacattcaagcttatagttcgaattgtggaccgggtttgtccaagcccgtgaaaagtctaagcaccttgaaatggtgttgatggatggaaggagggatacagtccatgccatttttaagaaagatgatatggacagttgggaagttggactttacggacggatggcgtatcagatgtgcaactttcggggagtagtnaaatcacgttgaaatggtgttgatggatggaagtacgcgattaattcttgctgtggttcacatttaatatttgggagcttgnanncnntncatatcggttgtatcactttttgggnacaaataattntttccccgcatggtgg

SEQ ID NO: 75981 - DNA, 286 bp, Glycine max
  unsure (1)..(286): unsure at all n locations
  Clone ID: PAT_MRT3847_39625C.1
tttcaacggtgcaaaggnaactgncagnagtttgtanggtgctattccaanaacacaaagcaaggcacgtgctgtnaactctccnactaagagtnccataaccattgttgangaanaggctagcagtaacagttgcaagaccaagcnntttggggtgtctgnncaatcccaagaaaaanggtgcaccctnagtangggtctagcnatgttcttcagagnnccgaaaacgaataagncgcgttgggctttggnaaatgatggactantacgatgaatcttatgcccc

SEQ ID NO: 75982 - DNA, 518 bp, Glycine max
  Clone ID: PAT_MRT3847_39626C.1
gctcaaaccatgatttagagctccctaacagaaagagagagaaaacaaagtgctgatttgtagtatcaagcatatcaagaaattaagcttgtgcaagatcatggctggttggggccactctctatttccttagccaattctcttgtcagcttgtcagcacgatcatcatgtccaccagcaaatgtatagacccgaaatgccaattggaaagccctccaaagcaacttagcatattcttttctttttccatcactaatgtttgatcctgaacctctggcagcagcatcattgcgcctttccttagtgctagctccatgcaattggaggaaacatccaccattgcttctttgatttttataaggatgtggaagtcgaattcgatgttgtggcctttgaatttcttggattcttcatctttggttcgctccaaaccatctaattctgtttttatcttattgaaataacgttcaaccttgtcaaggaactgacccatgggagtcactatattccaattttga

SEQ ID NO: 75983 - DNA, 122 bp, Glycine max
  Clone ID: PAT_MRT3847_39627C.1
ggctcgatcgaagctgcagcagaaatcccgtacaggctgcatctccgttcaccactgatgggttaccagctcgaaaaggtgaatgaaggcacaccgccattgcctactactactttcccact

SEQ ID NO: 75984 - DNA, 240 bp, Glycine max
  Clone ID: PAT_MRT3847_39628C.1
ggtatagatctcggtagcaaacgcaacagtgggagatataaaggtagatagattgagagagagagaaagattcggaaccatcgctatcgcacgctttccattgatgcttccgacgcttgctttgtctgcatcgtccttctttccttcatgcgttctctgtgtgtcgtaagggtgctctcaaactcttcatcatgtctgaactcgctgatactctcgatcagtgagtcgtcttcctccaag

SEQ ID NO: 75985 - DNA, 896 bp, Glycine max
  Clone ID: PAT_MRT3847_39629C.1
ggtccggaatccgggtcgacccacgcgtcctctcttttgcgtttcgatgggacccttcagtttctgcacacaccatcataccttttaaaatcttcacgaatcagcaaaatcccctcacacactctcttcctcccaaagatcttttctctttcgatattttatctctctctcttttcctcatggctgagaacttggacgacggcgagttctggctcccgccgcagttcctcgccgacgacgacgttttgccgacaccctttgaagcaaagttcccatctttgcccgacgacactgttttgttcccctccgagtggccgtacggttccccagttgattctaccgttggtggctccagtgagaccgagagcgacgaggaggagcaactcgtcgctgagttaactcgccgcttaactcgctcctctcttcaatctgataccaagtctgcgggtcggtttgtgtctagttctccacaatccacgctttgcgcgttcggaagtgggtgtggttgcggcaaagggtcgagccagggaagccctgatggtgtttgcaagttgtcctctgcgaagaccacttgggatctgctgcatgcggctgcaggggaagttgagaggatgaggttgaagcaagaaggttatgctttcaaccatcaaaatggaaacctcattccccaaagaaaaccttctccagtcatccctttaccctccaaagataccacctcaacgccaaaccctcaacaagggggctctcaccagcaattgcagatagcacaatttcagttggagaggcagcaacagctggcaaagcagcagaactcggtctggaatgtgcagaagcaatgtgatggggtttactctcagaggcagcaacaaagcaaccaaatggttcccaatagaggg

SEQ ID NO: 75986 - DNA, 581 bp, Glycine max
  Clone ID: PAT_MRT3847_3962C.1
ttgcccacgcgtccgtacggctgcgagaagacgacagaaggggagagtagagcctaagcacacacctctcagtagccaagtccacacactctctcattctcatctctctctccgtaccccaagaaattaaagagcaaaaaaaatatggtttcccttgaacctattgagggcaacctcagatctagtgatgcaccttcaagtcctagaatatctttctcagcagagttcttagatgagaacaacttcatctccatcagtccaaacgctgagtatgaggggccagatcaagagaaggaacgtgagagagcaaggaatgctgctgagtttgagtttctctcaaacaacacgagcaacaacaacacagtggtaactgctgacgagcttttctttgaagggaagctcctacccttttggcagatgcagcatctagagaagctcagcaagatcaacctcaaaaccaaagagggagaggaagaggagttgaaagaggaagtaatagtggtgagcaacaataacccagcacatagtaatagtaatagtaatagtagagtaaattggtttgtggatgatgacccatctcc

SEQ ID NO: 75987 - DNA, 434 bp, Glycine max
  Clone ID: PAT_MRT3847_39630C.1
cttggggggggggggggggggggggggggggggggggggggggggcaaccaatgcagggtgagaagagcaactgaactgagagaacttgataaacaaggaaactgagatttacgaatcctgatgagtgagcatataaaaacctacatgagaaaggaatctgagatacttgtaaagactttaaaaaaagaccgagataggcagaggtcatgcgttaatggcatgcttaaagcaaccgggccagctcgctattagcttaggattagcgaacgccagcgaactaatagtagagggtgccagcataccacttacgagctaaggttagaatgagacctataagaaactgccaatatattaggcatgcgtcaaataacaacagcgtatcagagatgagtgagccagacccttatgcgtgtgaaacctaggagttggcctt

SEQ ID NO: 75988 - DNA, 727 bp, Glycine max
  Clone ID: PAT_MRT3847_39631C.1
tcttttttgtaatgaattttctcaggtgtaaccatttagcataataataggactaatccaacacttttgagatatgtacatgtttcttaaatatacaaaaatcttcaatgcattcatcagaaattataatctgaatttcaataaatagtatgcttatgctcatttaagtataactcagcaatagcagtgtgcagggatgcccctattggaagaacttcctcatcaaggaagaaaaaaggggagtgtggggagtgaattgctcccactttatcatttctgattccaatagaaaacaatactccgggaatcacttgttgaaaaaatgcaaagtcttcacctgccatcaccttcttggctgcatggacattgtctggaccaagcagaatttggcctactctttcgacatgcagatgcagattattgtcattgacaacagcaggatatggggtgaagtactcttctttgaaatcaacataagcattacatctgtgcacagctgcctgtccttcaataatctcctttaatcgctgtctgaaatggtacatgccttcatttgtcaggctcctaagtgtgcctccaaattttacataggatggaatcacgtttaatgcagtcccaccttcgacaaaagtaactgatagcacttgactgtgaagaggatcactttctctcgaaacaagctgttgcagtgccaaaattgcaaatgatgtagccagcactggatcta

SEQ ID NO: 75989 - DNA, 893 bp, Glycine max
  Clone ID: PAT_MRT3847_39632C.1
cccgcgtccgctccacactctctttcgcgtttcgatgggacccttcagtttctgcacacaccatcgtaccttttaaaatcttcacgaatcagaaaaatctcctcacacaccacaccactccctctcccaaaagatctttcttctctttttctctctctatcctcatggctgagaatttggacgacggcgagttctggctgccgccgcagttcctcgtcgacgacgacgtcgtcgtatttccgacaccctttgaagcaaagtttccgcctttgtccgacgacgccgttttgttcccgtacggttctcccgttgattccaccgttggtggctccagcgagaccgagagcgacgaggaagagcaactcgttgccgagttaactcgccacttaactcgctcctctcttcaacctgacaccgagtctgtgggtcggtttgtgtctggttctcctcaatccacgctttgcgcgtttggaagtgggtgtagttgcggcaaagggtcgagccagggtagcccagatggtgtttgcaagttgtcctctgcgaagaccacttgggatctgctgcatgcggctgcaggggaagttgagaggatgaggttgaagcaagaaggttatgctctcaaccatcacaatggaaactttgttccccaaagaaaaccctctccagtcaccactttaccctccaaaaacaccaccgcaaatccaaaccctgatgtgggtggtttctacacccaacaacaatcactctctcaccagcaattgcagatagcacaatttcagttgttgaggcagcaacagctggcaaagcagcagaactcggtctggaatgtgcagaagcaatgtgatggggtttactctcagaggcagcaacaaagcaaccaaatggttcccaat

SEQ ID NO: 75990 - DNA, 191 bp, Glycine max
  Clone ID: PAT_MRT3847_39633C.1
cccttctgacgggttctcgaagccgtacccttctgtcgacttctcgcaaccgtacccttctgtcgtcttctcgcagccgtacccttctgtggtcttctcgcaaccgaatccttctggcggattctcgcagccgaacccttctgacgggttctggcagccgaacccttctgaccaattctggcagccggaca

SEQ ID NO: 75991 - DNA, 241 bp, Glycine max
  unsure (1)..(241): unsure at all n locations
  Clone ID: PAT_MRT3847_39634C.1
gaggttnttannaaatggtgntgaaggggaaggagggnttnttgattttaggggnnagnatttncaattnntnnnatttgggtntgggaggagaatgtgnnttggtgtnaatttggttanttnaggaatggnaananttnttgnatttnttatnnaatggtttganntgnaagtggtgggnnttaaaggaaaaatattgaaaggtgatgatgnaaaatttataattcaccagagggggggg

SEQ ID NO: 75992 - DNA, 755 bp, Glycine max
  unsure (1)..(755): unsure at all n locations
  Clone ID: PAT_MRT3847_39635C.1
aatagttttaggagatcggccaattgaaataacgcttcaaagagcatggaaggctatgaaatggactcagaaactaagtttagtgttatcaattattcgggggatagcatcttcatctaacagttctataaataagctcaaggaagcaagttcagatgatggtacatttcaactttatgagcaattgagtttttcatatccttctttattgccacctctcatacatgaacgagatacttatcttgcatggtcattgaagcggagcaaagctgtgaataacagtaaaaatgttgtgggtgtcattggaaaaggccatatgaacggtgtaatatatgcattgttatccgacacaggaaatttgaggtttcgagaccttgtagggaaagattcatatgatggaggttctagtggttggattgatgatctaatcaagagcttagtgagggacacaatcattatgggccttatatgaattagtaaatggaggaacatgaagcaggcccatttagtttttcatcttttattataatttccaagattaaaaaaataaagagcaatagatataagctaagagatttttgttgtacctcgcatacagtaggcgggcgtggttcatttttataaagaaataggaaaaaagaaggaaagaatgggattgtgttagattaattgatgttttccaaacccccnnnnnnnnnnnnnnnnnnnnnnnnnnnnnnnnnnnnnnnnnnnnnnnnnnnnnnnnnnnnnnnnnn

SEQ ID NO: 75993 - DNA, 213 bp, Glycine max
  Clone ID: PAT_MRT3847_39636C.1
ctttatttttcggtcgggaaataattgggggttgtgcttggacctggcggtaatcggtcaagctttggtctagtggttctctcgcctgtggaaagtaaaaaatagttgtaatgggtcattctggggctttcatttgcttaaggtttgggtcaaccatagtcactcatatacgtggttcttttacatatggaatatttcatatttagcatggaa

SEQ ID NO: 75994 - DNA, 527 bp, Glycine max
  unsure (1)..(527): unsure at all n locations
  Clone ID: PAT_MRT3847_39637C.1
atccatcttcctcaccattattctctcgttgctgaacagtcgaaactagtcgaccgttaccgtttgccgttgaaacctaccatacggctcgattcccgcttagtcgcaatttagtcctaacggtcgcacatcacgctacaacatcgtcatggccggtgcactcccagaaaagcagctccatgagctcctctcccgttctatggtcgacatctacgtcggaaccgagaacacacactggattcttcatgagaagctgctctgccattactcgccattcttccgccgcgtattctacgcaaagggctccaacaccacctcattcggcctgcctgaggaagaggatgcacccttcaagaccttcgttggctggctctacagctcttcccttcctgtgccccgcgaagaaaccgatcttggactcctgttcgatctatacttgatggccgagaaattccagatccccaacctgatcgcncgacgttctccaagttgcgcgcgagtggtacaagtactctgacagctaccct

SEQ ID NO: 75995 - DNA, 1113 bp, Glycine max
  Clone ID: PAT_MRT3847_39638C.1
gatcatagtcaaatcacgagatcccccagtagtattaatatatactctaaattgaagagaagttcgttagaaatttaatatgaatgctttttcttatattaactcattttacatcaatatgaacaaaggaaaaaaaaagaagggcagaaccaaaaatatagttgcctaggcctgatgccaagttgccaacagaaacgtcagaaaagcttctgtagatgttaagatccaagtgtaataaattccaaactaacgaaattcacaaaaagtggtggacctgctgcctatggactttttcttcactggaatctggaaaccagtgactaactttaggatttcaaatcagtaacacattctatttgtagatccactcgttggaacgagcacccgactcatccatatctataaaaatgcttactgccttccctatccgaggtcgttccttcgacttttctaggctgttccgaatatgagacacagctccccaacattttaagttgtttgcaatatcatcaagcctcaaaatatactcttcttcggtcaatgggaaggatctctgctccatgtacttccacatgacattcatcgcaaggagatttcttcccatgaactccttctttatcaactgaacatcataagacctcccatatttgttcctgataagggtagcaaggtcaaatccactaaacgtggaatcatcttttccaactattttctcgagactctctctaagcatttcactattcactcctcccatttcaccattctgaggttttttcttatcagtgttatctgaatctgaaggatccgtactgttgctcactgaactggaaaaaacgggcctacattttctggcactatgaccatatttttgagtatggtatccaacattaaggaagtctgatcctctggaaaatggagccctattaatacttcctttgtcaggatgatcctgaattctcacaggccaactacactggtgggtagacatgatgttcatcgtatccttcactcactgacagtgttcctggaagacagaaacagaaacggattgggagaaatgaccccttcggttgatgtttttttagttttttatatttttggggttgaagggtc

SEQ ID NO: 75996 - DNA, 168 bp, Glycine max
  unsure (1)..(168): unsure at all n locations
  Clone ID: PAT_MRT3847_39639C.1
ggngcgctggggtgatgtatgtaactntatagggtaacatactnatagcgagcgcaacccnnctctcccagtctcggaagaagaaatgaagcagctgccaacgctgctgatgaagtccctctcactctcagtgtgttctttgccagcagcagcttccacaaccaccct

SEQ ID NO: 75997 - DNA, 207 bp, Glycine max
  Clone ID: PAT_MRT3847_3963C.1
ccgtgatcagggtgagcacctccatcaagatgtcacgtcctatgacgtgccagatcctgatgccattccccagcgctcttcatggactggtaggtggtcgaggtgggcgaagctccttgcaggccctcgtacacggtcgacagtcacaacgctagacacagacgtggactatgcgtgcccagacacgaccgtcaccttggacatggc

SEQ ID NO: 75998 - DNA, 606 bp, Glycine max
  Clone ID: PAT_MRT3847_39640C.1
atgatgtaatttgttgccggcctgttgtgcgtgtttatggtcaggacccttcaatccctgccaatagaagttcaaagctacttttttcaacttcaatatccaaaaagcatgttcgccactacgtacaggcagagtgtatgctcgtcaaaattgacatacggtgtcgagttcaatgggatgcggatctcgaatgcctacatttaaatgaagattttgttcgtgaggatatgatgtttagagttatgtttcatactgcatttgtgctgtcaaatattttgatgctcaaccgtgatgaaattgatattttgtgggatgcaatggacctatttctcctggaccttgaagcataagtgctctttttggacgctgatgctgttatacctgaactaaccacagtcatggtgagtgaagatgcaaatgagactgagagtgctgagacagaaagtgcttcaccagaggaattctatgaagtagaagagattttcagcaatgtaattgatgcacaggaaggtaagacagaatatgattctcaagcttttcatgaaaatgcagtggatgttgaaactcataaagaagtctggaggcaagagtcagatccttatactt

SEQ ID NO: 75999 - DNA, 778 bp, Glycine max
  Clone ID: PAT_MRT3847_39641C.1
aaaacattatcacctgcttgttatggtgctggctatgttgtttctggtgtcgttgacaagaggaaatgtaggcctagagggattctcactgtagagaagaactattcatgcagtgataaaatagctgctaatagttttgataatgatgagaagaagaaagtaattgatactaatgaccatgctagtccttccttgttacctttgccaactgaagctgtagtgcattggctttcttctccatttaacaagggaaagaaaattccgagtaaggagtttggaaatggactaaatcaaagtcagggactagcagaatccacaactcttgcttccagtacttcaccatcatccagttctaaaactttttggaatggcaggcagctcaggaaaaggaaaaactgatagatataatctcattgatgagaattctccattttccctgaattcatttggtagtggaaatgttattcaaactccacagtcagattctagttcagatttacatgttggattgtcattggtgcatgcagacaaacgaaaggaagatatttctaaccctggccttaactcatccagcaaaatacttctatcagaaagcttacttctcaatatttctatgcccctggaggattctgttaattcaagtttccaatttgattttttaactatgccttgtgaatctattgatctcagtaaacgtccaaattttttggagggtcaagatccttggttatctagttctacaacagagatgcttcacaatcccaaatgaggatatcat

SEQ ID NO: 76000 - DNA, 557 bp, Glycine max
  Clone ID: PAT_MRT3847_39642C.1
gggccccgaaaagattaaaagaatttttttttgggaaaatcaatttcaatcccccctacggaaacccccttttttgggggggcccgggaccccaaaccaagggggggggcccttaaattacaggccccccaccggggtgggggggttcccccacaagggggggccggccccggcaagggaacctttaaaaacccaactttttaaaaaggttttaaaagccctcccagggcctttattctaacatggggggccaaacaacaaaaaggggcccccgggggaaaaccctttggggtaaccgggggggccctaggggggggaaaaaaagggttttggggccccaaggggacccgcccggcccaagattaaaaaaccccttttttccagggaaaacaatttggccaaaaggggacgggggcccccggggccatgggaaacacccccccgggttttgggggggtatccccaaaaaaaaaaaaggggggggggggccaccaacccaacaaaggggggggctttttagggcccaggggggaaaccccttttaggggccccggggg

SEQ ID NO: 76001 - DNA, 670 bp, Glycine max
  unsure (1)..(670): unsure at all n locations
  Clone ID: PAT_MRT3847_39643C.1
gacatgtgancaatttctttccatgagtaagatagcacaactctttcattttaaatttatgtctgtttaatgatgatattatatccacttcagaagattttaaaaattgtattattgatgagttcattgaggtatttgttcatattcttaagcaccagcattcaggattaagttggaaatgtttttgaattatccaaagtcttaaggattatgaaggttttagttataaactaagaatttacgaagttatgtagtttgaccttcaattggaattgaagaatgttttgtggattttacttcacctttctggtcataataattacttgttttcattgctaatagaatttgaaataggatagttgatgcttacttctatggagattatgtaaccagatcactgcactttgtgaataaatgaattaggttggtaatcttttataattggatttccatcgttggattctcttatttttgttgctctctctgtctttctctacatattgtttctgccagtcctattttacattttgacatttaatgttatgtattgctgtattatgatatatctgttaggaagcctctgctttcttcacagcttttactgtgatctaagtattggtgtagctcttggtttccttaaccagtatgtagagaaatcactgatcatccg

SEQ ID NO: 76002 - DNA, 777 bp, Glycine max
  Clone ID: PAT_MRT3847_39644C.1
ccacgcgtccggttcaatattggatattaagtggcatcatactcttaactatgaacaaccaatgttgattaccagtgataatcatgttgttaggatatgggatcctgaaacggtagaggaatttgctcctactcttatatttcatattaatagttcaactgtttttctccaaattgatctgtatcccttggtcatgcttattttcatccattaaaattgtgatgtgtagtgtctgttttaattagttgggtcattcagtaacatttacctaggagaaagaatgataaataatgttgcatggcatgattgacttcaagaattcaattgtgacatgttgttgacatcattctatatttggagattgttaaaagatgccagactttgaaagattttaaggtgttcttgtcaacaaatttttgctaagctgtaattggttagataaagtacaaaaatttcttaccaaatgttaatgatataaatttataataatattctacttattaccttcatactgtggttcacttgttaatcatcactgaaggacttttcttgataatatgattttgcaatatctaaactaaattgtacatgctaacatgcatacatcttatgtttaaaataagcttggtatcccttgttcctaaacatttaggtaattaactgcatttatattgtatgtttcatcaggcatggggttgtttcgattgaataatctgtttccaggggagaaggcttgaccagcattgaaccgacaacgggacaataaatgacgtgtgt

SEQ ID NO: 76003 - DNA, 313 bp, Glycine max
  Clone ID: PAT_MRT3847_39645C.1
tacgaacaatgagaaggggctgaatgaggaacgatacattggggtgaagcaaggacgagcaactgggcaggaatatgctgacctgatgcacgaattgatgacagcgggcaagttaacttatggggaaaaaggtctaattcgggttgaagactttgcaaaccacaaagctaaggaactgttttttttttatagagcgacacatctgggctttactgatggtattgcggcccccgcatccgggggacgtgctggacttggagcaggacggaaagcggctgggggtaacggagcggagcagggaaacttaatactg

SEQ ID NO: 76004 - DNA, 626 bp, Glycine max
  Clone ID: PAT_MRT3847_39646C.1
aaaaatgtgttttcaatttacgtttttcagcaaattataaacaatacaatgcattgtctgaaaaccataatgattaaattacaactttaaaatgttaaaacaaagtaacataaaaatttctccatcaatcaaaatggggtcatcatcactctatttgtctcagaacatggtaactctttttcacctcctcagttgcagcttcaccatccaattcaaaacacaggtttggatgacaatgttctattgccttgtgaagggttgccttaacatgttagatttacaacaacattacagcctttattcttcaacactgccctgtgaatcatattattgcgaaaggtcacacctttttctttagcaccgccgttaacctttttttcgtccaaggggaaaatagataaaaatggaacctcgtcgaaatcagacaaaggtcacacctttttcccgtccaaagcaatattaaaaccaaagcggaaaaaaatcgaacaaagaaggcccttaagcggaagaaaagaggagaagacgagggagagaaagagagaggaacggaagattaacaaagacgcaaaaagaaaggggaagagagaaagagagagaaggtaatgatagaaaagcggacgcgtggg

SEQ ID NO: 76005 - DNA, 336 bp, Glycine max
  unsure (1)..(336): unsure at all n locations
  Clone ID: PAT_MRT3847_39647C.1
cccacgccgtaccgcccacgtccgtccgcgcccggcgtacctctaacctcgtgtttccgtccccgagggagccgagaggtactccatctgaaaaccatcgcgcgtcaggaggagattatacctcatcctcgctcgtcatgccacaggcggtcgatgatcgcccggtgtatcatacgtcactcgtcaagggccgatanatcctaactgatatagatccggaatgccgttaccttgaatggatatgcgtccgcccgaacgtgttcttatgaaggacagcgacggctgtgtatacggcgcctctgccaggcgtctttacccagcccgtgcaaactaacg

SEQ ID NO: 76006 - DNA, 488 bp, Glycine max
  Clone ID: PAT_MRT3847_39648C.1
cttaatcatatctaaaaatgggtcaacaacaacagggaagtcaaccttctccaaccaaagtcgaaagaaagattgtagagaaaaacaggagaagccagatgaagaacctctattccgaactcaactctcttctccctacccgtaatcccaaggaagcgatgtcactgcctgatcaaatagatgaagcaatcaactatatcaaaagcctagagacaaaagtgaagctggagcaggagaagaaagaaaggttaaaggaaaggaagagaactcgtggtggctgttcgagttcttctgaagcacaaggaagcctgaaatcgccaaatatccagattcacgaaacgggaaatttgcttgaagtcattctaacatgtggggtcgatagccagttcatgttctgtgaaattattcgaattttgcatgaagagaacgtcgaggtcatcaatgccaattcttcaatggtcggagatttagtgattcatgttgtgcac

SEQ ID NO: 76007 - DNA, 132 bp, Glycine max
  Clone ID: PAT_MRT3847_39649C.1
aagatttcaaaggtgggatggatagtcggagaagttgttggtttcagcatccaggagcagcttggcagatgaaacgcatttacgaatccatatccaaatgacagggccggactcgcactaccatgcatgctt

SEQ ID NO: 76008 - DNA, 418 bp, Glycine max
  Clone ID: PAT_MRT3847_3964C.1
tgctcgagcgaaaggccctaaacaacaccctacggattgggcggcccttactgtagggccatccaggggaagcattacctgtgaagcgctagatttctacgctaccccatacgactacttacagctagccttaaggtggtctcatccctattgcttgactcaagaaggatcatgcctggcaactggggcacatgatctcactattgtctgccttgatgcgatgagacgcggaggcccacacacgctgcctggcccctaaccgtataatgtgccaggtagcgctgttgcgacaaacaccaaagacctactccgaagctgtcctaagccgtgaactgactatcccttagagagtactgcaccaacaaaggaccaatcgagaaagcctggcgcatgctccagttgcgaggccaaaagacta

SEQ ID NO: 76009 - DNA, 488 bp, Glycine max
  Clone ID: PAT_MRT3847_39650C.1
attccatttaacactgatcgcacaaatacggcatgtgcatatggggaatttcacacttggacaaagctgcagaggtgtgcaagaattatattcgagatgattcttcttcatacatctgcaagacacccggcctgatgactcctaccggtcttcgccaattggaagctgcaatgaatgtaagctataggttatatcattatggcccattctcggatgcactacctaaccgcgctttcgatccgaacatatcccagacatcaacaacattcactgccctggcctgcagataatcaggcaatcgatacatattgggtcggtttcgctatcacctgctgtaacgtcggctttgatcttcggagacatctatgcaatataaccgctgcaccccgttaatactaagcagttcatagaaggctaaaagtgctgtgactcaaactaccttaggaacattacggatctctcgcacattcaggccatagaatgcattc

SEQ ID NO: 76010 - DNA, 162 bp, Glycine max
  Clone ID: PAT_MRT3847_39651C.1
gctacacggtcttctacctttttcccccaattgggttgacaaatcctaaccaaacacctcacaatcttcttcttcttagcagcatggcttcttcttttatcatagaatttcatctccctccatccccttctgtcgtcttctcgcagccgtcggacgcgtggg

SEQ ID NO: 76011 - DNA, 575 bp, Glycine max
  Clone ID: PAT_MRT3847_39652C.1
aataaaataactaataatatacatagccttcttctttcaactattcttcaagtggtatttatggaaacacttgagtacctctgtggaaccagtcttgtagtacgtttacttctgataaattttagcaataaattttttaaatagactataagaagaattttaaatataaataatctaatttaactgcatacttaattgttaaactttctgttttgtgtcgtacagtattttaaaaatagtttacgtgttatccttcatcatagcctcttagacttgaaaacggataagaacaaaagtgagtggcccttccaataggcaaaatttgttgtgctttcacaatcatgctacccgtaaatatgtaaactacaaatttcttgaaccttcgtattaattcacctgttatccccccacttcatcaacttctttccctaaagaaacaaacataacttcccctgtctctgctctgctacagattcctcaagtactgttgtgttcactgttgaggcctaatctggacaactattctctcacattttttataataaatttatgtttgaatgcttatcccccaatgt

SEQ ID NO: 76012 - DNA, 174 bp, Glycine max
  Clone ID: PAT_MRT3847_39653C.1
ggtgcgctcgagtcaacctgctgatcctcactttttcaatgtattatctaatatctatttgtactatgggcagttcaagtgagcttggactttccaaattctggggcaatttttactggagacaccttgatcagctactaattatttaggatttttacattcacttgctcacag

SEQ ID NO: 76013 - DNA, 335 bp, Glycine max
  Clone ID: PAT_MRT3847_39654C.1
gggcaagggggaccccattaatggggaatgggccataaaactgaaattggcccaatgtaaaacccggaacttaaaaaccaaacattaggcattcagaaatggtttactctcagggccagataataaactttcaacctaaagggggcctgaaaccccggaaaagggttcaaaaattgggacagggttttggatggacacaatctccataaaacagggggggttgtttgcagggggaccaccctggggggggtttatgaaaaaaagcgctcgcggcgccaaaaaaaggttgatgcgcctctcatttggtcctccggtgggggggggtgtttttcggg

SEQ ID NO: 76014 - DNA, 1777 bp, Glycine max
  Clone ID: PAT_MRT3847_39655C.1
gggagagtcataaacacgtagacgttgaattgaacagaacacagacgtagctgcaagcaaagacgaagaatgagagagtcctgaaattcacacacaaacacaacaatcttctcctttctcttcacacattccatatgcaagcatgattctatttaatacccaaactacgtgaaacactagacacacaaattgggtcttggaggaatcttccatcatgtctggttacagccctatgttcctcgtaatcctcagtgtcgtcgtaggtttcacgattcggtggttcctgttcaaaacgggattgatacacaccataagaatacgcttcccaagggtcgtggattggttccacgtgtaccagctccttaaagtccccgaatttaacgaaaccaatatgcagccgaataaccttcaccgcaaagtttctctctatttgcattcccttccttccatagaggacgctgacttcaccaatctcataaccggaaatgaccaaactgacatcgttttgcgcctcgacccgaaccaaaccatcgaggaccgcttccttggtgccacactctattggttcaaccaaaaaaccgaaccgaaccggatttccaccttcgttctccaaatcagaaaaaccgataaacgtcgcatccttcgccagtacctccgccacatcaacactgtcgccgacgagatggagaaccaaagcaagcgcaatttacggttgttcatgaacgcctccgccgtcgaagacggcggcacacggtggagatccgttccgtttactcatccggcgatgtttgaaacgatggcgatggagaaggatctgaagaacaagatcaagtcagatctcgaatcgtttctcaaggcgaagcagtattaccggaaaatcggccgggcgtggaagcggagctacctcctgtatggtgccggctgcacccggaaaatccagcttcgtcgccgcgatggctaactttctctgctacgacgtgtacgacgtggatctctccaagattcgcggcgattcggatctgatgtttctgttaacggaaacgacggcgaaatcggtaatcgtggtggaggatctcgaccggtttctggaaccggagccggagacagcgacggcggttaccgcgtcggggatccagagcttcatggacggaatcgttagcgcgtgttgtggcgaggagagggtgatggtgttcacgatgaacagcaaggagtgcgtggacccggacctgctgcggccgggtcgggtcgacgtgcacatccactttccggtgtgcgatttctcggcgttcaagacgctggcgagcagctacctcggcgtgagggagcacaagctgttcgcgcaggtggaggatattttccggcacggtgcgactctcagccccgccgagatcagcgagttgatgatcgcgaaccggaactcgccgagtcgcgccatcaaatcggtgatcggggcgctgcaatcggacggtgaagggagaagatcgtacgcggattcaatcggacggcggatagagggtgatgacgtggacgaagcgccctgtggtggggacgggttctctacggttaaggatttaaggaagttttacggtttcttcaaattgcggaaccccagaagaactcctcgccccatgatagataatgatgaaagatgaaaataaatgttttgaaaacttttatcaattttggggccaaagtttctgttaaaaacaaaaatacctaatgcatttattggcaagatactcccaatcaaaagtgatttgccatggaatgacaatgt

SEQ ID NO: 76015 - DNA, 192 bp, Glycine max
  unsure (1)..(192): unsure at all n locations
  Clone ID: PAT_MRT3847_39656C.1
anngnagngangnagcgtacgtnagntcggaattcggcncgagctcnaaacaaaggccanannccaanttcatttcnattcanaatgtnaattncctcnacttnnaantnnntcnnnggcnagaaatctttaatnnnnnantnncaanagctcattcngaanatcaggnccggggtcnggngcaagcntggn

SEQ ID NO: 76016 - DNA, 428 bp, Glycine max
  Clone ID: PAT_MRT3847_39657C.1
tgtttttatctgataaatggccagagaggaaaacgtgacgcaggatgcggttcaggcaccaaattgggacgacttccgacaggattcttcaaccgccaagtagaaacgccaagactcaccaaattggaaagcttaccggcccctcgacaatagcatttctactatgtcggtggtgcgctcaattatcagagctctatcatttgtttgtgaggcgatactcttgctgcttgcagctccatgtcgtctcgtcaagatcatcggtgttgatctaacagcttatggaggactcaggttagaagatagtccaccgcagcatccctggaagagattatcggacccatttagaaggcactaccaaggtgcacagcaggcccaaaggggatcaaagcttacccaacacctgtgttgctacaacccacacttttgac

SEQ ID NO: 76017 - DNA, 757 bp, Glycine max
  Clone ID: PAT_MRT3847_39658C.1
ctcgagccgctcgagccgattcggctcgagattattttcattgtatgaaatgcaatgggtgcctggggataaaatgggcatctcacaagtgcctggagaaaggtttagaaatgaactgcccaatttgctgcgacgacttgttcacatcaagtgcaacagtgagagctttaccttgtgggcattacatgcattcatcttgctttcaggcatacacttgtagccactacacatgtccaatctgcagcaaatcactgggagatatggcggtgtgcttgagagagggagttcctttgggaaccattttgttgggagctcacttctactcttgggggctcacttagctgtttctttacctatccagggttactttggtatgcttgatgccctattggctgctgaggagcttcctgaagagtacaaggaccgctgtcaggacatactctgccatgactgtaatcggaagggcacttcacgcttccactggttgtatcacaaatgtggattttgtggctcttacaatacccgggttatcaagtgtgagacgtcaaactccagctgctcttagtgtgcttcttttgtcgggaggtagacagagtttgtaaatacttgtatagcaaattaggaatccaaatttttccatgaataggagcccccttatcttttcgtcttatacttgaacagatgctcctaatcagtcttatagcaattatgtacagatcaactttctattaatgcaacatatattgttgcagctcct

SEQ ID NO: 76018 - DNA, 374 bp, Glycine max
  Clone ID: PAT_MRT3847_39659C.1
gagagcggagcttgaactcgaatagagttcagagtacgcactttgcgaccagcgctctacgaaccctaaatccccgcacgctgtaaaatactcgccggatctagggttattcagccctcgcagcggtggaagtaaccttagctcgctgagatatggaatagcggatggaggcggatcacggtgagtacttcaacgtgctgggcactgcgcgtggcgacgaagaatacgccgcgtacggtctaccgattatcaaacatcgtgaagaagcttcatcgccgagaaattatgtacgaccgagaccgcgctttcttcatgactgacgcgcatgacaggttacgcaacattcgttcgcaggaagaatctgagccacatga

SEQ ID NO: 76019 - DNA, 272 bp, Glycine max
  Clone ID: PAT_MRT3847_3965C.1
cccaaataattacatgttcaactctaattatttgtgtttccatatgtgatcagccgcatgaataccgagcactggatagagatgatgcgcggtcacgggtgtccacaggccaacaccccgtgctagtctacgacatttgcgtatactagagcgagctactgcagatatcagctctgaactgaagtaaccgtgctaaagcaaagcaatggaactctaacactcaaacacacccaaccctgatgaacaagtttcgtgatgcaatcaaccaccac

SEQ ID NO: 76020 - DNA, 4627 bp, Glycine max
  Clone ID: PAT_MRT3847_39660C.1
agttggcatcctgcacaggagctttgcagacgtcagttagtcaacacatggcaaaggaagaggagcagtattcctgtgaatatgatggccgaatttctaccatggctttcaacatctatatcacctgatgaatctcaggatatgcaaaattgcttaatcaagatagtgccacaggaaaaactccttcagaaggtcgttttctcctggatggaaggaagaagaagaaagaaataacaaaaaagaaagttaaaacgcgcatggcgtcgccgttggacggaggaggagtggcggtgctcccgaattccgtcaacaaggttgactcctcctcggctctcaatggcggcttgaagtgctccaaaccggagtcgccaattttgattttcttgttctttcacaaagcgattcggaatgagcttgacgcgctgcaccgattggccgtcccattcgccaccggcaaccgctccgacattaagccgctctacggccgctacaatttcctcagctccatgtacaggcaccactgcaatgtttaaacttacgggatttttccagctcatgttagccgtcagtagaaggttgcaaagacataatcagacgtgaagagtatgcgctgcctgaatatacagccaatagggcccctatgcataacaccttcatgtaatgttgtatcaatggcaaagaagtattactacatctcaaaattttttgagagggaaatgaatgtatatgtgtggcatttatgcaagttattctgtattgggcacaatcttaagattgctttttctcaatgcgtgcagtgcatttgttgcctggggattaaatcatcatctcatatgtgcccggagaatgaattataagtgaatgagcaatataagcgaaatggcatgcttagttcagcttgttgtgtcatgaatttacctttagagatctagttatgtcaatgtaagttatagcccaacgggtagagaagcaacataggaaataatgtgaacgcagtgcctaactatacagccatttgggtctgtatgcatgtcaccttcatgtaatgggcttaaattggcaaagtattattgcaacatttgcaaattttttgatgatgaaagggatgtttatcattgcccattttgcaatatatgccgtgttggacaagggcttgggattgattatattcattgtatgaaaatgcaattgttgcctggggataaaatcagcatctcataagtgcctgtagaaaggtttagaactgaactgctcaatttgctgcgacgaaatttacacatcaagtgcaacagtgagagctttaccttgtgggcattacatgcattcatcttgctttcaggcatacacttgtagccactacacatgtccaatctgcagcaaatcactgggagatatggcggtgtactttagtatgcttgatgctttattggctgctgaggagcttcctgaagagtacagggagctatatcaggatatagatcatataatggaaaccatacagaggcatttccataatgaagaagttcaggttcttccacttgcaagaaagcactttagctttagaaggcaatgtgaacttttgtatcaaagcttatgcatgatgcctctgaaattgattgagcgtgtcctgccatggttggtaggatctttaactgaagatcaagctaagacgttacagggaaacatgcagttggtagctccagaaacagatccagctcctttcaaactcttctgtgaagggttttgcaaggctcgtaataaaggtctgtgtgtatcttcaagtgcattagattgctgtcctgttcaaagactttctgctattgaagaaaattttgttgggccatcctgtgcttttgcttttgctcatctaatacacattgctcgtgattagctaattaaggtgggaacaatagatcagtcaagcgcaacatatcggagttgcacaaaaatgaagatctacctgaaacttcagaggctgaagatattcagaaacaatgttgtagtgcacggtcttgttgtgtgccaggtttaggagtaagtagtaacaatttagggctgagttctctttctacagccaagtccttacggtccttgtctttctgctcttctgccccatctcttaattccagtcttttcatatgggaaacagagagcagctcatgcaatgttggatctacacaaagaccaattgataccatatttaaattccataaagctatacgcaaagacttggagtatctagatgttgaatctggaaagctgagtgatggtgatgagacaattcttcggcaatttaatggaagatttcgtcttttgtggggtttgtatagagctcatagtaatgctgaagatgatatagtatttccagctttagaatccaaagaggcacttcataatgtgagtcattcgtacatgctggaccataagcaggaagaacaattgtttgaagatatttcctgtgttctttcagagttttctgtccttcatgaagccttgcagatgacgcatatgtccgacaatttaagtgaaagtaattttggaacctctgatgccaatactagtgatgttatcaaaaaatataatgaacttgctactaagcttcaggggatgtgcaaatctataagagtgaccctggatcagcatctttttagagaagaatgcgaactgtggccattgtttggcagacatttcactgtggaagaacaagacaagatagtgggtcggataattggaacaacaggtgctgaagttctccaatcaatgttaccatgggtaacgtctgcacttactcaggatgaacagaacaaaatgatggatatatggaagcaggcaactaagaacactatgttcaacgaatggcttagtgaatgctggaaagagagtcgagtgtctacagcacagacagaaacgtcagctcgcagcacttctcggagaggtgctgaatatcaagaaagcttggaccacaatgatcagatgttcaagccaggttggaaagacatatttcggatgaatcagaatgaacttgagtcagagatccgcaaggtatatcgagactcaactcttgatccaaggagaaaagcatatcttgtgcagaatctactgacaagtcgatggatagctgcccagcagaaatcacctaaagctttatctgaaggatcatctaacagtgtagaaatagaaggactctcaccatcatttcaggacccagaggaacatgtatttgggtgtgagcactataagagaaattgcaagcttcgggctgcatgttgtggcaagttatttacttgcagattttgtcatgacaatgtcagtgatcactctatggatagaaaagcaacatcagaaatgatgtgtatgcgctgcctgaatatacagccaatagggcccctatgcataacaccttcatgtaatgggttttcaatggcaaagtactattgcaatatatgcaaattttttgatgatgaaaggaatgtatatcattgcccattttgcaatttatgccgtgttggacaagggcttgggattgattattttcattgcatgaagtgcaattgttgcctggggattaaatcatcatctcataagtgcctggagaaaggtttagaaatgaactgcccaatttgttgtgatgacctgttcacttcaagtgccacagtcagagctctaccttgtggccactatatgcattctgcttgcttccaggcatacacgtgtagtcactacacatgtccaatctgcagcaagtcattgggagatatggcggtttactttggtatgcttgatgccctattggctgctgaggaacttcctgaagagtacaaggaccggtgtcaggacatactctgccatgactgtgatcggaagggcacttcacgcttccactggttgtaccacaaatgtggattttgtggctcttacaatacccgggttatcaaatgtgagacgtcaaattccagctgctcttagtgtgcttcttttgtcgggaggtagacagagttggtaaatacttgtatagcaaattaagaatgcaaattttgccttgactaggaaggaacccccttatcgtttcgtcttatacttgaacagatgctccaaatcagtctaatagcaattatattaatgcaacgtatattgttgcagctccaatgcgagtcacttccaaggtctcatgagtttacttggcttctcgtatgccggagatagaagcaccaaatcaagtccatagttgtcatgtataggtaaagctttcttccaaacttgtttttgtagtggatactttacctcttcctcttttctgcttctagttttagttgaaagttcatttaagtgcgcactagcgttgctttacacagcaatcgttgggtaaagggagactatttgaactatgccagcttttgttagattctttttctttttctttttatgatgtgacgatatatactaaatgattctatggggcttacttaataaacaatagcatatcattttgatcattctcaagttcaatgtagttctaggtcattaacccatcaggttgagaaagtaaactgtgcttgtgaatccacaacaacgggaaaaaggaaacattctgaatctatgatagatggttctgataccacttgaacac

SEQ ID NO: 76021 - DNA, 412 bp, Glycine max
  Clone ID: PAT_MRT3847_39661C.1
ctgagcggcggccgcttggccgtttttttttttttttttttttttggagacaaagtggaagttcggaaggcaatccaatagcagagtaagcagggatattaagcatgtaggaagtgtgtacgtatcgggaaaagtaagggttcatcagtaattgtgcagtgtgtttaataggaatacgaattcgttggtgtaattttaatttggcagtgaatataagttgtatttatttgtagactaagtggaagttcaaaatgtaatcgtataggactggaagcacaaatacaagttgtggatggttggtccaggactccaaggacttcgaaaacattttcattaaattaaatcatattaaataaaaaaggattgaagtttcatttttttgtagactaagtggaagtttaaaaaccaatcg

SEQ ID NO: 76022 - DNA, 116 bp, Glycine max
  Clone ID: PAT_MRT3847_39662C.1
gagggccacaggtggggatgctgctcgaaagcactaggaacagtgtgaatcatataaaggccatggacatgttaaatgctacagtattggtagaacgcaatgattgcaactatatg

SEQ ID NO: 76023 - DNA, 456 bp, Glycine max
  Clone ID: PAT_MRT3847_39663C.1
tgacatttttgtatatcctgtcttttgatttggtgtatgcaacttgaaagttaggaattgtccagtgggtcccaatcttgaataaaatttcctatcttaagtatgtttattgaggtcagaaataagcaatttggtttgtaagggtacaacttactaaggaagagcatttgtcaatagcttgcaagttcatacaatttaattgacagggtaggaccagatgaaacttgcctgtttttctctatttttaggtttagctgattactttctttttgtctctgtgtgtgtgatgaactcttgatgttttacaattctgaaaatatcttgaaagttcaaaatgggaataactcattcagcaccttcgaagacacctggtcttgaagataagactgatccgttacctgaaattctgaagctaagttgttagtactgagaattgtagaaatatagaggatagta

SEQ ID NO: 76024 - DNA, 573 bp, Glycine max
  Clone ID: PAT_MRT3847_39664C.1
caacaaaccaccacccccttgaaatggaaaaaaagggaaggttttaaggccccccaaagggaaaaccgggtctttaaactaaaagaaaaacagccttggaattcccatttataaaaaggggcccccatataataatcaaaaaccctaaaaaacgtaaattggactaaaaaaaacccaaatttcggggcccttatttccccctttaccattttttccagaaaaatttaagcataaactttcccccacaattttttttccaagcccatttaaaatagttttgcaaatggtagagcccaaccaaatttaccaaaatttaaccagaccctgggttcttgggttggcaagcccccatgggttaaaaaaatgctggggggggggctgaataaccattgcccccaccattttaattagaccgggcataaggattctccggagggggtgggggctgctgctcaccaccctgaggagggggggttgctgggcctttgggggaacctggttgggggggcaggggcttgggttccgaaaaaatgggttaacaaaacctgcccacagtttaagttttttttttta

SEQ ID NO: 76025 - DNA, 1507 bp, Glycine max
  Clone ID: PAT_MRT3847_39665C.1
cgattctagtttctctcctcatcctacaaccacaacaagcctcccccctcttttccccaacaagttttgtctcactcccatgatttttaccgaggtctcactcccatgatttttaccgaggatctctggccactgctccagcaactcgttggcaaaattcccctctactattcttcatcattcccacttttttttcctaggatctctggccactgctccagcaactcgttggaaaaactcctctcttctcatcttcatcatcagaagcttcgtcgtccttcttccagaaccttcgggaatcgatgacgaactcaagttgcggaggcgcggagttggagctatgccgagatgaatcagccgcattggttctcaagttcgtcgccatcgcttccattctcctctccggcatggccgggatcgccatcccgctcatcggaaaacaccgccgcttcctccgcaccgacggcaacctcttcgtcgctgccaaggccttcgccgccggcgtcattctcgccaccggattcgtgcacatgctctccgacgccaccaaggcacttcgccacccgtgcctgccagcgttcccgtggtccaagtttcccttcaccggtttcttcgccatgttggccgcgctcctcacgctcctcctagatttcgtgggaacgcaatactacgagcgcaagcaggggatgaaccgcgccccctccgaagaaccagtacgggtcggctcatccgaacccggtgggaatgggaaggtgtttggggaagaagaaagcggcggaatgcacatcgtggggatgcatgcacatgctgcacatcatagacataaccatcctcatggcaatgatgcatgtcatggcattggcaacatcaaggaacaggtccacgcccactcccactcccactcccactcccacggacactcccactcccacatcgaagatggagaagatactgacgttcgacacgtcgtcgtttctcaggtgttggagcttgggattgtatcacattctgttataattgggttgtccttaggagtttcgcaaagtccttgtaccataaggccattaattgcggcgttatcttttcatcagttttttgaagggtttgcgcttggaggttgcatttcccaagcgcagtttaaagcctcgtcagcaactataatggcttgtttttttgcactgactacacccttgggtgttgggattggaatggctatctcttcggggtataacccttacagccccggtgcactcatcgccgaaggtatcttggattccttgtcgtcggggattttggtttatatggctttggtagatttgatcgctgcggattttcttagcaagaggatgagttgtaactttaggctgcagatactgtcttactgcatgcttttccttggggctggattgatgtcttcgctcgcaatttgggcatgatgtccctcccctatatagttgtaattactgctttgttcaatatttgatttcatatacgtttttttttttcc

SEQ ID NO: 76026 - DNA, 464 bp, Glycine max
  Clone ID: PAT_MRT3847_39666C.1
acgaggctgtgtgaatttttgattgaagaaggagcagaggttgatgctgttgatagagctggtcaaactcctctaatgaatgctgtgatttgctataacaaagaggtatgcttattttatgtttgtgcacacgtgtgtatgctgtaaaagagcaaaagtacaccaggctcaatgtttttgtttgtaaaattcctgtccgcctgtgtattaaaatagtggatgtgacttcttgattcatttgttcattttcttttgatccaatccaattgcttaattagtttctttacatgcgaatttttcaagaagggtgctatgttgattgtttacaactgaatcatgcaagtatatttttctgtacttggtgttcttttaacaaatatttcatccttctcatctcaaattaagattatgcttggtccttgcttgtaaggcctggtcaacaacaatgaagcattgaatgacag

SEQ ID NO: 76027 - DNA, 242 bp, Glycine max
  Clone ID: PAT_MRT3847_39667C.1
tgctaccttggcatcaatgcccataggtattacatttaaaatttcttcaatcaagggtcattaatctgtggtggaaggcaaattaatggcctgtacaccggtattttatttcttgggggtcaaaaatggggaacaccggccttacatgggcctttggcactggcatttcattccgattcctgggggaaatggggttggaacctttaccaggcaaggcaattcatgggttaaggtggattttc

SEQ ID NO: 76028 - DNA, 172 bp, Glycine max
  Clone ID: PAT_MRT3847_39668C.1
gaatcggtcggcggctcgagggagggttgggtgactgtgcaggaggaggactgggtggtggtgcaggagactgagttgacgctggtgctggtgccggtgccggtggtggagctggagctggagctggtggtggatttccatgaaaacattaatattgttacactctccatat

SEQ ID NO: 76029 - DNA, 272 bp, Glycine max
  Clone ID: PAT_MRT3847_39669C.1
atcagcagcaacagcagcagcaacttaaaaacttgcctgttcagcagcagttaccaaatgtcatctctcctatgtctaagtctgcatgggaggagattgagactgggtacctgatgcaatctcctcccatgcaagccctagcttacattgtcagcagcagagctttcctgaacctatgaggaatcatatttccggttctgatgtttcccctatccagagtctactagggtcattctcccaggatggaacatcccagttacttaacttgcgtg

SEQ ID NO: 76030 - DNA, 469 bp, Glycine max
  Clone ID: PAT_MRT3847_3966C.1
cttgggggggggggggggccaacgccgataaacccgaaatgcgaaggtcgggaataagacacgcaacggataaggcgctagagagaagaattagacgatagaagtagtggtccgggtgtgggtgtttttatgagttcgtcgtgtgcgggcttgcggcccggcgcgatatggtgggtgatgggtaaactactaagacaaagataaagcaaagaaagtcaaaaggtaaaggagatacccaaaaaaagtacaaaagatgcaataacaaagtgataagggcgcttcttaacgtaaactaaaggagaatacttgatacacctgcgtaaggtaggtggctatcagttagagtgtgctagaggaggcattctatatgaacacagagagggcgtgtgagggggaaagctagagttatagacaagtgcggctggcttaataagccgcgtaggcaagcaaagtaccggggtatagaagt

SEQ ID NO: 76031 - DNA, 705 bp, Glycine max
  unsure (1)..(705): unsure at all n locations
  Clone ID: PAT_MRT3847_39670C.1
cctttttttttttttttttttttttttcttttcagtatagcatgtttctttttttttttttttttcttttttttttttttttttttttttttttttaaaataaaaaaagcagattgaaccggtaattaccaatgatttcccttatttgaatttatctctttcaactccccggaagggggaaaagtgttaaaaaaaaagttcacatttgtcagaagctattaaaaatttaggccttcagttcattcatcgtcttcattgatgattagaagtattctgcttgtcttcgcccttgtcttttggaaatggagaacccttggatttcaatatctgttggcatactgagtttaaatcttctgtcttgctcttgatatcacttgacaataatactggatcaaagttcttagggtaaagatcttgctgttgcctcatctctcttagccactgctctgctttattgcactcattgatgatctgttctttatcttggggtggaagagaatctgcagacattcgatactctacaatgcaacttaacaaatctcttgtagcttgtggtcttgcttctgtgtctttataccgaaactcaattggatccaccagctgttntagatcttctagttttgcagaataagcatctacagtttcgtcatcaccatcatcataaagccaatcctcagtcgcttttaggctcctagatatggcctt

SEQ ID NO: 76032 - DNA, 275 bp, Glycine max
  Clone ID: PAT_MRT3847_39671C.1
aatacgacttaaagggcactgaaacgcaaggctaaataggcaacgaatctcaggggatcacaatggaacaagcaaatctaaacacaaggggccaagcaaattatgccaaaacggggaaaatagccaaggcggaaccatgacaacgcgagaggtccggcccacaaactccgaaattgaccgttagagacaccggggtaaggagtgcggtggacacccgatagccgggtacttttacaaccataagggcgcgcccggtattggagcacctgaagacc

SEQ ID NO: 76033 - DNA, 239 bp, Glycine max
  Clone ID: PAT_MRT3847_39672C.1
cgggctctacacgcgtacgctcaaggagatcgaggccgtccccaaagacgagggctaccgcaaggccgttgagtccttcaccaatcaccgcctccagatctgccaggaggaggacgactggaagcgcatcgaggaccgaatcggatgcgggcaagtcgaggagctcatcgaggaggccgaggacgagctcaagctcatcgccaaaatgattgaatcggatccgtggggtgtccctgatg

SEQ ID NO: 76034 - DNA, 2060 bp, Glycine max
  Clone ID: PAT_MRT3847_39673C.1
ggactctcctctcaaacaacatggtcaatggttgcttctctagttctccacgccacgatgcttttccagctggtttgcgagttcttgttgttgatgatgatctaacatggttgagaatccttgaaaagatgctcaagaagtgcttatatgaagtgactacatgttgtttagcaacagaggccctgaaaaaacttcgtgaaaggaaagaagcatatgacatagtgatcagcgatgtgaacatgcctgacatggatggtttcaaacttctggagcaagtaggacttgagatggatcttcctgttatcatgatgtctgttgatggagaaacaagcagggtgatgaaaggtgttcaacatggagcatgtgattatctccttaagcctataaggatgaaagaactgcgaaacatatggcaacatgtctttagaaaaaggatgcatgaggcaagagattttgaaagccatgagggttttgactttgagggcattcacttaatgagaaatggatcagatcactctgatgatggtaacctgtttgctgtagaagaaactacgtcaattaagaaaagaaaagatgcagataacaaacatgatgacaaagaatttggagatcattttcccacaaagaaagctagagtagtttggtctgtggatcttcatcagaagtttgtcaaagcagtgaatcaaatcggatttgatattggtcccaagaaaattctagatctgatgaatgttccatggttgactagagaaaatgttgctagtcacttgcagaaatacaggctctacttgagtaggttgcaaaaggaaaatgatcagaaatcttcatcaagtggaataaagcactcggattcaccttcgaaagatctaggaagttttagttttctgaacactgcaaacaagcaacaaaatgatattgccactgacagcttcagttattcagatggaactttactaattcagatggatgctacaagttatgaaggtgatctcaagggaattgtgtcagagcctacaacagaaaaaagaagagcttccactagtgaaattccggatccaaaggtacaaaaaagttcgcagaagagcctcaacaaaccttttacatctgtagagtcatcagaagcaaaccatgcagtctttgattgcaccataccaacagaatactcttggagtgagtttccaaaaggtccactcaaagaagaacagaagacacctgttcaattagaggatagcctctgccagttgccattgcatggtacacagcatcacattcagattgatcaatcacaatcaattgcctcaattaattccaatccctctataacagaagaagaggttgctgccaaattagagaccaaacctttgtatgctggttacgagagtgattatgtgaatcctgtgagttcaataggatctgcagttgaagcctttcgtagtcagtccaaaagccttatggtgagtgatcaatcttcagagcccactttcacctcgaatttgagcttgaagactcagggattcaatctagattgcatttctgatctggatttttaccaaaggaacctattattgggtggtgaggtagcttctgcacctttggatgaggacctgaatttctttttgctacaaagtgaatgctacaacatgaattttggactgcagaatatagatatgtcagagtattatgatccaaggcttactgctgaagtccctagccacttttatgattcagcagattattcatcggtagatcaaagtctattcattgcatgatcggtcctgctcttcccttttctgcatcttcaacaaaaatccaactaaatgcacgaaaggacgatttactgtcacaacttgaactttctttttcctttccaagaatatcaactttagggggctggggtattcttttttccaattagaaaggattttgatattgaagcacagataaaagtggatgatgtgtgatgacaaacgttaagcttatcaataagcttgcttcctttaatactaataactgaatatttggagaagcataatcttgtgtttgtaagttcagagtgattc

SEQ ID NO: 76035 - DNA, 456 bp, Glycine max
  Clone ID: PAT_MRT3847_39674C.1
aaaggaaaaatataattattaccctggattggaccgaaaaattttccaatttttttttttggaacagggggagaaaagaacttatgacttcctaaactttcaaaattccccacccctaacttagggggggggatttttcaaacccttttttttttagggcccaagtttttttacctgcctttttaagatgaatatatgggttaaccaacgggggctttttccccattattatgaaaggatgattttttcttaactggtgcgattcaattaacaatttctaattttaaaaccgacccccactaaattaaattaaatggtgacccttcacccagtattttatattatttttaaattttatggggggatcacccaaattttgggagaattttgggggtgttttttaaaaattatggaaaacatattattttctttttttatgggtttttaaggaagggg

SEQ ID NO: 76036 - DNA, 506 bp, Glycine max
  Clone ID: PAT_MRT3847_39675C.1
ctacgcgtggggtgctcccaggacctattgggttgtaaatacacaaaacccttttgagtgaaatagggggaaggggaaactgactaccccccagggcacttcccgaagtgagaaaagaatgcctctttctatagggggaggagctggtgcaaagaatgctattctcatgaatatgccaaatgctgttctgtcaatgaggacatattatgttggagatctcgtgtttgaagaatctaagatgacttatgcctacattaaatgtgcaggctctttcttcatagcaattggaaatttggctggtgacaccagcaatatagaggctgcaccgcacaagctggagcattatggagagattcaggaaaaagctgtattgaaattttcacaagaggacattcttacagctaggtcaactcaggtgcgtactgcaacaactctgatggctgatgggtgaccatacatgaatgctatggtgcatgatagttcagcgactacaataccaggtgatt

SEQ ID NO: 76037 - DNA, 1136 bp, Glycine max
  Clone ID: PAT_MRT3847_39676C.1
ggtccggatcccagggtcgacccacgcgtccgcgaagaagaagcactgtgattctgattctttatcggtcgttgcaattggtgcctccgtctttttcatccctaaccccactccacacccttcgacgcgattcctattctgatcgttagtggggcaagggctgtgggtgaggatgaatttgcaacaagttggacagcctaaatcatctaatggatatggttgttggaaatctgaaaaagaaggggcaactaagtctgataataagatcccgtctggaaagtcaaatgccagcagcagattagcaagtgtagtgactggcaataaaggtggtagttatgggagtccttcacatgatcgattagtatatttaaaaacatgccttattgggcagcatgtggaagtccaggtgaaaaatggatctatatactctggaatatttcatgcaacaaattctggcaaagattttggaatcattttgaaaatggctcacttaacaaaggatgctgctttgcaaggaaaagaatctggtgtagaatttgtcagtaaagctccttttaagactttaattatacctgccaacgaccttgtacaagttattgcaaaggatgttgctgtttctagagatggcctacctagtgaatctcactatgatatgcatcaagatcatggattcagtaatatctcgatcctgtcatgtcgaggtaagcgcatcactacagcgatgggtgactgatttcagggagtcaactggccctaagctggaaagatacaccactttctcacatatctgatgctgtatataaaacatcaatggactggattaaccaacgttctcctgaggcacttagtacctttctgatttggtctttagatagcattcttgctgacttgggtagccagcaaaatgtggccaagggttccaaaaaggccgtgcaacaagtgtcctcaaaatctcaggtacttatactatatactcttctctgtcaagaactagtgtttttcccccttctgattattattggataacagaaataacttgtattagaagataagatttgttagagagaagaaggaaaacgaaacactcttgaaaactaatagcaaggccactcaccaaattgaaccaaagctaagct

SEQ ID NO: 76038 - DNA, 461 bp, Glycine max
  Clone ID: PAT_MRT3847_39677C.1
cttctcatattttctttttttagacgtatttgatgataagacttgcaaaccgcattcaaaaataacatcatctggactcgtgatcatttgtttatgtgagaaagacattagagctttttagtatgaatcaaaattttattctgaacttaataatattctttcgatcctctaattctatactactagtgctccctacataatgcgactaacttattgaaagtcatgtttgatgatccacctttcgccattgctgccggggcactgattttgattttaaaaattctttgtctaatcaccttccctttgtccgaggccatgagttccatcattcggtcccccaacttgggggaactcactaacccgtctttgttttgatttaccgacaaaaaccacctttatttcctccaccaagatcaccttattcagcttctgctttgcgtaaagaggccacgcaaccattg

SEQ ID NO: 76039 - DNA, 912 bp, Glycine max
  Clone ID: PAT_MRT3847_39678C.1
cctcgagccgaatcggctcgaggcaattcccatctcatggccatctacaaacaataatcatcatgctcttctccttgtttcaccaggaatgggtcacataatccctgccctagaacttgccaagcgtttagtcactcacaaaatcatttccaaactcaccttcttttatggttcaatcaaaacctctactccatcaaaagctgagacacaaattctccaatcagccataaaggaaaaccttttcgatctaattcaactcccccctattgatctcaccatccatgttagtcctcatgacaccttagaaaccaaaatagcaattataatgcatgaaatcccactactttttgtgtccacaatatccagcatgaacctcaacccaaccatgatcatcactgacttcttcttcagccaagttatacctctagccaaaaacctaaacctacccatatttgcttttgcaccaaccaatgcatgggtcattgcacttagtcttcaatgccccactttggataaagaaatagaaggagaatatagcattgaaagcaaaccgatctcaatcccaggttgcaaatccgttcacccccttgatttgattcctatgttgcgtgacaggacacaaagggtctaccatgaatttgttggcgtgtgtgaaggggcagcactggctgatgggatatttgtgaacacgtttcatgagttggagccaaagacacttgaagcacttggtagtggacacattattaccaaggtgcccgtgtacccggttgggcctctagtaagggatcaaagaagccctaatggtagcaatgaggggaaaataggtgatgtttttgagtggctggacaacaataagaagtttctgtggtatatttgtcacttgggagtggatacacaatgtcattcgaggaa

SEQ ID NO: 76040 - DNA, 247 bp, Glycine max
  Clone ID: PAT_MRT3847_39679C.1
atctcacaaatattttaaaatggtgacaatgtacctgtttcactaggtaaaagcttacagaagcagaaaagaccaacctgtttgagcacacctgataggggactatacacaaaactaaacttttaggaagttttggcactaaaaactttagagagagtgccgctcttttttttggaaaacccgaaactcgagttacaaacctttttatttttttacaaaaggttacacagaaatacctcttttcaag

SEQ ID NO: 76041 - DNA, 230 bp, Glycine max
  Clone ID: PAT_MRT3847_3967C.1
caaaaaggcccctactcaaagttctttaagggagaaaaaccggcctaaaggtcttaatataacctaacccccccaggggggggggggttttaaaaaaaaaaaattttttttaatttgttttccaccccccaataattaacaacttttttttttaaaaaaccaagttccataaaatataaatttaccggcccttaaagggttgttacccccaatgaaccaagattttgttt

SEQ ID NO: 76042 - DNA, 1479 bp, Glycine max
  Clone ID: PAT_MRT3847_39680C.1
ctcgagccgaatcggctcgagttgagttgctgctgctagtgctatcgcactgtcacgatcacgaaactctgaagaatcaatggtggggaatagtgaagaagaccgagatggccttcaccaatcgccgttaggaatcccggaattgctctatgtttcggtgaagatggagaatcccaatctcactctctctggggaccttctccctcacatatctggctcttgcccttctggggatccttccaaagctctttctatggaacgggaatcagcgtcagtgtgggagttgagctttgttgttccacctaatcacgaagctttagagtttaagttccttttgaagcccaagtacatcgataatccttgttttgttgaggagggtccaagtcgagtacttattgggggagcattgcaagatggtgacaggctggctttgtttaggcttgatagtgatcaagttcttgagtatcgagtatttgtggaagcaaaaagggcttctccctttgatcttgcagctaggtggagggcttatcaggagaatttccgtctttcaactgtacgtgggatacctgatgtcagcataaattcagaggttcagacaggtagtgagaacatctcatctgcgagtttggaacttgatcttgagcattatattgttccatctccccctgtttctgcaagttcagcacctgtatatgcggctaacttgacagagaatcccagatcactaggcagtgggtctgccagcatttcatcttctactgtagatggcagtgtttctatgatcaatcaaccagagacagtaaagttgacggaggttaatgtccctgatccatctaaggtggacgcgtggcctggaatggttaaatctcagtctgtgggaacaatttcccctctgcaaaaggaagacgatctgaggggacttcttgttgataggggtgttggagttcccagacttgtaaaatcttctagttcaaatgctttcactaatcttaatttggtcactgatactaagaattcaattccagctgctgctggagctgttgcagctgctgcgattgctgatcagatgctaggtcccaaagagcatagacatttggcgattgtcatggtgagtttgccagctcgaggcaagacttacactgcagctaaacttacaagatatcttcgatgaggtcataataccaaacacttcaatgttggtaagtatcgtcgccttaagcatgctagtcagttgctgattcttcgagctgacaatcctggaggcacgtaacgaggtagcaaaggcatttgagaatgatatcttggatgatcctggtgtgtctgtcaacccgttgtaaaacgatcgctgtacttgaacttactagatatcttaactggttaggtcatgataacgaacacttctatgatgggtggccaggttgggatatttgatgccacaaacagtagcaagcagcgaagaaacatgctgatgaaaatggc

SEQ ID NO: 76043 - DNA, 339 bp, Glycine max
  Clone ID: PAT_MRT3847_39681C.1
ggctcgaggatatatttcgtgtttggtgttctaatttttatttctctggtttggcattcttatttactgtgatattctgtttgttctattagtattacttggttgttcatcctctgcctttttaaagttcctgtattctcccttttgctttatcttgtttatttttgatagcgggagaaacatggtattttgagcacttctacagtcctgctttgtggatggttctttttagttcttcattggctcattatgtagccctggagtttgttgtaggttggtgtaggtttaagatgatgaatttagtgcttctcatccctgttggggctagcctatgtagtt

SEQ ID NO: 76044 - DNA, 853 bp, Glycine max
  unsure (1)..(853): unsure at all n locations
  Clone ID: PAT_MRT3847_39682C.1
aagggtcggaattttagaaatataatcatcaatatggacatcaacggtacattacatactataaaaattcataaaggacaaactacaaaagggaaatttatgtatatagctctgactaatgtgaagagatgggaaatcccactaactgttttctggctaatgctatgaaaatgcaaactacaatccccttttgcaacttcaatttccattttcctagcaagaattaggcagaggttgttccttccttttggtccccaaaaatgcgttgtcggaagtcagaaaccattagagggagtcccttccgtaggtccaccttgggttcccagcccagttgctccttggccctactaatatcaggctttctcttgtgtgggtcatcctctgtgttgggcctgtactctatcttagcctctggatctattgtttcttgtaccaccttggcaagttcaagcatggtgaattcacccggatttccaagattgaaaggtccaacatgttcaccttccataaggcgcatcagcccctccaccaaatcagaaacatattgaaaactcctagtctgcttcccatccccataaaccgtcaaaggctccttccttagtgcctgagcgacgaagttactaacgacgcgaccatcatctaagcacattcgtggcccgtaggtgttgaaaatcctagctattctcacctcgactccagctcctctgtggtaatccatggtcaacgtctcagcagtacgctttccctcgtcatagcagcttcgaacaccaatgggattaacgttgccccaataggtttccttttgngcggacgcggggtcgaccgggaattcggnccggataaacgactcact

SEQ ID NO: 76045 - DNA, 379 bp, Glycine max
  Clone ID: PAT_MRT3847_39683C.1
cggattattgctttttgtgctggtggcttttcttgcttggggaatactgcccaacactaaaaaggaggttgaaatcacattctcctttaaacactgtaaaccatggaaaccaatctttgtcctaaataatattatggtttggtccttgggattaacacaagggcttaccaagccttgagcttacaatttgagtcttcccgggtcatttgggtcggcccgataaaaatttaccagctccgaactttccaggcggtaaaatttgctaggcccccccctccactgggttagaaattaaatccttgtttaaaacaaccaaagggaaaaaccttcttttttttaaggaccggggtgaaaaccccaggcgaaagattccctcggg

SEQ ID NO: 76046 - DNA, 714 bp, Glycine max
  Clone ID: PAT_MRT3847_39684C.1
gcacatacaataaaaatttataaaggacaaacgataaaggggaaatttatgtatatattagctgactaatgaactatgaagagatgggaaatcccactaactgttttctggctaatgctatgaaaatgcaaaactacaatccccttttgcactcaatctgaggtatattttgtagaacaaactccaatttccattatcctagcaagaattaggcagaggttgttccttccttttggtccccaaaaatgcgttgtcggaagtcagaaaccattagagggagtcccttgcgtaggtccaccttgggttcccaacccagttgctccttggccctactaatatcaggctttctcttgtgcgggtcatcctcagtgttgggcctgtactctatcttagcctctggatctattgtttcttggaccaccttggcaagttcaagcatggtgaattcacccggatttccaagattgaaaggtcccacatgtttctccttccataaggcgcatcagcccctccaccaagtcagaaacatattggaaactcctagtctgcttcccatccccataaacggtcaaaggttccttcctcagtgcctgagcaacgaagttactaacaacgcgaccatcatctaagcacattcgtggcccgtaggtgttgaaaatcctagctattctcacctcgactccagctcctctgtggtagtccatggtcaacgtc

SEQ ID NO: 76047 - DNA, 575 bp, Glycine max
  Clone ID: PAT_MRT3847_39685C.1
aataatgaatttttatttcataaacttatttattcaccacctgcatattcttatattataactttcaaaagctcatacattatcaaccatttaaatcatattacatgatccaaatctataatcaaaatgcaaacagtagtttaaaaaactcttcaagcgttccttcttactcaacactaatatatagcatcaattgagattcgtgaaacatttaaccaatctcattggaaggaccttcttaatttgcttccaaagatgcttgacgatgcttcgtgtcatcacataaacagggaattgaatcattgcaaatatagtgacgggaaagaaagcagcactatatatcaatgttgaggtccaattcttccattccaagcgaatggtcagcaacatggttgcactgaatgctaacattgttgtcatcaatgacaagaacaacaaagcgaatcccaaatttagttttcgtgggagagacttgtgaaaatcccacaactcacatggggaagtgaggatggaaaggaacaccaccactgaagctagtgaggtagcaagtgccacgacatccataatagtgaaaa

SEQ ID NO: 76048 - DNA, 431 bp, Glycine max
  Clone ID: PAT_MRT3847_39686C.1
ctgcaaagcattggtggtgacgctcaacagagcctatcccaaggattggagtttgaagcacgggccaatttacagtctatgaagttggttttgcacacctgttttggagatatactccctggtagccacataaaaagaaaatgcgagctgtctgctatagataccgccatagccttctattgatttttgggaccggtggcccttagggtaaaaatcgggttttcttccgttggaaccctaatggagaccacctggtcttgtccctcaagaaatccaagatttatttgaacaagcagtggcttatgaggaggaagcttcagagcatcctcggttttgacattatcaggcaacagacttgaaaaggcgggttctgaaaaattaatttgctgatgatctgcgcgattcaaaagtggaaaataaaccttgtggga

SEQ ID NO: 76049 - DNA, 289 bp, Glycine max
  Clone ID: PAT_MRT3847_39687C.1
ggctcgagcgcatgggaagatcacgtggtcgaatatctgttctttgacgattgtaaccctcacgggggaaaaaaagcccaagagggcagaagagatatcagaatagcgaaaagaaattcttctgaattgaatcgttatggatccaatgaagaggttgagcgctgagatacttatgaatcataatagaagctagtgtgtaaccgtgccgcactataaagttatatgaacccttgctcttaccgccaacctcatctaggacacaccttgatctaactcactgggcttacac

SEQ ID NO: 76050 - DNA, 126 bp, Glycine max
  Clone ID: PAT_MRT3847_39688C.1
tagggaaaaattactatacttcctcaagattatcaacaagtacctgggttaatgttatttcaaatgctgggacttacaccattttggggatgatgtatgacacatcattttgaaatgcattcacac

SEQ ID NO: 76051 - DNA, 781 bp, Glycine max
  unsure (1)..(781): unsure at all n locations
  Clone ID: PAT_MRT3847_39689C.1
ttttttgttttcagggttggaagaagaggtgagtgagggtattattattattgctacaatttatcttattttaatgtataattatcacaatgtcttgtctccatatccattcttggaattattcttttgatattgggcatgtctccatattcattctttgtcaatgtatctcgtgttataaactttacgccatatgttgatggtgagcctggattaaattgatgatgccatttgataacaatttctccaatgagcatgcttccttttgatacctactctaaccttgcttaatcttttctattttggccaggctgatggctattaaatttctcatgtttgtctcacctatatgtgtgcatttgttcagtttaattttagaagttcttcctacctacaactttatacttctccttcccttccaggtggcgaacaaatggtttgctcttcaaacaatgtctgacatttctggtaatgttgagaatgtgcggaaactgttaagtcactcaacatttgatctgcgcaatttaatgctgttaaattggttcatttgcttagttataactcaatttgatcaggtttgtgatggttgtccttacatcttaatttcttttgaaaattcatttaggcctaaatggacttgattgtattctattactagaactacagtgtaacctgtgacaaggatgaacttacttatnnnnnntnnngtagagttagtgatnnnnatctaggaacaatgatgtcatgatntagttgtagtatgatataattgcaactatat

SEQ ID NO: 76052 - DNA, 279 bp, Glycine max
  Clone ID: PAT_MRT3847_3968C.1
ggctcgagctctatcgaaggtggcctacattgtctacctaatcgcctctggcatttggctcatgtcctccgtcggcaacaccttctttctccacccattcactcacacccggattattcctgaccatgacttgaacctcgagatcttcaaatcgcctgttctcacatcctgctggcgtgcgctgtcttcgaaactgcctctttcgctactacctcaccgcgacgcggacatagcactcatcgtcgtgaccagattcatcccctgatactcgttagaatc

SEQ ID NO: 76053 - DNA, 1692 bp, Glycine max
  Clone ID: PAT_MRT3847_39690C.1
cccatccgtgcgattttctttgcatgctcacgtttttcaattttcaagcaaagcatccgcttcacttgatcacagtttcctctattaacactccacattctcacatcttcactcctatatctcgccgagaaaacttctcagctaacagttagcaatggcgccacccgccacctccaccggcggtacgctgccggagctaactaaccgaaccccctttctcggcctcaaactctacgtcctactcctaattgcagttctaatcgtgatcgcaacggtgatcctgatcctcgtgtgcgttcgccggagccggagctcgaagaagcggaaaatgcgagtgaagcacagctccggcgcgatccctctggtgtcgaaggagatcgtggaggtgaatactctggagctgaaaatcgatgaggaggtggagattgagattgaagagagtgcgtcggcggagtcgccgaacatagggtggggacgatggtatagtctcaaggagcttgagaatgcgactgaagggtttgcggaagtgaatgtgatcggagaaggaggctatgggattgtctacataggaattctcatggatggatctgttgtcgctgttaaaaatctgagctacgttcagttagagagaaagatcctgtgccttctgcagtgcggacgtttccattaaagttccttatccaccaccaaagcatgcagaaaccgtagaaaaatcaagatggagataattgtttgtaatgttggtcatgcaactttggggatcaatctatttgtataaggattttcgtgatgttatgaacgagttttgagtctctgtgcatatcttatacgttgtagctttttccttcaggtttcaacaccattttgttgtattgcattatcttggaaccgagaagagcatggcttgtaaatacgcacctcactatttgtcaatttttgtctgcttgtggatacattcaaggaagttaagtgcaaatgcgaattcacgtaggatcatttaaaatcaggctgaaattttaagcttttaggtaaagcactggtatgcttaatgagggaagcgatgtgtatagttttgggattctactgatggagctaattacaggaaggagtcccattgattattctagaccacctggagagatgaacttggttgattggtttaaggtaatggttgcaagtcgtcgaggcgatgagctagttgatcctttaattgatattcagccctatccaagatctttgaagcgagctttactggtttgtcttcgctgtatagacttggatgtcaataagcgaccgaagatgggtcaaattgttcatatgcttgaggctgatgattttcccttccgttctgagcatagaacaaatcgagagaaagatcctgttcattctaaagcagctgtttccagtaagattctatacccaacaaggcatgtggagcccgcagataaatcaagctggagatgattatctgttgtgctgttcatggaaacctggagatcaaactatttgttccaacgattttcaatttattatgaaaatgtcagaagccattgtgcataaatagtgtagtttcttctctgtaggtccgtctgaacatatattttgctgtaatgtatggcatcgtcttgtcaagaaatgaactttgtagatatgaatttcccacaacatataaattttatcaatttgcctgag

SEQ ID NO: 76054 - DNA, 1653 bp, Glycine max
  Clone ID: PAT_MRT3847_39691C.1
ctcgcttcttttcttttctttttcttcttttcatttttcaattctcaagcaaagcaacaacttcactcgatcacagtttcctcagcaacaaccaagcaaacgccattaacacatcttcactcctcagtcagctaacagcaatggctgcatccgccacctccaccggcggtgcgctgccggagctaactaaccgaactcccttactcggcctcaaactctacgtcctactcctcattgtagctctaatcgtgatcgcaacggtggtcctgatcctcgtgttcgttcgccggagccggagctcgaagaagcggaaaatgcgagtgaagcacagctccggcgcgatcccactggtctcgaaggagatcgtggaggtgaatactctggagctgaaaatcgatccgaagaagaaggaggtggagatggaagagagtgcgtcggtggagtcgccgaacatagggtggggacgttggtatagcctcaaggagcttgagaatgccactgaaggctttgcggaacagaatgtgatcggagaaagaggccaaggattgtctacaaaggaattctcatggatggctctgtcgtggctgtcaaaaatcttctcaacaacaagagaagcagtgaatattcacggaaacttggaacaatggctgcatgtgatgtaccagctagccccttgacatgggatattcgaatgagaattgctattgggactgcaaagggctagcctatctgcatgaaggtttagaacccaaagttgtgcaccgggatataaaatccagtaacattcttttggataaaaactggaatgccaaagtatcagattttggactagcgaagctcttaggatctgagaaaacacacgtgactacgcgtgtaatgggaacatttggatacgttgcacctgagtatgcaagctcgggtatgcttaatgagcgcagtgatgtatatagctttggagttcttctcatggagataatcacaggaagaagccccattgattattcaagaccacctggagagatgaatttggtagattggtttaaggcaatggtagcaagtcgtcgcagtgaggagctagttgatcctttaattgagattcctccccctccaagatctttgaagagagttttattgatttgtctgcgctgtatagacatggatgtcgtaaagcgaccaaagatgggtcaaattattcatatgcttgagacagatgatttcccctttcgttctgagctacgttcagttagagagaaagatcctgtgccttctcatgcggacgtttccattaaagttccttatccaccaccaaagcatgcagaaaccgtagaaaaatcaagatggagataattgtttgtaatgttggtcatgcaactttggggatcaatctatttgtataaggattttcgtgatgttatgaacgagttttgagtctctgtgcatatcttatacgttgtagctttttccttcaggtttcaacaccattttgttgtattgcattatcttggaaccgagaagagcatggcttgtaaatacgcacctcactatttgtcaatttttgtctgcttgtggatacattcaaggaacttaagtgcatgtttgtattcatgtaggatcatttaaaatcaggctgaaaatattatgattttaggtaga

SEQ ID NO: 76055 - DNA, 619 bp, Glycine max
  Clone ID: PAT_MRT3847_39692C.1
atctcatgtagactgataaaatttatatgttgggggaaattcatatttacaaggttcatttcttgacaagacaatgccatacaatacagcaaaatatatattcaaacggacctacagagaaaaaactacactatttatgcacaacggctcttctgactttttcataataaattgaaaatcgttggaacaaatagtttgatctccaggttgccatgagcagcacaacagacaatcatctccagcttgatttatctgcgggctccacatgcctggttggatatggaatcttactggaagcagcaggatctttctctctatttgttcgaagttcaaaacggaaggggaaatcatcagcctcaagcatatgaacaatttgacccatctttggtcgcttactgacatccaagtctatacagcgcagacaaaccagtaaagctcgcttcaaagatcttggagagggctgaatatcaattaatggatcaactagctcatcgccatgtcgacttgcaaccattcccttaaaccaatcaaccaagttcatctctccaggtggtctagaataatcaatgggactccttcctgtaattaactccatcagtagaatcccaaaactatacac

SEQ ID NO: 76056 - DNA, 652 bp, Glycine max
  unsure (1)..(652): unsure at all n locations
  Clone ID: PAT_MRT3847_39693C.1
ctcgagctcagatgaatttggtagattggtttaaggcaatggtagcaagtcgtcgcagtgaggagctagttgatcctttaattgagattcctccccctccaagatctttgaagagagttttattgatttgtctgcgctgtatagacatggatgtcgtaaagcgaccaaagatgggtcaaattattcatatgcttgagacagatgatttcccctttcgttctgtaagtactacacttcatccactccttctcagtttctcacaaaataccatttcatcttccttaaatgactgactttaagttgttaaacaggagctacgttcagttagagagaaagatcctgtgccttctcatgcggacgtttccattaaagttccttatccaccaccaaagcatgcagaaaccgtagaaaaatcaagatggagataattgtttgtaatgttggtcatgcaactttggggatcaatctatttgtataaggattntcgtgatgttatgaacgagttttgagtctctgtgcatatcttatacgttgcagctttttccttcaggtttcaacacctttttgttggattgcattatcttggaaccgagaagagcatggcttgtaaatacgcaccttactatttgtcaatttttggctgcttggtggt

SEQ ID NO: 76057 - DNA, 362 bp, Glycine max
  Clone ID: PAT_MRT3847_39694C.1
atcaaattcattttggaccaactttcctaattgcttgggcgcgggtatatttttgcgaacgtgtacatattcttattgagactggaatctccattagaacatcaatgcctgtcatccatttgggatgctctccctttaaaaggaaaaaaatgatgttacattacttctaccagataatgaaacaaattaatttcttgcactttaagctttcacctgcatatcttagacgtccttaagggtaaggtatatatgcggaaggaggacaagtatttgccaatgtccaattaaagacttgcaactatcgaactctgactgcatctcaacatagagtcaacctaccatgttactctattgctagtgtt

SEQ ID NO: 76058 - DNA, 227 bp, Glycine max
  unsure (1)..(227): unsure at all n locations
  Clone ID: PAT_MRT3847_39695C.1
aagacatcaacaccccttatctctctctctgcccaattctggtgattattcccctttcttcctccttactccttttcttccaattgggtcatttatttcacagcaacgggtttttgtttaggcttnttttttgcctaattttgctgtcactcacagtctatgttatcatcgaatcccaagtttcttcgtcaaatttcgtatcttttgctagcttattcttcctcact

SEQ ID NO: 76059 - DNA, 621 bp, Glycine max
  Clone ID: PAT_MRT3847_39696C.1
gatccacgcgttcgcccacgcgttcgtttacgcgggcgaccacacttcgtacactctaacagtcaaacggctctgaaacagattattgagttccaccggaagaccgacggttctgaaaagggagtactaccatgcgcagctgcgaaaggagtgctactaatagcttgtgtgatggccttgaccgtgccaagggctagagttcatggtataagcacattccttgatgcctgaccgaacaattccctggtgactacggatggaacactgctgtattatcagatgatccgctgaccttagacaccaaccgtgggctgcatgtgattcacaccgtatgtgcaatgcttggcgtccttggctgcaacgtctcagagatccttgacaaaaatggagggaaattcgcccaggccgggtggatcgaggccagtgcttaacatattgtgacatggaggaacttgactacttggacaacccacacttgatccatgctgaaagcatcctagatatcggatctgttcaggatggactaatgtggggtggccaaagttacaaaggccttcgtataccaatatgctgaaagacttgattgactatacggtggtggcgattttgacactattgttc

SEQ ID NO: 76060 - DNA, 578 bp, Glycine max
  Clone ID: PAT_MRT3847_39697C.1
tttttttttttggtatcaaagcataaaaatagattaagattgcaatcgttgaaattagcaaaaatagttttaatttctcaatcacgagggtattgcaaaataataaaatataactgggcagaaaaatccagagagaaactaaaagattccaacattgctgaaacataaaaagctgcgaatcctaattcgcaaactagaacagagatgttcccttgcccttcttgtcaccaccaatctcaaagtgcttgcacctcttaatagcgtgttgggagacatgcttgcaaccctggcattgcaacctcagaacaatcttcttggtggtcttagccttcttgtggaagacgggcttagtttgtccgccataaccagattgtttgcgatcgtaacggcgttttccttgggcagcaatgctatctttacccttcttgtattgggtaaccttgtgcagggtgtgcttcctgcactccttactcttgcagtatgtcttctttgttttcggaacgttcaccatggtgatgggggcgtgccggaatcggaagaagcagacacttcagctttgcgccgcgaaaaaaacccga

SEQ ID NO: 76061 - DNA, 1244 bp, Glycine max
  Clone ID: PAT_MRT3847_39698C.1
cccagcccggcccgtcctaacgtcgctcccacctgcgaggtcttgataaaagacggccaccgggggccgagcagggtccacgcgttgcctgaactacttcccccgaggaattcaaatttgaattgaatccctcaatgaattcaaatctggttgaaatattgaaagcagaagctagcaaaggcaagtcatgcaaggggtctagttgtcgtaaggcctttctttggctcacttggtccctggttgtcgcctcagcattgttaaaacatatatgtttgtatataagagaagtggaagagggagagtgagggaaggtaacaataagggaaatgaagaggagcagagatatggagaagagatcagagattaaatctgcaattgaagagttgtctatgctggttatagtcaaacctgaaggaaatcatgtcatgattgctcacatccccaccaagcctttcctgtctctatgtcacttggttctacaagttcttgataagataggaccaacgatggccgttttgagacaagacgtttcccagaatattaagaggttggaagtgatgcatgaattgaatccctcaatgaattcaaatttggttgaaatattgaaatcagaagctagcaaaggcaaatcaaggaagaggtctagttgtagtaaagcctttctttggctcactaggtccctggatttctcctcagcattgttacaatcactagaaaacgatcctaaaaaggatttggagcaaatagttcaagaatgttatgatgcaaccttgtcaccatggcatggatggatttcgtcagcggctttcagagtggctaaaaaactagtgccagatagtaaaactttgatggatctcctcaaggaaaaagatgaaaactgtgaaaccctaaaggagaaaatgcagatcttggtttccttgcttgtgccatttcttgaggatgttcattgtattcttaaaatttataacttggacaggattaagtcaacctgaagatagaagaactgatatacagctttgtgtagtactgtagacacagctatgtagtgtatattttggcttccttcccccgctgttttcatgtaaatagtttgtatagaaaaaattgcgtcaacacagctatgcagttacaagtttggtttcggctgctcaatatagattttatacatcaaatttgtatataagttgaattctaagttttattttgtctacatgaaagatctaatttagagccatgttacatcc

SEQ ID NO: 76062 - DNA, 1172 bp, Glycine max
  Clone ID: PAT_MRT3847_39699C.1
acgaggagagaactagcctcgagtttttctcttttttttttagtatcaaaagtataaaaaatagatagagattgcaatcgatgaaatgagcaaaatagttttaatttctcaataacaaggtgttgcaaaataataaaatataactagcagaaaaaaatccagagagaaacaaaacattccaacattgctgaaacataaagctctaaatcctaattctcaaactagaagagtgatgttcccttgcccttcttgtcaccaccaatctcaaagtgcttgcacctcttaatagcgtgttgggagacatgcttgcaaccctggcattgcaacctcagaacaatcttcttggtggttttagccttcttgtggaagacgggcttagtttgtccaccataaccggattgtttgcgatcataacggcgttttccttggtgccgaattcggcaccagggataacgaaatttcttagacaaaaaacaaggatcagaaccgttgaatcaagttgaggaagatggcactagtctctggaggaagatcaacactgaaccctaacgcccctctttacattcctgccgcgtttcgccaagtggaggatttctctccggaatggtggcagctggtgacgacgctgacatggtaccatgactactggctaagccagcagcacgatgagggagccttctacggcgaggacgacgggtttgatggcaatgatgtcgttgatttgcttcctgattcgtttgatcttgatgctggcgaggatctttttgaagagtttataagatcttctgaatcccaagaagaaactggacccaaagtaactgcatgaggcttagagatgaacccatttaaagaatctacctaccaacctaagagactggacccaaggccttagctttaggtcagttagatgatatgtttgcatcatgttatccgtagcttcaactttctgtaacttcttgtataggcaaaggtttcaaaccttcaatctatccttctcttgcttttgccaaaatgttatggtgaatagggaaggaaaaagatggaaaaaaatgtgactgtttcatgtactgatattgtaaaagctgctaaaagtattcaaattacaaaatgtaaaaaaaatgtaaaatgacttctctgttgaaaaaaaaaaaaaaaaaactcgggggtctttt

SEQ ID NO: 76063 - DNA, 614 bp, Glycine max
  Clone ID: PAT_MRT3847_3969C.1
gtgtatcctctcttttccggagcttcatctacaaaatcagcactaagcaccacaccatacaatactggtccattcacagtctccatccggaagcctatagagatcccattgaactgcactgcctacaacctcaccagaacatgctccaccaaccaattcccaatcccagaaaacgatcagagccatccatccagtgccacgtgtccagagtacttccgttggatccacgaggatttgaggccatgggcccgcacaggcataacgcaagacatggtggagagggcaaaggaaactgcaaatttcaagttggtgattttgaagggtaaggcctatttggagacttacgaaaaggcctatcaaacaagggatgtttttagcatatgggggattctacaattgttgagaaggtaccctggcaagatacctgatttggagcttatgtttgattgtgtggattggcctgtggttttgtctgatcgttacaatggccctaatgttgagcaaccaccaccccttgtttcgctattgtgggaatgatgctactttggatattgtctttcctgattggttccttctggggatgggctgaggtttacattaagccattggaggat

SEQ ID NO: 76064 - DNA, 497 bp, Glycine max
  Clone ID: PAT_MRT3847_396C.1
tcgcgtttgatgtggaatgggcataggcagtaatgggcgtagagtggttattggtgtgccatggcttggtcactgcggtggtcgttgcctctttcctctgcggtcgatggccaatctttgaaggcactttcattcaacgcattcactacttcctcactttcggcgcctacgattacttcctgtatctctctctctctctcttctccatttttgcttcttcaatttcaattacttcatctctctcttttgcaggcgtttcgttggcgctgttttcggtcctaagtgtacggattcggttctctccgtcgaatattactgctgcgatcgtcccaatcctcttctgcagattatatatattgtgataattggtgtaacatattatttcgttgcgaagtcttgctttgcctatatccctggatactatctaagtggaattcacaggtacacaagcttcttggcagatgctgttggaattctgctctctcttttgaccagct

SEQ ID NO: 76065 - DNA, 453 bp, Glycine max
  Clone ID: PAT_MRT3847_39700C.1
tggcttggaacctttgggctgatttatgtgcttgtataactctaaatattctaatcctaccctctcgtcttaaagctctaactccccacttaaagatctaaacgggtacggttataactataacgggaggaaattataaccttcttactatcttatgttatcataatatttataaggcgccttcccctcgtaatcatacctctccgggcgtagtcctcagtcgtactccttctatttctctctcgtgttctacctttctctctcgtggtcctcctcctacttcctcctaggctcccatgaccgtgggtgtggctcttgggcgtgttgttgcggggatcaataggcggcatctcgtatatacggcggttatcgcctcaatggtcactccctaaggcctcgccctggcggcggcgcccatgaggattggtgacccctcgggctaaccgaagctcc

SEQ ID NO: 76066 - DNA, 114 bp, Glycine max
  Clone ID: PAT_MRT3847_39701C.1
tttcgtttttcgattaagaagaacctgcagaagctgatttattaaacgctgacccaaatgcgtatggctgagcactatcaaaaattgccctttcccattggtattgaaacacat

SEQ ID NO: 76067 - DNA, 648 bp, Glycine max
  Clone ID: PAT_MRT3847_39702C.1
ttctttttttttttttttttttttttttttttttttttttttttttttttttttttttttttttttttttttttttttacccgggaacccacaaaaaatatttaaaaacaagggtttccttcccaagcttgtttaaaaaaaacaggggggcggggtatgaaaaaaaattactacctgattagggctaaaaaaaaatttttaaacactgttttttggaggcccttttttatccccaaaaattcaggggatttttacccatttaaaaatgggccctatcaaaaaaaaaggaaactcatttttttaataggatccccatgaatttaacctaacaaaaaaagtaaaaaaaaattggcctactagcatttttttaacaaattttaaacttaaaagcccaaaaaaaaaataagagaggcagagtttttgcccccaacaattcaacacaattttcaaaccggagggatactctccagcccccattgattcccttgaaaacgggaaaagggaactgaaaaaagttttcctatgctggcccccactttttaaggtggaaactcttaaaaaagcggggcaaaaaatttccttgttctgggagcaaagataaagctcaaaaatgctgcccataagcaaactacagttaaaattccaaag

SEQ ID NO: 76068 - DNA, 306 bp, Glycine max
  unsure (1)..(306): unsure at all n locations
  Clone ID: PAT_MRT3847_39703C.1
tactttaagggattttacattttcnaaactcatatgttacatttgttatcttttaaaaaccanagagcaaaacattnccctgctttctatttttttcactcataaaagtgacgtataaaataaaatcacaaaaaatatacagcaaatatcataattaacatcaaagtcagtccctatcacatgtcaaacatttaatataatcactagctaactatttagacaatatatacacacatataggtttattaattttacaactgtcaaaaaattacttacaaaaaaaaattttacatgataaaaatgtta

SEQ ID NO: 76069 - DNA, 136 bp, Glycine max
  Clone ID: PAT_MRT3847_39704C.1
tttttgaattgaacaatggcctttaaagaaacgtttagcggggacagcaagattcactcccaactggcacctgatttgaagattaattaaaccccgcggacttggtcgaccgtacattacacaaaccaaattccct

SEQ ID NO: 76070 - DNA, 483 bp, Glycine max
  unsure (1)..(483): unsure at all n locations
  Clone ID: PAT_MRT3847_39705C.1
caccattcctttcccccttctcttccgccaatttcagtttgagattattttgcgtttgtttatcgggaaagccgggaacgaaggagaaagagggcttcaatttcattccggaatgtcgtgggaagacgagattgtgatgcgcgatgtcacgaatgcgggccttgttatcagcgatcgcattggtcgtgaagtttcgtctcagctcgacctcgaagaagctctagaagcttccagatacgctagccacccttattccactcaaccccgagaacggacccctttagttgaggtggtgaatacctgcgagttgcctcccgtgctcattgaaagatacaatgcagctggtggggaaggaactgctttttgtggaatatttgctggaatacgaagggcggagggcgtctagggacaatnntattgttctttgnccttatgataaaagggaagggcgagggcctgaattaagggagaagagcaagctat

SEQ ID NO: 76071 - DNA, 145 bp, Glycine max
  Clone ID: PAT_MRT3847_39706C.1
ctcttgaaggaaaaaaaaaaaagtgttttcctggacattgcttgttgtttcaaaggatgtgaatgggaagaggtggaacatatacttcatgctcattatgaaaactgcattgaatatcatatgggggtgccgattgataaatccc

SEQ ID NO: 76072 - DNA, 323 bp, Glycine max
  Clone ID: PAT_MRT3847_39707C.1
cgtcattccctcgttgttcccgatcttttgtctccatcatcacacgttccgtgaaatcaaaaggccgctttctctgtgaaaccttgcttaagaattctagttgactccctctgactcctcctccttaataaactgtaatagccttcttgccttttctctcaagttcacattttatggggaaccctttttaggggaggtggatatatggagtgttcccacactcatggaatggagaccttgcattcggcggctactaagccgtcagacaagctctaccattataaacttatggatatattacaccgtattgttatggggggctc

SEQ ID NO: 76073 - DNA, 938 bp, Glycine max
  Clone ID: PAT_MRT3847_39708C.1
gctaaatttaattccagtagacccatgcacacccgacctactgcggcggccggcttcctcctcttacgagcctttcctttcagtccattgattcggtgggtgcgggtgcagcgaaaccgagctagaccctgatcggcgtcggcacaccgccggagaacaagatgattgtctgcgtcgccgtcgtcggtcaccagaacaatccgctgtacatacagagcttcacggaggccgatgatgctctcaagctccaccacatcgtccattgctcgctcgatgtggtcgacgagcgagtgaacaatcctaaaaagtctgggccgatgcttaatgagacgtttttgggactgctttatcctattgaaaactacaaagtatatggatatctgactaatacgaaggtgaaatttatcttggtgaccacggatctggatgttaaagatgcggatgtaaggaattttttcaggaggttccatgccgcatatgtagatgcagtttcaaacccattccatgtaccaggcaaaaagataacctccagaacttttgcagaaagagtgagcacaattgtcaagtcatttggcttgagttctgctgggtgaacatctataactggttcctagtatgatgatgcttggttgatatttggcacaacttttcttttattattctaagctcttgccgttgtagttttagctgtggtaaatgcttaggaacattttgatcagagttctatgttcaatatatcatattcaaattgaaccatcacatttgctttaacatgaatttgaattttgaaaacatttctccctacaaattgtatagcctggcccggctggttgcttgtcttctcgcaatatctttttacttgcctgagtgatcgaagtataggtttttaaggaaaaaaaaaaaaaaaaaaaaaaaaaaaaaaaaaaaaaaaaaaaaaa

SEQ ID NO: 76074 - DNA, 1797 bp, Glycine max
  unsure (1)..(1797): unsure at all n locations
  Clone ID: PAT_MRT3847_39709C.1
tggttgttcactgttcccaatgtacatccagaatccagcgtgggtgcgctccctgcggcttgcgtggttgtgtttcgcgggctagcagcgcccgcggcctatctcgctggaattgaggtggcaactgctgcatcttctggggacattaagggatacaagctctggtattacaagagtagggaggagtcgcacactaaagatcccgtttctgtgtttcccaaagctcagagaaggattttgatatccaacctccagccttgcacagaatatacatttcgggttgtatcttttacagatatgagtgacctgggtcattctgaggccaagtgtttcaccaagagcattgagatattggaaaagaattcatcttcatcagttgccatgaataaaaaaaaggagaaccttcaaactgaatgcaattcttctggctccgaaatggagcccaatcccacaatggaagacgatttatttaaattattgcgccttgggaaaatcatgcatccttcttgggctcaaggacctctggacatgaaggatttttgctgtgctgacaagagaaattgctgtgggcaaagtgaaacaatcaagcctaccaaactacaagagcagttgccttcagtttcgcgcgaccttttaataaatgttgttttctgacaatgatttaaatgaagagcttacacctccattcgagtcttctagggatgaagataatggttgcactttgcagcaggctgttgaggcagatgatgatgctgcttcgcatgatttagaaaaaaatttagcaagatcacacggtagtggtggttcccaaacttggaaccatggacctactggtgaagttccagcagttgactctcgtggagatgcatgtaggaagagggtagcaagcacaaatgaagagacacatgattgtgacagcactttgataaatgattctcctttacgtgcatctgatggtccattctccttagatgagaactttgagtattgcgtgaaagtaattcgctggctagaatgccagggtcatatcaagcaggaatttaggttgaaattgctgacatggtttagtttgaggtcgacagaacaagaacgtagggtggtaaatactttcattcaagctctgattgatgatccaagtagtttggcagggcaactagttgactcattttctgatattatatccaacaagaggccaagaaatgggctctcttccaataaggctgtgtcatcaagttaaggctgtggaatcctgttacccgagatcatccctatttgcttcaagactagtaccattttaccaaatcaaccctgattgtttctgccttgtacatgcattttttattactcaccgtgattcattttgttgggacaagtttttgtcctgctaaaaggatttgcattgatgattgcgcagacagtagtaactcattcatccttgaagggaaggaggatctcgggacatggaagtctcaggatgttgaaggcaatttgctattttactaaattactgcaattatttgtcaattatgaatttagtcaaagtagatattattagtgttgaactttcttttcattattactttcatttgacaagcaacattgtgatggctgattttattcatcccgtcattcttttgaaaaaaataaaaaaaaaaaataaaacactcacttctactaggactgtggttatcttgatgtgggtctctactatgtaaccctatctatggttgttatcatcatagggtgttgtaggtctgaagctaccactaatagtatatnnnnctaagctgnnngcac

SEQ ID NO: 76075 - DNA, 454 bp, Glycine max
  Clone ID: PAT_MRT3847_3970C.1
cacccaaaccaggcggttggtttggccggaggtaaacccaccaccaaataaccaacccgggggtcctactactacaagggggtttttaaaagaaaaaaacatcttttattggactggggtttttaagaggcccaatttaccaaaccgacccaaaaccccatccctaaaaataaactaccttggctagaaggctagttttgctaacaagaaaaaacccgccaaaatttatttaccatccttatttcccaaatcggggggattaattaaagacttgatgatgttgggcaaggcagggttgattaaaaggaagggggagggcaaggggaacctccccaaagcccataaggggggttgttctgaccttggggtaccaatttggggggcaatttttccttgggcttggaaaccggttcccccaaaccttgaaattgttgctgctgctgctgctgctgct

SEQ ID NO: 76076 - DNA, 679 bp, Glycine max
  Clone ID: PAT_MRT3847_39710C.1
cccacgcgttcgttttataaaaaaaaaataaaaaataaaaaaaaaaaaaaagaaaaaaaatttagaaaaaaaaataagggcaacgcgttttaaaggataagaaggttaaccaagggggcgtttcttttttgagcttttttttttggacacactgggtcaattttttgggccttagtttttgaaaaaaaatgggggggaaaccggttgggtttcctgagttaaccgccttttggccccttcgtttttttttttgtagccccttttttaaaatgccctttcccatttttgcctcccaattttttgggaaaaccgcgcgggtgtatttggccgtttctttgggcgggacttttggttttttacgcgcggtttttacgggtaatttgaccggctaatttgccttccacctaagggtttactctttttgttttttggctttctttcgggtcctccctttaagtttttcccgggggggttttattcggggggtcccttttaggctttggggtcctttttccgcggcttttttacccttaactttttttttttgtggaggcttttggcctgggtcaccggcttgttccaagggggtggcgctttttggggtttttattaagggttttttttttgcccctttttgtccccccaaagtcggcaataagggggttggggctttttttgg

SEQ ID NO: 76077 - DNA, 394 bp, Glycine max
  Clone ID: PAT_MRT3847_39711C.1
cccacgcgtccggttacatgggttgttttagtaccaacccataccctaacaaggggggaatgtgacacggaccggcttgagttaatttcattcagtgtagcagccagcagccataatcaacgtagcaattgcattaccaggttctgattcgttacatcagacaaaggaaggggtttgggtgagacctgacacaaaaacgttgcggaagcttctatattatcacctaaaaacgctaaccttctctttcacagacgacgacaccgccactaacggatctgattccgccttcaacagattcaccactctatctcgctgctgactctacttctcaacccaatctgacgatgctactgcaatcaaaaacaaggttgaagacataatgccaatcgctact

SEQ ID NO: 76078 - DNA, 1842 bp, Glycine max
  Clone ID: PAT_MRT3847_39712C.1
ggccaagtcaacaaaattttacttacataagttacaaatttacatattaacaacaaaatggagatagtattgtggtgtcaaatcagcaaaggataagatagttgtaaataactcaaataaaaagaagaaaaaagtggggtgatcctaactattgagaccatactctgaaggtttgctgggaacaataattgacatctttgtttgaataggtggctcgagagcttatctgaccttccctcctttgcataacaattattcctctctcttctcttctcttctcttctcccatggcttattccattcctctcatcatcaccttcttcttcttcctcttcggcactctctcccacgctcaagcccctgcatctttcctaatcccagtcaccaaagacgcttcaactctccaatacataacaacactttcatatggcacccctttggttcccaccccactggtgcttgatttaggaggtccttttctctggcttcactgtgcatcacgcaacacaccttcatcttcttccctcaccacccctcaccgttcccttcaatgcttcactgccaaaacccacaaatccaccaactcctttctctccagccccgtcgacgaagtcgaccagtaccaaccatgccaagtgttccccgaaaacagcatcaccggaaccatcgccgccgaaggagaactcgtggaagacctcatggcccttcaatcagccaaagaaaaaggacaacttgtggaacaccagagccgtttcacgtgttccccgaccaccctcttacacggcctcgccaagggtgccagaggcatggttggtctcggtaggtcccgcagctcgcttccttctcaggttttcgacaacttcagcacgcaccgaaaactcactctctgcctttcctcctccaaaggcgttgtcctcttgggcaacgtggcaacctacgagtccgaggttcttaaatctctcaccttcacaccccttgtcaccagcttccccacgcaggaatacttcatcaacgttaactccgtcaaaatcaacggtaagaggctgtccaacgagcatgagggtggtggaggggttttaactcttttgagcacaattgtgccctacaccaccatgcagagttccatctataactctttcaagacatcttttgaagatgctgctgtggctatgaacatcaccagagtggcctcggtggcaccctttgagctttgtttcagttccaggggctcgcaagtggggcccagtatgccggttattgagttggtgctgcagagtgagatggtgaagtggaccatacatggaagaaactccatggtgagagtgagcgatgaagtactgtgcttggggttcttggatggaggtgtgaaccccagaaactccattgtgattggagggtatcaattggaggatgtcatagtgcagtttgatttagccacttccatggtgggatttagttcctcccttgtcgccaaaaataccaagtgttccgattttaaatatgccagttccataactgcagactcgatttgaatattttaacccaccgctttgaggatgggctttctagtactaagtactaagttttcttgcttgattttatgtttttgaagcttctcagatctcaattactaagttttcttgtttaattatgtttctgaagcttctcaattttgtaacaacttgattttgggtagtttttttttttctttttcctgcactattggttgtatatttaaaatatcgtgatgagatattatgatcttatgatttgatggcacttttgcgccactgtatttttgacattggaatgaaatacttatccctatattttattttggct

SEQ ID NO: 76079 - DNA, 360 bp, Glycine max
  unsure (1)..(360): unsure at all n locations
  Clone ID: PAT_MRT3847_39713C.1
nnnnnncaaggaacgggttttactttttatacgccccaaggaggatctatgtgccattcgggttataaatcccatgtcatgggaatatactgcataagagataagggcgacaagaccaaccgtatcaacactgattaaacatatgaatgttccccatgcaccgaaagatcgaaggtctcactgatacataaatattgttgtaccagccaaatgcatgccaactcagggaccacaccgacagcgggataggccgaagcaactgccctcagacaatattcgctggttataaagagatggcgggcgagccatgggcaaaaacgaatttggggactggaacagtctcttttcaccaccacacat

SEQ ID NO: 76080 - DNA, 1286 bp, Glycine max
  Clone ID: PAT_MRT3847_39714C.1
gcgcctacgctttttaaacagagcgggtcgtcgcgtgcccacaatcaaaacttcacctaatatcctcaagaacactcttctcctaagctctagcacttaactagcaatattaattagcatttgctagagagactaggagtataaaacatactcccagtttaagatggcttcaaaaacttgttcctcccttgcccttttcctcacactcaacctcgttttcttctcacttgtttctgcatgcggttatacaccatgccctggtccaaacccaaagccaaggcccaaccccaaccctaaccctaaccctagcccaaagtggctcgtgcccccgtgatgcactcaaactaggtgtatgcgccaatgtgctaaacttggtgaacgtcactttgggtcaaccaccagttaccccttgctgcacccttctcgatggtctcgttgaccttgaagctgcagtgtgcctatgcactgccctcaaagcaaacattttgggcatcaacctcaaccttccaatctcactcagcttgcttctcaatgtttgctcaaggaaagtcccacgtgatttccaatgtgcctaagcttatactatcacatatcatcttatatccttcttctgcttcgggtttgctctagttgtgcttttccattttttatttttatttttcaaattctattcatcagtgtgtgattctgattaatttgtacgtgcatggagggttaacttccgatcgttattccttcctttttggtggtattttaattgtatggttaattggagtgttgcgataaataaagttcccgatgctggcttatgtaaatcgcaagggaaccaacaagatgatgaactattgtgttatttatttaatttgattgagaaattattattgtattacttacaaagaatccttattaatatatttttgtcttttgtctttttgaaaaggattaatattaaaaactgatttagaaatggtcaatatatcacaaataatcgtttggaaaaataaatatgttgggtacgtttatgagtggggggtcactgatgtaataggagcagattatgtatgcagggactgaacaaattatcttgcttgatatatgctgtggggttttatgtgctgcgtccatagtttaggagcaggagcagattatgattgctgcatacataatatgcaggagcagattatatgtatgttgtgggattttccagtgtagtggtttatatataatgtaaaagggtttggttcccttatattataccctctattatataaatcttatttggcctc

SEQ ID NO: 76081 - DNA, 748 bp, Glycine max
  Clone ID: PAT_MRT3847_39715C.1
tgatcttcttgaagatctaatatgtttcattgatgaaacttgcgatgagggtgccatccttgtatttctacctggaatgtctgaaataaactatttacatgataagttggtggcatcttcccaatttggtgggccatcttctgaatgggttattcctttgcattcagcagtagcatcaagtgaacagaaaagggtatttttacgtcctccaggaaatatacgtaaggtcgttatagcgacaaatatagcagagacaagcataacaatagatgatgtgatatatgtaattgattgtggaaagcataaagagaatcgctacaatcctcagaagaaattgtctagcatggttgaagattggatttctcgagcaaatgcaacgcaacgtcgtggtagagctggacgttgtaaaacctggaatttgtttttccttgtacactcgtcatagatttgaaaagctcatgcgcccatatcaggttccggagatgcttcggatgccattagttgaattgtgtttgcagattaagttactgtctcttggatatatcaagccatttttgtcagaggcattagaacctcccaaggttgaagcaatggattcggcaatatctttactgtatgaggttggtgctcttgaaggggatgaggagttgacaccacttgggcatcatctggcaaaacttcctgtggatgtgttaattgggaagatgatgctgtatggtgcaatgtttggttgtttgtctccaattct

SEQ ID NO: 76082 - DNA, 258 bp, Glycine max
  Clone ID: PAT_MRT3847_39716C.1
tcgctgtattgaacaaaccctagcaacgacggcaaaggccatggaggagctcaccggtaaccacacgccgcagctgatggggctggtccatgacatcaccaggcatgagctcgagagacattcttctacgccggcgccatgtaacacctggactgcaccgatctaggttgcctaatctgactgctgacccacctgtttcaagagattaacgaactgaccaacaacgatgaccgtggagcttcctcttcttcttctact

SEQ ID NO: 76083 - DNA, 802 bp, Glycine max
  unsure (1)..(802): unsure at all n locations
  Clone ID: PAT_MRT3847_39717C.1
cggaattcccgggtcgaccccgcgtccgcaaatgttggtcccaatcgactcttcctttttcggcgcatgagcgaagctttgaagcggacacgggtgtcttgtgtcttgttggaataggtgtgaaaccaaccacacacagagagcgggtaaacaacagacaatccgtgcactgtttttctcacatctccggtcaaaggtatcaaacaaatctgccaagatagccaccactggactctccttgttatggtgatacgcgaggaaagcgtcaatggcggctaagtccaccaaaccgtccacgttcggaaagaggacaaccccaaaaatcaacaaagctagtatatccgcaaacgcgccccacttctcttggctcgccatatcccttgccttgccttccaagtatttccgtggcaggcccactacgccgttgcgagtttgcttcatgcgatccaactctcttgccgaatccccaaccacagctgcaatcttgctcaaggagggaagaaacccggagaaaagatacggttttctccccccaagaagggcatcctagtatctccccaaactctttaatnagttggtaccattttggaagtccccaaacgtgaagcacctcaacggctggtcatagtattgggcgagggatatgacagnncctccgtaatacctcgttcgcggtcaaatctagaatctttccgtacactttgcgaaaggcttgctttgggagagtcccatcatcgtcccattccttgaagctggtgacatctaacttttaccttgactgataaaacttttgcgttttgat

SEQ ID NO: 76084 - DNA, 524 bp, Glycine max
  unsure (1)..(524): unsure at all n locations
  Clone ID: PAT_MRT3847_39718C.1
tactttcaatttaattttggatatttagtaaaagggacctctttgcagtaaaaaaaaattataagggacattttaggacaacaaaatctacattttaattttttttagaatacaactcaactcaactggggtataaatttatatactaatgatggtaataattagaccctttttaattgtacaagcctatttgagctggtacacctgtgccattgatccatgtcccttgcaagaaagcctcaactgtgtacctggtagcctcatctctattgatgactttacggccaggccaattaaccctatcagtggtgatggaaccagccccattgttgttgtactctccgtnataaagggtgcttagggcaaagttcccttcccagggaagaaacccatcagggtgaattaagtcatcaatctgagtctccatgatgatggttcttgaatactccttccatggccttccgaggaaattcttgattctgtccttcaccggaaccaaatctgtgtcgggcttgataacgcac

SEQ ID NO: 76085 - DNA, 1070 bp, Glycine max
  Clone ID: PAT_MRT3847_39719C.1
tcattcgatattctttttcatcaaataacttatcacgtttattctcttgcaatacaatctcgtaattacatgaaaaataaattgatgggaaccaagttaaccaactgccacttaaaaacagtaaaagatgatggaaaaatgtgattccagaaactaagattggacaatacaagacactctactcatgaaaccagcaaaagggatatcaataacagttatctgcattaattaactcagatatggaggattccttcacggtaattgcataatcctcaagaaatggcaagatccgttacatgtgtcatttactcgtaagcatctaggtgtaacagataatacactttgaagcagtggccataatgttgtttcacattgtcattggcgcatgctgctttagatactgagtgtcacctagtattctcatcctagaacgctctctttaattgttgctgaatctctgactttgttagtaccccttttcttgagcttgttgcggaagcttcttttcctgctaaatgcagtttccacaggttgatcaagttcccctgcccgacgaacagcattaacaagctccctgttggattcagtgcacatgctagtaacaagtccaatttgaccagctctagcggtacgaccaaccctatgcaaaaagtctacagcagaagtagcaaaatccgcctgaataacatgtaaaacatttggaatatcaacaccacgagcagcagcatcggtacatacaagaacaccacctttatcttgaaaatcaactaaggtttgtgctcgctcttccaatgtgcaattcttatgataacgagaacattcaatcccagatcggagtaatatctttgccacagcttcaacagcctcaacagtgttggcaaacaccattgttctgtgaatgccaccagcattaaccaaatcttcagatctgaatctgtgattcacagcctttatgagttcatccacttgagtatcaaccataacttctatccatttttgctccaatctcggattgtgacaatgaagatagtttccacaaacccactcagcatcaggaaacatatatttca

SEQ ID NO: 76086 - DNA, 729 bp, Glycine max
  Clone ID: PAT_MRT3847_3971C.1
tgccacactctatgcaacaatattttccagatccactctcatctccctccatagaatattagaatacttgaccccagcttctacctctgctccgttaattaatggatcctcatcttcctaagaatggaacccaacaacaccatggtaccccaacaccttccccagcttcagttgcaaataatattataataccacatcctgaattccggataccttcctttaaagaacatcacaaaaatgttcctcaactcgcgatgattgtcatggcatgcatggttggcgtcatcatgtttctctgcgccgtgtccgtactcataaggtacttctactcaagaagatatagccgcaataaccaaaacagaagagtcgacgcccccatattgttcgatttgaacggagattctcctccgagttcggataacgatgatgacgtggaggagttggcggttgtccacccgatatggtacatccgtacggtgggtctccaacagtccctcatagactccatcacggtattcagatacaagagaggcgaaggcatcatagacggcaccgagtgttcggtttgcctcggagagttcgaacacgacgagagtctgaggttgttgcccaggtgcagccacgccttccacatcccttgcgttgacacgtggctcaggtctcacaaaaattgccccttgtgtcgtgcacctgtgctacgcgacgaaactgacggcgcgcatgtgatca

SEQ ID NO: 76087 - DNA, 435 bp, Glycine max
  Clone ID: PAT_MRT3847_39720C.1
attagtgttaaatacaaatatatataaacatttttaatatatatatatatatatatatatatatataaatgtaatattttggtaaaaattttggaagaccacccttctaagctcccctagtgctcctatcctatattcaatatctttgattgcctctgtataaaggacaaacctatatatatagtgtcaagtaaagaaggaaaaagtgtgaagaccgaaggggacttttactctgcactataaacagtaaaatttattacaaaagactattcatgttttcagtgtcatgaagactctgcccgggtcaacttcttttctagttcagtaagaccacatctatctcttagacagctgtatacagggtgactgagaaaaaattcaacttcataagcaagtgcatccttcacactccggttcattcgaatatcctgtggg

SEQ ID NO: 76088 - DNA, 196 bp, Glycine max
  Clone ID: PAT_MRT3847_39721C.1
gccatggactctgtcctgaaggcctgaggttactggaaattaggggattaacccactagctcttgttgagccgtgggcaattgtctgaaaagtgaagacagaaccacagggctattttgtttgcttcatgtgtcccagaagatgactgagggtgagttggcttacctggcccatcagggtaggctggagttaggga

SEQ ID NO: 76089 - DNA, 305 bp, Glycine max
  Clone ID: PAT_MRT3847_39722C.1
ttctttatacactggagaacggttagtctggaccgggctggtcttacttgagcagatcccaggtgacaatgatcacactcgcatcacaatcaagtaccatttctggaattcatactggacacgctccaagcttagtggctcagcatggcagaacgtgcccatttcatactactcgtagcagaagagggctaggctcaccatacgaaggaccgctatgatgcttgaaagcggataggaacaacatgtgcatctggtttagcggaccaaacagcgctattctagcatcttgatcctgatgagcgggg

SEQ ID NO: 76090 - DNA, 234 bp, Glycine max
  Clone ID: PAT_MRT3847_39723C.1
ttttcccttcatcagcttcttcactctcttcaccttcaacatatgatacctgcctgactgtcctactagaagtgcgaatctcactgttgcgcgaagaaaaacctgtggctgcagatgagcgaccattgttcttgcggacatgaacactccgctttttagtgctgttgaaatcctcatcactatcactgtcggaatcctccagtgttgactctgtgccctcaaaagatgatataa

SEQ ID NO: 76091 - DNA, 570 bp, Glycine max
  Clone ID: PAT_MRT3847_39724C.1
ggctcgaggtagacatatatcaaatatgatgatcatggcatgagggtcatcatcacccctatctgatcttctatttctgaggaagtatttctcatcctttgttcctaggttggtttcatggtagctttatgttggcttattgagagaacaagtctgagataaaaaggagcttcaacttactctccaaatcaccaccgtcgccgtccagaagtagcttccaccggccaccgaccaccgcaggcgccacaaccaccaccaaccctactttgatgcgtttcccacatacctaacacaaattattccactcttccattacgcctttggattctgttgcgtgatgaaacaactcaacaagccaaccatatcccttgcagcaaatattccagcaacataagaaacctgaagcagtataagtaaccggtgagaaagcaatttgatcaattgagaagaactttagcaattgttgaagagctttattatataattaatttgatggctcgacaaccttgtgatgacaaatcatctggattctgctactctgatgtgtcatcgggaaatccaacgatgttg

SEQ ID NO: 76092 - DNA, 121 bp, Glycine max
  unsure (1)..(121): unsure at all n locations
  Clone ID: PAT_MRT3847_39725C.1
agangcataaacatactagcgtacacattgcaaganncncacangggcgcntagcancaggtctnactctttcagnnccctggnaatctaaaatcngccatgggttcaataggtacggtgt

SEQ ID NO: 76093 - DNA, 428 bp, Glycine max
  unsure (1)..(428): unsure at all n locations
  Clone ID: PAT_MRT3847_39726C.1
ccgacccacgcgtacgnacaggcagttttaagacgacgagaggaagattgaaaccacggggaaganacaaggaagaagggaggcggccaagaagaagcggaagcccaccgaggaagcagacgaaaaacaccaccaagaaacgaagggagaagaggcgacgaagaagagacgacgacangcagccacaaaacaaaaagcagaaggcaccagcagccagacgaacacaacaacgaggcaaaccggacaaaacaaacacagaacgggggaccaaaggacagaaacaacaaaaagggaccaacagacaaagcgaaacaaacagagaacaaccagcggaaaacaaaaaggcaggcgccgacgaggaaaaagaaaaagccaccaaaggagaacaaaaaaaaaacaaaagaacaggaaggaagaaagggccaaag

SEQ ID NO: 76094 - DNA, 214 bp, Glycine max
  Clone ID: PAT_MRT3847_39727C.1
ccccacaagcaggtgcagccaggagagacccaggaaaaagcagcaccgaaagccccacaagaggaattccttacagctgggacaacccaggtgcggcccgcaacaacacttgcggccgacgggtggccacaaccgcatgccacggcgcacgatagttcagtgtctacaataccaggtgattccgccaccggcgccaagctgacaaccaaaaaca

SEQ ID NO: 76095 - DNA, 577 bp, Glycine max
  Clone ID: PAT_MRT3847_39728C.1
tccgggaaaaacccttttgggcacaacttatcacacaactcggtttcatattgcatagtgagagagttacgtacgaggatgtctgacattgctatgctggtggctgaggagtacgagaggagggtcaagagtttaagaaagtccggtggtggaactggagccggggaatttgacatggtttcttgtgtttcggtgatagtgtcgaggctcaaggaaaagaaacaacttctgcaatgggttttggagcccaagactcaagtcgctatggctgcttccaacagcttcttctctgcttaaacaattcattcattcatcaactcctctggactctggtgtggttggtgtcattcattgttgcaacgaattgttatctagtttccatcttctatttttcatgaaatattgtacatagctatgttttggattcaaatcaaaggcaaagcaatttgtgtttagagagtttttaccttttccgacaacaatatttatgcccccttcccctccggtttctctgttttgataatgagagatatttattggaaaaccttataaaagagtcttttctctcatttttagc

SEQ ID NO: 76096 - DNA, 456 bp, Glycine max
  Clone ID: PAT_MRT3847_39729C.1
gtcgtgttagaacaaagactgttaagaaagccgcaagacttgtcatcgaaaaatattaccctcgacttactctcgatttccaaaccaacaaacgagtttgcgaagaagttgctgtcattccctcaaaaagaatgagaaacaagattggaggatatgtcacccacttaatgaaacgaattgaaaaaggtccagttcgaggtatttctttcaaattacaagaagaagaaagagaaagaaaggataactacgttcccgaattctccgtcatcaacaccgataacgtcgaagttgatagcaccaccaaacaattactcaaatccttgggtctcgaaaatttacaaggtgttactgaggttgctagatctcacgttcctgctggacgaggagataaatccaacagaaacagaaaataaatatataaaattttataataaattaaacgtagttttgtcataa

SEQ ID NO: 76097 - DNA, 376 bp, Glycine max
  Clone ID: PAT_MRT3847_3972C.1
ttttcgcccgcctccttttgagaaaaaaaccaagaggggttaggacccatttatataaaaccatccctttctaacccagatctgtgattatattaactgtgaaatgctaacaactcaggttcagttggcaccacgggtgctatgacacatgcaggcggaaaacagatgatcctcctgaaaacaaacaaccccaccccctcggtagcggagattcctgtggtcagaccaacagacccatatgcctaaaccaacacatataatgcctgcagggactacggcttattaagctagtgaaccacgatgttcccctgcagagatggccaatcaagaaggagaaacccacattggtgaaataaaacctcaagccgagaaagac

SEQ ID NO: 76098 - DNA, 248 bp, Glycine max
  Clone ID: PAT_MRT3847_39730C.1
tgggggatcttttcactgcgaggcaactgaattcagtgccatcagactgtaggagccgcgagttatttcctactgatcctgaaattcttgcaaccggcggtgcccctaacagtttgtcttctgcatatgatgatgctaacctcggggaaggaaagagagaattggagaagaggaggaggggtgttaatgacgatggaggggtggagatgtatgatggagctggttctcttaatttgaaccttgggggt

SEQ ID NO: 76099 - DNA, 213 bp, Glycine max
  unsure (1)..(213): unsure at all n locations
  Clone ID: PAT_MRT3847_39731C.1
cttnactttgttacgccgccccctntcctctgttgtcttacgacgttagccatgnnaagtctcaaaanaagaagntcgagtccgttgttnatcntcgtctgcatcctcatcgactccaccttctgcatcatcnagccnactctgctcccgcatgggcncatccgaggcggcccacanattctnccctcgaacngggcttncccgcttcagggt

SEQ ID NO: 76100 - DNA, 334 bp, Glycine max
  Clone ID: PAT_MRT3847_39732C.1
atccacatatggcacgcaaacctggagatataattatcacttccgggctcaaaaggttacaaaaacaataaaggtctaaatgcctaattggtctctatccccatctaaggagacaacacagaggaaccatctcgcctctgtgaaaccagactcattgccacaaggaccgtataatccagacacttagggaaactactatatctcttattgctgattccagcactttagagaagatctaggtgaaccacacccactattcttcccgaaattttgttagaccacataacctcccattacaacccctagatggctatctattttaccacaagttccc

SEQ ID NO: 76101 - DNA, 597 bp, Glycine max
  unsure (1)..(597): unsure at all n locations
  Clone ID: PAT_MRT3847_39733C.1
cggaattcccgcgtcgaccacgcgtccgatctgtgatttgttaacagctgttgtgtgactttcaaaaatgggtataaagaaggccaaatatagataagtcagcacagtgaatgagtcacataactgagagtgtaagtgtgcgagtgttggtcactggctttaactgctcagagagagatagtataatccattgggtgttggcctctatttggattctggactttttcaaaagcattccctaagtttatgatgatatggctctctgaatttgatgtgaagctctgggatttgtaggagagagaaaaaaggttttgaaaagatctatgccttgaagcacttgcagattgttaatctccttctgttgtttgatggtgacgaaaagctatggatatttcggagtacacgaggattgtttttgataaacttcaaagatttgagcctgagcatactacaaagatcatagggtatctccttctccaagaccatggtgagcaagagatggngaagttggcttcactgccagaccatttaattcgtggcgtggcttacaaggcgagaactgagcttcaaaggctggctgctagatcagccattcag

SEQ ID NO: 76102 - DNA, 534 bp, Glycine max
  Clone ID: PAT_MRT3847_39734C.1
attatttttgtgatcattgtttttttaggtagtcaataaatttttctcttaacgaatataatgtggtaaacatatgatctgatctaagatcatgatctcatagatgctacgtacattgcagcattacataaggattactggtggattaattaacttaataatatttttttattttagggtaatgtgctctaacacatatttaaagaaacggataagaggcttgcatgttaatgccgcaaagaccttgagggttaccagtgtccctcataagcttcatgtaaccaccctcaccccaacttttgccccatgaattccttatgagccagtattttccctcagcctcctcaccatacccaacaatggtaactgcatggttaagttcagttccacactcgccactgaaaactcctcctgagtaaaactgaaacccttgtcccttggcttcaaggagcaccgagacaggttgagaggccactgcagttagaagttgctcctcgttctggggagttacactttggtaacctctgatctgaa

SEQ ID NO: 76103 - DNA, 404 bp, Glycine max
  Clone ID: PAT_MRT3847_39735C.1
gttgtctcttggtttttcttttttttttacacgggaacgcccaacgctacccgcattcataccaaatgtagctaggggagtcttatgagatcgggccacaatggggcacacattagaaccctgggggataatgtgttacgaaaacggtgccacacaacagaccagccccactcatattgcgttgagccgaccgggcattatgaaagaggtaaccgacagcgaccgagttgcgctaacagtcggcctattagaggggagacgaaaagtgcgaactgcattaacgaatgggacaacgctcggagagagggactccccacatcagacgccccggaagcttatggttataacagagaggcgcgaaacgggtgactatacttaaccgcatggccctaaaataattgccg

SEQ ID NO: 76104 - DNA, 672 bp, Glycine max
  Clone ID: PAT_MRT3847_39736C.1
cgagttttttttttttttttttatttctcaaaagcattactctgaataatcctcagaaacacctgttcaaatttttacatttcatttgtttcgaaactagaaggcatgtttgtattacaaattataagctgcgaataatttgaagatacataaacataattacaatccaaaacacagtacacttttgtttatggtcaacatcaggactggtgactcgtggtatgaatggggatagacaggacccataacagaagtaatgattgcaagcagaacggagcaaaccaccacagtggatgatgcacgatgactagggttctggcgccccatgataactgtgttatgtgtaaagatggatgataacccaataaacaaaggaaagcatacaaaagtgcagactactccgtgaaaatttattatgagaagtatactcagccacgtccatcatcttcggatgccttggatgtaaaagcatagtcggtgtaaattccaacaagcattgagtaagcttcggaacatggcaaagaatacaaaaaatgtgctgaaacaccaccataccatccaaaattattcaattctatccatcaccatcataccaaacacctttcccaacagaggcattcacaaacttattccctgaaagtatcctggcaaagaataaaggattcatttgca

SEQ ID NO: 76105 - DNA, 264 bp, Glycine max
  Clone ID: PAT_MRT3847_39737C.1
ccgggccggaaagcccgggtcgacccacgcgtccgggatacagcaaataacatccagattgctctgtgactatcaaacggccttctttcctcatttgagacgcacgctccccatacatgtctagttgtgtaaaaatctgaaatgatatgatttgaggcgctgcacatacgccagcacacggtcaacttgaaaaaatatcatctccttctgctacaaaagatggtttaagagctattaatactgttctcccgagagaaaatgggg

SEQ ID NO: 76106 - DNA, 580 bp, Glycine max
  Clone ID: PAT_MRT3847_39738C.1
tgatcttcctgtctccccctcccaaggtgccaggattacaggtgtgaaccaccgtgcccggcctatttccaactttttaaccccttccctgtttaggaaaaaagtgcaactcactgccagtgcagtattcccagggcaaacagaaaacgggttaaaaaaaatagagattcggccgggtgtggtggctcacgcctataattccggcactttgggaggccaaggcaggcggatcacttgagcccaggagttcaagaccagcctgggcaacacagtgagacccccatctctatttttaaaaattatttaaaaataaataatggaaaaaaaaatagaggctggaaatccagattaggattgagtaaacttccacatattggcaacgagctaaacctggacagacaaaacgggataccacaaaatgggctaacaacagggcttctggtgtgccgtctgtctccactttttcccagtttaaaaaaatcttcaacagttcctgtattcacttataaataataaagtaactctttcaaagtgagtttttaaactgaaaatcctaggattcaatttagccaaatatact

SEQ ID NO: 76107 - DNA, 302 bp, Glycine max
  Clone ID: PAT_MRT3847_39739C.1
ggcaaggctcaactgggggtcactttttataaaattatcgataaacaatgggaatcaaaattttgggagaagaacatttttccctttaaagggtcataacttacatttttaaccccaaccggcttttttttgttttaagcatgaactttttcgtaataattttaaaataccccaaaattgtcccgggaaaaaaattcccacggcccctcgatttgtagctgaaaacgttgttcgatactcaagctcaacgatcttgctgattttttataggagggatcggggtcaaatcaacaaacccgggt

SEQ ID NO: 76108 - DNA, 238 bp, Glycine max
  unsure (1)..(238): unsure at all n locations
  Clone ID: PAT_MRT3847_3973C.1
gantaaactaaactagtcgaagagaaatgtccgaaaacggagaagagaaattactcgatgtggngcggcacatagcgaaaangctgggccatnanaacancatgtntgatgatatattncaaatactatagaancggcgacggangattntcgagagagtatctttntgannaaggcgaagatgnggatcccanaggnngngctgnaaatngntcatttgntacnnnacgctngnaca

SEQ ID NO: 76109 - DNA, 276 bp, Glycine max
  unsure (1)..(276): unsure at all n locations
  Clone ID: PAT_MRT3847_39740C.1
ntacgcatncacgcgtacgtaaactcanaattcnnctcaaantcatncncaccactctcanagctctcannnntaantnacncactagtgntacatagcaanacgccagaaanntggagcnantanaaagntcatcataccntgngcaaccacntccantctaaaaacaaaaaaacaaatctnnatcnaggtactcgtaattnnctacatanagttccagagnaatanananctcaacccagagaagangttatacccantannnantaactncga

SEQ ID NO: 76110 - DNA, 198 bp, Glycine max
  Clone ID: PAT_MRT3847_39741C.1
attcatttccaaggaagggtttccctgtcatcacatgctatgacatgcctctcctccttgggttggggggaggggggacgatactatgtgtgtaggatagattaacgaagaataagatatcatatggcgcgaagcgcagggaaacgagatacgatacgtattcgagcaaatatgagatgtgattgctagcgaggccac

SEQ ID NO: 76111 - DNA, 345 bp, Glycine max
  Clone ID: PAT_MRT3847_39742C.1
ccaacaaaaaagttgagcctaagattgaatataaaaaaaaacagtaaaaacattacctaatttatttattaaggggcccgacaaagacattgaggaaataactaatacttctatgttaaagacagaaagaggggcgcttaattgcatgcttgtgcacctattcgaagggccggattaccaacggggcctttacgggtcaagatcctctctgttccttccattactggaatgttggacacatacaagatactgggaggattcacattgcttggagaggccccttactttttttaaaatggtattactggtttaaaaaagaaaggcaacaacttttttcctctttga

SEQ ID NO: 76112 - DNA, 271 bp, Glycine max
  Clone ID: PAT_MRT3847_39743C.1
atcgctggcaaaagacacacagaagggggaaagttatcctctcgatgccttcttttgttttgtctcctatcggagcgaggtccaagacgggagctatgcctttctttataattagtgcgatcttctgcatttaagctcttgctacacttatagcctatcatcggaggcatgtttttatacttcaaagtgctttcacaatgctaattccttctgcgtctgatatccgggctatttcatatggactaattgcgctgattcctaaccaccttgt

SEQ ID NO: 76113 - DNA, 477 bp, Glycine max
  Clone ID: PAT_MRT3847_39744C.1
gaaaggattggccccccttggccccaaaataaagttggggttcacacaacccccatttgttggcctttgcttttggccggggcttttaagaggaaaagaggcaaaaccaccccaaatggggaagcaatacaaacaatacccacacctaaaaattaccgaaacatcttgggggccgaagcaactttggcaaaaaaaaactagggcgggcgggggggggctaaaagtaaaaccgaggcgggctcggaaacaaccatggggccctttttggcaaaaaattcatcagcacggccaagggttttagcaacggagggcttaacccaatttttggggcccggaagcacggggagggaacaacccccattcccaaggttttcctttgcggagggggaaaaggcccgggctttaaatgacaactttttggtcaggtctccttcacccaagaacttcaaaggaagtcccgacgccggggtcgacccg

SEQ ID NO: 76114 - DNA, 180 bp, Glycine max
  unsure (1)..(180): unsure at all n locations
  Clone ID: PAT_MRT3847_39745C.1
agaggaggaattatgggaatttatttaaaattttggcccaaattccccaaatagaaaaatccccaagtgttcgacctcctttttgctaccccagtagtacattggcgatcacgaggaattttcaccatgaaaacaaaaatattttttttcaagctgaaagggaatnccccccttttctct

SEQ ID NO: 76115 - DNA, 329 bp, Glycine max
  unsure (1)..(329): unsure at all n locations
  Clone ID: PAT_MRT3847_39746C.1
aananttancacngcgtacgatacacgagagngaacttcnagcacttngaggaagtggcangtggttgattganactctncgngannaagangaatgggtcattngaagnngtnnaggcttgganngcncntnncgaggangtaggaccgggagcncgaacttgnancnancnnttncagtnagncnngcatcngnanntgtgatnaananncgatgcgngananaagtgggatgtcaagacgcnagnctntcgatggatnnnncagntacgngncngnntcanatncanaaaggngttatncntgtggggnngnggangaaaaannnn

SEQ ID NO: 76116 - DNA, 940 bp, Glycine max
  unsure (1)..(940): unsure at all n locations
  Clone ID: PAT_MRT3847_39747C.1
gagcggctcgagcggctcgagcaaattcttaaataaaagtgcccccattttcccaaaatcaccatctagagttttctcttttccactgaaaatcaaattagggtttggatttcggaattgccacagaatcatggccactctgaaagagcttcttcctcctgcaaaatcctcctccaccgcctactacgaccacaccaacgatccatggttcaagcagcgtttctcctcagaagaggaggagaaatccgccgccgccgccgccgccaagcagaagcccgttcccccctacctgaagcgcgccggcttcgttcctcggaaaatcgaggacttcggagacggcggcgccttccctgagatccacgttgcacagtatcctctcgacatgggaagagaaaagtccggcgccaaacctggatccaaaatcctccctgtcaccgtcgacgctaacggcaacgttgcctacgatgccatcgtgaggcaaaacgagaacgcaagaaaaattgtctacacgcagcagaaggatcttatccctaagtttctcaagaacgacgaagatgacgacgacgtcgtttccgacgacgaagcacagaaacagatcgaggaaacgatgcaggagaccaaggccgctttggagaaaatcgtgaacgttaggttaagcgctgcgcaaccgaagaatgttccgaagcagaactccgatgcgaagtatataaagtacaaaccctcgcagcaatccgatgcgttcaattcgggtgctaaggagagggttattaggatggttgagatgcctgtggatcctccggagcccaagcagtacaagcacaagcgtgtgtcggggtctccgcgggtgccgccggtgccggtgatgcactccccgccgaggccggtgacggtgaaggaccagcaggattggaagattcctncttgcatctcgaattggaag

SEQ ID NO: 76117 - DNA, 389 bp, Glycine max
  Clone ID: PAT_MRT3847_39748C.1
tagggactacagatcgctgtgaaattaaaaattacttggaggcgtgaaatgaaaataatgactcaacaattatctccaaagctctatacctacaagcctttaaaagatcgattaaagtacatacgtgcgcaacaaatattaaacgccttctactctccttataaattggcacacactcccatactttaaaaccaccttttaatctttctaaggaaccccacaccaaatcttactaattttccctttcctaaacaatgggtcaataattcctatataaaatttatttgtttactattattaataaactttttaaccatttcatcaactactccttctttttttcttttaaacctctaaatttcccttccttttcaccccttttttttttt

SEQ ID NO: 76118 - DNA, 721 bp, Glycine max
  Clone ID: PAT_MRT3847_39749C.1
gacactatattaaaaaactaatgttcccatcctcccaagatcaccgtctagggtttttctttttccctctgaaatcaaattaggttatccttctatggttttcgatttctgaatttccacagaatcaccatggccactctcaaagagcttcttcctcctgcgaaatcctcctccactgcctactacgaccacaccaacgatccatggttcaagcagcgtttctcctcggaggaggaggagaaatccgccgccaccgccgccgccaagcagaagcccgttccgccctacctgaagcgcgccggtttcgtcccccggagaattgaagacttcggcgacggcggcgcgttcccggagatccacgtggcacagtatcctctcgacatgggaagagaaaagtccggcgccaaacctggatccaaaatccttcctgtcaccgtcgacgctaacggcaacgtcgcctatgatgccatcgtgaagcaaaacgagaacgcgcgaaaaattgtctacacgcagcagaaggatctcattcctaagtttcttaagaacgacgaagaagacgacgacgtttccgacgacgaaacgcagaaacagatcgaggaaacgatgcaggagaccaaggccgctttggagaaaattgtgaacgttaggttaagcgctgcgcaccgaagaacgttccggagcagacaccgatgcgaagtatataaaatacaaaccctcacgc

SEQ ID NO: 76119 - DNA, 343 bp, Glycine max
  Clone ID: PAT_MRT3847_3974C.1
gcccactcataatctaagaatatcaatcactacgactcctgttggtcgacctatcgagtcacaactcccacccaccctctttgacttcactatcagaagagctcgttggagcggacaactgacaataaaacatgcacacacaacggccgggggtagtagcatcacttctaatttgctgtttcaacacacatcgctatgggaaggaccacttctcttccttgaaaagaaccctagaagacactgcttaccccaagcaggaacatgtactggaagctggattagacaaaatcacagctacaagggcattgaacaagaccttacccgcggtgacagactctgtcta

SEQ ID NO: 76120 - DNA, 382 bp, Glycine max
  Clone ID: PAT_MRT3847_39750C.1
ccggtggatccactttttttagatttgtcttttttttttggggaactacagcttgtggcccctaaccagacgacaaattgggcccagggttcgtgaatgtcatcacttcacaaaggggtggatccaataggcgcccgagtttaatattttacatggtgcccgaaccaaaggttttttcggcgctataacccatggaaagaaatccctccccttccttgaatggtccatacacagagtccattatattagcagtttggggcacgggattcttcacaaaatcaaagaaagctttcccagggggcagactaaggttgggacctaaaatgtgaatgaaatgcccaacaaacaaggctcggggaacaaggtgtttttttttctccaa

SEQ ID NO: 76121 - DNA, 582 bp, Glycine max
  Clone ID: PAT_MRT3847_39751C.1
tttttttttttttttttttttttttttttttttttttttttttttttttttttttttttttttttttttaaacaaaaagggggaacattccccgaagcattaactgggttggcttatctggccaaagggggaaaaaaacccagcctagtatcaaattaagggcctaggggggggaggagcaaaccccttctcaccccgcggggggagggaaggaaacccccccactttaggatccctaatccccacccaacccatatgggcttaaacatataattaaaaggggttcagggcccctctcgaggaaaaagttgcccaacaaaaagccgggaaaaaagaaaaagagagggatgagatccccctaggccccaaccatggggggggagaaagggaagcccccaggggaaccaaaatatcccccagggttaccggcaagggttttgagccccccatccatgggcggagttctcaagaggagggggaaggggaccacttaggctaagggggaaataaaaacactaccccccctaaagatagggggagggggcttaaacccccatagtttacccccctgggatttacggg

SEQ ID NO: 76122 - DNA, 259 bp, Glycine max
  Clone ID: PAT_MRT3847_39752C.1
ctaaaccactccatctttatttttcttttccaagaacatccaagtaaatacactccccttcctaactctctacaatgaaggcttcaccactgtcatcgaccgcgacacacacgagcacagtttcatgggagacgagacggtggcactcgaccaacaatctttcatggcctagaggttgctgctatggaaataaaaacatacaaaataattgatcaagaaaatacacatatagcccttaatagataagatctcctataaa

SEQ ID NO: 76123 - DNA, 332 bp, Glycine max
  Clone ID: PAT_MRT3847_39753C.1
ggctcggctgcgccgccaggaactaaacaaaaggagagcacctcccgctacagagtaatgagcaaccctggcacaccgctaccgaggagagactccgagtgatggaaggcttcagcttgttcgacatggacggcgatggacgcatcacacccaaggagcttgtaactgtgatgagtggatcggggcaaaccccagctgaggcaacgctccaggacatgatcaatgaagcgcatgccaaagggaatggcaccatggacttgcctgagcacctaaatcgcatggccggaaaggacgaacgacactggactgtgaggaggacgctgaaagaggca

SEQ ID NO: 76124 - DNA, 1053 bp, Glycine max
  Clone ID: PAT_MRT3847_39754C.1
aaaagttgcatcaaattccagaagcagagagaaaactccacaatttaactcaagaagaggcggtcacaaaacacaacactgagaaagaaacgatgcgattttcttggagaagaggttaggttgttgggtgttagtgttaaatatataaagaacagaacagtcgccaacgttaacattaacaaacatcctcaaaatatgcgcacgcctctgcttcccgctgcttcatctgcttcgttcttcactctctttctcgcttagccttcactttcttctctctgtttcttctttcttctgccagcgatgccgacttttactgccatggcactggataggttgatagagcccggagcttctaagccagttgataaatctgctccaacttcaatgcctgtgccaaactcgcagaagctggagaggagtactagtgcgcccgccaagaaaagtaaggttcctcagcctccattgaagccggcactttataccactcctgaagtgacaccacttccagatgcgccttcttcgttccctccttcaccatacatcatcaaccacaaacgccgtggtccacgcctcctcaagagttcctctgaggccagtgcactgtctgaggtgaatattcgttgtgatgatgataatgataagagcgtagatgctgttgttacaagttcagctggtgacctccaagttacttctacaaagcctgaacttgttaaagaagagaaggtgaatggtgtttatgacggccaacttgatagaagcaatgatgttgaccatgcaaatggacacagagaaactggaagtggtagcttaaccaatggattactcaaggaaaagccaccggcattgaatttggacagagttagcgaggttgaagacttttttttatccattagactcaatgagtttctctagtaacacagatggggaagagaatgcagggacagaattgtctatgaaactcagcagtcccagtacggagttttatgatgcctgggaagaattatcttctgaaggcatgtctcaaaattctacatacgacattgaagctgaatt

SEQ ID NO: 76125 - DNA, 459 bp, Glycine max
  unsure (1)..(459): unsure at all n locations
  Clone ID: PAT_MRT3847_39755C.1
cccgttgtaaaagcccccccaaagaggcacgggggccgaaaaaaggancagaagcggggaccccccaccgggcaaagcaaacaccacggcacccgcgccccccaacggacaaccccaaacagcccacagaggacgacacccccccgggaacggcccaagaccccgaaaacgccggcaacacccccacgccagccggacccgccccacaggccacagccagaccccccgaaaacgccggaaacccccgcacgaacccggaacccggcggaccaccacagccccgcccaccccgcccacacccaaaacaggaacaccagggcaagaccccccccggccgaagaaagcgcccgccaaacccgaaagaaccccacaacccgcccaccaaagggcccaaacgaacgagcgcaacaggggcgcccacccccaaacaacacacaaccggcacaacccccaccaacc

SEQ ID NO: 76126 - DNA, 257 bp, Glycine max
  Clone ID: PAT_MRT3847_39756C.1
cgtacgcgttcgccgcgggtgggatgcttgcgatggtgaacgagctccatctatctctgtatctatacgctctctccaacccaacaactagtacgacactttgtggccctatgttctccacctgcttgtcggacatttggagttggcttgaacatgatgcagcttgagcaacatccatggcaacagtgctgaacttgtatagtcaaaggagctctgtctgctgtgggtgaactgaataattgctgatgttgtgaccc

SEQ ID NO: 76127 - DNA, 190 bp, Glycine max
  Clone ID: PAT_MRT3847_39757C.1
atctctttcgatcgtacagtggaatgtagggctgacgtgtactgtcgcaagactaccgtattaagatgatgactatctgagctgtggctacagaggatctgatttatcagcttcgccaagaggaagatggaaggaaacaaaataaaaagggaacaactaaaaagactataacaaaaagggctttgaaagc

SEQ ID NO: 76128 - DNA, 781 bp, Glycine max
  unsure (1)..(781): unsure at all n locations
  Clone ID: PAT_MRT3847_39758C.1
tggataatttggattctctatatcataattttgggctctttaggtgataacgagctagattagtttagtgaaggcttgcaatcctaattattaggtgggagacaagacaaccaatcaatggatttgataccaagttcaatgtttttcgcaattttttcttatgatgatgattgccaaagagggaaaataaaaattattctgtggctgaaggcctagcacaaaattctcataattgtttagtgggagttgttaaacctaggaatgttactcttagctggttttatctgtctgaattaaaccttaattaatgcttcttgtgaacttttgttgtatatatcttcctttggaacctatcaagttactacttaatcagttgcctggaccacacgtacctgtacagtgatgccaagaattatcaaccgattgttgttaacagtacttttttccccccatgagttttattatatatgtgtcatgcaaagcatgcaatgcaactttggtttttctttgtgcagatggaataaagccagaagatgttggtttgagaccagatatgccgtatttcaggacaagtgccacacagagagtgccaagaatcacgtacctgcacatttatgagtgtgaaaagttctcgatggggatattttgtttgccaccttctggggtcatccctcttcacaatcaccctggaatgacggntntcagtaagctactttttggcactatgcacatcaagtcatatgattgggtcgttgactcgcctnctgaatctcctacaact

SEQ ID NO: 76129 - DNA, 567 bp, Glycine max
  Clone ID: PAT_MRT3847_39759C.1
ctcaataacggaggcattttttttcatgctttccttattgtttaaggataataatatatagcacatggttctcatggtctctaagcatggtcccaatccctacagcgtcacacttaaactgtgctagagagctcaatttgattcccttttgagctactatcccctttgtcttggaattcaattggcttgtaagtatacaatttggcacaaatcaagtagtaaataagattgaaaatttgcagtattgtgatgagccaataaaagtactccaacttccccttgttgaggttgttgtcagggagccaatttgacccgttaggcctagcactaaacttgtggaccaaagtaaccaaaagggtactcacataattcccagcagaaattgaagcccaaaatagtgccatggcagtgctcctcatactctcaggagcctggtcataaaaaaaactccaagtgcccaattgacataaaggcctcggccattccattaaggctatattgtggcaaaagccaaaacactgatattgggattatggcatgtggatggtcaagaagcccatgggccga

SEQ ID NO: 76130 - DNA, 557 bp, Glycine max
  unsure (1)..(557): unsure at all n locations
  Clone ID: PAT_MRT3847_3975C.1
ccctgtgtagcttttgtttttttttttcgcttcgaacttttcacctccacgctcttctcgaaaatcggaatgaccctgcttcttaggacgctttgctcaggtccccctgtggggggggccaccccggggggccctctgggtgatctgccccccgcatcgaaatcgcggctgcaagcggaagggtacttgaattgcctggttttgattgctggcccaacactgtttacgttgacccacgtgaccccaggtggcttggttgttgggcaggatcacattggagcctgaactgcatgaacataactgaggcaatgtgctgacctataggctctcctatgaagaactttccctcttttggcagacactgtggaaggccgtccagatcacatcgttggcttcaacagggatgtccttaagaagtttgttgggttgtaaaatggcgccctggncgantaanaatgtncaccatgcgtcactggtgccgcactttaggttgacggatggatactttaggcgggaactcaagacatatcagcccttccttcaacatgccagcatgc

SEQ ID NO: 76131 - DNA, 481 bp, Glycine max
  Clone ID: PAT_MRT3847_39760C.1
atatgagagtaacactgagcatcgtctagctatctcgatcgaactgtccaaggatcctgtcacgtgtaagcccaaacaatgcgttataagccaacgtaacctgatgagttataccgctgccgcggaagggcatggttttacgccggtactggttggacagatatgtgaggtcaacgggtgttatgtaaaaaccaggggccaacaacaggtagtaacgcagaatgtagtttggagtactactaaggtgcacaacggtggctcgatacagagtagtcatgcaggtaattacgatacaccatggcgtgcaggagaggggccgcagccccatcccgctacgcctagcgcacaaaggtgcaggttaatagtgcgtttggtaggcttagtggggttttatgtccagaggggtttggggcagagacattatacaggacgcgggcttaaggtatcccggttcttcgtgtggaaaaccgtgggcgatcca

SEQ ID NO: 76132 - DNA, 370 bp, Glycine max
  Clone ID: PAT_MRT3847_39761C.1
ttttcctatagctttttagttattatcttctaagtgttccaagtaactggattcagtggtggctttgactgtatttggcatctgatactattatgaagtaatggctggtatttgcatgtaaatgttaataagcatgtctggctgtcttcacagcggctttgatggttaaaaaaaaaaaaaaaaaaaaaaaaaaaaaaaaaaaaaaaaaaaaaagacaataaaaaaaaaaaaaaaaaaataaaaaaacaaataaatggcgccccctctcagatacaataaaccaccctacacttaaatgggggggcccgttttaaaggatccaatttaccaaccgcagccttgggaggtcatattttttttttaggggccc

SEQ ID NO: 76133 - DNA, 761 bp, Glycine max
  Clone ID: PAT_MRT3847_39762C.1
gatgattttcagtcggtttcacctgcaattccattctccagttggctaccaagcttttatgatgagctactactttatcttgaacaagaatggaaatggtgtatgattgctttccctgatgactataaaactcttgtcccaaggctactaagtgagactatgatggctataggttccagtttcatatctcgtatcaaccttgccattggagatgctgttccagaaacaaaagcactggctaaaggtttgttagatattttagctggagatatgcaaaagggtattaagcttcagacaaagcatctggaggccttgattgaattacacaatatgactgggacctttgcaaggaatattcagcacttattttctgtttctgatgtccggtttttaatggatgtgcttaaatctgtgtacttgccttatgaatcgtttaaacagagatatggacaaatggagcgtgccatcctttctgctgagattgcaggagtagatttaagaggagctgttattcgagggttgggagcccaaggtgttgaactcaatgaaacagttcgcaagatggaggagtctattccccaaataattatacttcttgaagcagctgcagagagatgcatcaacttcactggaggttctgaggcagatgagttaattcttgctcttgatgacataatgttacaatacatttccactctgcaagaaactctcaagtcactgagaactgtctgtggtgtggattatggaagtgatggtacttt

SEQ ID NO: 76134 - DNA, 579 bp, Glycine max
  Clone ID: PAT_MRT3847_39763C.1
agataaattgaagaatgtatcgtcttcatctgaaaatacgaatggctgcacagaggattcttccttgtcaagtgacaagtctgcaccttcactctctggcagcaccaaagtggtttctgactcaagtaacacgtattcaactgcagtagaacgggtcgttgtttactcacgcaagaccaatgtggaaattgaagatggtggcactatattgccgattagcgatgacaggtgggttgcttactcatattctcattgagatagttggaacagttgcaggctctcctgtgtcatattttgcgtctctctccgaattgatttgtatagaaggatttgactcccggtaaatttagaaaacaaaacgtggaacttgtaacctattgattaaaaacctaactgttaatattttaataacttaggaaactgaagcagattagttattattctgtcatcaacagctaggaatttctctaccaaggattatgtagatcatttaagaatataaacatgttaataactatgggtgtggggaaacgccggaggtccttatatatatatatatatatatataccctttaatgt

SEQ ID NO: 76135 - DNA, 291 bp, Glycine max
  Clone ID: PAT_MRT3847_39764C.1
aaaaggaaaaggccgcaaatgcaatttaaggggcccctggaactcaaaattatagaggaagacggtccaatttgaaaaatatagtaagatcattttaaacttagcatcttttttttgcacctaacacattgggaatgctaaaaatgttacacgcaagttccatcacaacttttaacacttggtttagtacaacaacctttacgaacaaaaatatttacttgccaagtttgctttgccttcaattcaagactggaagaaagctcccctctgaatagcatcctcgttagcatt

SEQ ID NO: 76136 - DNA, 487 bp, Glycine max
  unsure (1)..(487): unsure at all n locations
  Clone ID: PAT_MRT3847_39765C.1
gaaaaaaggtatatgtggctttaattggttctttgcatataagtatgcttttattttgttttaacttttaactactactattattagttgaacacacgcacaaacatgttcatagattggctttgttatattttttagtatatactagtcattgcaaaatggataagtctgacttttgatagcattaaaccttgcacaaggtgccctgataaaggtgcagatctttaggggcaacttgtttttatctatacatgtgtatttgtatgctagcgagtggcagggaccattcacgttatatagtatggtccacacacaggtcgtgttgctcactttctagcgtctagcactctagctagctagctatattatcgctttcctgtgttaatagcatttcatattttttttctgagtatatagagcatgcgggccatgaggtgtggttttttgctgtgatgttctcacctganacagtatgtggcttaatttg

SEQ ID NO: 76137 - DNA, 127 bp, Glycine max
  Clone ID: PAT_MRT3847_39766C.1
tttcgttcactgcgcacaggacgcacaccctgaagaccattttcacaagcaacggcggcttgaatacatgaatcatgcaatagcttactccacatgggggtcccacctattatgggaaagagaatga

SEQ ID NO: 76138 - DNA, 196 bp, Glycine max
  Clone ID: PAT_MRT3847_39767C.1
tttttaacatctctaaaggatcaaattatacatttatccaaaatggagtacaactgatggatgtactggcattaaaaaattatacaactcaagaaaagagtaggtggccactgctaaaacatggcattagaatggccactgatgggcaaaggttgttccaaataatgccattcttctagggttacaaatttcaact

SEQ ID NO: 76139 - DNA, 483 bp, Glycine max
  Clone ID: PAT_MRT3847_39768C.1
gcatgtctagctatctcgatcgaactgtccaaggtcctgtcacaataaaataaaaaagcctgcaaatgtgaaattgtttagggtgatgtgtacgtgctagtagtggtataatttgtgtgtggataattgtgtctatgagtataattttagtatatattaagcggtgtcagcgtgtggtggtgtgttattaactttattaaagttgtgttggtaatttataatggtgacaacactaagtggtacaaatacgaaatgtttatggtattagtggtggtggtggtggtaggtgtgtgttaatgttatttaccacaaatttgttgtaatgcgtaatattttaatgataaaatttgacggtgtgtttcatgcgtttgtcatatagtttcacggaatgtgtgtaatattaaatgttaatgcgtttgtgttacttgtaattccgtccagtgggatttcattcaaatccaatcgtgttcattcaacattgtg

SEQ ID NO: 76140 - DNA, 669 bp, Glycine max
  Clone ID: PAT_MRT3847_39769C.1
tggcttctgcggatgttgaataccgatgctttgttggtgggctcgcttgggccactgacaactacgatctggagaaagccttctctcagtacggtgacgtcgttgaatcgaagattatcaacgatcgtgagactggaagatccaggggatttggatttgttaccttcgcctccgaggattcaatgagggatgcgatcgaagggatgaacggtcagaaccttgatggacgcaacatcactgtgaacgaagctcagtcccgcggaagccgcggtggaggcggtggcggttacggaagtggcggtggatacaaccgcagtggtggtgctggaggatacggtggccgtcgggaaggtgcatataaccgtaacggtggtggttatggcggtgacagagaccatcgttacggaccttacggggacggtggatcacgctactctcgtggtggtggtgatggaagctggagaaattagggcttaatgttgtagattagtgtttattgctatgtttgtgttccgtaattttaggtgttacggtttggtaatttgtcttggtttggggctcctggatacggttttttacctatatatctctggttgtgtagaatcgaataaatgaaaagattgccagaaattagggtactactatagtgctatcacatttcaacagatt

SEQ ID NO: 76141 - DNA, 261 bp, Glycine max
  Clone ID: PAT_MRT3847_3976C.1
cggctcgaggaaaaagaagaacctgtgaagaaggagcccgagactaagttagcaacaagcaagaaatcccaagctcttcgaagtggcacttcatcttagttttgtttgtttgttttatttttgttatggtttggtatgagtttcatactatgcttcaaattaatgagttaattgaaaacttagtatattttgatttccttgttatccttcggatggattacttaacattagtttcaaaagaaatactaaatgttagaacat

SEQ ID NO: 76142 - DNA, 267 bp, Glycine max
  Clone ID: PAT_MRT3847_39770C.1
cttgttatgatctttaccttgcatacatatactatattagctgaacaaaaaatgttgtaattaatgcaattagaattttgattcaagtctggttatttctctaacatgttttcttactgtcacctatctccgtcattaccaagccatcgaggaagacaaatgggacgtaccacaagtgccaatggaggaagattagccagattctccaacatcgatttttacacttcatttgtctgtgaattacatttctaaagatattgctgtatt

SEQ ID NO: 76143 - DNA, 754 bp, Glycine max
  unsure (1)..(754): unsure at all n locations
  Clone ID: PAT_MRT3847_39771C.1
aaatttccatggcttctgcggatgttgaataccgatgctttgttggtgggctcgcttgggccactgacaactacgatctggagaaagccttctctcagtacggtgacgtcgttgaatcgaaggtccgcatcgcatatgatctgacacaattcggatccggaatttctccatcccgttctgatctgtgatctctgatctatttgcgttacttgttctatgatatgatacttgtgttactatatgattcttttattactcacgccaataggtacgttcatcttcatctttttgccaaagaagaagatcgatcggtttctattcggttctggtttttgttttcgtgctgttttgcttttcatttcaatttgatgaaccgtttgtggttttatgtgtagattatcaacgatcgtgagactggaagatccaggggatttggatttgttaccttcgcctccgaggattcaatgagggatgcgatcgaagggatgaacggtcagaaccttgatggacgcaacatcactgtgaacgaagctcagtcccgcggaagccgcggtggaggcggtggcgctactctcgtggtggtggtgatggaagctggagaaattagggcttaatgttgtagattagtgtttattgctatgtttgtgttccgtaattttaggtgttacggtttggtaatttgtcttggtttggggctcctggatacggntttttacctatatatctctggttgtgtagaatcgaataaatgaaa

SEQ ID NO: 76144 - DNA, 649 bp, Glycine max
  unsure (1)..(649): unsure at all n locations
  Clone ID: PAT_MRT3847_39772C.1
ccacgcgtccgtcaaatttccatggcttctgcggatgttgaataccgatgctttgttggtgggctcgcttgggccactgacaactacgatctggagaaagccttctctcagtacggtgacgtcgttgaatcgaaggtccgcatcgcatatgatctgacacaattcggatccggaatttctccatcccgttctgatctgtgatctctgatctatttgcgttacttgttctatgatatgatacttgtgttactatatgattcttttattactcacgccaatagattatcaacgatcgtgagactggaagatccaggggatttggatttgttaccttcgcctccgaggattcaatgagggatgcgatcgaagggatgaacggtcagaaccttgatggacgcaacatcactgtgaacgaagctcagtcccgcggaagccgcggtggaggcggtggcggttacggaagtggcggtggatacaaccgcagtggtggtgctggaggatacggtggccgtcgggaaggtgcatataaccgtaacggtggtggttatggcggtgacagagaccatcggtacggaccttacggngacgggggatcacgctactctcgtggtggtggtgatggaagctggagaaattagggctttatggt

SEQ ID NO: 76145 - DNA, 1067 bp, Glycine max
  Clone ID: PAT_MRT3847_39773C.1
gaaactaatatcatacaaaactttgtgtctttcatccatcttattacacctcagttttcctggctcccagaactttctttcatactctctgttgccttgtgccattcatcaatagttaaggtcttaaggacactaaatcttatggaggtgaccaaccttgtagtcttgccagcagttttggcattctttgtcctttgtctatatttcatcactaaagttgttagactcgggaaacatccaaaccttaatcttcctcctggaagattaggatggcctattgttggtacgaaacctttgactttatgcgtacaatgaatgagggaaacttgttaaggttcatacaagagagagtggagaaatatgacgccagggtgttcaagacttcaccaaattatggagatcctgttgttacattttccgagactgttgatgacataagattattaggcgatcacacaaggacccatcactcttctcgaatccggaaacttttgatgcttcaaggtttgaaggggcagggcctacaccattttcatatgttccatttggaggtggcccccgaatgtgtttggggcaagagtttgctagactagagattcttgtgttcatgcataatatcgtgaaacggttcaagtgggatttggtgattcctgatgagatgttcaagtatgatcccatgctagaaccaataaaaggacttgcaattcgacttcatccttcccatttctagtcaaacaccttcatcatacgcataatacattgtttaggcgggccagctgggaacaagttcctatttagcaatgagaacaagaatgttcaagtgtggtggcctagttcggtaaggaagttgttaaggttgtctctggttaataaggttggtgacgaggcaaagatggtgagaagattgctcatgagctttcttaatgcagaaacactcagaaactacttgccaaaaatggatagcattgctcagcgccatatagacacctattgggaaggaaaggagcaggtgtttgtctatcccatagtacagctatacacgttttgatttggcttgttgcttattt

SEQ ID NO: 76146 - DNA, 217 bp, Glycine max
  Clone ID: PAT_MRT3847_39774C.1
cccacgcgtccgtgtgttccgtaattttaggtgttacggtttggtaatttgtcttggtttggggttcctggatacggttttttacctatatatctctggttgtgtagaatcgaataaatgaaaagattgccagaaattagggtactactatagtgctatcacatttcaacagatttttatttggaaaatattttaattgcaccaatgccgtttgctt

SEQ ID NO: 76147 - DNA, 1525 bp, Glycine max
  Clone ID: PAT_MRT3847_39775C.1
tacgcgcgccaaaacacgactgaagcggagggtttagatttccggaatcagaaatgaaagcatccgcactgcttaacttgaaatctttcactctcagccgccattctcccacttccaactccttcttccccccctttctttgtccatcccacccccgccaccgccgaatccaccactctcgaaatccaatcatgtctgccacatccgtcaactccgaacgagcacgcgcccctcccgccattcccttgccccctccccctctctccaacttcaaaattggcctctgtcaactctccgtcagccccgacaaagacagcaacatcgcccacgctcgcaccgccattcaggatgctgcatcaaagggcgcccagcttgttcttttgcccgaaatttggaacagtccttattccaacgatagttttcctgtctacgctgaggatattgacgctggtgcttctccttccactgccatgctatctgaactctctcgtctcttgaaaatcaccatagttggtggttccattccagaacgctctggaggtctcttgtacaacacttgctgcgtctttggcaccgacggaaacctactagccaagcaccgcaagatacatctttttgatattgacatccctgggaagattacttttattgaatcaaaaactcttactgctggggagactccgacaattgtggacacagaggttggacgcattggcataggcatctgttatgacattcgatttccagaactagcaatgatatatgctgctagaggtgctcacttactctgctaccctggggcatttaacatgacaactggaccattacattgggagttattgcagagggcaagggctacagataatcagttatatgtggctaccctgttcaccctgcccgggaatactggatctggttatgtggcttggggccactccactcttgttggaccatttggagaagttctggctactacagaacatgaggaggcaatcatcatagcagaaattgattattcaatattggagcagagaaggacaaatctgcctgtaactaagcaaaggcgaggtgatctttaccagttggtggattttcagaggctgaattctcagtgatgggagcaggactattgtaattgagacatctggatctggattatcttgtatgtggcattagcttgtcatctgtgttatatggttatttgaatgctgcattattgctaatatggaacccgaaccctgaaggaagaaataaataaaggaatttgtgctttctcgaatactttgttctgttaattactatcgtatctactaatatttatcaattaaataagggttctcgatgtagatatatggaaaattggttaagcccagtcaaacccactcattgctctgtagtaagcccagtcaaacctgaattgtctccttttgaaatcctggtgtctgcatttgttttaccattgtgcacaacatttgtatgcactgttgataaggtttatctttatgtaatttacacaattattaat

SEQ ID NO: 76148 - DNA, 480 bp, Glycine max
  Clone ID: PAT_MRT3847_39776C.1
tccaggaaggtttcccgtcatcactgtatgacgtcctccttctttggggggggggggggggggcatgagtttaaaagctcggagcgtatggacaaaagtaacgccggactatacggacggacgaagcgggacggtaatgagatcacaaacaagtaagtaattactaaagaaagacaccaataccgcagctgccggcgcaagttttgaatggtagaaaggaaggattagttaccatgtagggtagggatatgtgcacgtaacccagtttggtactaagcaccgaggtaatcgttgttgggtttgccccagaataatggacttaagccaagtaatataaagaagggtcggatagggaaaccatataaatcccagttgtgaattaacgattgcctcaacggtagttcgtaatggtacgtgattgaagcctgttaatgcgtggaaaaccctactaacattggcaccgacactggctaaagtgac

SEQ ID NO: 76149 - DNA, 283 bp, Glycine max
  Clone ID: PAT_MRT3847_39777C.1
cggcattctgccgctcgagcgaacacgctctcacaccctttcacgtcgatagacagacagagagagagagagagagagagagacgaagccattttcatttctcaggcgccactttcagaatcggatctacgaaccaaacatgtcttcgaaagagaagggcgacaacgctcaggttctcctccgttacatgccgtttagcgacgaagagttacgacaccacgtgccacaagtcgtgacttggcatgcatacgatgcgtcgatgtggccgtgtctcatagcagct

SEQ ID NO: 76150 - DNA, 675 bp, Glycine max
  Clone ID: PAT_MRT3847_39778C.1
aaagcatcattattttgttcttttattattattctttgactacacaagataatatgactccaaattcaaaacaacacattagtgcacaaaggaaaacaattgtatttcactcaagtcccttagaatttgactatgtctattcctttgtaagatgttcatagatgatattgacagctagggctattaaaaaaataaactaaactgttgttgaagtcaactctatgtgctaaaagaaaatgaaattttgaacaaaaaactaaactgtttctgaattgtagccatgagactaaaaaaatgtgaaaatggaaaaaaaaaaatggttcaggtgtgtgcaataatcctcctctaagtgggtctctgctagcagtccccacatgtgactcacaccctgtccttttttaatacaaaaaattgtgaaaaggcaaagcaaataagatgtttgttgagaacaattcaaaatagttcgggttgtttgggtcaattcagacttgccaagttaagtttccctaaactgttaggcaatacagtttagttcaccaaaactacacaattcaattcagttcatccaatctatttttacagttcacttcagttttttaacagttcatatcatcaattttgcccacccctactactgataggctgatagcagttgccttgtatgagcgatttttc

SEQ ID NO: 76151 - DNA, 579 bp, Glycine max
  Clone ID: PAT_MRT3847_39779C.1
gcgccccccccccccccccccccccccccccccccccccttttctttttttttttttttttttcttttttttttttgctgaccaaaaacaaaaagggtttttttgcccaatgaacaaaaaggcatttttttgactgaaaattttcactggcaaaatttttttttttttttaagctgaacccaagtttaactttcactgggaggatttgttttctatataaccttttttcaaaactgggcatacaatcaacttccgtttaaacctttttggggaaaaaccagggccaggtttggggttaaccccacttgaacttccttttctttaaaatgaggcccaaatttttggcccccctcttattttaaaagctttgcaagggatccttttggttttttaccaaaacccctaaaacctgtgggtggtttgcccaaaaacgttgggtttaccttaggggttaggggggccaccccttttaactttggtgaccccccaatgcccccttcacatgacaaaatacaagctttagcatgcccaaatccccccttgatgggaggaagggtattccttggatggggaactttg

SEQ ID NO: 76152 - DNA, 448 bp, Glycine max
  Clone ID: PAT_MRT3847_3977C.1
gctatctcgatcgaactgtccaaggtcctgtcacttacgggtagaaaggtgatattagccctatccaccggtgatccttataacaggggggtatttattctagtctggggttattcctccccggggtttccacaacaattgtcccgatatataataataaggatggtacccctatctccaactttcggatttcatttcaatacacaaaatcccgcgccacaaaccctttagtggtcagcaggtcaccggggtcacggccacagccataaccgtattaggtgttccacccccacgtctgtcaggtcaagtgcaaaattcccagggcaacaaccaacgcataagggccgtcgcggccgatttacacctgtccattgcatttcagagccggtacaactacagttccagtcgccagggtacggttcatcttacgggatgtctcagtctcggt

SEQ ID NO: 76153 - DNA, 657 bp, Glycine max
  Clone ID: PAT_MRT3847_39780C.1
aataaacttcatagattcatttgagactcaaaaaaaaaaaaaaaaaaaaaaaaaaaaaaaaaaaaaaaaaaaaaaaaaaaaaaaaaggcccaaatataaaaaagaaaaaaaaattacgaacgcttgcaaagaaaaaaaataaatgttttatgagagccaactaatttaaatttggttgggcggaagtgataaaaacggtaagaatggggaaaatcttttaaggggggggggtgttttaaggttcccggtcttcccacctttggcgggggggggaattttctttttttgggggcacggaatataatttcgggggggggggctttaatgaatgtgggggggggaaaccccgggggttccccaattaagcgcggtgggggagatgccctttttggggggggggggtaataaaaaaaggcccccactattttgttttttaaaaatgtgggccccctttagttgggagaggggggccccccctttttttggggaatttttatagccgggggtgggtgggggggggtctcccccaaagggtatacccttttttattttttttggcgcttcgttttgaaccgggtttttttttgtccctttttgtgtcggtttggggagtttcccacggttttctttaaaattagggggggaccttcttttgtt

SEQ ID NO: 76154 - DNA, 480 bp, Glycine max
  unsure (1)..(480): unsure at all n locations
  Clone ID: PAT_MRT3847_39781C.1
ntttttttctttcttttttctttttttttcttttttttttttttttttttttaggggttttaattgcaacaaggggccatgggattgattccctttccaaagttaaaaaaagatcaacaagatacaaattccctcccatacataaaaaaaattttggggggtgggaggacacaaataccctttttagacaagtccaaaattaaatttgtaaaaaaaatgcccaagggcagagaggattagcccaaatccataactttaatcaaaaacaacaattcgggggccaggaacaggccaattcaggacaaaattcctttcaaaagccatcacccctaatagagggtttgataggaacattttggggggaaagaacatcatcctttgggggaaaacccacaaggggggggggaactgctgggttgccctcacccactgggggaaatgccatcacaagaaaatggggggggggaatcatggttaatt

SEQ ID NO: 76155 - DNA, 219 bp, Glycine max
  Clone ID: PAT_MRT3847_39782C.1
gtactcgaataaccgaagtaagggtagagctagtacgtgcaacaaaccccgacttctggaagggatgcatttataacataaaaggacaacacaggctctgtctggtgctatgctgacacatgaagactctttagatcatgaggtctttgcgacgcagcacattatgcgagacagttgtcctaaaaactttcaatggtaggatagcggcctaccatgctg

SEQ ID NO: 76156 - DNA, 714 bp, Glycine max
  unsure (1)..(714): unsure at all n locations
  Clone ID: PAT_MRT3847_39783C.1
tcgcangcacgcgtacgtaagctcggaattcggctcgagcgtgatctgtcattacgtgcggacgcctccactatagaaagaaaaaagaaaagaacaagcaaatccacaaatactaatataataaatactagaaataaaggctttctacatatacatatatcgtccaaaacaacgatttttatcagctgtagcaaagaatgaaacttcatagaagtcaaaatatgaagaaatcaatatgtctagatacccccttttctatggataaaagatctaattgataaaggaagcatcgtaaggatccattaacgcggttttgaaccgatacaataaaaactgcttacttatctcatgatagaaaagtcaggaatccacttatgtaataaagtagatcccccgatattttgagcagcggtgtagtatcaaatcccaaagatagaaagtcttttctctttactttataaataagaaagaaaagactttttccaagattctatagaaatggatatattataaagtatatgatatataaaatagagatagttacttttcagaaaattctaatgagggtgttaatgccgatgctttattcccttttctgaaggtaggagaaaagataaaacttaaaaagaaattctttattagtccaaattcaagtttgaaacttatgtaaataacttctttttttcttttagttaacttcaagataatagaacc

SEQ ID NO: 76157 - DNA, 181 bp, Glycine max
  Clone ID: PAT_MRT3847_39784C.1
tcaagaacttggtgacatatctgcagaagctctggcatatatttttaatctggcatctcccttggcctccctgaaaaaggagctgcctgaagtaaagaaggaaaagggttgtcttcaaatggaacaatttggtggaaagggaaaaaaccatttattggggtacttggggaacctttccccc

SEQ ID NO: 76158 - DNA, 342 bp, Glycine max
  Clone ID: PAT_MRT3847_39785C.1
agttaatataaattttttattttcgttaaattcccaaaaagggggggttattaataaaataggggtggttatcatctattaagctggcacctccccgaattgtgaacagaatgcctttttctatatggggaggagctggctctaaaaatgctattcttacttatatgccagatgaattacattccagtgttaaaatttttataaggggatttctgtgttaaaattttttattttatcttttactaaaatcattgcgcctggttccttttcataacatttggaaatttggctgatgataccatcatttatctttttgtttgtctcttaattctctctttttta

SEQ ID NO: 76159 - DNA, 326 bp, Glycine max
  Clone ID: PAT_MRT3847_39786C.1
ccctccctttttttttttttttttttttttttgtttttttcaaaaaaattataactactctactgtgtttttttttaacaaactttcaaccttaaatactttcaaaaattaaattatattttgacaaaaacaaagaacacaaacaaacattccatacaatgtccagtcaaaaccaccaaattaaaaaaaaaaactattttactaacgcatgtgttgaaatgtcccaatttcttttcctatatcaaaccatcataatcaccacttatctaacaactccacgaggtcactcttttttatttttaaaaatcctttaaaaccacaagtct

SEQ ID NO: 76160 - DNA, 1641 bp, Glycine max
  unsure (1)..(1641): unsure at all n locations
  Clone ID: PAT_MRT3847_39787C.1
ggctcgagaagaaattctaattaaaaagcaaagtccgatatctttctaactatatatatatatataggcgacaccaacctttctacggctgcgagaagacgacagaaggggataccttaatatttcaaatacccagagggagtaacctctccaagcttcaattatctacattatccacattccttgctagctttatccacatctacaaaatagtccttagatttccctctctctttctctttataactgtgccatatcttataggatctcctttcacttccttcaaaaacaacaaaatcatgggtctgagagacattggtgcttcactgcctcctgggtttcggttttatccgagtgatgaggaattggtctgccattacctctacaaaaagatcgcaaatgaggaagttctgaagggtaccttggtcgaaattgaccttgcatgcgcaataatattaatgcacgcagaggtggctaagctcaatgcgaatgagtggtacttcttcagtttccgggaccgcaaatatgctactgggtttcggaccaaccgggcaactacatcagggtattggaaagctacggggaaggatcgtaaggtggaggatccagccacgcaagaggttgtagggatgaggaaaacactggtgttctacaggaacagagctccaaatggcatcaaaacgggatggatcatgcatgagttccgcttggagaccccacatatgcctccaaaggaggactgggtgttgtgtagagtcttccacaaaagcaaagaagatgacaacagttccaaactcctacagtatgagacgacaccatcatccctaactttgttggcttcgtcatctcccaccaaccaagccatgcctcatggtgttgggtataataaccgacttgccacctctttctctaattcattcatgccaacccaccaatatcatcatcacttcaaccctacccaaaacgctaattctttgatggatctccttcacttctctcgcgaaaccaacaccaacaatactggctttcttactcaaattggtgccaaaggtgatgacgaatatggtttcttatgggacatggatctagaagaaaatagcctagatgatggcgtggcttcaaacttggacgcaataagattcgaggttgataataataatactaataacaacaatatggtattgctataattaaatgtgtaagatgtgttatgtgtgtacatatatacacatatatgttattcatagctcgtaaattgtcgtaagattcgtttatttgtggtgtatttatggtgcttcgctatgaggggcatgtcacatgatagattgggtttagttgttacaagtttgtgtggtatattgttcaagtagtagggtaatactattgtggtccattaggcttttcgtaatcaattactattatttacccattattattgggaactattcctttgtatacagtttgtatatgtaattagaattggctataaaaaaaaaaaaaaaaaaaacccaaacaaaaaaaaaaaaaacccccccacatataagaaaaaaaaaaannggccccccccataaaaaaaaaaaaggggggggcccctttaaaaaaacaaaatttttttcccgggggttggaaattttttttttt

SEQ ID NO: 76161 - DNA, 431 bp, Glycine max
  Clone ID: PAT_MRT3847_39788C.1
catgccaccactcctattctactattttttgtgcctgtggttcaataagcattagtcaaaattctaatccccctcagcctaaatgtaacctcctaagttcctcattcacactagtttcctatctcaataatttgttttcttttaaaattcaacaattgatttaactctcattataggtgttgcccatgcttttataatcttgtgaaatatgttgagttgcaggattatcacagtcaacaactattatggggcaaattattattgactttttgggagttttcaatctaataaacatttgtcaggcatgtggcgtggttttatgttgcataagcaagattgagagattttgtgccttcctatttttaagtattgagtctcaacatgtcaatgttattgaaacttttctaaattgatggcttgagaagtagtat

SEQ ID NO: 76162 - DNA, 398 bp, Glycine max
  unsure (1)..(398): unsure at all n locations
  Clone ID: PAT_MRT3847_39789C.1
cggcacgaagtgcagnggtcaacacttcacagggngttatgccaacagngaaaagaaaacgttattccgtaattactaaccacntnntcctcagttnngctttaatgggtgttattnggttgtttnnttgtcttgaattgaatnnngcttatgaaatnnggcttttaanntttcaagnnggtaggaaagaanatagatggannatttatacctttatnatttttcnttcatanccaaccaaaaagaaagtanttggatagttnngattggattagaatacacnnattattgnngacttagaaattgaangaaataaatnnatttacgtgaatccnncacaagctctttatgggtcgagtnngagtttttagacattaggtgaaacagagcttgcgaaa

SEQ ID NO: 76163 - DNA, 912 bp, Glycine max
  Clone ID: PAT_MRT3847_3978C.1
ttttctttttttttttttttttttttttttttaaccatcgatttatgttctaacatttagtatttcttttgaaactaatgttaagtaatccatccgaaggaaaacaaggaaatcaaaatatactaagttttcaattaactcgttaatttgaagcatagtatgaaactcataccaaaccataacaaaaataaaacaaacaaacaaaactctccacttgacataatctaggaatattgggcctcaaacaatttagtggtaatctaagatgaagtgccacttcgaagagcttgggatttcttgcttgttgctaacttagtctcgggctcctttttcacaggttcttctttttcagataatatcaactctatgtggcacggagatgacatataagaattgattcttccatgggctcggtatgttcggcgtctttgcttctgtgcttgattgacttggatatgagaaatgtaaagcgcatcaacatccaaacctttcacctgaaaagaaacaattttcagttaattagtttggaaatcataaaatagccatatggaaaaggaaaaaaagagtatataatacttcagcattgctctcagcatttttgagcaaatcaaggatgaattttgctgacttgacaggccaccttccttggccattagagtgtctattctttgcttgagctgtccttccaacaccacgacagaaacgtctgaacggaatggcctgcttgtgcgcaagaacatcttccaagtaccttttagctttaaccaagggcaacttcctgattgcaaaggcagtttccctagtgttcttaaaatgaaccctaaggtcggcgcctctagccttgcaagacttggttggattgtcaggctcccttgagtacttcaccatggcggcttactagggatctcgtgc

SEQ ID NO: 76164 - DNA, 277 bp, Glycine max
  unsure (1)..(277): unsure at all n locations
  Clone ID: PAT_MRT3847_39790C.1
tacaannctcncttgnagactagttttgttttgggaacatcatcacnttacnttagattncncggtagtggcagtgtcactacaagcagnagctagtttnatgnaaccnngtcannntgangangngcaacactttggagcaaaagtctantnagtccatttncnaggnttttggtttggnacctgttggagctnaaaaggtcacatgctcccttcaggctgatcttnnggacttggntcccagtgtgttgctgtaccacaattgcnggattcgcct

SEQ ID NO: 76165 - DNA, 506 bp, Glycine max
  Clone ID: PAT_MRT3847_39791C.1
aaaagaaaactaattccttcttttataaaaataggggggtgtattacttacataaaaatttgataaggataccaaatgaagttgaaaatataaaataatagtttaacaggatttatttgagtaaaaaggtttctgaggcaatatataaaagttaactcctgccttgcctatcattcgaaaaattgtaccaatttcaaatccaagggtataaccaatatcacatgccaaaattgaaagggaagagctagcttagggagaaatcactataccgaaaaaatggaaatccccaccaaatgagcccttgttgccagtaaatgagaaaaggggcaaaggaactggaaacattgatgcccacctgcccagcctcaatttcggcctgaaatttcctcgcagccacactagatggggtaaatatagaagcaccgtttccatacttgttttcattgataaggtttatggcctcttccaagctatcagcctgaagttaaaaagtaaaaatgaaaaac

SEQ ID NO: 76166 - DNA, 644 bp, Glycine max
  Clone ID: PAT_MRT3847_39792C.1
gttggcttggaaaagtttcatgcagttatgtttttattttgtgcttggcttattttcttcttgttgcacaggtgtatatgttttttttttaatctgcagattttttcacttgttttaatagctaaatcaattccttttggaagttgctagatgtaatattttattttgttattgggttgtgcttgtgctagttggattgcactttggctcaacatagaacattagtataaataacagtattaggtcagtgttttctctgttttcctttccatctaatccctaaatatcaacaccatagtgccattatgtatataggcataacttcatcctgtatataaattccttcccatatgtggtatattccaatgcaggactataagctgtaaatttttctgtataatgtatggcttcaaggggtgagccctggtgcaacagtaaggctctgttgccttatgacttggaggttgtgggtttaaatcttggtaacaacctctctccttgctggagtaagactgtatatttattgaccctcaccaaatcacaactctcggtgggagcctcatacactaggctgccctttttaatatatggcttcaagtttatcttgtttgcgcaaaatggaaggtaataggcgtgtagcatta

SEQ ID NO: 76167 - DNA, 315 bp, Glycine max
  Clone ID: PAT_MRT3847_39793C.1
ttacctttttttttttttttcctttttctactttttggggatttttaaaacaagagggtaattaaacatatattaaaaagcaaactccacccactatatactaactctcccatagtggcacccaatccatcaaaaaaacatgatatttactctacttgcaatcatattctaaaaccactcacattaatataaaacatttttcacacatctataataatttcaacaacatctacaccttataaatcttaacatatactaacatgctcatactatacaataccacacaaagaaaccccttaattttatattaatcac

SEQ ID NO: 76168 - DNA, 405 bp, Glycine max
  Clone ID: PAT_MRT3847_39794C.1
actactctttcactctctctgtcatttaaatagggggtcatttagttgttacttaggttttccaaacctaatgagagagagaaagtgattatctgattaatttccagcattgattatatccttggctgaaaaatttgggaatctattaggggtactttaggaaaagcaatgatcaatgcaacgtgcatttataaatgggtacatacatagggacaaacatgttttctgaaaagggtcttataaaagggacagatggcgtaaaaacatgcctcctcacatagactctaagtgaaactatggacgctggcaggggcgcatgaagagagggttgaattgatccctcttgtaaccactcttgcattcacaagttcataatatttttgtgaagagtgatctgatacagga

SEQ ID NO: 76169 - DNA, 485 bp, Glycine max
  Clone ID: PAT_MRT3847_39795C.1
tcctctgtctttttggcactaaccacttcttatcaaccttcatgttaacattacatttcaacggatgaaatgaccatggtcttgaaagttgaaaccaaatcgaaaagcaaagtaatatctgcattgcctacttgtatacaaggtagaatttcccttgcctactagtaacaacttacgagctttattgatatttggtaataataatatagactgcataatctgcattttaatgtctctagttgttgctattggtaattggcatgcattgttgtgtgtatatacagtcttcctgttaatgcatatagccacccatttaagatgtgggctaattgtttcttttaatttattatgctggtcctaacccactggtgatggtctatattgacagctactaggtttcaaaaactaatctctaatctgtatattgattattgaataccagatagtagaagaaaaggaacttcagctggttttatttgatagag

SEQ ID NO: 76170 - DNA, 325 bp, Glycine max
  Clone ID: PAT_MRT3847_39796C.1
ggctcgaggaaacacgcatagaaaaaagaacattttcgcatttaagacagcaaccaacggaaaggggaagggggggaacagaaacgggaccgcccgcgctgaacaaggcagaagcaacaacgtcaacagctctcgcagtgagccggatatgcacaagaccgggaggaaccctatagcaagacaagcaggaacagacacataagtggcggaccaagcacaaaactgacgggatgctgaccacagtgaagaagaacagtcgacatgcacattaggaacggataccaacttaacggggcaatgggggggaacaaacgtccgacgtggc

SEQ ID NO: 76171 - DNA, 384 bp, Glycine max
  Clone ID: PAT_MRT3847_39797C.1
aatgcttaaaaaacaattttaactttgattatgaaaaataaaaatccacatttacagaaggatggcccataatcatagaatagtatcttatcagactgcagcgcgaacttctataatacagaaccaaaaacgacataaacaagcaaatacatgtaacagtttctgaatcctttatcaaatttatccactcagctcataaatttgaatctggaatacttaagtgtcgtccaatgcttatcgtacgatcttgatagttgcagagctcagaaaacaaataaactggcaagagtgacaattaggatctgcaggacggtagagagatgcctccacaacaagcagcgattattaaataaagaacaaccccacgcgtccgcggacgcgtgg

SEQ ID NO: 76172 - DNA, 391 bp, Glycine max
  Clone ID: PAT_MRT3847_39798C.1
tctcacatgctccttcttgtttatgccctacggtgtttccagatcgaaggacctggcaaactcaatgcaaccctaaatactagggatcgtttcgctttgactcaacatgtcgcttttcagcttgtatactgatggtataaggcaaattaaatccgatagattctcttgcttgactgccctctaattttgacatcatcatccacgccctgatgagcgattctgccacacgtttctttgttaaccctgaactcaactgtatgcctagttcatcattctattccattacaggattttgatgattttgcaaaatttgggtacacgctgagctgattataactgcccacccccaccccattttcattgtctgattcgggtgtctaaaaaattaaat

SEQ ID NO: 76173 - DNA, 1298 bp, Glycine max
  Clone ID: PAT_MRT3847_39799C.1
aataggcattgtattattgtaatgtaaaaccgtccacaaggccacagctaaacgtacagggaaaataatcattctcatctctaatgctaaaaacaattttaactttgatttatcatgaaatatactgttagtgcttcttttagttttttaacaaaccaattgaactttgattatggaaaataaaaatccacatttacagaaggatggcccataatcatagaatagtatcttatcagactgaagcgcgaacttctataatacagaaccaaaaacgacataaacaagcaaatacatgtaacagtttctgaatcctttatcaaatttatccactcagatcataaatttgaatctggaatacttaagtttcgtccaatgcttatagtttaaacatgatagttgcagagctcagactgcaaatatacagggacgaaagattaatacagttgcaagaacggtcgagacatgtgtctacaacaggcagcgattataaaataaagaacaacaacaatcgagcatgtcaatgaggccaggagtttaaaatttttcatccaaagtgctcttcgaaggcgctttgactgtttcgctaaagtgaagatgcactgatcttgcattgttgctgttttatcaacaagaaggctcaatccggtcaccttctctccaatattttctcaatattgtccaccatgatagttgcgtcatctcgccaacttctgtccccctcacacgattgagttgttatcggcacttccacgttactagaaaaaaattccatctgctgatgcaaaacccttgaaaattcatcattcattgcataagctggtgcataattggcaactctactgtagtttttcataaacctcatttggatatcttccaagtacgagaaaggaattctccttccgaaggtgtcgttggccatacagacgtaggtgatgccatccgatcggagtatgtggaagatgtagcgatcctgagagaagcagagcctggagtcggactccgccggaagcttctcgaggatgcggcgggagacggcgccggtgttgccggtgacggcgctgaactccgccaggacgaccgtgcctctggccaccaaagcgtagaagatcgccatcggctaagaactttccagagattctgtcagaacatctctggctctagctagatcttcgactaagattagggagaacgttctctgcctctagctagatcttcgactgcctcgcagcattggaaaaccacaacgaggttccccttctgtcgtcttctcgcaaccgaaacgtcgagaacttgccaat

SEQ ID NO: 76174 - DNA, 288 bp, Glycine max
  Clone ID: PAT_MRT3847_3979C.1
acgaggtgcaatgatcgacctgccatggatttcaaattcaaaccttacaaacaattaatcatgccttaaatagtttccatttttattttcaattttttaaaatgttttttatcttcagatttttaaatgttgaattggatcatggtcagctgttgttaaaagagattgttgtaaagagaaaatacctaaatgaacaaattgaaaaaaaaaaaaaaaaaaaaaaaaaaaaaaaaaaaaaaaaaaaaaaaaaaaaaaaaaaaaaaaaaaaaaaaaaaaaaaaaaaaaaaa

SEQ ID NO: 76175 - DNA, 871 bp, Glycine max
  Clone ID: PAT_MRT3847_397C.1
ctcggttcggctcgagtggaagactaagagaattaagagttgttgattttctaaccgtttattatggaatagaaaattcttttctggatttagctcctaatgttgtgcagtggttgttgggatcttacaacacccagatacttcttatggtgttccttgcaatcgttgggatgctgttagctggtttctttggttaccatgcaaagctttgccttaccaacactaccactaatgagacttttaagtggcaagattacatggactggcagaggaagctaaaagaagcacacgtcagtgctgaagccctaaaacaaagtattggtggaatgagcagtgagaaacagcccttgttgagcaaatggagagccttctttcgaaaatcacctctagaagatgtggtagtagttaagaataatgtttacgataaagggttcttccacaatattcaggaggttatttcccctttctctacaaggcggtcctttacacaaaacaaattgaagtccagctgaatatgctcctaacatacgtgtctttctagtgggtagtgggtctatgcatttctttagattacccaataaatcatcgtgaaaaccagaaaaatgatatattaaattctatttttaaattagagttctagactagatgtagagtgaaaattgattgtttgttagcccccttgtgtctctttttttttgggttggttttgatgtattattccctattagaaaaaaacagaaagataccagtagaggaaccaggagtatatcacccaagatatattttctttgcaatattgatccccaagcaaacctatttacaattcacatcaacgagcaaatttcaaaacatgccaacttgtttagcagat

SEQ ID NO: 76176 - DNA, 782 bp, Glycine max
  Clone ID: PAT_MRT3847_39800C.1
aataggcattgtattattgtaatgtagaaccgtccacaaggccacagctaaacgtacagggaaataatcattctcatctctaatgctaaaaacaatttaaacttagatttatcaaagataataaaaatccacatttacagaaggatgccccataatcatagaatagtatcttatcagactgcagcgtgaacttctataatacagaaccaaaaacaacataaacaagaaaatgtaacagtttctgaattctttatcaaatttatccactcagctcataaatttgaatctgaaatactaaagtttcgtccaatgtacatattgacaggaacgatcttgatagttgcagagctcagaaaataaataaactggccggagtgacaatttaggatctgcaggacggtagagagatgcctccacaacaagcagcgattattaaataaagaacaacaacaatcaagcatgtcaataaggccaggagtttaaaatttttcatccaaagagctcttcgaaggcgctttgactgtttcctaaagtgaaatgcactgtcttgcattgttgctgtcttatcaacaagaagctcaatccggtcacctctctccaatattttctcaatattgtccaccatgatagtgcgtatctcgccaacttctcccctcacacgattgagggtatcggcgctcgcattactagaaaaaaattccatctgctgatgcaaaacccttgaaaattcatcattcattgcatatgctggtgcataattggcacctctactgtagttcttc

SEQ ID NO: 76177 - DNA, 2188 bp, Glycine max
  Clone ID: PAT_MRT3847_39801C.1
gaagcatatgcctcaaatgatctatacaatacattgtatgataggacagtaaaagttcctgaagatgtcattctcccatccacatctaaatgcgccatcccatcaacaatgtattgtctgaagcatatgcctcaaatgatctatacaattactgcccttcatgggctctttcttggccatatcgcaggcaaaatttgttacgggaaattattggttatcgcccagacattatttgtcttcaggaggttcaaagcgatcattatgacgaattcttttctcctgaactagacaaacatggatatcatggtctttacaagagaaaaacaaatgaggtgtacagtggcaacacaaatacaattgatgggtgtgcaacatttttccgtatagacagattttcacatgttaagaaatacgaggttgaatttaacaaggctgcacagtctttgacggaggctacaattccaaccactcagaagaaaactgccttgaatcggctgggtaaggataatgttgcactaatagtggttctagaagcaaaagttaacaatcagccatttgataatgctgggaaaagacagcttctttgtgtggcaaatacacatgtaaatgtctcccaagatctaaaggatgtgaaactctggcaggttcatactctcttaaaaggtttggaaaaaatagctgcaagtgcagacattaagatgtaaaaaaaaaaagattttaattcagttccgggaagtgctcctcatgcacttcttgcaatggggaaggtagatccttcacatcctgatttagcagttgacccgcttaacattctacgtactcacagcaagttggttcatcagttaccactggttagtgcatacacatcttttacaatacaaactttcttgaaaattaacatacctggatggaggtttgtacctactactacacatagaaggatgaaggaaatcaacaaagatatagaagcttcgcttatggatatgattaacaagagagagacagctctaaaggcgggtgaagccactaaaaataacttgttagatatacttctggagtcaaaccacaaggaaattcaagaacagggaaataagaatgttggaatgaatcttgaggaagttattgaggaatgcaagctattctactttgcagggcaggagaccacctcagttttgcttgtttggacaatgattttgttgagtatgtaccctgattggcaaacacgcgcaagggaggaagtcttacaagtttttggcaaccgaaaaccaaattttgaaggactgaatcaccttaagattgttaccatgattttgaatgaggttcttcggttatacccaccagtagttggtcttgctcgaaaagttaacgaagatgtgaaacttggaaacctatcattacctgctggagtgcagatttccttgccaatagttttggttcaccatgattgtgagctttggggtgatgatgctaaagagttcaaaccggagagattttctgaaggacttctaaaggccacaaatggaagggtttcattttttgcctttggagggggtcctagaatatgcatcggacaaaacttttcctttttggaagcaaagattgctttgtcaatgatcttacaacgtttctcgtttgaactttctccaacctatactcatgctccaacttccgttattactcttcaaccccaacatggtgctcatctcattctacataaggtggaaatatgaaaaaataattattagctcatattgaaagtttataatgtaataacatttcaacaatagagatacaaaccttttcatatcactattatcagtttattttctttagtattaatgagaaatgcatatgatttcctttaagcaaaaaaatggatggtggaacaaatgaccctttattcacaaatgtcactaaagattttattggcactctagattacatattttacacagcggattcattggttgtggagtcattattggagttactggatgaggagagtttgaggaaggacacagcacttccttcacctgaatggtcctcagatcacatagcttttttagccgaatttcgttgctgcaagaataaatttaggcgttgacagtatctccatgtggagtcattgcaatgatctgctatgaatcatgtcacctttatctcagaaaaaaaaaatgcccctgggcct

SEQ ID NO: 76178 - DNA, 649 bp, Glycine max
  Clone ID: PAT_MRT3847_39802C.1
caaaaagtgttcttgtcatttaacatttctttgcatgacaaacagctggttcaaaactgtatgcatgttgcccatctttatcaagtacaacaaaaaagggagaaaaattccaaaggcttccctacattggaaattcctcaatgccagagtgaaaaaagcattctaagagtcagatacactgcagtattacatgggtactacacagattgtttggaatttttagaacactgcctgcaatgtcatttctattttataaactaaaaatgtaaggctgcttcaagcactactaaattccatcacatctcgttattttcatccattgcatccttagtctcaacccaagcactctaaatgacacaaccctatcaccctttttctgctaataaaccttaactgtcaacgcctagatttattcttgcagcagcgaaattcggctaagagagctatgtgatctgaggaccattcaggtgaaggaagtgctgtgtccttcctcaaactctcctcatccagtaactccaataatgactccacaaccaatgaatccgctgtgtaaaatatgtaatctagaatgccaataaaatctctagtgacatttgtgaataaaagttcatttgttccaccatccattctccttttatgctgctcatat

SEQ ID NO: 76179 - DNA, 1424 bp, Glycine max
  unsure (1)..(1424): unsure at all n locations
  Clone ID: PAT_MRT3847_39803C.1
atttattttcctgtttctcccgctaaaacccaactttctctctcaagaaccatcaaatcttgatcctcccctctccctgcaagatccggtggtggttccgattgcgctgtagggtttggtctagggtcggtcaaggctggcgagtattcgggtgaagtaaatggcggatccggccggaatccggccccgcgagtggtgcgagcgtggtgttgcggtggcggcgttgatagggttacagtgcggtgacgattattgccaagagtgaagcatgctgagcgtgctgcgcgtgcaccttccttctgatattcccattgtaggctgtgagctcacgccttacgtgctcctacgccgacctgataagatcgttaccaccgacgatgtccccgaaaccgccccgttagacggccatttcttgcgttacaagtggtagtggtatcgtgtacagagtgataaaaaggttgctgtttgtagtgtacatccttctgagccggccacactgcagtgcctaggttgtgtaaagtctaaaatacctgttgccaaaagttaccactgcactccaaagtgtttttcagatgcatggcagcatcatcgtgtcttacatgaccgtgctgcaagtgcagccaatgaaaatggaaatgaggaagaagagttatatgggcgatttaataattctggatctggatcaatcaatatttgggcgctttaatagtactgggtctggggcaacccattccagcttatctgcctctgcatcaagtgctagcttgacaaatgggtctgcaacacctttgtatccagcagctatcacacaaagaagtggtgaaacttggtttgaagttggacgatccaagacttacacccctactgctgatgacgttggtcatgtccttaagtttgagtgtgttgtagttgatgcagagacaaaactgcctgtggggcatgtcaacactatactaacttcacgtgtcattcctgctccctcgcctattccacgccgaataatacctgttgatgggatggcacatttagatgtggatgggagaatgacatcttcaggaacttttactgttctatcatacaatgtattgtctgaagcatatgcctcaaatgatctatacaattactgcccttcatgggctctttcttggccatatcgcaggcaaaatttgttacgggaaattgttgggtaccgtccagacattatttgtcttcaggaggttcaaagcgatcattatgacgaatttttttctcccgaattagacaaacatggatattatggtctttacaagagaaaagaggtgtacagtggcaacacaaatacaattgatgggtgtgcaacatttttccgtagagacagattttcacatgttaagaaatatgaggttgaatntaacaaggctgcacaatctttgacagaggctaca

SEQ ID NO: 76180 - DNA, 501 bp, Glycine max
  Clone ID: PAT_MRT3847_39804C.1
ttcattggttgtggagtcattattggagttactggatgaggagagttttaggaaggacacagcacttccttcacctgaatggtcctcagatcacatagctcttcccacgcgtccgcgctgctgcaagaataaatctaggcgttgacagttaaggtcactttcagtgatacataacaaaaaaggctgtaagaagcatttggttggtaagtattttgtaaaaatgatagatcatgcctgtctttttcaggtatctccatgtggagtcattgcaatgatctgctatgtatcatgtcacctttatctcagaaaaaaattatgagtttctgccttgttgaaatgcctctatctaaaaaaaaaaaaaaaaaaaaaaagaaaaatttccttttaaaaagggaatttttttcatagatgcctattggggttctatacatcctagtaaagaactaaagtccttctgatctagttgctgccgcagagcctagggctcgaatttctcacata

SEQ ID NO: 76181 - DNA, 357 bp, Glycine max
  Clone ID: PAT_MRT3847_39805C.1
actattctacttcctaccttttttttttttttttccaacaatccatgcatcaatttctaagaataatttacaaaattattacaacccttcaataattcattaatgtgctcttaaaaatccaaaaacccattaacctctatacatcaaacggggaacaaatattaaactttaatggacacgacacacaatttaatataacaacaattcatatttttcaactttaaactcaacggtacgttttaaaagcttgcacatccccatattaaccaatcaacacttctccataaatcaatccatccaaacctcctccaatcaattggccaacccaatatatccatttatcatctaagtctccac
